United States Patent Application Publication US 2007/0083945 A1 - sequence listing, part 31

SEQ ID NO: 209748 - DNA, 440 bp, Glycine max
  unsure (1)..(440): unsure at all n locations
agcttcttatctaaagcacattcttggtggtgaagctctntcttccatggcttattccctagaggatgatgtctcccctctcctcttctcctttgccttccactgcatctccatggnggaaaatcaccattgaaggaactcattgaagctcaaagatccagcctccatagaagttccacaagcaagctttcatcaagtggtatcagagcacaagagctttaagtaggtgctccttacacctccattaattttcagctttaccttctcttccattgtagnttcttcatttttctccatgtatctcctcacttgtcttgagctaaatgttgttaacatgattctttagaatttcactgattaatcttgctatagaagctagatttgattntctatagagtcaaattctagttcatgttcttaaaccatgagttgtgttgagt

SEQ ID NO: 209749 - DNA, 295 bp, Glycine max
cccccatcccttcggcaatacattccaaagatgactttttggaccttcccgtcctttggatttatcaaaaactggtactttaaaccttggaaggatgatgatgtcaagtaccaaacacagatccgctaaatcccaaaaccggtagttgtcgaggccttctaccggtctaacctctcttaaagaaaacaatcttttccttatcttttgcgaaggaacaaattctttaaccggtgcgggtggagaccggacataaccgactatgttttggtggggaaaatcatggggggcccgatcc

SEQ ID NO: 209750 - DNA, 353 bp, Glycine max
  unsure (1)..(353): unsure at all n locations
agcttatcgtctatgttagccattaagcatatagtggcttgctcattgtctaaactgttactattctcactttcttagtcgtcttaggtgaccattagactatttattttatcaccagagtatcttcttttcttcagctgggaacactcaaccttcatgtgtccaggattttttcattcttagaaaattatctctttgctttcctccttgtacttcttcttgaatcttgtgtcctttcttctataaaagagttgaaactgtcctttctttcctagcatcangtttaaatttttggacataagcaccacttcatcgtcagtgaactcttcaaaatgttgtctcacttatcacac

SEQ ID NO: 209751 - DNA, 237 bp, Glycine max
  unsure (1)..(237): unsure at all n locations
cactctctaggtggtaaagctctntcttccatggcttattccttagaggatggngcctcctctcacctcttctcctttgtctttcgctgcatctccatggtggaaaatcaccattgaagganctcnttgttntctcnatatcctgcactcattccatccttacattttatcttcataacttttaaagcactaatatcctccttttattataatacctccatcccttctttaacctct

SEQ ID NO: 209752 - DNA, 432 bp, Glycine max
  unsure (1)..(432): unsure at all n locations
agcttgcctcanagaggtccaggattgcttttgttccgaaggaactagttccgctccggagtatgacagtcaccgctttaagagcgctgtacaccagcagcgcttcgaggccatcaagggatggtcgtttctccgggagcgacgcgtccatctcagggacgacgagtatactgatttccaggaggaaataaggcgccggcggtgggcaccactggttactcccatggccaagtttgatccaaaaatagtccttgagttttatgccaatgcttggccaacagaggagggcgtgcgtgacatgagatcctgtgtaaggggtcagtggatcccgtttgatgccgacgctatcggccaactcctaggatattctttggtgttggaagagggccacgaatgtgagtatggccagaagaagaaccggtctgatgggtt

SEQ ID NO: 209753 - DNA, 417 bp, Glycine max
  unsure (1)..(417): unsure at all n locations
gcttataagtgcgggtctgggagacgaaggtcaagtggtcgcgatatgtgaagatgatgttccaagaactctggatttggtccgaccatgccctcctgatttccagctgggaaattggcgggtggaggaacgccccggcatttacacaacaagcataatgtaaacctttacggttttaaaagctctatagttgggcctaggctttagagttttcattttgttaaggctntgtgtcttttgtctttgagtttataatacaaagatctttcttcatctgttcctggtctctacccattctcattcatttgcatggttactttttttttctgaaacggcagatccgatgacgagttcccccgaaggtactaatacctgggacccgtctatcaatttcaagcagaaattaacccaaccgga

SEQ ID NO: 209754 - DNA, 453 bp, Glycine max
  unsure (1)..(453): unsure at all n locations
agcttgaggaagagcttgaagaagttttgtcttttacatgcccaactctcttaagtggcatttttattaattgttatattgaatgttgtatcttagtatatatcatatcatttgtgcatcatgcatcatcatgtgtgagtaagaagaaaatttctaaagttagaaaatttcttcagaagacaaaactctctgttttaattaattacaaccttatctaatcgattacatagttgtttttgagacaatgattgatttattcaggagtctttgttttaatcgattaccatgtgatatgatcgattacttctctttctataagtgtttcaaaagtgaccgagaacactttaatcgattaaattgaggatctaatcgattacattgttcttgagttgnttccagtttttgggaagaacactctaattgattaaaaagataatctaatcgattacttta

SEQ ID NO: 209755 - DNA, 424 bp, Glycine max
ctcagcttacataggagctacatcatgtggtatcaaaagcatcttcatctatgttatgttcttttgcttcctctatctttttgtttggtcaattcactttaattccttattcttcatcttattctccatgtatatactccattgacttgtggtttggtgctgtttagagtagattcaaaaaaataaatcaattaaatcttagatctacacttgttcttgcatttctatggttcaaattttatagatctactcttgaatcatgtttttgtgttgattttaggttctatcattttttagtcattatcttcttgtgctgaacctttagatataaattttcttccaaaatattgattagaaaaaaaacaaaaatctaagtgtaaatcacttaatccatgtttagtcataataattgtcacattatgtt

SEQ ID NO: 209756 - DNA, 444 bp, Glycine max
agcttgagatgaggaagtgttgaattgtgaaacttcctgcttttattgttgaccacagagtggtacctggagatatgtcgcgggggtcaggagaccttggggacgtcaggtggggtgctattgcccaaaaccaagcttgaccaatcccgacccaacccgggcatagtcggtcagtgagaacctgtgatgtacctaagcaggcgagctcctggcagtcaacagataaaaggaaaacaagaccacaaagcacggaggcttgtggtggctggccacctgtgaattctgtgtaatatgtggatggtggcctctggtaatcgattacaaggcttaaatatgaggacaggaggctaagatggtctctggtaatcgattaccacgggtgtaatcgattaccacgcttgacaacgaagtcaggaaacttacggagcctctggtaatcgatta

SEQ ID NO: 209757 - DNA, 419 bp, Glycine max
  unsure (1)..(419): unsure at all n locations
ccttaactgctgcttggttaactgatgatcatgattgggtctttattatttaattngggcaagattggatgaggggaagtgtggttttcgaaatctgcactttgtgcagatttttgctgtgaaattgtgcagcagaattttgcacaagtgcagaaaaatgcttgtgtgtgattggctatggaaattgtagtgcagaatgagttctggatgtttgctagtagatcccaacggtcacaatgtaggcttaagtactagagacttccagtaaaattttcgagtcgatccaacggttaacgaatgggaccaaaggaaagtgttttgcggatttggtgtgagaagctgtgattttggttggtggtttgggcaaagatttctgcctttgccctgttttgcttagctgtgatagcttgtgctgtgtg

SEQ ID NO: 209758 - DNA, 309 bp, Glycine max
  unsure (1)..(309): unsure at all n locations
agaactaattccgccccggagtatgacagtcaccgctttaggagcgttgtacaccagcagcgcttcgaagccatcaagggatggtcgtttctccgggagcgacgcgtccagctcagggacgacgagtatactgattttcaggaggaaatatggcgccggcggtgggcaccactgattactcctatggccaagtttgatccagaaatagtccttgaattttatgccaatgcttggccaacagaagagggcgtgcgtgacatgagatcctgngttaggggtcagtggatcccgttcgatgccgacgctatc

SEQ ID NO: 209759 - DNA, 397 bp, Glycine max
  unsure (1)..(397): unsure at all n locations
acctatctggtgtgacaatacaagtgcaatctatatgttcttaatgctattctacactctagaacaaagcatatttaaataaggcatcacttccttcgagaccattttcaaaaaggggattgaatattagaatttgttgacacaaagaatcagttagctgatatctttacaaaacctctccccaaagaaaaattctttgctattagaagagaattatgactcatagactcaattaacttagattcctaaccattttgattgtttataatgattgattttgatgggtatttatcatgcttgtttatgatgatngttactttgattgtttataataattatttttttatggttgtttatcatgattggttattataaatgttttgattgtttacaataa

SEQ ID NO: 209760 - DNA, 400 bp, Glycine max
  unsure (1)..(400): unsure at all n locations
agctttgagccaattcaaacgacaataactttttactcggatgtctgattgaggcccgcaatatatcgagacgctcgaaattgaatgtggaagctctgagcccattcaaacgacaataactttttactcggatgtctaattgacgcccgtaatatatcgacaagctcgaaattgaatgttgaagctctgagcaaattcaaacgacaataactttttactcggatgtctgattgagtcctgtcatatatcgagacgctcgaaattgaatgttgaagctctgagccaattcaaacgacaataactttttactcggatgtctgattgagtcccgtcatatatcgagacgctcgaaattgaatggtgaagctctgagccaattcanacgacaataactctttac

SEQ ID NO: 209761 - DNA, 431 bp, Glycine max
  unsure (1)..(431): unsure at all n locations
ccttgatactcagcttaancattcaatttgagcgtctcgttatattacgggactcaatcttatcatccgagtaaaaatttattgtcgtttggattggctcagagattcaacattcaatttcgagcgtctcgatatattacgggactcattcagacatccgagtaaaacgttattgtcgtttgaattagctcagagcttcaacattcaatttcgagcgtctcattttatcacgggactcaatcagacatccgagtaaaaggttattgtcgtttgaattggctcagagcttcaacattcaatttcgagcgtctcgatatatgacaggactcaatcagacatccgagtaaaaagttattgtcgtttgaatttgctcagagcttcaacattcaatttcgagcgtctcgatatgtgacgggactgaatcagacatc

SEQ ID NO: 209762 - DNA, 411 bp, Glycine max
gactgatgtcttggatgccagagggggactttattttctcgggcgatagacactgtatctttgacacagagtgcagatgaccatatttgtttccgtgcgtcaatgggctcgcttaccttgagttattggaagggagactaaatagtctcagtcgatagacattgagttttcgactaagggagcaaatgaccatattgggctctacgcgtcatcggacttgctgactctggatgaagaatggagactaaagtaggctcggtcgatatacatcgagacttcgacaaagggagcagatgaccatgttggatgctgcatgtcatgagacttgctgtctctatatggcgaaaggagactaaagtagtcttggtcgatagacgttgcgtcttcaacacaaggtgttgacgaccatgt

SEQ ID NO: 209763 - DNA, 419 bp, Glycine max
gagaagtcaagtgcatagccatcatagtctttagagagtatgatgaactaagggacgtcaatatggccaccgatgaagccttggaatgaaaaaccaagaaggcccgaaaggaagaacacgaccaaaacaagttttgaggggctttatatggcagcaatagtgagctcaaactctgaagaggtgaaaagaatcatcacgggtcaaaggcatgatctggaaggacgagctaaaggcttgccttatgtcgaaaagaaatttgtcccaacagttaaagtgagactgaagggaatatgtgggccatcatcgatgagtgcaaagagaagctaaatctagtggcgactcacaagcaaaggctagaggataagtacgccaagatattatcagaaagggaagcaaaggaaagggtaattgattcattg

SEQ ID NO: 209764 - DNA, 435 bp, Glycine max
gctatggggaggagataaaagggaagatatgagttaaatcttctgtttaatatccgtccacaaccgtgatttggcatgcaaaattaagatttttaattttaactgttcccaatcatgaaatgggaccgtattagcctatttatctgtgatttgccccaatatcaacaaacagaaagaaatcttagcacaacagctaccaatattgaaaaccttactaagaaaactaaaccttactaattatttgaaatcaaacggcttccatttgaaaggagacaaaggcatcataacagcagcatactgcacctggtcaggagtgagccagataatcccacctactcttactgatcttcttgggcttctcaacctccaagcccagtacccataggcccaacgtcttctcagcttctgcacgtcagcttctatcccaacccccac

SEQ ID NO: 209765 - DNA, 430 bp, Glycine max
  unsure (1)..(430): unsure at all n locations
tggtgatntcaatatcactgtctcttatggacgaacgatatgtatttcttgcattgtatacttgcttgattgttgtataactgttggcattgtgctccttcaacgttagaagaatatttcttggtttcaccattgactttgtcatatcaacaataataatcttctcatccgaagtcagtcgaccagcatatggatgtccaactaatgacttagtcaattcatgatggtgacttccatgcattaacttcaccattcatcattcacctcacaccactagttctgcatgcagcttaaagggacacccacattttctactgccaataactgttcgtactaaatctatcttcccaaccctatactgaccactcctttcacaaccaattaaaacaaatgaggtctttcctctaataggagtatttgtgtctgacct

SEQ ID NO: 209766 - DNA, 415 bp, Glycine max
tggtgagaaagataacactctattctttatgggtcatggtcacttgatgatttccagtgagttcatagaaatgtctgagttttgtccatccagccagtagagttagattcaccaggtcttatttgtatgtaacagagtgcatgttgccattactgtctaacagatgccaagtatgctctagttcatccttccatcttacaacaaaggacctactgacttcaccataaggctacatttaacaagcaaactaatataagtaaatgtgttatatcatgtcatgtttatttgagaatagtcttgaaatttctaacttgatccataatatgaactgtgttgaacatttcctcttattttttgttaatcttcatcattgttttagccatttccttccaattttgttgatcttcattcactg

SEQ ID NO: 209767 - DNA, 397 bp, Glycine max
tcatttctctcattcttagtatatgataaatttatgtatgtttattttaaaattagaattttaaaaacatatccttttcagattgaagaatgaaattcaactaacctgcacgaagaataaatgattctcatttacaataaattaaaggtatactttttttaacaataatacatcttttaagttcatatttcttataattagaatcaaaataataactctttttttttttttaatgagagagtatgttataaacacagacatccaataacataacagagcagcactttaaagtggaagacacttgtccctaattttccgaaagatgccatgattcttacgtggaaagaatatttcctttatgtgttcgttcacaccctcacattggacacagcacgag

SEQ ID NO: 209768 - DNA, 374 bp, Glycine max
  unsure (1)..(374): unsure at all n locations
ttttttnttggggaagattatctccagtcaagcttagtttaacataacgatcagaagtttccagcaaatccatgttcaaaagcttttgtgcacaaacgacattcacatgttatctccccacagctcttattgcaccctaagagagtgaacaagcatccaacatcattcttcatatagcaaacattgttattgtaaatttaaactttaccgattcacagtaaatttttaacaatagtgaagtcatggtttaaataataacaattctagtaagatatgggttgcagctctttgtaattccttcaatagcatacgactaaaaaataacatggcattatttttataaacattttaaaacatgttattatacttcaact

SEQ ID NO: 209769 - DNA, 428 bp, Glycine max
ctatttattttataaatactatttaatttaatttctttattatttaattgtatttatgttttctcaatatattgatatattataaagttgaaaattatattcatccaatatgattttatgacttaacatgttaggaaagctaactagtaatattttttaatcacatatcacattttaatttgaataaaaaagagacataaaataaaataacaaactttaatttatttataaaaataatatagaataatataaaaaatattatgaaatcataacttttttttaaacgaaaattagactctttttagttgtaggtccaatatcattgcacctttaaacgacgtttaagacctgaatagaaacatataatacatcgatctcatcaactcatgtaaattcctctaacttaatgatcaaagtgttattgcaag

SEQ ID NO: 209770 - DNA, 373 bp, Glycine max
  unsure (1)..(373): unsure at all n locations
tcagattgattgtgaaggaatgcattgaccgtatcccgatgagagtgtgatccttaaattttgagagaaatgactatcatttagttctgatttttgcatgaatctctgaagtatggactgaatgcatgaaattgaggatgatgaaagccatgtttgattgtgatagccacttagccaaaaagttgaccatgtgcttgaatgaattatccgttgcacccagttttgagctgaatgattgattgattgaaccttgaatctatacaatgttatctcttgttgccttgtcttaagttgtaggagagcatcatccacagaaaagcttggttcaagaaaanattgtcccaaatttgggggagttatatgtcaaaacaaa

SEQ ID NO: 209771 - DNA, 413 bp, Glycine max
  unsure (1)..(413): unsure at all n locations
gtgttgaagggtgaaacttcctgcttttattgttgtctcacagaatggtacctggagatatgtcgcggnggtcaggagaccttggggacgtcaggtggggtgctattgcccaaaaccaagcttgaccaatcccgacccaacccgggcatagtcggtcagtgagaacctgtgatgtacctaagcaggcgagctcctggcagtcaacagataaaaggaaaacaagaccacaaagcaaggaggcttgtggtggctggccagctgtgaattttgtgtaatatgtggattgtggcctctggtaatcgattactaagggtgggtaatcgattacaaggcttaaaattgaagacaggaggctaagatggtctctggtaatcgattaccacggggtgtaatcgattaccaggcttgaaaac

SEQ ID NO: 209772 - DNA, 430 bp, Glycine max
  unsure (1)..(430): unsure at all n locations
agctgcgcctatgangaaggccttgcgcttagatagcatgaaaaagtctcttcgataatatgtatgtatgtaaatatgtagcataaaataccttgcaaaatgttgagtaaaatgccttgcaaaatatgaatatatatagcatgaaaatgccttgaataatatgaatatatatagaatgaagtgtcttacaaagtgtttgaatggttagcgtaaaagtgtttttcaaatatgtgtatttatgagtaggtaggaaaagaagccttccgaaaaaatgtgtgtatatatatatatatatataatgtagcatgaaaaggttcgtaaaaaaaaatatatgtgtacatgggtgtctatcgtaaagtgcctttcaccaaatttttatgtgtgcaaatgcatatgtgtcataaaaatagcacggccccaatatgattat

SEQ ID NO: 209773 - DNA, 423 bp, Glycine max
ttaactgccaaggctcttaatattgaaagtattctttgtaaccttcacccgacgaagacactgacaaaaacttatcttctccttcttggacaaagtatggcaggttgggggcaagtaaattttcttcccatcagaccttggatgcaactgtgctcttatacccatatcaactacatcttgatgggtattcaagccatccttcatcttgccttgaatgttaaggagcgtcccaatcacactgtcacaaacatttttctccacatgcataacatcaatacaatgtctaacgtcaagatcacaccagtacggaagatcaaagaaaatggacctcttcttccatatgcaactctgacttttatccttcttttgggtcttcccaaatacaatgttcaggtgttgaacccgctgatatacctgctcacc

SEQ ID NO: 209774 - DNA, 422 bp, Glycine max
ttagtcttagtttcactgtggttattagtcattttattcaaggaaacttccaaagaaaaacgttcgattgatttttttgattattttattcaaagatattttgattattttatcattattttgcctttttttggtttaaccgtggttacaacatgaacggtcggttagattttgttttaacagtgattaaacgagattacaacacaaatgatcggttgaaattcattttatcatttattaggtgagaaaacggcttaaataaatggttaaaagcttgttaaagcggaagaaaagaaaactgaaagtaagccaaattaaagtgaaagtacacaaaacaagtagggaccactaagggtgcatagaatgaattgaaagattcgatttcgggaacttaccggttgaagactaaagaatcacgaaga

SEQ ID NO: 209775 - DNA, 412 bp, Glycine max
  unsure (1)..(412): unsure at all n locations
ctggactacttacatggacttgatggtgcctatgcaagttgaaagccttggaggaaagaggtatgcctatgttgttgtggatgatttctccatatttacctgngtcaactttatcagagagaaatcagacacctttgaagtattcaaagagttgagtctaagacttcaaagagaaaaagactgtgtcatcaagagaattaggagtgaccatggcagagagtttgaaaacggcaagtttactgaattctgcacatctgaaggcatcactcatgagttctctgcagccatcacaccacaacaaaatggcatagttgaaaggaaaaacaggactttgcaagaagctgccagggtcatgcttcatgccaaagaacttccctataatctctgggctgaagccatgaacacagcatgc

SEQ ID NO: 209776 - DNA, 384 bp, Glycine max
  unsure (1)..(384): unsure at all n locations
ttttgaaacttggtggttnttcaagaattggacatagtctcgacggtttctccgtaccagtataaatcctttgtgtctcattctgtttattctcccttctgttatttgaactaacctagggtttgaatttgatctttggttttgaaaaactttgtttatttttacaaaaatctaaaactattatctgattttttttatgaaaatctatttttttcttaagtctcaggagaagactatctatattagaaagacaaaatagagatgcacatcaagttcaaccactacaggctctagatgatcattacaaatgtagacatacccatcactagacttgtagtagaatggacaaacacagacttggctataatggatctaaatacaaat

SEQ ID NO: 209777 - DNA, 419 bp, Glycine max
  unsure (1)..(419): unsure at all n locations
tactattttcgaggaatttgttttcatgcatattatattcaagncgaagcatgggtgcgttttctttattaatttctctgtgactaaagagaatcgcttttattcagcaaaaaaaaaagggagaaccactgttatttttacctgcctttccaataaacttttcttatattaagacctacaacttcatttcatttccttcttttcaataccattttcttatcataaggaaaaaaaacacaaaatgaataaactttgaaggttttcacatcttctctgagataattattttgacggtgcaattgcaataattaatcagttctacttgggtgtttgatccaatttatctaaaaatatatttttacaacatcttaataatttaatctttgcattatttaattagtacatatatttgatagggc

SEQ ID NO: 209778 - DNA, 427 bp, Glycine max
  unsure (1)..(427): unsure at all n locations
gaatggaaagaataggtatatcatatcataagacatattttatagctntacacactactgtatgattgtgataattaaaaaagaaaaagaaaaacagttttcttctagtaggaaactaaattcatacctaggtaaagttttaagaatatctaattacccatgcaaaatttcagcaaccgaggcaagatataaacattgtattttaaggataattagccactgaatgtgtccttattcttcgcacagcaatgaggaactaatccaaatgatatcagaaaatgggataacaccagtgacaaatagacaatagtactaacagcaatcaactacggaaagttaaggaatattgtattttaaggataattagacacatgttgtcttattcttcacagaacagaggaactaaaccaaaaaaatatgaaagcgg

SEQ ID NO: 209779 - DNA, 289 bp, Glycine max
acgtacatctagcccactcaagattttgctgatgcttatcttcatgagatggtgagataagtttaacatgaggccgtatatattctgaagaaagggcgagagactgcataacagactgctaactactgtcccaacatagagtctatgtgacttcatatacaagtgatcggttgccttatcaatgaacattcttaatgtggattcacggctaacattattggtatgaatgttgcgcaatcgtaagaaaaggagtctgagggtagacaaagtgcaagctcaaatttatact

SEQ ID NO: 209780 - DNA, 439 bp, Glycine max
ctcagcttacactactggtcctttgttctagctggccagggaagcatatgtgaattaccgggatcttgatttggggataaacaccaagaacagcacaagttacattcaagcaagtgcttggggttataggtattacaagaacaactttgacaggttggtgaagattaagaccaaagtggatcctgaaaacgtgtttaggcacgagcagagtatcccaccacttccactctgaatgaaaaaggaaagaaatgggggaatacggcaccatgctgctacaatcattaagactggttactataaaatttgtgaaagggttaatatgctagtttagagcaaaaaggatacagtacaaatatataattagttgctttgtttttggtcaagttaatgttgtgagatacagattatgttgctaatcgtttgctgtttctgtgatttg

SEQ ID NO: 209781 - DNA, 424 bp, Glycine max
tctgaatttgggtcctcttaaggacttagtctttttatccgctggctgatcattagaaccaatgaagtcagtgacaatctccttggacagaagcttctctcgaatgaaatgacaatcaatctctatgtgcttagtcctttcatgaaagactgggtttgaggcaatatgaagagtagcctgattatcacaatacaacttcatttgcaactcttcacaaaacctcaattcttgcagaaattgtttaatccacatgagttcacaagtaactgtagccatagatcaatattcagcttctacaccgagcgacaacagtttgtttcttgcttttccaagagataagatttcttctaatgaagacacaataacctgatgtagacctcctatccacgggacaaccagcccaatcagcatcacaatatcctga

SEQ ID NO: 209782 - DNA, 437 bp, Glycine max
  unsure (1)..(437): unsure at all n locations
gctatcccatgagcatgtccacctacttaaacggtagaatcatgaagcttatatgaatgaaacataatgtctcagtgagtactctaagaactctaggttgactctatattctagaaatcattttcttaactatcatggtttctctttttcttttcttaagcactttatctaacaactattatcccatctctatatcgnttatatctccttggaccataccttaaccttcacttaggtacctaaagttgatcaccttgaccatctctaaggctactagtatcctatgtcacctgttcgcttccggcaagtgcactagatcgcacaagtagtataaaacggtaagaaccgagtatcgaactctcgaaaaacttgtgttacttggtaagctatttcagtgaataggtgtctggtgtgaaaatctaagtgtgaatatgaac

SEQ ID NO: 209783 - DNA, 418 bp, Glycine max
  unsure (1)..(418): unsure at all n locations
atttctntatagacattgtcgtttaagcgaatatcactcttggcttaagtgtaaacatttgcataacttcaaatttcttaagacctcaaatgacttctaaattaaaccaatttaaattacacatcatataccatacatacaaatcattgcacacacaaaaacaacatttcaagtagcaaccacttaaacaaagaattcaatcaaagtaaagcttctcttacctatccaaactcaataaactagctttgaaaagaaggaaaaatgaaagaagaagactttaggtccaatataaaatctttctcccacttacacaacaactctaaaccacccacaccacccaaaccctaaaaaccaacaaaaaacacatcaaaaccttgaaaatgaacacttttatgaagcttctaaatgtgcttatggg

SEQ ID NO: 209784 - DNA, 379 bp, Glycine max
gcgagcttgaacagatgttctacactcggagtgatcacatgctatcctcttaaacacttaccacccactctgccatcatgccgagactcaggaaggccaataggactagccttctctaagtatcctgaacaaaaaccaatggcttcttctgcaatgcacctcctcacaatagatgcttctggacgatatagattcattttatacccttttaagattctcatgtgtcgttcaaccgggcacatgcaccatacatcaacaggaccacaacattcgatttctctgaccagatgcacaatcatgtgaatcatgatgtcaaagaacgcagggggaaaatacatcttcgactggcacaggataatagcgggctgatattccaact

SEQ ID NO: 209785 - DNA, 429 bp, Glycine max
  unsure (1)..(429): unsure at all n locations
atactcagctctctgtcatnatcagggtcttgatatagtacgcgactattttgttgtgcgagtagaaagttattggcggcgacttatctcagagctttagtcttcagatctcgaacgattcatggggctacgggactgcatgcggtatttgagtcgtgccgcaatatatgaagaagactccaaaatccaatctggtctattgatgtagacttttcgtggtaatacggagaccactttgattaccttgtgtaccactattgactgcctactttaaataaaatcatgatatatagtttgggacatctaatctcccctgccaattaatccaatcctatgattaagaaacatgacgaaattaattaaaatctactcatctaacctactctaaattgagatgtcaaattgtactataaagggctgaatatctgg

SEQ ID NO: 209786 - DNA, 404 bp, Glycine max
  unsure (1)..(404): unsure at all n locations
tccccttgtgctgctttctaatagctgaaatatgaatntgatttccttaccctttgttcttatatcttctgcatttacctcactttgctggttctttctcttgttttgtttccagctactagatgagagaaagggcatcaatgtctttcggtttcttcaggctatcaatgagtaagagctgctacatagttgtcacttgcttcaccatatttatttgcttctcctataaatgcttgtggaaaagtttatcaaaacacgcacacgcctatacttaactgagttatcatatttacgtgcacttgcgaacttgtaggagacctgacataacggaaggattgaagagattaaaatgtcgtacgcttatttttgtcggggacagttctcctttccattcggaggctctt

SEQ ID NO: 209787 - DNA, 58 bp, Glycine max
gactctatcccttagtgaggactctctttgtggaaaatgtttttggtcaaaaattggg

SEQ ID NO: 209788 - DNA, 441 bp, Glycine max
  unsure (1)..(441): unsure at all n locations
ctaagctctaaatactgaggacacaatcggacatccgagtaaaaattattgttatttngaatttcacagagcttccattntcaatttcgagtgtctcgatatattacgggacacaatcgaacatccgagtaaaaggttattgtcatttgaatttgctacgagcatctattttcaatttcgagcgtctcgatatattacgggactcaatcagacatcttagtaacaagttattatcgttagaattttctcagagcttccattttcaattgcgagtgtcttgatatatttcgggattccttcgtacatccaagtaaaaagtaattgttgtttgattttgctcagagcttctgttctgaatttcaagcgtcttgatatactacaggagacaatcggacatacgagtaaaaatttatcgtcgtttgaatttgctcagaacttctg

SEQ ID NO: 209789 - DNA, 438 bp, Glycine max
  unsure (1)..(438): unsure at all n locations
aactagctatgtaagagcttagtcatctcattaattaactgganattgttgagttgtggtatgtaccaacttactattagttgagcttttttttttttggttttaattaactcctagatttacattacagtatgacagattaaattcgacaaggaaaagactagtaatttctcttacacatggtttgatattgaccgcatttcctttttttctctcatcgattgagtgtaaataaagaggaaagaaaggaaaatgaagaatgtaaaattgaaataccaaattttcttttttatttgagaggaaaaataatattttttttaacacctacaagaaaaaacttaccccaaagtgcataaaatagagtgggacaaactctctcttcctttttcaattttaaaaaagttaaacaaaaaaaataatatcaagaaaaaattaatg

SEQ ID NO: 209790 - DNA, 410 bp, Glycine max
tcttttgctcttgaatctattatattaagatcttctctttcatctgttcctgcgtctctacccattctcattcatttgcatgtttatttctttatgtctaaaacgccagattcgacgacgagtcccttgaaggtactaagacctgggacccgcccatcgacttcgagcaagaaacgaattaaacagaagacgaacaggacgaggatgtgggactttccctggagttagaaaggatagtcgcccaggaggaccaagaaatggggcctcatcaagaagagacgaaactagtagacttgggaactaacagtggaaaaaggtaagtaaagataggcacgggtatgaccacgcccatccacgaagaattaacaaccctgctaagagattaccaagacatctttgcttggtcctac

SEQ ID NO: 209791 - DNA, 353 bp, Glycine max
aattctttagtttctgaatgtacaaccttcaaattgttgctcgttcccctctttcttttctgcaaaaaagaaaatcaaatgttgtcaaaacatggatgaagtcctaagaaaatcaatatcaaagaaaacatggatgaaatcacaattaaaaagcacaactacctatctttcagagtcctttggttaatttgtcttgtctccttatgtggtggggttttgtttaataatcttatacttttgccttccaaaaaaaacttatcactaatcctcttttcattaatccaattttgtatgttattgtataaaagatcatgggttctccacctgcctccactactcctcctcctcctcct

SEQ ID NO: 209792 - DNA, 374 bp, Glycine max
aacttccttcgaaacacgccatttctgaagactcttgttattttaaaggttagtaattgattgattgaaacaggcacaattactaaattacaagaaatgtttttgtagattgtcaacatttttgcaaaggaaattctggcgactactaattagatttaattattaagttattttaattctaattaattaatgtgttattcagttattgtaatgcaaattaattgatatagctttgtctttgactgtcatcagggcatatatcaatttgatgaagaactcagtaatcctgataatgtgccgtcatgttttatgtctaatcttcaagtggtgaattttggagctctaaatggtaaaaaacacgagctgcgtcttgc

SEQ ID NO: 209793 - DNA, 427 bp, Glycine max
actgcgccactcgcaggcagcaagtgcttctccaaacatcttccttctggaggaatcttctggagggcccaagtgggcctggttgctatctacaccccctctttttaactaaatgcacccccttttctatttttttgtaattctttttccgtaacgttacgaaactttacgaatttcgtaacgatacttattttccttccgcaaggttacgaatccttacggattatgtatttactcttttttagctttcgaagaagttatggaaactcacggattgcgcaaaaacacctcttttctatttccgccacattacggaatttcacgaaccacgcaagcctgcttcctttcgatttctgagacgtctagggacttcattcattgcatgtcatcaagtaataatccccggacgaaattagggtatgacaac

SEQ ID NO: 209794 - DNA, 411 bp, Glycine max
gagacgccgctattgctggcatactcttatgtgagcccgcttagaggtaagggatgagtttatcgcaatttgggttagaatgaacatgtgtagacatccttagaggataaaattagggtttatattgggatgtttatgattataatcacgagattgttatgtttgactggccaattaatgtcctaatgcaaattggttgataaaattgggtgctcttagtattttttttttgtgtttttgattcctttgattttgatatgattatgtgaaattgtttgagggatttcactccccatgttgtgagaaacatttttgtataatttgtttgtgttttggataagatttactagattatcgtgataaattgttatattgggatcatgaaattgtgattaagattgtgcgtaagtg

SEQ ID NO: 209795 - DNA, 384 bp, Glycine max
ctcggatgtccgattgtgtcccgtagtatctcgagacgctcaaaattcaaaacagaagctatatgaaaaatctatggacgataactttttacacggatgtcccattgagtcccatcatatgtcgagttgttcgaaattgaaaactgaagctctgagagaaatcaaacgacaataactttttactcggatgtccgattgagttccgtaatatatggagacgctcgtaattgaaaacaaaagctctgaagaaattcaaatgacaattacttttgactcagatgtctaactgtgtcccgtattatatcgagacgctcgaattgaaaacagaaactgtgagcagattccaacgacaataactttttactcggatgtccgattgagtcc

SEQ ID NO: 209796 - DNA, 436 bp, Glycine max
  unsure (1)..(436): unsure at all n locations
gcttgcttgagcttaatggagaatgaagaagaagataatggcatcgttatggagagagagagctngttgaaaagtgtgggggctgagtgaagagagagagaaaagctttttggttttaaaataaaagggttttctctttttctattattttattcaagctctgccacatgtccgtcggggccagttttcgaaagcaagcaatatatatatcanaacgctcaaaataaaaccccgagcgtggttcagaggttggttttgttaaattctaagtcgcacgcaaaacgatgatttttagactaattacttaagaattaacccataacctcccagttatggatttctctttcttaattagcctaacccgcatatcttgcccccactattcctacttctaccaagaacatatatgcatatacactgaataatacttatatat

SEQ ID NO: 209797 - DNA, 377 bp, Glycine max
  unsure (1)..(377): unsure at all n locations
gataggacattagatgtaggaaattggtatataaagagaaatctacgcacttatagtctaatatgaacatgatttttgggatgcagatacatgcaaccttcatcttgaaatgctagtaatgcaaaaggttttgaatcatgaaaattgtgtaatgctgatgacattccttcctatttttgtgattttgattttgattgttttttctttttttctttttgtggaaaacatagattgaccatctctttctgaaagacgcgataactcatgagacctcatcctatctttttgaaaatctcttcggggactccctcagagtgtatgttttgtttgatttagtcacttgancaatttagagtgacgacaatggagccatttga

SEQ ID NO: 209798 - DNA, 418 bp, Glycine max
ttagcttggttcactggttattttcaactctttataagacaactttcgaagtaaatggccagttgaaacttattttttgatgattaattgagattacagcataaacgatcggtaggattttattttaaaggtgattaaatgagattacaacataaatgatcagttgaaattcattttaacattgattaagtgagattacgacttatacgatcggtcgaaattcacttaaaacaaaggaaaagatcaccgatagtagaagaatgaagatgaagacatgcaaagcaagaatggacccctaagggtgcatagaatgaattcaaaacttcaaaatagaaaactaaccggttgaagaatgaagaacaatgaagaacgatcacggaaacattatggaagcgcctaggccttgacttttcttctt

SEQ ID NO: 209799 - DNA, 431 bp, Glycine max
  unsure (1)..(431): unsure at all n locations
tgatataaatttacttaaaaatcaaagtttagtttattcggacttttattatattnctagtcttttaatataactcaatatattaattcatatttttataatttaaattgtgttaaaagataatggctatttattataactttgcaaatagcacacacaacatttgaatggtggatgattcatctattttggttttgccattatagtctcattacatcaaaatcaagaaaagaaagcagccacaaaacgactattacttggtcggtgtaatttccacgtgtcatgtagccattggaagcagatgtgaatctccttgcaggccccactaacatgggcccaatggcccaccagccgaccaaaggcccagatagatagttttaggtgaacgacgctntgttgctttatttgcgtcagtgtctgatctggactgg

SEQ ID NO: 209800 - DNA, 448 bp, Glycine max
actcagcttgcgaattagtcttcaccagtgaaaggatagatgtgggtccggattgattttattttagtcatcctgcttggacgaatgagaaaactggggcaagtgaagacggtgagaatgagggagaaacccatgttgtgactgccattcctatacagccaagttccccaccaacctgacaatgtcattactcagccaataacaaaccttctccttgcccaccaaccaattatccacaaaggccatccctaaatcaaccacaaagcctgtctaccacacaaccaatgctaaacaccacctttagcacgaaccaaaacaccaaccaaaaaggaattttgcagcaaaaagcctgtaggattcaccccaaattccggtgtcatatgctaaacttgttctcgtatctacttgataattcaatggtagccataaacccaaccaaggttcctca

SEQ ID NO: 209801 - DNA, 425 bp, Glycine max
  unsure (1)..(425): unsure at all n locations
cccgtcatatgtggtactaggtggcgatcgggctatggtgcaaatcaactctcccacatccacaaatcaaacatgaacccaccatccccagttgcccaccttcaactgagctcacgtacccccacgtagcccttatcctcgttcctctcagcaccaggtccccatcaacccctccaagcttccacaacatccaagcaattcaatatccaaacatcgtgaactatcctaaaccaagaaaacagggcagagacagaaaactttgcccaaaacacattccaacaccacagctttccctactcaaataccccagtaacattctcttcattctgattcgttaaccgttggatcgactcgaaaattttactgaaggtccctagtacataagtctacattntaaccgctgggatctgcaagaaaacgtcaag

SEQ ID NO: 209802 - DNA, 443 bp, Glycine max
  unsure (1)..(443): unsure at all n locations
aactcagctntggcaaggaagaagaagaagaagttcaagaagatgttcaaagagattcataggttgtaaaagaatatatgaaaaagttatatcaagtacataaaatgcaagtcaagatcttgcttttataaactcttcatgtctggttaagaaaaccattggaagagttataaccttgagaaaatcttgagaaaaccattggaagagttacatctcttgatttttattcaaaacttgtcattggtaatcgattaccaaaaccatgtaatcgattacacaaagcattttatgaaaagatgtgactcttcacaattgaatttgaatttcaacgttcagatatactggtaatcgattaccaatatattgtaatcgattacaccatntaaaaatcaataggaacgttgcaaattcagttaaaagcttttgaaatcaaactttgccac

SEQ ID NO: 209803 - DNA, 437 bp, Glycine max
  unsure (1)..(437): unsure at all n locations
cgttacatctgattctctcntgaaataattttcagagtgtgtttcattcttatgtgaccaaagcacagcttcaaatttggccactttagatttatcacgcaatcaaataaaggggcaactgccagattgttggaaatcagtaaagcaattactgttccttgatttaagcagcaacaaattgtcagggaagattcctatgtccatgggcgcccttgttaatatggaagccttggttttacgaaacaatggtttaatgggtgagttgccttcttctttgaagaattgcagcactttatttatgctggacctgagtgaaaatatgttgtcgggtccaataccatcatggattggagaaagtatgcagcaattgataatcttgaacatgcgaggaaatcacttctcaggaaatctacccattcatctctgttatttgaacc

SEQ ID NO: 209804 - DNA, 416 bp, Glycine max
  unsure (1)..(416): unsure at all n locations
tggtgattttttcacaaaaaagatattttgtttttaaagctttcagaacctatnttttatgtgaagcatgagaaaaagaaggccaaaaaaaaaacacctggtgaaaggagaagaagaggaaatgtaataaaaaattagagacaggaaagaagaaactaaacgttggtttaaaatataaaaatatatttttatggtattttaataatatcatgatataaaacaattattacattttaacatttcaatagcacaaaaaattggtttaaaatattaacgcaaaaaaataattaaattttatcctggatgtaaaaaaaagataataagtaaacttgtaccaatttgtaatggaagaaagaaaaaaaattaaatattgtagtagaagaaaggtnaaagaaagaaaataaaaatatcaattt

SEQ ID NO: 209805 - DNA, 432 bp, Glycine max
  unsure (1)..(432): unsure at all n locations
gctgatctcatcgaagagataagagtggtcaagggttcgatgattatcnctttgctgatgtgactganttgtgtttggtaccagatgcggtcatttctcccaaattcaaggtaccggattttgacacgtacaaggcgaccaattgccccaaaaatcacttaaagatgtattgtcggaagatggggtcgtactcaagggacgagaagctgctcatgcacttcttccaagacagcttggccgaagcaacagtcatgtggtacaccaacttggaagcctcttgtgtctgctcgtggaaagatttgatcactgcctttattaggtagtaccaatataacactgacatggctaccgacagaacccagctgcagaacatgagcaagcgggagcatgaatcattcatggaatatgcccagaggtggagggaattggcgg

SEQ ID NO: 209806 - DNA, 397 bp, Glycine max
  unsure (1)..(397): unsure at all n locations
acttcctgctttattcgtttatacagagtggtacctggagatatgtcgcgggggtcaggagaccttggggacgtcaggtggggtgctattgcccaaaaccaagcttgaccaatcccgacccaacctgngcatagtcggtcagtgagaacctgtgatgtacctaaacaggcgagctcctggcagtcaacagataaaaggaacaaagaccacaaagcaaggaggcttgtggtggctggccagctgtgaaacttgattgatatgtgagatatggcctctggtaatcaattaccaagggtgggtaatcgattacaaggcttaaaaatgaagacaggagactaagatggtctctggtaatcgattaccaaggggatgtaatcgattaccacgcttgaaaatg

SEQ ID NO: 209807 - DNA, 423 bp, Glycine max
aatcttaagggaggctaccgataagtaaatgcatcttattagtataggtatcaccaattaattcctttaagtcatcttcaactatacaattccatacctgtacaaactttggatccctctcattccagtgtgattcgcttgggctcttacatgcccaccaacttccgcctggttcgtcctcgaaccacactatattgggaaagaaggtctgctacgataccatttgcaacacccctaattgtcaacacttcaatggctctcacactacaacacttcactcaatatccttgttggttagaatcgtccaccagtcagaaccctccgtaggtaaccctttccaagacctcgacaaccaactctgaccctgctcaactattcttaagatcattgattgtccctactatagaataccatgtaggtgag

SEQ ID NO: 209808 - DNA, 416 bp, Glycine max
  unsure (1)..(416): unsure at all n locations
ccttggcattctagtaactcagcttgccttgaattataaatctacaccgggggcaggagtctgtggtctatgtccttctctaccacactctggagtcaatgagcaacctgaagcttatgctgcaaacatttataatagactccctcaacagcaaaaccaacaacagcaaaataattatgacctttcaagcaatagatacaatccatgttggaggaatcatccaaatctgagatggataagtcctccacaacaacaatagtatgtccctccttttcagaatgttgctagtccaagcaagccatatgttcctcctccaatgcagcaacagcagcagcaatcacaacaaagacaacaagcaactgaggctcctcctcaaccttccttagaagagttagtgaggcanatgaccatccaga

SEQ ID NO: 209809 - DNA, 377 bp, Glycine max
acaaaatagagatgttacattaaaatacgtgagcttgcgcgcgatcaattgctttagaatttgcttactctggcaagaagcacctaaatacaatcgtggtatatctagagcacatgtgccacctttggggaaggactactgtctctccaacaataaagctaaaaaggtaggcctcaaaaattctgtatctcttgtgtttgtggccagacatgtataaaggtctgttgaaaaaactacttcataagtacttctagtagaagaaaaaaaagaaataaactgcttcataagttaaaataaacttttcattaactaatcattagttaatttgtaaaaaatatatgagagagccgctaaaattataaggctggagaccttat

SEQ ID NO: 209810 - DNA, 389 bp, Glycine max
tttatcccggaatgggtttaggcaaggacaacggtggcataactagcctgataaacgccaaaggaaatcgtgggaagtatgggttaggctataaacccaatcaggcagatataaagagaaccattacggaaaggaaaagcggaagtcaaggttcgcggttgagacaagaaggcgaaggaagcccaccctgtcacataagtaggagctttataagtgcgggtctaggggacgaaggtcaaatcgttgcaatatacaaagatgatgttccgagtgcattgaatttggtacaaccgtgccctcctgatttccgactaggaaattggcaagtggaggagcgcccggacatttacgcaacaagcataatgtaaacctttacggttttaaaagct

SEQ ID NO: 209811 - DNA, 378 bp, Glycine max
  unsure (1)..(378): unsure at all n locations
aattttntgctntaccttctcttccattgttgtttcttcattntttctccatgtatctcctcccatgtcttgtgataaatgtttttaacatgattctttagagtttccaccgattaaacttgctatagaagctagatttgattttctatggttcanatttcttgttcttgttcttgaaccatgaattgtgttgagtttaggttcatttgagttttgtattgttattttttgtggctgaaaactaaaccataaaattcttacaaaaatattaaagtagaagaaaacctcaaaaatctagagtgacttgttcacctattgtagttgtcatagaagtcatgtctagtcatgaaacttgtcacataagatttcttatgttgt

SEQ ID NO: 209812 - DNA, 342 bp, Glycine max
tgagagcttttggtgtgaaaagattggtagaaaactgagcgaaaaaaggaagccatcctgagagcatgagatgagtctgtgagtgattgtgaggctctaaaggtggaggagacatccccactacttgtatttcttcaatccttcatttttctcttctctttgctgcaaatgaagcttcccagatatggagagctaaatcctctggtgggtcttccttgtaggtacttgatgtaaatacttgtatatctatttaatgatgttttatgttttctctgtgctatcagtacgtcctttcagtgtgcttttgccttgatcatgtacacgcatgttttcttaggatca

SEQ ID NO: 209813 - DNA, 381 bp, Glycine max
  unsure (1)..(381): unsure at all n locations
caatgataataaatatctctagttagtgtttttttttactgaatctaattagtgtacctaaaagtaacaatattgaatgaaaatgtatagttaaacattttcaaatattaataagtagtggtttttttgtgtgaatatattagtaagtagtggtgagcattactcaatccggtccattaactntttttacatgaaattgagagatgtgctaagaccaattgaagggagcaatcctaattatagattgacactacaacctttaatagccaaaataacacattccaatatgaagtgcctttgcacaacatgtgcaatatagtctccaagtgtccttctaggatgttcttctttcgccatttcaggctcctcaaagataggaag

SEQ ID NO: 209814 - DNA, 396 bp, Glycine max
gttcacctctcgtagacaattgtggcttatcttcatccgctaagcgcaacactcgtgggctaagcgcgaggaagaatccacaacacaatgagttgtacaggtttgctaaccgcaccgcttcatttctctaagcgcaccgttttagttcatccgctaagcgagataggcgtgcttatccaataattacaaacgggcacctaagcggtccatacgtgtgttaagtgcccgaacacgaacaaggccacctatttaaacctgaaattatgttttgtgaagagagtttggactgagattcagagcttcgcatgtctagggtctctagagaaagaatagtcctaattcccaagagatttgagagatcttgctgtgtgaagatctgcagagaccaaagcttgc

SEQ ID NO: 209815 - DNA, 377 bp, Glycine max
acttgttgcccaaggttcatggtcttgcacgtgaagacccttataaacatctgaaacaattccatatattctgctccaccatgaaacctccagattgtcaagaagatcacatctttctgaaggcctttcctcattctttaaaaggagtggcataagactgactatattaccttgctccaaggtccatcacgagctacgatgacctcaagagagtatcctcagaaacaattttccttgcttctatgaccacggccatcagaaaggatatttcaggcattatgcaacttattggagagagccatactgtgagagtattaaaaaactatgcgccagttggccctcaccaccagatttctgagcagcttcttctccaatat

SEQ ID NO: 209816 - DNA, 439 bp, Glycine max
aactagctaagttctaagcaaaccgaattattagtccgctgaggtgtctttgttcattccacaaattaattctgactagtcatgaaaacaatttttataatctaaaatgaaaacctttcctattcagaaaaattagtttcacatcaattaaaaataaactaaaaataaactcaaattagaatatataagtaaagaaaaaccctaaaattttcatgtagaatttactaaactggaaggagaaaacaaaacccacaaacgtgacacaacatttgaaacaacaatcagagccattgttttattcactggcacggatcacttttgcatatcctgtgacttcaatatgcgttgccgcagtgcttttactagatcatgaattatcatgttatattcgtcatccatctgcaatagaagtataaaaattcagaattgcatatcatgg

SEQ ID NO: 209817 - DNA, 437 bp, Glycine max
  unsure (1)..(437): unsure at all n locations
ctaagctcggcanatccagatacatctccttgtatcatcattgcaatacttatgactctattatagtgccatcataagcttacccganagcatgaagtatctgccaagactcaaacttcttgatgttggtgaatgcaaaatgcttcaacgtatacctgcacttccacgatccactcagtgcttgcatgtctggaactgccaatctcttcggacagtgttaagttcaacgattgaaccatccaaaagacctaagtgtacttttctgctccctaactgtataaaattggatgaagattcatatgaagcaattttgaaagatgccattgtaaggattgaaattggagcaaaaccaccatcagaggcagtattaaaaaatgaagatgcatccacggataatgatgacaatcaagtgtatacttcttatgtgtatccatctc

SEQ ID NO: 209818 - DNA, 439 bp, Glycine max
  unsure (1)..(439): unsure at all n locations
taagcttcactacatgctngcgttatngaagaatatgcttcctgaacataactcgttacccaaaaatcactaaaaggcaaagaagatattatgtcctgtgggtatgaagtactagaaaaatacatgcatgccctaacgattgcattttgtacaaaaatgagtttgtcaaaatgggcaaatgtcctacatgtgggatatcatgctacaaagtgaaggatggcacatgtagtgacaatgcaaccacaaacaacgaccgtccaacaaaggtgtgctggtatcttccaataattccaaggtttcaacgattgtttgctaatgatcatgatacaaaaaaacttaacatgtcatgtaattgctagaaaaagtgatggattgctccggcatcccgctgattctccccaatggaagacaattgatcttttgtatctgaactttacac

SEQ ID NO: 209819 - DNA, 421 bp, Glycine max
ctgcacagctatatcattgtcatgatcaaatttatttctcctccacctgagatcccactcccagctatcattattaaagttacccatgctagagatgagggaactttgctgtctactaatccgaaaaagttgattatatttctgctcaagagtgcagtctgtccctagccacttatctgtccaaaatttgattctttccccactcccaacctttcaggtcaaatgctgattgaaaatattaggatccgactgatgatatagctttctaatatccctccaccaatgggaatgacccctcttgttagagccaagctggaattctgaccaatccccatatttagaatttaggactcttacccaaagctgctaccctaatcaaaaactgttgttgataaattactaaaccaatagttgtagggct

SEQ ID NO: 209820 - DNA, 404 bp, Glycine max
  unsure (1)..(404): unsure at all n locations
tgctaccacctctatgattggaaagcggnttctaatgactcctctacggcctccacataaggcatagaggatgggtagctcaccaagatgtcttcttcgcctgatacgatgaccagatgcccttccactacgaatttcaacttttggtggagtgtagagggaacaactcccactgagtggatccacgggcgccccaacagacagctgtagggggggttaatatccattatttggaaggtgacttgacaggtgtgagggcctatttgtactgggagatcgatctctcccctaacctctcggcgagtgccgtcgaaggcacgaaccaccattgaactcagctttaagtgggaagcattgaatggtaatttctccaagtgctcttaggcatcacgtttaaactggaa

SEQ ID NO: 209821 - DNA, 386 bp, Glycine max
  unsure (1)..(386): unsure at all n locations
tgatcgtcaagctttgataaatgcaaaantnaaaaaataaaantaatataaaaaaaaactggggcaaatgaagagggtgagaacgagggagaagcccatgctgtgactgccattcctatacagccaagtttcccaccaacccaacaatgtcattactcagccaataacaaaccttctccttacccactgcccagttatccacaaaggcaatccctaaatcaaccacaaagtttgtctaccgcacttccaatgaggaacaccacctttagcacaaaccaaaaacaccaaccaagaaatgaattttgcagcgagaaagcctgtaaaattcaccccaattccagtgtcctatgctgacttgctcccatatctacttgataattcaatgg

SEQ ID NO: 209822 - DNA, 426 bp, Glycine max
  unsure (1)..(426): unsure at all n locations
ctatggaggctggatctatgagcttcaatgaggtcctttatatggtgatttacaccatggagatgcagcggaagacaaaggagaagaggtgagaggaggcgccatccactagggaataagccatggaagaaggagcttcaccaccaagatgagccttggataagaagcttggagagggtgcttcaatggaggaaaagaaagagggagagaaagagagaggggggagcacgaaattgaagaaaaaaggagagaagttgaactttgagttgtgtctcacaagactcttattcatcaaagttacaacaagtgtcacacatgcttctatttatagactaggtagcttccttaagaagctntctcgagaaaacttccttcagaagcttctttgagataacttccttgggaagctagagcttagctacacac

SEQ ID NO: 209823 - DNA, 330 bp, Glycine max
gacgattaattgagattacagcataaacgatcggtgcgaggttatgttgaaggtgattaaatgagattacttcatatatgatcagatgaaaatcattttaacattgattaagtgagagtacgacttaaacgatcggtccacattcactttggacataggaaaagatcaccgatcgtacaataatgatgatgatgacctgccgagcttgaacggacccctactggtgcatagaatgaattcaaaacttcagaatagattactaaccggttgaagaatgaataagcgtgacgaacgatcacggaaacattatggaagcgcctaggccttgac

SEQ ID NO: 209824 - DNA, 385 bp, Glycine max
  unsure (1)..(385): unsure at all n locations
ttatccatgaggtaatatgtgtcaagctagtgacgttaaagaagcgcttactgggaggcaacctacttctcttttctttntattttcattaatcattgcatatagttaggatcaacttgtttgtgattgcttgagtaaatcatcaacatgttntgcataaacatatggggttgttaaagcttctctgaagttgtggatgagaaataacttagaaattttttcagtcatccacttgctcagtgcgccttgtgcgctaagcgaatcattatgcatgggctgagcgagtcattgctcgcactaagcgcattaacccctacctattggctgatggggtgtcataccctaatttcgttcggggacctttgcttgatgacatgcggtcttt

SEQ ID NO: 209825 - DNA, 412 bp, Glycine max
tgttttgtcttttacatgcccctctctctagagtggcatttgtattgattgttatcttgtatattgcatcttagtctatatcatattatttatgcatcatgcatcatcatgtgtgagtgagaagaaaatttctaaagttagaaaacttttattaaggcaaaactctatattttaattgattgcaacctaatcgtaatctatcacacaagttgttttaagcttgcagagttaagtcttgtatcgatttaatcgattacaaacttatcgtactcgattgcacagttttttttttggacaatgactgagttattcaggagtctttgctttaatcgattaccatgggatatgatcaattacttctttttctataagtgtttcataagtgaacaagaacaccttatcaattacattt

SEQ ID NO: 209826 - DNA, 432 bp, Glycine max
  unsure (1)..(432): unsure at all n locations
ttctcacagataggacatgcatgatgtcctttgacactatttatactcanatttccatatgctagaaagtcattaatggtacaaaaaaccatagcacgtaaattgaatgtctcttgaagattcccatcccacacatcaaccccgtcttcccacaattttctcaagttttcgatcaatggagtgagatacacatcaatgtgatttcctggttgccttggactggcaatcatcatgcaaagcattatgtacttttgcttgatgcacaaccaatgagggagtttgtaaatcatcagcaaaacaggccatgaactatgattgatggttaagttaccaaaaggattcattccgtcggaagcaagaccaagcctaaggtttattgggttgtctgcaaaattaggatacaaatgatcaattgtcttccattgtggagag

SEQ ID NO: 209827 - DNA, 410 bp, Glycine max
acactcgtaggatccgcctagtttgtttcttcttgaactttaatttttgcttactttcatagcttatttcctttaccctacattgtcaaaccgcctagatagcttgccttttaccaattagtttttaccttatctttcacacctcttttactgtttattttggctagtttcaaccatagtttcttttaccttttgttttcaaacccccaacaagaaagaaccataacttaggaaccaacatgagtcttcattcttcatctagtgttaatggtgagggttctactcctaaggaccccttgtataagatattagatgagttgagatcccttaagttgtggaaagaaaaaaaagagagaaaatatgagaggaagaaagaagaacaataataaaagatatgaaaagagaaaaac

SEQ ID NO: 209828 - DNA, 440 bp, Glycine max
  unsure (1)..(440): unsure at all n locations
ctcagctaagctccttcactgcacaaggctcttaatattngaagagtatccntttgtaaccttcacccgacgaagacactgacaaaaacttatcttctcctttntggacaaagtatggcaagctgggggcaagtaaattttcttcccatcagaccttggatgcaactgtgatcgtatccccatattagctagatcttgacaggtattcaagccatccttcgtcttgccttgaatgttaaggagcatcccaatcacattgtcataaacatttttctccacatgcataacatcaatacaatgtctaacatctagatcagaccagtacggaagatcaaagaaaatggacctcttcttccttatgcaactctntttttatccgtcttttgggtctttccaaatacagtattcaggtgttgaacccgctgatatacctgctcacc

SEQ ID NO: 209829 - DNA, 359 bp, Glycine max
ttcttgattgctcagaattattaattgacggtatggttgctaattgacatagacaaagtagctctagggataaacccaaccatatggactattaatctttttcatgggcatatcttatagttcttcgacgattgtgttttgttttatccaaggataggaaatacatagaattagtattttaatttgatatggaaatgtttcgactaggcaaaaattaatgcatgtaatataaagaaaatgatataagtatttggtcgctcagctagcctgcatatagttttacccataattgggaaatggatgacgattattaattattccatcatcttaagaataaaccaatggagttaaaattaccg

SEQ ID NO: 209830 - DNA, 427 bp, Glycine max
  unsure (1)..(427): unsure at all n locations
gcctagtgattctagagagagaaaggtccaagttccatattttttngagagattntgctgtgtgaagatctgcagagaccaaagcttgaagaggaagctgttctgagagcttgagatgagtttgtgagtggttgtgagatcctagaggtgaaggagacatcctcaccacttgtatttttgcaatctttcatcatgttcttctctttgttgtaaaggaggcttcctggttatggaaagctaaaatcctctattggatcttccctgtaggtacttgatgtaaatatctttttatctatttaatgttgttttgtgtgttctctgtgctatcaacttttcattctagtatgcctttaccttgatcatgtagatgcatgctttgttagggtcattcaacagtggaaactggtctgattctgatgaccttgat

SEQ ID NO: 209831 - DNA, 376 bp, Glycine max
  unsure (1)..(376): unsure at all n locations
caattaaatattntcccaaatggatacaaatcaatttgattgacaaagttataaatttttttgacaaaattacaacatgtctccttcaatccaaaattcacaaaatcgtcctacttttttcccctccttttttaccaccaccaccaccaccaaattattttatgtcaaacactcaaatcccttgtactgttaattctcagagttcgtagacatttcctacaatcctagcaaacagtcatacgaaggtttcaattgatgatgttggttcacaatttccacaattttctacccaaattggactagacaagatcatcattgacgaaataggagggtcttcggcaaaaaagaagcctagagtagcctttgcagttgaaga

SEQ ID NO: 209832 - DNA, 435 bp, Glycine max
actaactgtacttatattaaactatgttacttattggtgacggtgtatttatgtttacactaaatatgcatatgacaattaaactcaaaaacaatacaaacaattaccttgagcttcttctcagcttccttttgtgctctggtagctgctttggctgcagctttctccgcttgttttttcttcctttccaaagcctgcttcgctttcgcgatttcctcttctcttttcatctccttcagcttttctggatcaatcggaggctccttattcacctttggcaattcaaattcatattcatcagtgtcttctaaaaccttgttcagattggatttcaaatcttttcctttctttttggtttctttctgaatcttctgctcaggcacagtttctggtggagatgatttaggctcctcctcctttggctgttttacactg

SEQ ID NO: 209833 - DNA, 430 bp, Glycine max
  unsure (1)..(430): unsure at all n locations
ctaagctctctgcgaaaaagattatcggccgtgtgtgtgaacaattgcttttgtcggctganaaatatccgtcggggctatttaactgccgatgtcggctattgttttttctattccacccctgaattatatttggatgatgcctattaggaaatgttcggtcggggtcatccggtcatgcttctttttgaggcctcgatctgtcgtctttcctagccggccgacgtcggctagcatttttttcgatccatatctgtgtgaatcatgttttttttttgccaaggagggctaatgttttcgtggccgacaaaatgagaacatgccagtgtcggccgaaacacaatcccgcacgaaaaaccctagccgacctacattgtaattttttcaggcaataccgagcgacaaaactttttctaccatgaaaaaatat

SEQ ID NO: 209834 - DNA, 404 bp, Glycine max
  unsure (1)..(404): unsure at all n locations
acgccgcggagagaagncaactncatcctggacgcggngagaagaagacgaacgcgctgctggatgcgtggagctctggtcgcggaagaagaagaactcgaacgtggaagaagcctttggccgcacaagaagaagaagaaatcgaaggaggaagaagaagcgcctttaggcgcggaagaagaacttcaaacgggaggggggaagggcttcttagtaaaaaaatataacccatcaatggcaatataagggacaattgtgaaacgcaacataattgccgggcgcacccagcaacagccatatatgacggcgcccaccacagtcacaaatgtgccatcaaggaccctagagcccacccatctagatgagcgctgacccgaagaaccaaaaggagagctcaaaaccac

SEQ ID NO: 209835 - DNA, 443 bp, Glycine max
ttttttcccttgcatcaaaactgcttattatcttatgcctactgcgggcggaatacctttctgtgctgattctctcagggtcgattgaatttatcccgatgcaggtgatccctatcgccgggatgattgccggtaacgccatggtagcggtggggttgtgttacaacaatttagggcaacgggtcattagcgaacagcaacagattcaggagaaactgagtcttggtgcgacgccgaagcaggcttcagcgatattgattcgcgacagtattcgcgcggctttaattccgacggtcgattcagcaaaaacggttggcttagtgagtttaccaggaatgatgtccgggctgatatttgccgggattgatccggtgaaggcgattaaatatcagattatggtgacctttatgctgctctcaaccgccagcttgtcgaccattatt

SEQ ID NO: 209836 - DNA, 52 bp, Glycine max
  unsure (1)..(52): unsure at all n locations
tggtcgnttgtatctatgttgtatatgtgtgctccctcagtggtagctgtaa

SEQ ID NO: 209837 - DNA, 437 bp, Glycine max
  unsure (1)..(437): unsure at all n locations
ctcagctgagaagccttctgttctgttatacatttctgactntatggcatgatatgaaattcanagattggacctctagctagttgttattaatgaataacttaaacacttgcgcttgagtgaaacagtagccgtgagagtgtggtttaagctactttccttgatatttgtcttatgcctaactccatctatttgttcaagttacatttcattcttttctttggataactgcataccttgtgaaagacaagtgatgagggcattttacaccattctcctattatgcaatcagtaacctttgttgcatacacctttgtatatagtcactgcatgtcattgtcacttgaggacaagtgagctgttctctttttgcatgaggacaagcaaaactataatattgggggagttgttagtcggtgaaaatgactaacttttgt

SEQ ID NO: 209838 - DNA, 417 bp, Glycine max
  unsure (1)..(417): unsure at all n locations
gatttccaaacatgtatataattgatattatttcatactattaaagcataattgcttttagatactacacgttntcttcacataatttctcttgcttgactatttaatataattgtataattaaaaatttaatttaattctactaattaagttacaataactctttatatgttagatggtataaaatggatgtgcttttctaaattataaaaaaaaaatttaaaaaaatgttatatataataaattataaatttaatcttaccaaaaaaaaatcataaatttaaaataaatccatgctacttactttaattttaaaaagtcaaagttcattaaggtcaaacacataagaaaggaatcaacaagttattagttcaagtaatcctgaactcgacccttctaaataaaatctccattttg

SEQ ID NO: 209839 - DNA, 310 bp, Glycine max
acaactatactcctttagcgatgaacgaaacggagatgaagtcagtggtagaaaggtctacattatacagttctaccatatcgaacatccacccgctttgaaaaacaacttacgtgggacgaagaaatatagtgatctctattgactatgatcacatcactaagggatgcatttaattagggatggcactgaataacttcgtcaacggtgatggcccatattatatgtttagaaagatcacgctaatagtgagaaatgcccaaaacgaatacgcgaacgctctcatgtatagatgggaggacccatacta

SEQ ID NO: 209840 - DNA, 431 bp, Glycine max
  unsure (1)..(431): unsure at all n locations
tcaagcttatactctgtacgctttttctacatagatacatgtggctgagattgtgggatacttcctgttaagtcttccttctcttcttggaggaattcctaggtctctatcattatcaccttctttagggatattcgaccgcgaatttattccttcaatcactactacaaaagcagctgtctacgtcaggaattctacgacggtgtcacagaaccgtgccataaggagaagcggcggcatgatcgtaattaaaggcatgaggacgactaccatagccgctacctgtcataaacatgcaaccattgtggcaattcatatttaagtgggtaactcattaagacgattttatgggaaaaacangctatgtagtattcatggagacatgagccacacacatgactgggccgacgaggatacaaacatggtgcgct

SEQ ID NO: 209841 - DNA, 402 bp, Glycine max
  unsure (1)..(402): unsure at all n locations
atgctccatactaggagagaaaacaacactcataattgaagatgccaacttttgctatagggtcatgccttttggcctaaaaaatacaggcgctacttacaagagattgatggactgaattntcaagcagcatatcagatgaaacattgaggtttatggcgacaacatggtcgtcaagtctcagagaatagcccaacacgaggcagacctgaaagaagtcttgggaaagctttgtgttaagacttttgccaaacataccaattgtcattgtaggcttcacatttataaaagagttcctctccacagggactttgatgtagctccatgtggagcttgtaggccttggatcttcttcatcaatggagtcctttgcttcttgaagatcaatggcagcgaaatgga

SEQ ID NO: 209842 - DNA, 416 bp, Glycine max
  unsure (1)..(416): unsure at all n locations
ctgccctaactcttttagactggtgtttcctangctcttgaccttgacttgatagaacccttttttaagcgaaggcatttgacttgatcccatgttttacggttgaacaaaaattggtgcgaatcaaaactccaacatctatcatgggtggaatggatgaatgcatgaagaaatgcacatgacacatgcaatttatgaatacgggagcccgggaaattgtctccttcttagatacaacgtcttggggtaacaaagtgcccaacgtatgtatttaagaaggtggcacggaccctccgtcggtttgtttaaagagaggggatcaagacagaatccgtgcgtgacacatatgcgaaaggcgcaacatggtatgacaatattcacaaaatataaaaagggtacatgaaacttatgcatgg

SEQ ID NO: 209843 - DNA, 435 bp, Glycine max
  unsure (1)..(435): unsure at all n locations
taactagctcacctagttggatttggcaacagcctttaacaacatttgttccttcttcttactagacgcacaacgctttggatatgactttntctctttagcttccaactttttgatttttttgtcagagtcaatgaactcaaaagtctctttatccattaccactagctttggccttcttctttcttctcccttctttcttggtatttagatttttatctcttttacgctttactttcaaatcaaaaccaagctgtatctttataatattgctggtgccaaagaaaacttatttaactttagaatcgcctttcagaatgatatcattgctttcctctacaagcaaccaataaaaaacagttgggtttcatgatctataatttaaaattttctaaagaaatcatgagccagaacaacaataaaattgttttaaat

SEQ ID NO: 209844 - DNA, 413 bp, Glycine max
  unsure (1)..(413): unsure at all n locations
aatgatcctttggacgatccaggaattttttcaaatttaatagctgtttgtaaatcagttntggctactggtaatcgattacatcctctggtaatcgattaccagagagtaaatttcttgtaaaagactttttaacttaaaattcttggccaaaccttttgctacttcaattggaattcccttcctatttaatataccctttctaagactctatagactgtcttgatcatccatcttgaatatctttaattgctttgtcttgaataaagctttgagacgcatgtgatcttttggcatcatcaaaacatcggcttgatcctttgtctacacatccaccgtagataaacaggaccacaacatttgatttctctgaccagatgcacaatcaagtgaatcatgatgtcaaagaaagc

SEQ ID NO: 209845 - DNA, 446 bp, Glycine max
accttgatactcagcttgtgtgagcttcatggtgaatgagggaggaagaaaagcaacgtgatgtagagggagagagagcttctgaaaatatggggctgagtgaggagagagagggttgctttttggttttaataaaagggttttctctttttctattattttatttaagcaatgccacatgtctccatttgagtggagcaagaagggcccactttctctttttgactgtgacccatactcagtcacaaaagtgaggaaaatctgacctttgaaacgctaaaaaatcctgcctcggtttgcgtgccgtttctctggttccagtttttcgcgtttctctgcgtccatcggggccagttttcgaaagcaagcaatatatatatatatcaaaacgctcagaataaaaccccaagcgtggttcagaggttggcttcgttaaattctaagtc

SEQ ID NO: 209846 - DNA, 364 bp, Glycine max
  unsure (1)..(364): unsure at all n locations
agagaagttgaactttgaagtgtgtattacaagtttctcattcatcaaagntatgacaagtgttacacatgtttttgtttataaccaagcacatgggaaacttccttgagaagcaaggaaggtagtttccttaggaagcaaggaataaagcttccttaagaagctagagggggggctactcacacccctccaatagctaagctcaccccatgccaaaatacatgaaaatacaaaaaagttcatactacaaagactactcaaaatgccctgaaatataaggctaaaaccctatacttctagggtacccttaacttgtacccttaatttgtagggtaccctacatacctaaaatggccaagataca

SEQ ID NO: 209847 - DNA, 441 bp, Glycine max
ctcagcttacagcaagcttccatagcacctctattgagagagataaagtatgactactggaaggagcttatgatatcccattttgaatatattcgcaaagactgatgggatgtggtggaaaacatagattacataccatacagtgaccagctaaatgaaatccccaagctcagatttttcttaaacaccaaggctatgaatgtaatggtgtgtgctttttcagaagaggagtacaaaaaggtacatagcttcaagaataccaaacaaatgtggaactccttagatgtaacatacgagggcacctcataggtaaagaggaacaaactcagtctcctcactcgtaagtatgaactcttttccatggaataaaatgaagacaaacaatgtatgtttagatgtttttagaccattcttaatgaattaagatccttaggtataact

SEQ ID NO: 209848 - DNA, 415 bp, Glycine max
  unsure (1)..(415): unsure at all n locations
tacctgaatgctgtccagaagnattttattggatccaatttgtgtcgttacttaatatattttatttgttagatgtgaataatagcaatgttttgctttgagtgggaaatttcagaattcagagttttatcaatgaagtagataagaagcaccttatatccaaatactccttcaacatagacaaacccaaactaaatagtggacaatagcaaaaaaaatactccttcagcgtagacctctaatggttcagtcacacttgatatgctttgacaatcttgaggaagacaaatgaattgagttcagatctaactttgaatttgattgtgatgataatcgcttaacaggggtgacagattgtgcattataaggatccaattcagcagttgcaaagaagcattgctgagaagttttgaga

SEQ ID NO: 209849 - DNA, 433 bp, Glycine max
cttatctactcaaaataagtctaagggtatctaaacttggtctttataaactacttgggagagtaatggtaaatagtttctctttgctaaaattgatatacaagagtgattaaaagttaaaattttacttcaaccaacataatgaaatcaagaatccagatcattcatcatctcaatatatactagttgggtgatctctgaccagaccaaaattaccatgtcctgtagtttgtgctgtttcaaatttcttgcccacgagtacaaagaaaaatttcttacccaagctttaggcaaagccactaaagcaaatgcatcacaacaacaaaaagaagagttagagcactaagctaaccaattggcagataatagtaagtagtaacaccatcaaaatttctgaaattctcaccttgtctcgtggcttctctcacaagtt

SEQ ID NO: 209850 - DNA, 430 bp, Glycine max
  unsure (1)..(430): unsure at all n locations
tggcaaggaagaagaagaagaagttcaagaagatgttcattgagattcanaggttgtaaaagaatatatgaaaaagttatatcaagtacataaaatgcaagtcaagatcttgcttttataaactcttcatgtctggttaagaaaaccattggaagagttataaccttgagaaaatcttgagaaaaccattggaagagttacatctcttgattnttattcaaaacttgtcattggtaatcgattaccaaaaccatgtaatcgattacacaaagcattttatgaaaagatgtgactcttcacaattgaatttgaatttcaacgttcagatatactggtaatcgattaccaatatattgtaatcgattacaccatttaaaaatcaataggaacgttgcaaattcagttaaaagcttttgaaatcaaactttgc

SEQ ID NO: 209851 - DNA, 376 bp, Glycine max
  unsure (1)..(376): unsure at all n locations
acatatattattagtaggaaagtacaatctggatttgaggaaacaaactaccctctcatgtgtttattgttatgaccacaatataatagagcatccgttgtgtactcagacacatggttttcaagccattattatagccttgttttctcctattttaacagtattgatcttgcagaggaataaatttgagagggatcagttcccataactatggcttanaagacaatgacacttaaactgcaagaccacttaatattaaagggcttgacttttctcgttattaactatatctacctatcacccacaaagaaactgatgttaatccaatttaaaaactaaattagttaagatcaccaagtttgttaccacttggcat

SEQ ID NO: 209852 - DNA, 365 bp, Glycine max
cctcgtgtaagagagatggcatttctgcttgtgttttcttgcaaaataaacaacaatggtgaacaattaaaacgcgtgagacggtcgatgcacctgtgcacacattgattccatggacctcttctctacacttttcaaaagtgtagatagacccttgatgcataggatgaaaaggtatggtgaaagggagtcacgctacctgagccatctcctaagaataataataccaactgtgtacctatcgaaaagacaacatgattaatagtttacataacaagctttatccatcccacctattttgcatggaatcctatgttcgtcagacgatagaaaagatcattgcaatccactctatcaaagcatac

SEQ ID NO: 209853 - DNA, 459 bp, Glycine max
  unsure (1)..(459): unsure at all n locations
tcttcgccagagaaatgatcgatgtgtgtcctaaaagaggcaaanttgatcatcctactaggacgacttataaaactggggcaaataaagagggtgaggatgagggagaaacccatgctgtgactgccattcctatacggccaagtttcccaccaaacccaacaatgtcattactcagtcaataacaaaccacctccttacccaccacccagttatccacaaaggccatccctaaatctaccacaaagtctgtctaccgcacttccaatgacgaacaccacctttagcacaaaccaaaaacaccaactaagaagtngaatttgcagcgagaaagcttgtagaattcaccccaattccagtgtcctatgctgacttgctcccatatctacttgataattcaatggtagccataaccctagccaaggttcatcaacctccatttctccgagaatacgactc

SEQ ID NO: 209854 - DNA, 350 bp, Glycine max
  unsure (1)..(350): unsure at all n locations
gcttgtacctcatcactttcttncgattctttaacctcatcatctctcatagtctttagattngggagccaatccaatccttgtgtccggtctcttagccacttatgatagccgccgatgatcccattactgcttcccctaagctctctgtcctttcttcacaccgcatcccatgccttgcgaactccttggagtaccctcgcgttgtggtcactgaaaccccgtgcgatgaaaggcgtgatgctttcgtctgatggcactcctctcatggggtagccaagctgtcttatggcgaggacgggattataattaatacaaccccttgttccatcaagaggaacatttgacat

SEQ ID NO: 209855 - DNA, 357 bp, Glycine max
gtcatcatggcataaaacttatcatttgtcttagtcactggcatctagaagtcctaattctcttgtaatggtgtaaaaagaatctttgggtaagggttttgtgaagatatttgcgaattgatttttggtatctacaaattctagaacacagtcaccttgtaggacatgatctctaagaaaatgatgcctaatttctatgtgcttggttctaaaagggaaaactatgttcttagatatatttatggcgcttgtgtgtcacattttatggggatgtggtctaatacaatcctataatcagataattgttatttcatccacagaatctgtgcacaacaactaccagcagagatgtattct

SEQ ID NO: 209856 - DNA, 379 bp, Glycine max
  unsure (1)..(379): unsure at all n locations
aaaatattctttttaattagagggtgcatgtaacacatttttcttacgtatcttttaaatacattgtgtattacttaatcataactttgttaaaagtataatacctaagagggagattttataaataaaaagtgagacaaagatcggaagtaaaaaaatatttggtataagaaattaatttctattaaataaatttaatattttgaccaactagccgagtggtctttgatttcggccaagaaataccctaatnttaacaaacaatgagacagaaatgaattattatataantttcaatatatcttaacttattagaaagagaatatctacagaattgtgttaaaaatttctaatttagtattactatttattttaagaa

SEQ ID NO: 209857 - DNA, 425 bp, Glycine max
catactggctcgtctgatatgtaaaacttggcatctttttctttatactaacaagaccacgatctattatgctggcacatgataaacctataggattgaaggatcgttcctaatagattgaacattcttttaactgattgttttaaaaaaatcatctcaatcttgtactctaatgaattaatggttgaactgaatccagtgatctattggggccactaagaatgacaaatgaagcttgtcgaacatactcggaagcatgtttggagctatgccgcgagatgaatgtgaaagccattgatctctggtctgcactccggcaaaggcatgactggttagatgtttgctttacgtaagtatctatatgtcaattgctctatgtctaaactataatgtatctgaaggaaaagtgaaaatatactcaagtt

SEQ ID NO: 209858 - DNA, 380 bp, Glycine max
  unsure (1)..(380): unsure at all n locations
cgacccgggatctctatatcacctctgcatgcactttaacctcctgtttgtctccctnttggcaacatcaaaaagccaaagtacgtggtaagcaacacaaggcggaagaataataattaaatataactaaagttcgcataatcattcataagtcaaaaccaaatataatccagtcataaaatactaagtgccaaataccgaaatataactaaagtgcagaaaatgataacttaaaaggcatagccaaatacacggcttataataaaagataataataatcttaaaactaggaaggtggtggaaggtcgaagcaccgacgaagataactcacantcctcttcaagtgggtgatgcgggtatccattccttcaaagcgacca

SEQ ID NO: 209859 - DNA, 438 bp, Glycine max
  unsure (1)..(438): unsure at all n locations
cctttaatctcagcttccgtcagggacccttagttcatgggataatttcttcattttggtntgatgaanaccccatggatcaatgcatataccacaaggtcagtgggagtaaaatatgtttccttggtctatatgtagatgatattttacttgcagcccatgatcggggtttgctacatgaggtgaaataatttctctctaagaattttgacatgaaggatgtgggtgatgcatcttatgtcattgacattaagattcatagagattgatctcgaggtattttgggtctatcataggaaacctatattaacaaaattctagagagatttcgaatgaaagattgttcaccaagtgttgctctcattgtgaanggtgatatgtttaatttgaaccaatgtccanagaatgactttgagagggaacaaatgataaacattc

SEQ ID NO: 209860 - DNA, 463 bp, Glycine max
  unsure (1)..(463): unsure at all n locations
gctttcggactataccttctaccgaacactgttcgtgttttgtctaagccccgattctatgcgggtagcagcaccggcttcgctttcctaactgtactggaggcggntgcggtggctttatcctctatgggtttctggaagtttgacatgaccttcgagatggaagccatttgatcttttaaggccgatagatcggccttcatctgttcctgcacgccctcttcattatccatttttctggatcgagtgttataggggtgccttggtgttttcttagttatgatgaaattcctaaagaaataaacaacggtgagtatgccaccaaaacatgagtatgcaaatggatgatcggaacacttggatccaccgcatgatntttagataacataatgagtccagaacttcttcatttatataaagaacaaaagctntcatctagccaagaatatacacaggtgttaca

SEQ ID NO: 209861 - DNA, 475 bp, Glycine max
tggagagtgatgctgaatgatgagactcaagcctgatgcttctttggttcacatgcattgaatatttttttatgcagactatggaggagaatatggcattgtattggatagagaaatcaaaaatcacatgcatgcatgaccgcttaatcagcttcgcatgtatgaggtgacttccatacagagttactttaataatggtgtataaatttacgtacattgctttttgctaaaaaaattctttaaatagagcaaacttgaatcacactctgcacaaatttgagaccgaagagagtattgtgaaagatgaagaaacagttttgaagtttgattctatagtaagtaaggatgttttatatttatttaattaaaagtttctttcattttgtttatttatgatgtacaaattttttattttgaagaacaaatatttatggtgagaatgaaattgaagctcaaaattaagtgtattaatttt

SEQ ID NO: 209862 - DNA, 356 bp, Glycine max
  unsure (1)..(356): unsure at all n locations
ctctaattaaaatacctaaaaaatgaataagtgaaaaattaacatttttaagcgaaacaaaagttaacttaaacttgaacctaattgtctaaaggcaaaagcaatattntaacgaagtaaatgaaagtttgtttgtgtatttataaataaaacttttcttgacaaacccttcatgaacttaatccaatgtcacaccgacaagtttcatgaaaactttataacggtcccacgtgttgagagactactcctaacactaaggacaaataatagaaagtgtattctctttttatttttggagggggatgggagaaggtattttttcagcttaaaaataaagcctaatcctcggagatact

SEQ ID NO: 209863 - DNA, 313 bp, Glycine max
cagcactttttctaattctgcggcatcgcgggcaattaactcaaacaggtgctgagtcaacggcacaatcatcttttgcgattccgcaaaattaatgaaagcatccgggggaatttctcccgcgacatgatgccggcagcgtatcaatacttccaagcccgttactcgcaaagcttgaagtctgaagttcgacggaaaaaataagaaaagaaacccttaaaatgtccattgaatttacagaataaagaatatatactactgcatctcatccgctttaattacaatattcccggcccataaatatcaatacaaa

SEQ ID NO: 209864 - DNA, 375 bp, Glycine max
  unsure (1)..(375): unsure at all n locations
gcgcgcatgcnagcttcccattggtaagctaattgaggtggtttcttttgaaagtaanncattaacatcatgcgtgaaccatgtttggacgactatttcattgacacacctgagtgtatagaatattggaaagaaaaaagatacagatagcagagtcgtggaaattggatccttgatccagctataacacagtgggtattgccaaaaaaacccacaatatcacagtccaggcagatatattcaaagacacacattaactaagatcttaaaactgcatgtaacaagataagtgtggactaccaaatcatatgcctggacagccaatgctactttntcatcagcaaccctgatactatgattttgctcatcaagcgc

SEQ ID NO: 209865 - DNA, 466 bp, Glycine max
  unsure (1)..(466): unsure at all n locations
tatcgatgatatataaggaattgacacctattttttgttctcttaacaaatatctcatatttatcactatttattattctaatatttttattttttttctccactcttcgtgtgactttgttattcatgaaatatttacctgtgtgacccatgatgagtatattctagttgcatgtaatagcttaattataaaggtaattgtcctacaagaatttagtcttatatgtttaataaattttagtttcacacccattataaaggtagtgttgctgcttccataagattttgtttaaaaaaatgaatgtacaaatctattcaagataaaagagagtaaaattatatcatgtcaccccgagtttcttgaatgtttgaatgtaacttgttcaatgtaatntgtatgcactcttcctgttcttgtttgcatcatcatcatgacatttgtgctgcagatggtagtgatcatcat

SEQ ID NO: 209866 - DNA, 314 bp, Glycine max
tatatatgcttgcgctatgattggctctctcttccttcatgcttgactcactgttgctgcccacatactccacggatttgtctcggcatgctcttcttgcgagccctttggttcttgtcaaggctcttgtggagccgattttttctataactcggacactctttcagacgtctgagtgaaaacttgaattttctttggaagcctgcttttctagtctattttaagctcggacttttcatctcttcgacttgaagtctcctgtgatacttcaattggaagcaattaacctggtcgaacttccccttctgataaca

SEQ ID NO: 209867 - DNA, 398 bp, Glycine max
  unsure (1)..(398): unsure at all n locations
cgacaataaccttttactctgatgtttgattgagncccgtaacatatcgagacgctcgaaattgaatgttgaagctctgagcatattcaaacgacaataactttntactcggatgtctgatcgagtcccgtaatatatcgacacgctcgaaattgaatgttgaagctctgagccaattcaaacgacaataaattattactcggatgtctgatatagtcccgtaatatatcgagacgctcgatattgaatgctgaagctctgagcacattcacacgactataacattctactcggatgtctgattgagtcccgtaatatatcgacacgctcgaaaatgaatgttgaagctctgagcanattcagacgacaataactntctactcggatgtctgattgag

SEQ ID NO: 209868 - DNA, 264 bp, Glycine max
aaggaattttttaaaacagaggattaaattttcattaaaactgggataaaatacatattgtgaaaataaggactaaagtgcatttagctaaaaaatggctattaagcatgctctaaataacaagtgcacaataatattcattcattacaaacaagacaactgaatagttggggggaatacatgccacaaaaatagaccataatttgatataaacaataaactaatgaaactttctgataccagggtaggatgtgttggccactg

SEQ ID NO: 209869 - DNA, 460 bp, Glycine max
  unsure (1)..(460): unsure at all n locations
tactcagcttactatcttcaactttgctgagtcttttttgatggataaattttatccatccgngtcccttatttcttacattaaatttgattatgacgctaataaactcatgacgtcacgcatattgtaaattgatttccttctggatttcatgggtggcaatgctatttaaagtacctgattttccttaactcgatctgaccatttgttgtctagacatttctgataccggaaatactgttattacttaacatactagtatctaatccttcctattctgccactgtcttgcgcggtttaatgaccactatggatatggctggtttgaccattgatgttgcatgcagattatctcggatagataagaataccgagcacaggacagcatggtgaagcatataatagaaaccgaaattgtngaccttgctcgcctattcaagaaaagggtgttcacatattt

SEQ ID NO: 209870 - DNA, 394 bp, Glycine max
  unsure (1)..(394): unsure at all n locations
acacccccttaatggacttcttctatatatgggnagtttttnttctcttctttttttcccactatcatatattagtngctagtgattactaatcttgtgtgcaaaatttatatgtttccttctaatcgtgttttcttttaaaacctactcctaaatctttatttaaaagattcaaatctaattacactcaaattataagtaactaccataatcttggaaaacatataaaatgcttaacttaattattaaacaataattatatattgagatgacaaaaacatatgatatgttcttttctgtcaaacaaagatatttgtggtttcttatttgatacccataatatctttttatttatgaatttatcatatcaacccatccttgcacgaaataatac

SEQ ID NO: 209871 - DNA, 390 bp, Glycine max
  unsure (1)..(390): unsure at all n locations
tgaacatttccactcaataccaaagtagctttttttgcagagtgtcctaangaatgtttggtttggtgcccaatatttcacggtagggtgaaggtactcttactatctatgcccaactatatataaatatatatgattatttaacgacctacttgtaagaaaaagaaacaatattatctttttacctaaaattgtcggtcataataaaaataatcatattttatgtcaaggatcataactccttaaaaaataggtcagaataaaattccctctcttttctagtcaaagtaatggttcgtaaaaaagtaaatggcttgtactctttctatcgacagggcccagctatagggtatcctcttaaggcaatctaaggcactatgaaatatatat

SEQ ID NO: 209872 - DNA, 418 bp, Glycine max
attaaatcttttatttaataaaatttaatagctgcacatatgtctattgcaatataattagtcaaacgaaaatttaagttaaatgatcacatattaaataaaagtataaaaactggatgtatatacagttttattaaaatgttaaacgctaatatatatacaatttttcatgagaaaaaacctatatgcagatttttagctccttaaattacaatagagcttcttcaacttactttcaactcgtagctatatattagtaagtttgagtgtaactaaatagatggaaagacgatgaaaaaaaatatggtatctaatttattatttaggggaagacatatgatgagatacaagcacgacgagaaaattgtgtcattgtcaaaatcttaagagtgagtcagataatttactcctaacaata

SEQ ID NO: 209873 - DNA, 443 bp, Glycine max
ggaactataaaactcaacttgaagctctattcaaggagtgacaaaattcttttacttataacacatgcacagtggcaatgatgcatgggagatcctgaaaaccactcatgatagaacctccaaagtgaagatgtccaaaatgcgactattggcctacaaaattcgaaaatctgaagatgaaggaggaagagtgtattcatgacttccacatgaacattcttgaaattgccaatgcttgcactgctgtgggagaaagaatgacagatgaaaagctggcgagaaagatcctcagatctctgcctaagagatttgacatgataggcactgcaatagatgaggcccaagacatttgcaacatgagagtagatgaactcattggttgccttcaaacctttgaactatgactctcggatagggctgaaaagaaaagcagaacttggcgt

SEQ ID NO: 209874 - DNA, 391 bp, Glycine max
  unsure (1)..(391): unsure at all n locations
cacctgcaaatataacgctctttttttagaaaaccatcaaaaacaagatttatggtntaactntttttcttccaaaccacaaaaaattaaaataataacgccggaaaggcaaaatatgaaaagatacaaccaagttaatatataaagtcaacaaaatgatcaccataacgtgtttgcatcgaaaacgcgtttaataataataaaaacaccgacttcgtatgtttttaccttcaaacaggtagcaccaaaagtgtatatttttgattaagttttctgtctcctcatcaatacaaagagaggaaacggaagcngaaacagctcatatcgaatatatgagaacaacccataagaaagaaacacaaaagtttatgacataatgaagnttcttatg

SEQ ID NO: 209875 - DNA, 241 bp, Glycine max
cttaatatgatcacccctctaggtatataaaatcgcttgattcacgcattataaaaaactacgtatgtctgattttctctccaaaggaaggtacgtaagatccaaatcctcccttttgtcgaccctcaaaaataataagaaataaagtaatgtaacacgatttccacaaatctaaaaaatatgctgttgaccttcgagacatacgtgagaagtgcttataccttcctcatgcgtatataca

SEQ ID NO: 209876 - DNA, 393 bp, Glycine max
  unsure (1)..(393): unsure at all n locations
agaagatntaatcaagattcaagattcaagaatcttgaatcaagagaagacttaatcaagataagtttgaaaagggtttttcaaaaacctagtagcacatggatttttttcaaaacatgtttaccaaagagtttctactctctggtaatcgattaccagattgtttgtatcgaataccagtggcaaaatgatattgaaaaagttgtcaaatgaatttacaacgttccaattgatttcaaataagctgtaatcgattacaatggtttggtaatcgattactagtgccctttgacattgagattcaaatcaaatgtgaagagaacattctttacataataccttgtgtatcgatttactgattgggatacataccaggattgttttaataaacaa

SEQ ID NO: 209877 - DNA, 470 bp, Glycine max
tcaagctgcatgtccaatttcgagtgatgaagctaatttgtgtgaatagcccaagggacctgatctaaaacataaaattcaacaacaattcataaacatcaggtattacttcaaactagtggaagtggacctagctctgcctaactaaatattatgcattaataacctgcagggctttggtgtggcttattctcttttaagcatgcatcattcttccaacaaatatgtagaaaagacaattgattactaatgattcgtagtgatgcttacaaaaccattttttgtggaacgaatcaaagtatatataggctggattctatctaaaatcccgtcattgatattgttaatactgcagtatggcttctcttatcatcttatgaggtgtgaatcttagtctcattgagtttccacatctaatctgacattacttatgaaactaaatgacactcctttacttgctctcattatat

SEQ ID NO: 209878 - DNA, 386 bp, Glycine max
  unsure (1)..(386): unsure at all n locations
agaagttattaatatgtatcttggtattattctaataaactatatattgatggatatattaactaaagctaaatctattataaggaatcatcttctcccaacacaactaattaagttataaatttcttactatagagatgaccatatttatatctaatagtatctcacataagattgttttttaaagaggaaaaaaaatattggtgcatctttatcatgctttattttttattcacaatataaacttcacgtatggtactcttcatttctagagtcacnattagacctcggcaaatgccaggttttcatttaagatttacaaatttggactttgacccatatatagctaatacagttttgagtgtacgtgagttgtaacatgttat

SEQ ID NO: 209879 - DNA, 352 bp, Glycine max
aatcacctcgtacagtgcacttgttgtctctgaatttataaggtgcccaccctctcttaatggggcaatcatggtaaacccatgggacattaatgctgtatccgatgcactgaatttggccatcacaatgcccagtggagagaaacaagtgcggcatgagaaacactatcgatatgtaacccccatgacgtaacttactgggccaaaagatttgtgcaagatcttgaatattcatgcaaggatcactatagtaaaaatcgctgggggattggctttggccttaatttaagagatatgaacctttcctctactttcaagaagcataacaaagaccatgcttgttctgcatatg

SEQ ID NO: 209880 - DNA, 439 bp, Glycine max
  unsure (1)..(439): unsure at all n locations
agcttctccatccatggcttattccctagtttgttgcgcctcctctcacctcttctcctttatcttctactgcaactccatggtggaaaatcactgttgaaggacctcattgaagcttaaagatccagcctccatagaagcttctcaagaaagcttccatcaagtggtaatcagagaacaagagcttcaagtaggtgttccttaaacctccattaattttcaactttaccttctcctccattggtgtttcttcatttttctccatgtatctcctcaaatgtcttgtgctaaatggttttaatatgattctttagaatcttcactggataaacttgctatagaagctagatttgatttctatggttcaaatntcttgttcttggtcttgaaccggtaattgtggtgagttaaagtcctctgagtttttcttgctattttt

SEQ ID NO: 209881 - DNA, 296 bp, Glycine max
ctttttttatataaccacacagaacaatatgacacctccaacgacaagtacaatcccaggtggaggaatcatcccaaccctagataggggaggacctcacaacagcagcaacaaccatagacctattttcataatgcgcgatggcccaagccaacacaaatgttcctgcaccaatccagctacaacacacaacaacatgatgcagcaacagccccagaaacaacatatagttgaagctcctccggaacactcccttgaagaacctgggaagcaaatgaatatgcaaaacatgcagt

SEQ ID NO: 209882 - DNA, 220 bp, Glycine max
catttggggttcatttttacggatttatttactccacataaagtattggcgttgaattcccccaacatccacttttatttcgagcgtgtcgttatttaccggacctagtgctacatcccatttaaaagttattgtcgtttggattatctcccacaatatacattcaatctcttacgtcctgatataataccggactcaatctcacatcccatgttaaagt

SEQ ID NO: 209883 - DNA, 387 bp, Glycine max
  unsure (1)..(387): unsure at all n locations
tgtcccattccttaacaagagcaacaatgctgtcccatggttgtacgcccctgataagccatacgaatagaaggacgatgcagtcgatggtggcctatgttatgcttaaattactaacatcaccggcgtaagcgatgtgacccgtattgggcgtgtcttcgtggcacctgacccgtgtggcgtccctaaattaatgactggtttaatagtaataatgtatataacaaanaccatggtaaattttttttcttctttttctttttcatttctttctcttttcaccataactaggtttagaaggaaaatcctcactacagagtcctgaatggccagttcacaactctattcggagtcatttctttcttaccgctcataatctctaaacta

SEQ ID NO: 209884 - DNA, 344 bp, Glycine max
  unsure (1)..(344): unsure at all n locations
atgatattaattttttaaattatatataanaacctaaaccgcaagaatagagaaaataccaaatccatatctctctaaatttctccttactttatttcatcaattcatattaattagaanaagtactcaatttatagggttcacgctcaacacaatagcatatcaatttcacaacaattgatctgtcaaacatatataattcactgtaataattataaggataaaatgagaattgcaaaacaccccaacacccattccaattgatatctctaaggatccctacacatgttctcactaattcccaattgtgaataactcatcccttacctctaagcgggctcacg

SEQ ID NO: 209885 - DNA, 287 bp, Glycine max
  unsure (1)..(287): unsure at all n locations
accttatatggaancaagactattgtgattttaacgaaagaaaacggagaaaactaagcatagccaaaataagcttagccacatcattcgtgtaaagagtacgaatttctttgtgtaccataaagcattttccacaacaaaaataatagatgattgatattaaaatatttaaaaattcaaattaaaatccaataaccattaaatctctaagagaatcaccacagaatcatgtgctacaatatctcaattatcatttacccatcgccatcaccataaatgttaccacc

SEQ ID NO: 209886 - DNA, 374 bp, Glycine max
ctacctattgtggaatattatatcggttacatacatgatgagctaatggtatggcacggctatggcacgagaataataaaaataatgtttctgtccttaacgtaaactatgtgaagccccctcctaatcccacttaaagaatccgaatgaagccacacacggagggacaaaatgaaatattaatgtacaaatgcactcgctgcgccaaactattgtcagcgtcactcacgtagccaccttttatatatactaccatcttctctttggcattcttcgattcgcaagcatctgatgacaatcaatgtgacattatatccctatggctatgggaactcaagaatgtatctctttcaatatcagacatgtattatatt

SEQ ID NO: 209887 - DNA, 360 bp, Glycine max
  unsure (1)..(360): unsure at all n locations
acctcagttcacagtttcaacacttaacccagtgttataaagatcatggttttttctcgtggagtgtaaacagttgtgcatacaattaatcattctggaaatcaattcttgattgaaagncctaaacatagaatttaagaagcttctatattctatgacattggttgaaaatacctttatagctggatctttctctttgttaatggacaagatatggatattgccctctcattaaagaagtctttattgaatttcatggatccataactattgatctcaatgctgctgtatgtgtagaccttaatgcatgggaatatggatgcaacttaaaactctggatggaacatttgttagatacca

SEQ ID NO: 209888 - DNA, 471 bp, Glycine max
  unsure (1)..(471): unsure at all n locations
tcttaagtcacctgaggcatgcaccttatcatatcgatacgctcgaaattaattatcgtaactctctggaaantcaaatagtcataacttttcacacggatgtccgattcgggcgcataatatgtcgagaggcttgaaattgaacaacgcaagctcttgagaaattagactggtattacttttcacacggaagctctcgtgaaattcatatggncataacttttcacactgaggtccgattcaggcttataatatatcgatacactcgaaattaaacactcaaaactctctataaattcaaatggtcataacttttcacacggatgtccgatttgagcgcataatatgtcgagaggctcgtaattgaacaacgggagctcttgagaaattcaatggtcataacttttcacacggatgtccgattcaagcttataatatatcgatacgcttctaaattaacatcggaaactc

SEQ ID NO: 209889 - DNA, 332 bp, Glycine max
  unsure (1)..(332): unsure at all n locations
agtcgacctgcattgatgcatttctagcccaatggacttaccttgactttattctttgataccctttgagcctggtacccttttcttgttttgaagctcactaccagccttaagtgaaaaaccatgatatcaccatatccttaaagaaatttggagctttggaattggtttgggaataagagtgggggtnttttgttcattggataacaagttatgccggccatgcctcatgatatattttgagccctacctgaggtacatcgcataattgttaaatgttggacatgccgaatatgatggtgcttttcaaaggaattaccataaaatatttt

SEQ ID NO: 209890 - DNA, 455 bp, Glycine max
  unsure (1)..(455): unsure at all n locations
acgctttaactgaannngaatctttccaatttttnttcaaangagggaatcgattacaatatattggtaatcgattaccagtgtatttgaacgttgaaattcaaattcaattgtgaagagtcacatcttttcataaaatgctttgtgtaatcgattacatggntttggtaatcgattaccagtgacaagttttgaataaaaatcaagagatgtaattcttctaatggttgttaggtttttctcaaggttataactcttccaatggttttcttaaccagacatgaagagtctataanagcaagaccttgacttgcatttcaataacacttacaactnttttcatatattcttttacaacactttgaatctctntgaacatctttgttgaacttcttttcttcttcctttgccaaaagctctctgagttttctgatttccacactttgctctttcac

SEQ ID NO: 209891 - DNA, 336 bp, Glycine max
  unsure (1)..(336): unsure at all n locations
gagagcaagaaatgaagatccaatggttgatacatgggcggagatgaaaaggatcatgacgaagcggtatgtgccggctaattactcaagggatttgaaattcaagctccaaaaactaacccaaggcaacaagggggttgaggagtatttcaaggaaatggatgtgctcatgattcaagcaaagaatgaagaagatgaagaagtaactatggctcgatttcttaatggtttgactaatgatattcgtgatattgttgagctgcacgagttttgtgaaatggatgatttgcttcacanagcaatccaagtagagcaacaattataaaggaaaggagt

SEQ ID NO: 209892 - DNA, 373 bp, Glycine max
  unsure (1)..(373): unsure at all n locations
agcttgtaatcgannaccagatgacattnttataanattattnccaagagtcacaacttttcatatggcgtttacatggccatcaaaggtctatttatatgtgacttggaacacaaatntgctcanaatttttcagaacaaaaaggttttatcctctcaaaaagcaaaatcttcttatcctcttaagattccttggccaatacacttgcaattcaataaggatttatttgagtgctcaaattgttcaatctatctctttcaagagagatttcttcttctcttcactctaattctcaaaaagggattaagagaccgacggtctcttgttgtaaagaaatctgaacacaaaggaaggattgtccttgtgtggttc

SEQ ID NO: 209893 - DNA, 434 bp, Glycine max
ctaacttacatagatttataatgatccactaaccttttattttaagaacctaattccattaacctagggaattaaaagaacttaatggctgagtgtaattgaaattgtggcaaccaaaagtcacccccaacagccatcaagtcagccaccatttggtctcctaaaaagcttatgcctatgttgccaattaagcccttattacaacttgaactaaaccaaactaaagcccttttagttgattgacccaaaacatatttttgatcagccaactttacaaggattgggccattatttagaaaaactaaacactctaaatatgagacaaagtggtgccatttagtcctcctccattgtgccatgataaactcacaaccttggactttctcttgaaacttggctgattcaaaatatggaaacacttgtgaaaacttctg

SEQ ID NO: 209894 - DNA, 392 bp, Glycine max
  unsure (1)..(392): unsure at all n locations
tcttttcttgctcgctctctttttgctcctttttttccatgagatattttgctacctaaacatacgtatatttttgtgaggtattttgctatatacatgcgtgtccaaggtatcttgctacctaaacatacatatatatgttttgtgagatatttttgctatatacatgcatatccaaggtatcttgctacctaaacatacatatatatatgttgtgaagtatttttcctacatacatgcatatccaaggtatctntctacctaaacatacatatatattgtgtgaggtatgactaccttccgagcttgtgcttgttctatttaaattcctacgatcatgagcaactatgtgtgtcctgctatgacttgagaaacataggtgatcaaataac

SEQ ID NO: 209895 - DNA, 433 bp, Glycine max
cttgacatcatccaaatcttcatgattaacattcctaccctctttgatgatgacaaccacctgtgtgttttgagcaacaacaaagaaaaaatatctaattgcatatagtttactccccctttggtttgcaataattgcctatatgagacatttgaaaattcatatttgtcatatgtaaacaaattgtctcataaacagtagataatttgtcttactattttatctgtgtatctttctctgccgcccttgtcaacatcaaaaacaaatcatgaattgagaggagaaagatgttaccacttgtcgcaatgtatgagaatcaagtgataccaaaaggcattaatacaatcattcaatattaatcaaacaaaaacaagtacaataacacatcaatcaaacacaatcaatcatcaaatatgtcatatcaaattaatta

SEQ ID NO: 209896 - DNA, 417 bp, Glycine max
  unsure (1)..(417): unsure at all n locations
gattaccatatatgtgttatcgattacacagggcaaatcttgaattaaaaatttaatagctgttggtaatcagttctggccactggtaatccattacatcctctggtaatcgattaccacagagtatatctcttggtaaaaacttttaacttaatgttcttggccaaaccttttgctacttcaattggaattcccttcctatttaatataccctgtctaagactctatagactgtcttgatcatccatcttgaatatctntaattgctttgtcttgaataaagctttagacgcatgtgatcttttggcatcatcaaaacatctgcttgatcctttgtctacaatctccccctttttgatgatgacaatccctgaaatcaagacacactatatacaagatgatagcacgttcacacac

SEQ ID NO: 209897 - DNA, 407 bp, Glycine max
acgttgctagacccaaatacacaaatcgtcaaacagatatgggattgcgcttagcgcggaaagatgcgccttgtgcgactactctattggcaacagtgacttaatgagcaagctcgctaagcccaaatccaacaattggaaaaaccgggagataattgcgctctaggtgatacggcatgcctaacgcatagcaaaacacaaaatatctatttgtctgagaacaacacacttgcttagtgtatatacacgcttagcgaggtcatacgcaagtgaattctcaatcagagaagatgaacgcgcttagaaggacatggccacgcttagcgagttcatccggaaaatcagatattccacaaataatgatgaactcgcttagcgcacaggcacgcttatcgcgctaatcgcga

SEQ ID NO: 209898 - DNA, 275 bp, Glycine max
  unsure (1)..(275): unsure at all n locations
ttcacaanttgcagnaaaagatgaagcagaatgatcattttcaggattaatatgctgggcacaatgctcaatctttatacgctttatagatgggtgcaagtcctctgaagtttctacaactaagggaggcttcgagatcaatctangcgatgcacctacaatattgtaaggttaaaagatccatcactgcagttggcagcttgattaacttctggccgaattgaagcttgagtaaatgacgcgatctttctacaaaacacaaacaggaacatgat

SEQ ID NO: 209899 - DNA, 378 bp, Glycine max
cacatgtggtactatgtggcggtcgggcgatggtgcacaacaatgtttccacatccacaatgcgcgcataaacccaccatccccttgttgccacctacaactgaactcacgtactcccacgtatcccatatgctcgtttctctcaacaccgggtccccatcaatcctcccaagcttccccaacatcatagtaatacaacattcacacagcacaagctatcacagccaagcaaaacagggcaaatgcagaaaactctgctcaaaacaccaaccaaaatcacagcttttctcacttatagaccccagtaacaattccttcgatccaattcgttaaccggtggatcgaatcacaaaatttactggaagtctctagtgcata

SEQ ID NO: 209900 - DNA, 442 bp, Glycine max
  unsure (1)..(442): unsure at all n locations
tgtaagacacatnttcttcaatctttgtgattcttgactccatttcattgaagcgcatattcatttgcaattccaaagtgtcaaacctttcaccaacaaaggtttgaagaccatcaaacctatccataatcttcgaaagaaaagatgaatcttctccctcttgtccttcttcaccaacatttctagcacccttcttcacccaagagccatcatgctcctttatataaccaaaggatgctatgactgaagcgcctataaagaatgatctcttgattggaacataaggttcanaatcaagaagggatgtgaagtgttgatggaaaagggtaacaagatgaaggataggcaatggggcattcaatcgcaatgccttatgcatgcgatatctaacagggtgtgcgcaatcaatttgtaacctttatgnanggccacatgacaatga

SEQ ID NO: 209901 - DNA, 219 bp, Glycine max
tgcagcagagcttgacatctggtatctctcacaaacagaaatgaatatggttacagacactttgaggggtcttgcttcctcctgcccatgggcccaaaatgctccaagatccgttcctcccttttatcctttgctctactggtccatacccgtttccacgtatgcaaacgatagacgggaaagtagatggggaaaggtgtatgttagaaaatacccttg

SEQ ID NO: 209902 - DNA, 377 bp, Glycine max
  unsure (1)..(377): unsure at all n locations
tatcaaattatgtgccagccctatgtattaacaattggacccatttgatactcgaaaggtccatcttntaaaagaactcgccattaacattntacagttgcttaattcttttgtcttcttccttgcaatttcctccttttttcacaatatttctcccactcattggtaatcaaagcttagggtgagttccaactctccttttcttgttccttttgcatcgaatcttctaaaatattaagctctataattgcaaaattatttattctgtataccaaaaataaaaactatctgaaaattattatgtttgcttaacttttatagaaaaatcaatcatcggctagaaagttccccacacaatttcgattataactttttca

SEQ ID NO: 209903 - DNA, 451 bp, Glycine max
  unsure (1)..(451): unsure at all n locations
catttggtctgtcttgactacttcaccaaatgggttgaagcggcttcatacacaagtgtgactaggagtgtggtggttaggttcatcaagaaaaagataatttgctggtatggtttgcctaagaagattatcaccgataatgccaccaatctgaacaataaaatgacgaaggaaatgtgtgaggatttcaagatccagcaccataattatatgccttacaggcccaaaatgaatggngcagttgaggctgctaataagaacatcaagaaaatagttcagaagatgatcgtgtcatacaaggattggcacaagatgctccctttngcactacatggttatcgaacctcgatactcacatcaactggngcaaccccgttctctttggtgtatgggatggaggttgtgcttccatttgaagtagaggttccttttgtgaaattctagccgagta

SEQ ID NO: 209904 - DNA, 390 bp, Glycine max
  unsure (1)..(390): unsure at all n locations
taagcctgaattattactcatactctctctccctatatatttctttgtcacattccacctaacgtacccgattaaatccttagtttttcatcttctttagatcaataaccttatttatatcctcttaaaacattctgcttctcctttggaataccactgatcaccttccataaactcaactgccccagtcaaatcactcattgtagaaagcaaagcttcatggtgaatcaaaggtgattgaaatgtgttttgatgataacaatgatgataacaaaagatgatgacaaatgtgatgacaaatagctcatagatcaatcaaagaacaactcangtgaatcaagaacaattcaagagttcaagataagaatcaagaagaattcaagacttaag

SEQ ID NO: 209905 - DNA, 51 bp, Glycine max
  unsure (1)..(51): unsure at all n locations
gaaaacttatgctattcanttttttcattcccttctccctttgccaaaaag

SEQ ID NO: 209906 - DNA, 382 bp, Glycine max
ggacactataatactcaacttaacctcattgtctctcacagactatagaattttgatctctttcaatccttgggtacggactctcaggcacttatgatatccgacgatgatcccattactgcttaccctaagctctatatgctttcttcacgcacgatgccatgccttacgaactacttggagtaccctgacgttgtggtcactgaaaccccgtgcgatgaaaggcgtgatgctttcgactgatggcactgctgtcatggggtactcaagctagcttatggcgaagacggaattataattaatacaaccccttgttccatgaaaggaacatttggacatacttcgcatgaacatagaatgctgattcttccttcctttatcg

SEQ ID NO: 209907 - DNA, 397 bp, Glycine max
  unsure (1)..(397): unsure at all n locations
ggatccttatgtcacctgccgctgcagctttaactgaattngaaacgttccaattgtttttcaaatggtgtaatcgattacaatatattggtaatcgattaccagtgtatttgaacgttgaaattcaaattcaattgtgaagagtcacatcttttcataaaatgctttgtgtaatcgattacatggttttggtaatcgattaccagtgacaagttttgaataaaaatcaagagatgtaattcttctaatggttgttaggtttttctcaaggttataactcttccaatggttttcttaaccagacatgaagagtctataanagcaagaccttgacttgcatttcaataacacttacaacttttttcatatattcttttacaaccttngaatctctttg

SEQ ID NO: 209908 - DNA, 337 bp, Glycine max
agagagcatgaaatgaagagccaatggttgatacatgggcggagatgaaaaggatcatgacgaagcggtatgtgccggctagttactcaagggatttgaaattcaagctccaaaaactaacccaaggcaacaagggggttgaggagtatttcaaggaaatggatgtgctcatgattcaagcaaagattgaagaagatgaggaggtaactatggctcgatttcttaatggtttgactaatgatattcgtgatattgttgagctgcacgagtttgttgaaatggatgatttgcttcacaaagcaatccaagtagagcaacaattaaaaaggaaaggagt

SEQ ID NO: 209909 - DNA, 437 bp, Glycine max
  unsure (1)..(437): unsure at all n locations
gcttgagctcactggtgctgttccacantatttcacgaaattngncatggtcatgctcttccttgcgagccctcttggtttcttggtcaagggctcttgcagtaactgcattttcttctcgtaacccggcacactctccccgtacgtttgtagcgaccaacttgaatttttctttggcaagtcttgcttttcctagttctatctttagagctcggacttcttcatcctctttcggagcttcgaagttctcttcgttgataatctttaactaggagagccaatctaaccctcgtgtacgaactttcaaccattcatgataaccaccgatgatgccattacgaatgcccctaaattctttatctttccttaacgggctntcccacgccttatggacgtcttgtataatcttgaaactttgcgcaccganatctctcaca

SEQ ID NO: 209910 - DNA, 307 bp, Glycine max
agatgctttactcgttccaaccccttactatcctgggtaagtaattaacaacaagctctttcatttaattagaaatactaactgacactttcaataatgattggaatttatccgacatcaccatttcttatagatgtcgttggctctcatctaacaatcctcacttcttatatatattaaaagagaaacgaaatctattaaaatgatctttaaaaatcacaaaacgatgagagagaaagtgcatcttatttactttatagaaaaaaaaaagacatcatggatgatacaagaaagtatacaaaaccac

SEQ ID NO: 209911 - DNA, 366 bp, Glycine max
atgcatccggtgcttggtggcagggagaagcattctatcctttctatcccgctcttatctggaagacccattcgcaccggaccatagtcaccgctcttgggaagatgaaaagaaacttccacgcgcagtatcatggaatgaggcgccagaattgacgatcctagaactatcatcacaagcaatggttacgatattacctccaccaacgagacataacaaatcatctttcgtaactatgacataatattcatctcttctgcttctttgatgtgatgacttggtctggcttaacgttactggccttgtgatctctcctgatagatcgacatgttattgtcatggggcccatccttccatagtaataac

SEQ ID NO: 209912 - DNA, 394 bp, Glycine max
  unsure (1)..(394): unsure at all n locations
agctntccctctttgaacaaatacccctcattctaatagaatccatcttggggccttttcccacaactctcgtaaatgggagagaaatgttcatctaaagtatacaagtccctaatattatcaaatcctaaaatttgagctcctagggagcaaaacaatgtgtgtctcctagagagggcatcagctaccacatttgtttttccctttttgtatttgataacatatggaaattgctctaggtactctacccattttgcatgcctcttgtttaacttggcttgccctctaatgtacttaagtgattgatgatcactatgaatgacaaattccttggaaacaaggtaatgttctcaaagttggagggctctgattaaagcataaagctctntatcat

SEQ ID NO: 209913 - DNA, 403 bp, Glycine max
agcttacggtaaaatctgagacctatccatggtttaagtctccacagaggccattgcctcccttgttcagtattattgatcagcacggtgagatgcttcacttttgtggacttccagctatcacccatggtggaagaatatgaaaaaatcctaagatgtcctctatggggaaggagaccatacctcttataatattccaaatctcggcgcatgaattataccacataaagcaagtcgaaaatggggtggttggaataccgagaaaatgtgtggaggcgaaaacaataatcttggcatgtagatgcgaatatgccccgttcatagacattctcgcactgtggatctttcgaggagtcctctttccacatgtggatgggttggtggacctatcatagaccgatgc

SEQ ID NO: 209914 - DNA, 394 bp, Glycine max
  unsure (1)..(394): unsure at all n locations
ttacccagaatgtcatacaaaggtgatttactttgtgaagcatgtcaagagaagaaacaaattaaaacctctttcttcagcaanaactctatttccacctaaagaccacttgaattattacatatcaatttgtttgggccaactaaaacaacctctgtcagtccaaagagatatagtctggtagtagtggatgactactcaagatggacatgggttatgttccttgctcacaagaataattccttagagatcttctttaaattctataaaaggattcaaaatgaaaagggagtatgccttacttcaataagaagtgatcatggtggagagtttgaaaatgagaactttcatctattttgtgaagaaaatggaattccttataacttctctactg

SEQ ID NO: 209915 - DNA, 465 bp, Glycine max
ctcagtgtgattatcagagatcttacttttatttgcgcctttcaccggtggcttaacttatggttgctcattaactctactctttaattgtcctggttatcaaattaattgatatatgatgattgcaaaaaatttccaattcatggaaactgttagccagttgctttctaattttcctagcttttattttccctattgattgtatgagaatatattattgaccaacatagctttgtgggaatttcatcatgaaagcttgaagttataaacaatagttgttgatgaaaaccatgacaagtcaactatgtggaacttattcatcatatagttccttatgaaatatattttattcgaaaggtgtcaaagcgaacatctgaatgctcagaccatcttattggtcatcttctatttctactataacctcagacagcaccatcttttatagtatctgagataggtatctct

SEQ ID NO: 209916 - DNA, 313 bp, Glycine max
gagggggagcaccaaattgaacgaagaaaaagggagagaaattgaactttgaattgtgtctcacaagactctcattcatcaaaggtacaaaaagtggtacacatgcttctatttataaaataggtaacttccttgagaagctttcttggagaaaactccttgagaagcttctttgagaaaacttccttgagaagctagagcttagctacacacacccctctcataactaagctcacctccttgagaagcttccttaagaagattcctaaagaagctagagcttagctacacatacctctctaatagtaagctc

SEQ ID NO: 209917 - DNA, 396 bp, Glycine max
  unsure (1)..(396): unsure at all n locations
atataacacctccagtctgggccaaagtggtaagatctttccttatgagcttccacggtagaccctcaatatttagtacaatatccctcccaaagatacacagccgggcttgaagctctggaggatcaagcctcagtctagcaaaccctggagtaagagggcaagctctccccttgcttcacgaccgctgggtctccaaataggtggtgagggaatcaacatcaaatttatcatgtgcacctcaaccctaacttgtcttgttctttgtcctcaaggacatatatggttgcatagaattcttngacaattgccacatcaatgcttccctcagtcaagttcgtcaacttgttatgccatctcctttaatcattctctctggaatcataaactcagtga

SEQ ID NO: 209918 - DNA, 414 bp, Glycine max
  unsure (1)..(414): unsure at all n locations
catgcaccttacgcccttttcattgcctggctgaatgatcttggtctttatggagtgcatatcagggttaaaggtccttattctgctcagtctcaccctgccacaattcttagaacttgcaaatgcaggattaattnttacccaaactctatggaagactatggttgacagccacaaataaaaaaatcccaggccatcgtacagaaacgtgtgacacagtgcgtacaaacaaaatcctttctaatcaagccatggaaaatatcccaaaagccaccctctcataataatagccactcattcattcatggaatactattcaaaccgacaatcctaacatgctatttgctactgttattagtaagctccattcataaaatagcttgttaagttttacacgtttcatcagtacattaa

SEQ ID NO: 209919 - DNA, 402 bp, Glycine max
tcttttctttaaagcaaactttaattagatacatgtttcgaaattctcttaaaaaataaagcaaattggtaatttcttaatagaacattgaaagggaaaaaaatttaagttttaaagaaaggtagtaattaaacttttagaaaaaactattggatgacttagaaattatacgtcaattgttaatacatgattcaaaaatttgatataccattggttgctattataaatgaattaaattccatttgtctataaatttaaagttttgtatttctatcggtaaatatgaaaaatttattaaaagacaaatatttatttataatttcttgttataatgtttctaattaacaagatattgatctcgataattcatatttttatccatcgattgtctaggtaatcata

SEQ ID NO: 209920 - DNA, 261 bp, Glycine max
  unsure (1)..(261): unsure at all n locations
tttatgtcaatgccttttattcataacctactgaaatataggtttttcatcgatgctcatttcaaactataagtttctacacaaaaacaaatctatagaaaactccgattatatgaagacaagcttttacgtaaatcnttttttatatcacagtccaaatcatgatcgtggatcgctcttttaaacatatccgaaacaaagaacttcctaatttctcttctgagcatcgtctcaattgtctctgatatctcgtctctcttt

SEQ ID NO: 209921 - DNA, 462 bp, Glycine max
  unsure (1)..(462): unsure at all n locations
catgcactcatctctctcttgatgggagggatagtgttgtgaaagtcttattaaccatanatanaccctggatgagtgtgttgctcttgatgtgtaaacacatgactacttaactcccttcttttgtgtgtagtcatgaaagtggatgttgaagtttgtgatttaataatacatcattaatgacagtttcattctaatgccttatagttcgatcacctgtatcatgatatatntcatcgacccatttctttgggtcgcatactgaagtcaagtaatttgatattacttgtatgtcctaccataattcattccctatgttatgtgtatgtgctaaacaatctgccctctgatgattntatcacaatcagacgattattgatgtgacactctctacccctcacatatatattaatanaggagnagaacntctcaatattaattaaaaatatttttaaaacattt

SEQ ID NO: 209922 - DNA, 198 bp, Glycine max
acccaaaatgaactccaaggtcacacaaaaaacaaacaagtgcaccgttcttttgataacctaactgtaagaaaaagccccaatcatcttgggtcaaaaaagaaagttctactttgccatttgagcaattactcatacctaaaccttgtggatatctgggcacactacatcagttcagaaggtgctactacgaacatt

SEQ ID NO: 209923 - DNA, 359 bp, Glycine max
taatcatcaatcactcattagttaatcgctaaaacaaggagcaaccatcaactatatcacattactgcgaggcactcaccgttttgcacacgaactcttccctgatatctttctcagttataatcgcagaggagaagccaagcacaacaacgggaatggactcttgcgtaaccttaaccaccttcccttctgaaaccaacaaaacaacaatcacgaacactattaattgaattaaccagaggcattatgttgacaaaacaagaaagggagagagagagaagaagaagaagaacagaaagagttcctaagagcatgttttgtgtgggagaaaagagcaacagattgaccttgagtttgac

SEQ ID NO: 209924 - DNA, 331 bp, Glycine max
  unsure (1)..(331): unsure at all n locations
ttaacattttggtntccaaaagaaatggtccccatatatgaacttttgtcacataaactaaaagttccacctgttatatgtgagaactttatgccttttagttttcattaagctttatatataattcatgtaagttcgcgttcaaatcatatatggattaaacactagatcgtgacccaacagaaaagggtatcttagacaaatatcattggcattgcattgacaacaaacacgcacatatggtgattggcaagtgacaagtgacactccttttatatgattgtgggttatatatgtacatgataaagaatatttttggattaaattccta

SEQ ID NO: 209925 - DNA, 438 bp, Glycine max
  unsure (1)..(438): unsure at all n locations
tatggtttacatgttttcaccctttatatgtagnggctaaagtgtccacatttgttttgcactcttaaagtcatgaactttggtatacttcctttttgagggcacataacagagcattgcatgatntggagtttagtaggagtctttgcttgtgagcgtttgtccatgagcttttgggcacttcatttagtatttcattaattggaatgtggtttccattctccattacatcccaaaggtcaatatgaatagactcaaaataagctatcatgtgttccttccagtagtcataattttctcttctaagtagtggaagcttattggtggagtactcttcttccatatctttcatttatcaagatctctctttgtattcaatagaattcttaacnccagaggcatagctcttatgccaactgaaatacaataagtcacact

SEQ ID NO: 209926 - DNA, 399 bp, Glycine max
cattcaaatgtgttaattaacattgattactgactcgatggataaaggcctttattgcttcctattgtattggaacattctgacatagctatgttgatcccttcctttccttcatgttgcatgtcataactttcaagaccagtaatcctatactatatctgcaggtatgaacaactgatagaccataccaaggcccttaacagacgtacttacatgttggtcaatcaacttctggaacacacacaagctcatactgcccggtaactgtgtaggtagatcgatgaaagtaattgttttatctttcctgatgcatcaaattagatttcggctatgatagatattttggatatacaattacattcaaatttatgggttgataccgcatggagaaattcttct

SEQ ID NO: 209927 - DNA, 404 bp, Glycine max
  unsure (1)..(404): unsure at all n locations
ttaggatccaatttgagaaaatatggatgtgggcaagatggatttcgaaatctgccctattatgcagaanaatgttgttgaattgtgcagcaaaattttgatgtgtgcagaataatgcttgtgcattgttggttatgggaaaggtattacatattgggttctaaacattttctagccgatcccaacggtgaaaatgtagatctatgtactaggaacctccagtaaaattttcgagtcgatccaacggttaacgaatcagaacaaagagaatgttactggggtatttgagtatggaaaagtgtgatacttgaatgtgtttcgggcagagttttctgcctctactctgttttcttgaattagggtaggtcataatatcttggaaattgattttcttggatattgtg

SEQ ID NO: 209928 - DNA, 408 bp, Glycine max
tatgctgaaatatttaaatagacctactaatcttttttttaataatcacagcagaacaattatgacctgtcaagaaacagatacaaccctggatggttgaatcaccctctcctcagatggtccagccctcatctactacaacatcagcctgctccttcctttcaaaatgctgcttggccaagcagaccatacattccttcaccaatccaacaacagcaacaaccccagaaacagtcatcagttgatgcccctccacaaccttccctcgaagaacttgtgaggcaaatgactatgcagaacatgcatgttcagcaagagaccagagcctccattcagagcttaaccaatcagatgggacaattagctacccaattgaatcaacaacaagtactataattctgacaagct

SEQ ID NO: 209929 - DNA, 436 bp, Glycine max
  unsure (1)..(436): unsure at all n locations
caaaacactccttgtagatattttttatccacagctaccacagnggtatatctgttagatactgtgggatacttggtgatttatgcccaaaggtcactttaaatggggaaacaccagtagctgaatgattgaagtgtcgtatgaccatttggcccacatcacgaactcgccctatgaagttgagttggtgtgcacggatgctctcaagtactgttcaatgactcttttcaagacttcaatctgtccatctgattggggtggtaagtagaacttatccgcaactttattccacttaaatgaaacatcgtttgccagagtctgctaacatataaaaaggactctatcttatacaagactctgaggcattccatgatacttccaaacaatntccatgaagagtaatgtattagtaaaagctgtgtagttgattacaaca

SEQ ID NO: 209930 - DNA, 205 bp, Glycine max
  unsure (1)..(205): unsure at all n locations
tcaatggggcanaacacaccaaatgattatgatgatggatggctaaattctcacaaggtaaactcatcactttcaaattgagctttcaaaactatcatgacatgtagaggagaatcaaagatttcacgtcacaaaatgtcaaaaactttattttcaaaacacatacccatttcttgaacatatcctataattaaagaaaaacatg

SEQ ID NO: 209931 - DNA, 359 bp, Glycine max
  unsure (1)..(359): unsure at all n locations
ctttgattgtcttgctttgacaagttaataagtctagggcaaatggagagaatgagaaggatgaaggaaaccatgttcgggcttgcattcctacatggccaaatttccctcctgctcaacaatgtcattattcagccgatgtcagcccttctcattacccaccacccattcatccacatagaccatcactaagtcagccacaaagcctgcctaccacacaaccaatgccatacaccacctttatcacaaaccattacaccaaccaaggaatgaatgttacagcaaaatagcctgtataattcaccccaattctggtgtcatatgctgactngctcccatatctacttgataattcaatg

SEQ ID NO: 209932 - DNA, 302 bp, Glycine max
  unsure (1)..(302): unsure at all n locations
cttggngctcantatatcccaaaaacaaatccctcttattactagntattttttattctntagttcctgaatgtacaaccttcaaattgttgctcgttcccctctttgttttctgcaaaaaagaaaatcaatatcaaagaaaacatggatgaagtcctaaagatgccatgtacatgtgtatttcaagaagatatagtatttatattccatcaagcatacatngactgttgattacatgtaatagactgtttataacatggttgccccanatcacaattaaaaagcacaactaccaatctttc

SEQ ID NO: 209933 - DNA, 362 bp, Glycine max
  unsure (1)..(362): unsure at all n locations
aaaaaaaaattgattcctgtattacggtacatagatactaagcttatagtgcggttcggagacaagggcaagcgntcgctatattctaagatgatattccgagtaccttggatttggtacgaacatgccctcctgatttccaactgggaaattggcgaatggaggaaccccccggcatttacgcaacaagcataatggaaacctttacggttttaaaaactctataattgggcccaggctttaaaagtntcattttggaaggctttgtggcttttggttttgaatttataatacaaagatctttcttcatctgttcctggtctctacccattctcattcatttgcatgtttacttctttttc

SEQ ID NO: 209934 - DNA, 274 bp, Glycine max
  unsure (1)..(274): unsure at all n locations
tgaatgggtcagaataagttattgggtctgaatatttcaaaaaatttttttaattctttttttagaataataattcgttcttttcactactagaaaaatactatacaacggtggttttaagacacattctaatccaacgtcgtggaaagtctggttccataatagctgtcttagaaaaaaactactattctaagatggtgatgcaatcataccccttnccccaagggcattggatataacactctaagaagattgagccaaagatgcatgagaa

SEQ ID NO: 209935 - DNA, 344 bp, Glycine max
  unsure (1)..(344): unsure at all n locations
gtctttcgtctaacattgtcttaatccttttataaatgacttctactaagaccattnttgagctgaggtcaaccaaggtttttcatccaatgtctattttgaccattnttggttggcatcaactacgaatttgcaagcaagaaacaaaatttaactgctctatctacagctgaagctaaatatgtgtctgttgcagtagttgttcataattggtatgggtaaagtattagctagaagattactctagtattaacaatgaattatgacaacactagtgcaaccaacctatctaaaaattccatacaacattcaaatgctaagcatattgagataagatatcattt

SEQ ID NO: 209936 - DNA, 236 bp, Glycine max
  unsure (1)..(236): unsure at all n locations
cctcttcatggggaacgggatgatgcaatcctccctatgataggaccagtcactataaccatgagcaagatgctccaagaagattgtgctatagctgctgaagaaagccctatggttctcatgaacctcanggtatatttctgatcccatgggccattgttgggtccaattatctttgtacatattagactacgatgtcattatatgtggtccttgtatttaaggcttcatatttg

SEQ ID NO: 209937 - DNA, 466 bp, Glycine max
  unsure (1)..(466): unsure at all n locations
tgaagcatgcaaccttctccttccatgacttattctctagaggatgacgtcttctcttacctcttctacctnatcnttcgctgcaattccatggctaaaaatcaccattgaaggaccttattggagctcataaatccagccttcatagaagcttcataagcaagcttccaacaagtggtatcagagcacaagagcttcaagtaggtgctccttaaacctccactaattttcagctttactttctcctccatagttgtgtcttccgttctctccatgtatctcctcacgtgtcttgtgctgaatgttgtaacataattttttagaaggtccaccgattaagcttgctatagaagctagatatgattntctatggttcaaattccttgttcttggtctcgaccaatgaattagtgtgagttacgttcccttgagtttatattgcaattttttggctgaacctaaacat

SEQ ID NO: 209938 - DNA, 388 bp, Glycine max
  unsure (1)..(388): unsure at all n locations
atgatttctatacaaaagttagtcgtataaagcgactaacaaaatccttttatatatagagttttgcttgtcctcaagcaaagaaagaacagttcacttgtcctcaagtgacaaagacagtggtcaatcaaaagaaaattgtgtttaattcatcaaggacatcaaccatatgaactgaatatcatggaatgcttaaatcaatcacttttcacaagcatgtagaagcaagcttcatgatgatgagtcaagttgattcaagtagttttgatgataacaaagatgatgacaaanagcccaagagaacgatatcaagattgagtcaacgagtttcaagaatcaagagaagtttgatttcaagattcaagagaagatgaattcaagaatcaag

SEQ ID NO: 209939 - DNA, 402 bp, Glycine max
actcagcttataaagttatgtggcttgaaacaagcatcgaggcatttgtgtcaagaagtttaatgagtttatgagcaactcaggattcaacagatgtgacatggaccattgctgccacgttaagaaatatactaatagctatgttatccttgtcgtgtatgttgatgacatgtagattacaggatctagtatggcaaaaattaacaggttgaagcagcaattggcagaaaactttgaaatgaaggatcttggtccagctaaacaaatccttggtatgagaattcttataaacagatcagaaggaattttgaagctgtctcaagagaaatatatcacaagttgcttgacaggttttaccttgaagattctaagaccaggaacacccttttgggatctcatttg

SEQ ID NO: 209940 - DNA, 354 bp, Glycine max
  unsure (1)..(354): unsure at all n locations
cagctcttggagtanaaacatgggaccaacttatttttatttaaaaaggaagtcgtatctagtcaaggtctgagagaccatacaagtttcctaacgatttctaattatgtgggccattaagtctatcatatgctgacaatagccgagaagcccatgaatctcttcgggggcggagtaggtgtctgccatcgccttggccttggctaacaatcggagaagttcttgactcccgttcaaggtaagagcaaaccgatccatccacatggttgcctcttggtgtaaagagtcgatcacccttcctctagcctctttttccgcatatacttgggcatactcatccgcgattctatactc

SEQ ID NO: 209941 - DNA, 384 bp, Glycine max
  unsure (1)..(384): unsure at all n locations
ctcaacttattcaaaagaaacagtgaattggcaccgtcttagtctttctctctctctgngnctagatatatgtatcattgtataataaataatagctacgtgagaaagagtgattgtgttcctcaactcacctcattcttcaagttggcatcatagcgggtttcgtccgccatttgccgacatctacaatcgtttgtctccggcgagactatggttatgatcgcctcgaataacgcgacccacccctggaagtcaggccaccaaatgagctcccacgcgccgtctttgtctcgcgcgactttcgacgcgtgaatcccacgcgctgccgcaccgccgttggaagctgacctgtttggtcccgacagctttgtcatcagtccctga

SEQ ID NO: 209942 - DNA, 419 bp, Glycine max
  unsure (1)..(419): unsure at all n locations
aaattccattttcatacacttatcatcaagggtcattgaaaccccagaaattccccaaataaatcatccccagaaagcaagctattaacatgcacaaaatctacaagctcagcaacacaaccctatctagctagcgctagcccctcttactggagcattgtttgctacattcattattagaaatacctgagacagagttgcaaaaaggtcctaagacagagttgtgaaaagtggcgggttgtcaatgtctcgataagggtgcagagacagagagatatagtcgcgaagaagaaccctagacgaataaaaaagagagtgcgagcaaaatatggctcgcgttctaatattnttaaatggaagtccaacatcggttntcaatacacaaccgatgttaatcaaatgatgtcaaccttaacatc

SEQ ID NO: 209943 - DNA, 425 bp, Glycine max
  unsure (1)..(425): unsure at all n locations
agcttctggtgggacatcttgacttgctntcctatctgacattcaccacagattctgccttcttctattttcagaatgggaatgcctctaacagcacctttgtcaatgattttcttcatgcctcttaagtgcagatgtccaaatctttgatgccatattctgacttcatcttctctggagaatagacatgtggaggagtaactggtttcttgaggtgtccatangtaacagttgtcctttgatctgctgcccttcattatgacttcactcttctcatttgtcaccaagcattctgactntgtgaagattacattgaatccttcatcacacagctgactgatgctgaatcaagttgcagtcagtcccttcaccagcagtactttgtccagactaaggagtccatcatggactagctttccattcca

SEQ ID NO: 209944 - DNA, 372 bp, Glycine max
cactggtaatcgatttctggattctggtaatcgatgaccaacaagtaaaaactgtagtaacttataaaatcttgagaaaaaatcctttgaaaaataaaactgtgctatgttttttttttttgaaaaatcttttcaatacttcccttgggaagtcttcttgatttcttctcttgaatcttgaattcatcttctcttgaatcttgaaatcaaacttctcttgattctttaatctctgttatttcttcctatgaaacttggaaataaacttgatcttgaacttgtggactcaatcatgaaatcattctcttgggctttttgtcatcatctctgtcatcatcaaaactactcgaatcaacttgattcatcatcatg

SEQ ID NO: 209945 - DNA, 367 bp, Glycine max
tcatgatggacttgatccttggcaaaacaaaatgcatttagacagtggcaaaaaatgatagccttttttttgtggaaacccaagattgctaattagacccttcagccaagttcattcctttactggttcttccaacgccatgtactctacctttgtaatggataaagccaccatgggttgaagtgtagtcttccaactgagtagagtgttgcttcccatgtccttcatctcaaattcactacttagtattgacttctacttctaaattgccaacaaattttgagatgctatgagaatgtcatcaacatagagtagtagatagataaaggaatcgtcctccaccttggtatgaaaaaacatgggtcat

SEQ ID NO: 209946 - DNA, 285 bp, Glycine max
acataaaacgcctcagataagttctcaaagctattggttgacaacgacagaatcaaaagtgaactgaggtttgcatagctctcaaggatttggccagttaacttcattttagcaaggcttaacattgtcaattcatggcaataggacaacgaatttggaagggatccattaaaatgattgctaccaaggtccaatgtgaaaagattagacaacctatcgaaattaagaccaacagaacctgtcaaagaattatttcgaagatcaagcacttcgagttttgagcat

SEQ ID NO: 209947 - DNA, 419 bp, Glycine max
  unsure (1)..(419): unsure at all n locations
tcaagaataatggcatcaacatagtatttatttcctgaatggaattctataaataggcatcccattgttaatggcgtgggtcaccattattggaaaacctgcatgcaaatttttataaaggcaatagatctgaatatctaggaagcaatagaaattgggccctacattcccactatgatggcaggaaatacaactatagaaaaacctatggaagaatggagtgggaagaaaagagattagtgcaatacaatttaaaaaccaaaaatattattacatatgctttaggaatggatgagtactttaaggtatcaaatcgtaaaagtgcaaaagatatgtgggataccctaaaagtaatacatgaaggtacaaccaatgtanaaagatctatgataaatacattgactcatgaatatgaatta

SEQ ID NO: 209948 - DNA, 418 bp, Glycine max
  unsure (1)..(418): unsure at all n locations
tttcatctgctatcacgaaaacttttcacacaatgatgctatttgtaatcaaaatttctagagctctttttataattnttcttttctatcacatcattcttctttctttacttatatatcttgctctaaaaattattaggagaattttaagtgaaaattcatatacaagtttatgaatattgattttgttactcattaattatcatgcaatttgggaccaaacttggctagttgggaagctttgatacggngaagaatacattgacaaattgttcgatcttaatttttcattgtcatacaaaatcagtactatttcataggtatacaaaaaataactgagatgggaaattaatatatattatggcctgaagaacaaattaaaatcatacagctctatgaattctgaattaataaattt

SEQ ID NO: 209949 - DNA, 309 bp, Glycine max
  unsure (1)..(309): unsure at all n locations
ctcaaaaacctctcaagaaagtttctcaaaaagcttctcaggaagctcatagtctataatagaacatgtgaacacttgttgaactctgataatgaaatcttggagacacactanagttaacttcttcccttttcttcttaatttctgctcccccttcttttcttcctcttttttctccttgaacatcttcaacttttatcaaactatttgggggaactattttcatgttattccatggatggctcttaccttttcttgtttcgtgattcatgggaatacataagactatgactaaatcactctaactcc

SEQ ID NO: 209950 - DNA, 390 bp, Glycine max
  unsure (1)..(390): unsure at all n locations
atggtatttgagaattaatgatatcattattttctttanatttaagaaaaatatttgttatcggtgtatgtatctgaaggtcagtgggaagaaagntattttctaattctggatattaatgatatcttgcttaccactaacgatcttggtcttcttcataagactaagaaatttctctctataaactttgaagtgaaagatatgggtgaggtaagctatgtgatagggataaaaatattttgtaatagatcacaagaattgttaggtatatctcagaagcctatatcaataaagtactagaaagactcaagatgaagaggtggttaacgtcacctgttctaatttagaaaggaggcaaattttgtctctcacaatgtcctaaaaatgata

SEQ ID NO: 209951 - DNA, 208 bp, Glycine max
  unsure (1)..(208): unsure at all n locations
aaaataataataatagagtggactgggacctattactttacaagtcactgggtgacctgaaccaaacattggtggcatagttatcaatatggacaagattacaggtgtgctgatgactgatgatcnagctggggagaaactgactctctgaagattgcatcaaaccatattaccataagatatactattcatattcctttcaatgtgc

SEQ ID NO: 209952 - DNA, 243 bp, Glycine max
  unsure (1)..(243): unsure at all n locations
tcagactgagtgactcaccaaggctactgcttttcttttttctttgacctgntccttcttgttgactactcaacctttggaaaccatgaatcccatcttagatttgagcttgatgttggaataggggggtttgttattaatacagttgtggctgctagatatttgacctcttgagacttgattggaaagtgactgcgaatagggtttaaagatcaaaaatattaaaaacaaaaaaaaacgtag

SEQ ID NO: 209953 - DNA, 420 bp, Glycine max
  unsure (1)..(420): unsure at all n locations
agaaataaggatagaaatataagagaaatatagtcgaaacaatggtttggttgattaaatagaaataggaaggaaagagggtggggaatttgtctctgcttatttggatgagtgaaaaagagagcgtaaataaataaataaacattggtatttttatattaattaataaattaaatttaacttaataatatatgaactttctattatattagttttctttccttccattntttatgttataattnttttttacatatttataactcaagaaaaacagactgtttcttctccatttcatggcttatgaggggagaattanttttgtagtgggtcccacanatttaattctcctcccctttaatttccacccatccaaaccatagagaanaccaaccagtcgttggtccagtggtactgact

SEQ ID NO: 209954 - DNA, 325 bp, Glycine max
  unsure (1)..(325): unsure at all n locations
agagagcaagaaatgaagagccaatggttgatacatggacgaagatgaaaaagataatgaggaagcggtatttgcctgctagttactcaagggacttgaaattcaagctccaaaaactaacccaaggcaacaagggggttgaggagtatttcaaggaaatngatgtgctcatgattcaagcaaagattgaagaagatgagaaggtaactatggctcgatttcttaatggtttgactaatgatatctgtgatattggtgagctgcangaagtttgtgaaatggattatntgctcaacaaagcataccaagtatagagcaacaatta

SEQ ID NO: 209955 - DNA, 414 bp, Glycine max
  unsure (1)..(414): unsure at all n locations
gataaaaagaatttcttcaagatcaaataaaaagaaaggtcttatgagcacatgggaggacctanacaacacctcatctgatgaagacgatgaagaagccaacatatgcctgatggtagatacaacttttgaagggtctgaatcagaccaggaagacgagacgtccttgatagccaaaagtagactcctatcatggtacctagacagtggttgctcatggcacatgcagggagaaaagtgtatgttccaatgcctaactccctatgatggtggaataatcactttcgaagtgaataaaanagggaaaataaccagcgtaagtaagataggtattcacccctatccctatatagatataggtagatagatatagatgttactaattagattatttaacctctatcataatgtatg

SEQ ID NO: 209956 - DNA, 327 bp, Glycine max
tataatattggacatttttatctattctaatacctcccctcaagctatagcttactaagttatgaacctacaaataaacccttctagaaagaaatcaaaaaatataatttgggactatagaatggcaggaccagactggtttatctatggctgttggtggccaaactgattttctgggatggttgagggaccgtgatgactacggaacaattctcttgtgttaaagtctatcctaaaatcttggaatgttgtggggtgaggttgattctctggggaaactatgaacacagggagtaagacaagaatgggttcaattaaacaatttat

SEQ ID NO: 209957 - DNA, 260 bp, Glycine max
cgatgaagaacgggtgaagaacgtcgaagaacgggtgaaatctttgcgaaattcctcacggaaaacggtacggaaacggttcggaagcgcctcgggttatattttcttcacgggaacaatttttccaagcaaattccaaagaaagaaaagtggctcaagggctgaacccctttcttcttcccttccttccctatttataacaaaataggggacgtgggtggccgccagcttcgccaggcgagctcagcttcgccaggcga

SEQ ID NO: 209958 - DNA, 468 bp, Glycine max
  unsure (1)..(468): unsure at all n locations
tcatggtgaatcaagaatgattcanagatgttttgtatatttcaaagatgataacaaaagatgatgacaaaggtgatgacaaaagctcaaggtcaatcaaaggatgagttcaagatgttcaagaaggaatcatgaacaattcaagactcaagaggaaaagttgaagacacttcaagattcaagaagaaagatgaattcaagaatcaagattcaaggatcaagcttcaagaatcaagatcaagattccagattcaagactcgagaatcaagagaagacttaatcaagataagtatgaataggatgtttcaaaaactgagtagcacatgaatttttacataacattgttaccaagggtttttactctctggtgattgttaccagaattctgtaattgattaccaatagcaaaatggttttgaaaaagtttcaaattgaatttacaacggtccaattaatttcaaaacact

SEQ ID NO: 209959 - DNA, 351 bp, Glycine max
  unsure (1)..(351): unsure at all n locations
gcaatatgccctaaccttggcagggttcattgtacaacctatctaccctctatattcttaataccaagatagcaaactgcataagtaacaaaacaatcaccctaacaccaccaccacccttcatcgtgtcacccaacaaaacatttgagaaagattgtttntcatataaagcaaaggatttcgagagaaggaatgctaaccttttgtaacctcgtcgctgccacggagagttgtgagtgatagtgagagcgagactaagagcgatagcgagatcgagagtgagcgtgccaacagggaggagtttcggcgtcgcgagagtgagaatgaaagcgaggaatggtttgagggagt

SEQ ID NO: 209960 - DNA, 194 bp, Glycine max
taaactaactttaatcttatgcttcatgtggtggaacattggttttatattactaacaagggtttaatttgatattcatgtttggaaatggattacaactcattagagggttaaaaatagtagaaaaaaatgattcagcagacctatgacgattaagcgccaatgttctcactatgactaaaattgttcttgct

SEQ ID NO: 209961 - DNA, 225 bp, Glycine max
tcaagatttcaaattccgcccgacaaacaataaattatgttgtattgtgagtaaataacaaaattagaatatttaagaaaatcaatgaagaaaactcaaatacctgaatatcctcccatatcatatacctttgagcagtatggactttctttcaagtgtcatatgtcacgtcgaacttatcacgagcgacaatccccaaatatgttcttaatttcttcttgtggg

SEQ ID NO: 209962 - DNA, 370 bp, Glycine max
taactgaatgacaaggaactctcagaaaccaatgatttgtactttcacacagaggttcgattcaagcgcataatatttcgagacgctcgaaattgaacaacgaatgttatcgagaaattcaaatggtcaaaacttgtcacacggatgtccgattcaagaacataatatatcaagaatctcgaaattgaacaacagatgctctcgagaaattcaaatggtcattaacttgtcacacggatgtccgattcacgcgcataatatatcggagacgcctcgaatattaaacacacgaatggctgtcgagaaattcaaatggtcataacttgtcacacggatgtccgactatgcgcataatatatccagatgctcg

SEQ ID NO: 209963 - DNA, 462 bp, Glycine max
  unsure (1)..(462): unsure at all n locations
aaagatgagtggagggatatggagagattatgctcnnaaatgngactcanatgaggtctgaactttgaagtgtaattctcaaatgagcaaagtagaaaaaatgcacacacttgacctctatttatagcctaagtgtcacacaattggagggaaatttgaatctctattcaagtttcacttagatttgaaattgaatttgtggagccaaattttggagccaaaatttcactaattatgattagtgaattttagttatgggtcaacccactaatccaagaccaagtccaagattctccactaagtgtacttaagtgtcatgaggcatgtaaagcatgaaggacatgcacaaagtgtgactatatgatatgacaatatggtgtcgcaagcaaatgctcaccccncctctaaaatttaattggattangcttctnccaattcaattaaatttattttccaacacac

SEQ ID NO: 209964 - DNA, 455 bp, Glycine max
  unsure (1)..(455): unsure at all n locations
gatattgatttcttttattngcacactatgtgtttctgtccttctactgagaaccccattgactaatccatataaacattctcatctaaatatccattaagaaagagagttttcacatccatctgatgtagctccaagtcataataggctactaatgtcatgataatcctgaaagaatcctttcgtgaaaccagggaaaatgtctctttataatcaatgttatctttctaaagtaacctcttaacaacaagtctagccttgtaacgttcgaagttggcatgagaatcacatttagtcttgaagacccacttacaaccaactctcttacaaccctttagcaattctataagggcccanacaccattatgttccatggaatttatttttcccttcatgggcattaaccagttctaaaattatcacaacttacagcttgtgaaaacgaaactggatca

SEQ ID NO: 209965 - DNA, 271 bp, Glycine max
aaaacaaaacaaaacatggtattatttaataatacaaaagaaaaacctttctttgatgagaataatatactttatatgtatttcttaaatatatagataatggatttcaaacctttttctttgtctcttactctcagcttcatagtttcttgatcgtttcattactcacaagtacgttctattatttgatgattagaatattttactactaataatagagatcactgtaagattatgtatgtctttggatgtacgatagatgttatagtga

SEQ ID NO: 209966 - DNA, 420 bp, Glycine max
  unsure (1)..(420): unsure at all n locations
tactcacctctgaacaattactgcccttatttaactgtctctgcgctttgcggncacgctcaacaaagttctttcgacacctactgttcgttgatttgaccaatgctgttatgggaatgttgcgacaatccttcataaccttattgatacattctgagaggtgagtgcatgtggacatatcgacatccttctctatcataagccatcatacattgttcctttgaaattcgatcaatccatgtggctatggctggactcatttcaacgaaattttctaaattgtgatcaaaaatgtgcttgcaaagagtgtatgctgcataaaattagttatgaatacatgataagatatatgaaaggtaataaatgggacatcaaatatgaatcttcccaattcttaacatgtctttgttttgatattga

SEQ ID NO: 209967 - DNA, 391 bp, Glycine max
  unsure (1)..(391): unsure at all n locations
agacaagtggatctggttttcctgcaagaaacaaagaaggagaatttcaccaagaacatttgtcaaaacatatggggtgattccactgtctcctgagaaagtgttccttcagtccacataactggaggcctactttgcatgtggaacaactcacatttcgaggtgaataggagggttaaaggcagaagtttcctaatgattgcagggacatggattaaggaaaanttgaagctgttcattgtcaatgtatatgctccatgcgatcttgctgggaagagagaattgtgggaggagctgaagcagctaaaagaatctaatcctgagggctgatggtgcttccttggggatttcaataacattagaagtcgggatgaaagaatangttcatctc

SEQ ID NO: 209968 - DNA, 371 bp, Glycine max
  unsure (1)..(371): unsure at all n locations
tttttataagctagatccctatttatccacacccctctattaaactaaattacttcccttaaaataattacggatgaaaataacacaacaaataatcaaacatcaaacataattactaataatatatagatatatatatcaaggtgtacaaaggccaccagaactaatgattctaaacgtgttgtggattttgtgagatctaacattgttttgcaggttttgtgtgcctataaccattatcagtgaccaatggagtcaattctgtaatatgtcattggcatcctggatccaaaagtatggngttgtgcatatagttgctacaacttatcatccccaaactaatgngcaagtgaaagttttaataaaaaatc

SEQ ID NO: 209969 - DNA, 437 bp, Glycine max
  unsure (1)..(437): unsure at all n locations
ctattttcctatatatanggggttaagtgaanggaacaaatgttcagccctccttggaattcgagatcacttgaaattagtgaaaaataattgtttccgtgaagaantatccagccgatgcgcttccgtaacgtttccgtgggtgatttcgcgaagaatttcaaccgttcttcattcgttcatcgtcgntcttcggtcttcaaccggtaagttcctgaaatcgaacttttcaattcattctatgtaccctcagtggtcctcatttgtttcatggtggtttattnttatttcatttacttccgtacccccttgtgacgtgctctagtcattacttaagttattttctcgcctaataaaaaaataaaataaatttccaccgatcattgaattggaatatccgtaatttctgtaaaatgaaatccgacgtccgtcatgcc

SEQ ID NO: 209970 - DNA, 410 bp, Glycine max
aaaaaccttaaatcatgtgtttgaaaaagataacctggcaaatcttcggctttcagacctaacttaagaatctatctaatcaatcctacctgaatatcttggatggcttgatgcccacttgaattatccatgaaaaaagatccttcttgaaatcaaattcgtctttaggtgacttggatatggctgactattggaatcatcaaaaacttcttgaattgtcttggatatgctcgactatgggaatcatcaaaatcgtcttgaattgttgtgatatgctttactatcgacatcatcaaaatcttcttgaagcttatcttctataatctaccccgtgttgatgatgacaaaaccctgaatcaagaaagcatatacggattgtattgggtcgtcatcattccaagctccccttt

SEQ ID NO: 209971 - DNA, 345 bp, Glycine max
  unsure (1)..(345): unsure at all n locations
tctacatcaccattaagaaagattgttttccatccatatgcttcaactgaaggtganaatgagatacctatgccaacataatacacaagagaatattacttatattcaagagaaaaagtcttagcgaaatcgattccttctttggagtaaataccttagcaacgagtcttgccttgtatctctcaatgatgcctaatgaaatctttgtggtcttagagacccatctaataccaatatcctttaccgcattatacaactctacaggctccaaactttcgtactctgcatggacatcatcttatccttcatggcattataccatatatttgactcattgcaactcat

SEQ ID NO: 209972 - DNA, 326 bp, Glycine max
  unsure (1)..(326): unsure at all n locations
atctttttctcttatagaatataaataattggtgtctcacttagtcttctttatttatgcccaaactaccttaactaagagatgttgntgtagtaattgtataattctctcctctaaagtcaaagagatatgtttgaaacttctgtcggcttctgctatttcctatctttctctataagaaatgaacggtaaagaaagaacacatgctcccaaccagagtacattgttgtgtgctagtcttttaaggcctcggttcgtgtgtatttaaaatacccatctagtataatttaaataaatatttacatatttaatttagttttgaagtg

SEQ ID NO: 209973 - DNA, 101 bp, Glycine max
aaaaaacaggcttgtcacaacgacagaccagccacatccgaccattttggcatagtttatcgataaatgatagcgggcaagttattggcaccttattatca

SEQ ID NO: 209974 - DNA, 273 bp, Glycine max
catgatgaaggagatacccatcttggccctctgctccacctcaaagatttgtctccccatgaactaccccaaccgaacatagtccgccatatcccggctttacccacacccgtaaaagaatctgttcccttcgcggaagataagggaaagattaaggcgcttgaagagaggttaatagcactcgagggccttggcaattacccattctcggatttagcggatttatgtcttgtgcccaacattcgcatccctcccaagttcacagtaccaaac

SEQ ID NO: 209975 - DNA, 390 bp, Glycine max
ttctccacatccacaacacgaactataaacccaccatcccctgtggcccacctcaactgagctcatgtactcccacgtagcccttatcctcgttcctctcaacgccgggaccgcagcaatcctcccaagcattcacaacagtcaagttattgaacatccaagcctcatgaactaacacagccaagaaaatagggcagaggcagaaaactctgcccaaaacacaaaccgacatcacagcttttcacactcaaatactccaatcatattgtcttcgttccaattcgttaacacggggatcgactctaaaattttactggaagactctagcacataaaactacattatgaccgtggggatctgctataatacgttcaaaacccaatctgtact

SEQ ID NO: 209976 - DNA, 416 bp, Glycine max
  unsure (1)..(416): unsure at all n locations
actcgctgtaatcgtgccatgaccaagtgagcaaaggatcgagcatgctaccacaagttcttggatttcaacggngaaacttcggtgtggatgatgacagtcgatgcctcgttcttgcttgagttcctccaagtcttttattgtgccattcaagatggaacaaaagtagctagggggaagtcatatcataatgcaattttgagggatattgtaatgcttgagaatcaaataccaatgtttctgttgagaaatattctagagttcaaattctcatcactagaagctgttgatgacacgctgatgttggagtttataagtctgttcaaagaggtttctcctttcaagatgatggaggaatatccaaccattcaagtctcagagtgcacatctactagatttcctatatcacatgattg

SEQ ID NO: 209977 - DNA, 483 bp, Glycine max
  unsure (1)..(483): unsure at all n locations
gatcttaagcacctgggctgcagcttatctttttgtatcttaggttttgtggattggcttcaatggtgttggaaataaatcatgttgtttaaaaatgaaagtttgagcatttaaggttctgagttttgaaattggggatttggattatatgatgagtattggtgaaaagttcctatttgtgaagacttttttttatttatgtattggaattgatagaaaatggtttggatttgttttgggatgatttgaaagccatgagaggaaattctacagaatnttgaaattntgcaaaatttgtgtccaatgactagtctgggttccaatgactagtctcgcgtccaatgaccaatattgagtccaatggtcacttttgagtctagtggctagttatgatgcggatgcgattaattcttgtttccttgtgtaaattaatattttagtatgcttggttttggaaagctacacttgctatgatgatcccgt

SEQ ID NO: 209978 - DNA, 383 bp, Glycine max
agatccagaatatctagatatggaagaaggattctccaccaaccaaccaccactgttcagaggcataaaatatgattactggaaggagcatataatagctcactttgaatccattcatatagatctatggggcgtggtggaaaatgaagattatatttcatacgatgatcatctcaatgaaattcctagaggccaatggacggaggagcaaaaactcatattcctactcaactccaaggcttggatgtgatgttgtgtgctttatcagaagaggagtacactaaggtacacaatttcagaagtgccaaacaaatatgggacactctagttgtaacatacgaaggaacatcacaggtaaagaggaacaaactcagtctcctcac

SEQ ID NO: 209979 - DNA, 464 bp, Glycine max
  unsure (1)..(464): unsure at all n locations
agcttatcattctcctgatagatctgttcttatagatctaaaagataaagctntatcttttagtgtttatcttcaatctctaatccctgaacgaaactattcaagtttgtaattcaatctttaattatcttttaattcgttcctaaagatagagctcctaatctgttgctgactgcacattaatctgttaaagatataacagatttatgtgtccagtattttcgggcaggatgtcctggacattgtatccgacatcgtggatcctgcagcttcaattcttcatttgacattttatcttgccttgtgcattgtgcagcccaatctgattccttgacataatgttagacatcatgtgcagcaactccagctttccttcattgtctaagtgcttatgttttaacaaaatcttagccaatctcttacaactaagtanagcttagcactaacatgtatgagagatgatc

SEQ ID NO: 209980 - DNA, 422 bp, Glycine max
ctcagctgcttgggagctttatggggctggtcttgagcttcatgaggtccttcaatggtgatttttcaccacagagatgcagcggaaggcaaaggagaagaggagaggggaggcaccatccactagggaataagccaaggaagaaggagcttcaccaccaagaattgccttggataagaagcttgaagaggatgctttaatggaggaaaagaaagagagaagcagggagcacgaaattgaaggaataaaagagggaaagaagtggaactttgaagtgtatctcataagactttcattcatccaaagttacaacaagtgttacacatgcttctatttatagactaggtagcttccttgagaagctttcttaagaaaacttccttgagaagcttctttgagaaaacttccttgagaagctagag

SEQ ID NO: 209981 - DNA, 428 bp, Glycine max
  unsure (1)..(428): unsure at all n locations
agctngtagtatctatataattctttcaaatgtctntntaattnttggtaagacaaaaatatattagatggtataaggggtattcttgcccgttatttcagtgtctgtgagctgtttaactactccccggtccatcaaatattcaattaggatcttgattttttttctcttttaattgagtattagaatttgtatttatttattaattgggtctattgaaaaaaaaaattagggacctgtttaaaaatgataaataatttagaaacttaattaaaaaattgtgaatctctacatatcaatattttcatccctgcacgttctaaactagttgaaaaccctaagaatattgagtttagaacctacataaatgacactacgtactggttttcagaagtaaaaatacttacctgtaaaggttgatagctttg

SEQ ID NO: 209982 - DNA, 398 bp, Glycine max
attattaattaagttagtgtgaaaactggattcattgttatataatataacttttttgtactatgggatacttgatgcaatctatttaaaaatgactaaactagtggcttgttatcatgaactgaaaaaattaaattatatattagaatgacgtgtattgtttgccacattatattaatgtgtcattttataatttaatgataaggtaaaatttttacattgacattaacgtgtaaaactatgcaataaattgaatttagatatggaatcaaccattgatcaatttatcataacggtatattgatattcatatgtccaacacaccatactaacagtacttgttggtagagactacaaatatcctttattcaagataatccagttccatactaatagta

SEQ ID NO: 209983 - DNA, 450 bp, Glycine max
  unsure (1)..(450): unsure at all n locations
agctntaccaagtaacacaagtttcccgagagttcgattctctgntcttaccgntttacactacttgcgcgatctgatgcacttgccacgaccgaacaagtttttggcgcccgtgctgggtaacttctttctatttggaaaattagtttagtcctaggtgtctattctttattctttgataaactgtggatatttactttcgattcatatttngtttcctcttgaactggataaccgttttctctgttagtgttttatatgcatagatctcccataggcaatttagttcctctggacttggagattgaagctatgttgagaaggaacagagccgagaggagaagaacattattgcaagacaggatagtagcgtccattcttgaggaagaaactcaattntttgattcttcatcacctgattcaccatcatcaggggaatttgtgacctat

SEQ ID NO: 209984 - DNA, 388 bp, Glycine max
aaagtgggtctgcatttatgcaaatctgatcatcatgctttgatagatgccaaagaaaactagggcaaatgaagagggtgagaatgagggagaagcccatgctgtgactgccgtgcctatctggacgggacacccaccaactccgcgatgtcattactcagccagtaacaacccatctccttacccaccacacagttatccacaaaggccatccctaaatcacaccacaaaacccacctaccacacgactcaatgctaaaacaccacttttagcatgaaccgaagcaccaaccaagaaatgaattttgcagtgagataacctgtagaattcaccccaattccagtgtcctaggctgacttgctcccatatctacttgataactcaatg

SEQ ID NO: 209985 - DNA, 330 bp, Glycine max
tcttataaaaaaaagaaaaagaaaaaaaaaagaatgcaaataagggcataaaagaagaggtgccataagtgctaaggttacaaaaaaaagaaagaaaaagaggtgtcataagtgccaagaagaaaagtgttgttagaggaataaaggctgaaaaataaataagcctagacagaaaataagtgaaagtttttctaaggatgcatgctctcttataatcctaagtttttgaaatcccagaaaaaccataatttcttgtttagccaggccccgttacaagccaataaaagttcttagtgatccacccagtgtaagtaagaataactttaactg

SEQ ID NO: 209986 - DNA, 398 bp, Glycine max
  unsure (1)..(398): unsure at all n locations
ttcttccanaatattgatgtagaaaaaaacacatttatctaagtgtaaatcactttaatccatgttgtcttagagtcatatttagtcataataattgttacattatgttctaagtttgtgtagagtttttattttgttgattgaattctaggtacatttgttcacgtattcttgtcattattagcctatgttttgaattttgagtctaattcatgcatgttatttagttcataacatgttctaaatcaattcctagaagtagtcttgttgttgaactctttttttttgttttctaagtttcctacatgatgcctatgatgaagttgagttgtaatgctgagctgtggctggatttgtgaatcaaaataagtcttaagctctcttgaattgtgttattc

SEQ ID NO: 209987 - DNA, 476 bp, Glycine max
  unsure (1)..(476): unsure at all n locations
agcttcttatccaaggctcatcttggtggagattctccttcttccatggcttattccctagtggatggcgcctcctctcacctcttctcctttgtcttctgctgcatctccatggtggaaaatcaccattaaaggacctcattgaagctcaaagatccagcctctatagaagccccacaagcaagcttccatcaagcggtaatcagagcacaagagcttcaagtaggtgctccttaaacctccattaattttttgctttaccttctcttccattggtgtttcttcattatttatccatgtatctcctcacatgtcttgtgctaaatgttcttaacatgattttttagagtttccaccgattaaacttgctatagaagctagaattgattntctattggtcanatttcttggtcttgttcttgaaccatgaattgtgtagaagttaagttcctcttgagtttttcttgttatttttt

SEQ ID NO: 209988 - DNA, 424 bp, Glycine max
taactctccgctgcttggatgctatgtggaggctacatctttgagcttcgatggtgtttatcagccatggagtagcactggaagacaacggataagaggtgagaggaggtgccatccactacggattcagtcgtggaagaagaagcttcaccagccagagagtgtctttgacaggaagcttagagaggaaggttcaatgtgcgaagagagtgagagagagagagagaacgagaaaacgtgttgtgggaatgaagggaaaatggggagagaggttcttctttgaggtgtgtcccacaagactctcattcatcagagacaccacatgtgttacacgcgcttatatatatagcctgggtcattctcttgagaatctttcttgaggagcaagtgttacacccctccaataactaagctcaccacatgc

SEQ ID NO: 209989 - DNA, 467 bp, Glycine max
  unsure (1)..(467): unsure at all n locations
agctngtacttggnttagacatgatttatacatgatgtatgacttgtaggattcaatttgggcaaaattggatgtgggaaagtgtgatttcgaaaatctgcactttatgcagaattttgctgtcaaataggtgcatcagaattttggctttgtgcagaaaatgcttgtgtatggctggttgtggaaagggtagtatatattgggttctggacattttgtagcagatcccaacggtcaaaatgtagacttatacactagggacttccagtaaaattttcgagtcgatccaacggtgaacgaattggaacgaaggaaatgttactggggtctttaagtaaggaaagctgtgattntggtttgtgttttgggcagagttttctgcctctgccctgttttcttggctggtgtagttcatgacgattggatgatgaattacttggatattgtggaagctcgagaggattgat

SEQ ID NO: 209990 - DNA, 414 bp, Glycine max
  unsure (1)..(414): unsure at all n locations
gcttgataaggtanacttanaacgttaccatgttttcttgcatctttttatgtctttaacatcttttatttcatcttctttttaccttctttttattcatgcatatattctttcttcgtgatgaaagcctactaactcttctcctcattttccatgaaggaatattaaagatttaatgtgaataaggttttctaaagaggctatcaagccagacttttaaaaatgacagaccaagtcaaaatttgataggctataggacagacttaggcttcaaaaattcatcataagttagactcgggccttttaaagccctgatatgatctattcccacccctactagtagatgatacttttgctcatgattcttttaaaaaataaaataaagcaaatgattaatcaaattcttaataaatt

SEQ ID NO: 209991 - DNA, 471 bp, Glycine max
agcttaagctccttcaactgcacaatgctcttaatatttgaagagtatccttatggaaccttcacccgatgaagacactaacaaaaacttatcttctcctttttggacaaagtatgacaagttgggggcaagtaaattttcttcccatcagaccttggatgcaactgtgatcgtatccccatctcagctagatcttgacgagtattcaagccgtccttcatcttgtcttgaatgttaaggagcgtcccaatcacactgtcacatacatttttctccacatgcatagcatcaatacaatgtctaacgtctagatcagaccaatagggaagatcaaagaaaatggacatcttcttccatatgcaagtcatacttttatccttcttttgggtctttccaaatacagtattaaggtgttgaacccactggtatacctgctcaccagtcaacggtatcagcgcaatatcgtgctct

SEQ ID NO: 209992 - DNA, 423 bp, Glycine max
tcagcttgcacaacagagtgctagattccttgcacttgaagggccaattttatcatcatatactaatggatcacatccagacagcttagcaaaaggtgttttaattgtgtcggaaattttcgacagactacaaaaatctgtcgattaatatttctgacgaccatttttctaacggatttgtgtccgtcggaaatctatcggaaacatccaattagcgacggatttttagtgttaccgacagattattgccgtcgcaaaaatgctttttttgtagtgttaggcacatgcattttaatgaatttttgggtccaaaatgcccttatcttcttcatgaagacactttgattttctcagtttcaacaaattcaagaacatcaagaacaccttaaaatagattcaaaacacagtttcaatgcacataat

SEQ ID NO: 209993 - DNA, 420 bp, Glycine max
  unsure (1)..(420): unsure at all n locations
nagctcgagatgaggaagtgtagaatgttgaatcttttctgctttattcgncgaccacagagtggtacctggagatatgtcgcgggggtcaggagaccttggggacgtcaggtggggtgctattgcccaaaaccaagcttgaccaatctcgacccaacccgggcatagtcagtcaatgagaacctgtgatgtacctaaacaggcgagctcctggcagtcaacagatgataggaataaagaccaccaagcacggaggcttgtggtggctggccanctatgaacttgattgatgtgtgagagatggcctctggtaatcgattaccaagggtgggtgatcgactaccacgcttaacaatgaagacaggagactaagatggtctctcggaatcagataccacggcgtgtaatcgattaccaggc

SEQ ID NO: 209994 - DNA, 358 bp, Glycine max
acactgatgatcaattaccgagatattgtcattgattacagcacttttgaaaatatttggaaccgtgaaaattcagcttggaaacattttcaaactcactttgctactgttaatgcgaaacgactctaggggaaacgattaccagatagcaaaaactctttgattaaggtcatgcgaaaaactcatgcgctatgcacagttctgaaacacttttaatacttatcttgattgagtccttactttatacttgaatcttgagtcttgaagcttgagattgattcttgatatcttgaatcttgaaggctgactcttgtaagcaggctatattattgagtcttgaactctggactcgaccatg

SEQ ID NO: 209995 - DNA, 467 bp, Glycine max
  unsure (1)..(467): unsure at all n locations
agctttctcacaattagaggatattattctttcgttngaanctagtgtatctgctcaagacccaactagcattactgcatgtgtagcaaagctgaaagatctaccaagacttaagcgtgggagtgaactattttacaaagccactaaacttatgaaaaaaagggcaaacaggatcacctttggtgctttataagagcctgagctacaacttggatggatcaaatctgaaacttaagcacaaattccttaatttctcctctattttatatcattgacacttgctagttgtgcttggttatgaaccttggatgtgttatggatcttatgttttaatgaaagctatgtcgtggatctttgattttaattttggttatgttatggatattagttatggcgtcggctctcgatttttttattgtccagttgagttatgattttatttccttctccaggatgtactcatcatt

SEQ ID NO: 209996 - DNA, 358 bp, Glycine max
  unsure (1)..(358): unsure at all n locations
acactgataatcaantaccaaggcattgtaatcaattacagccttttgaaaatatttggaacgttgaaaattcagtttggaaacattttcaaactcatttcgctactgttaatcgattacaacaatatggtaatcgattaccagatagtaaaaactctttggtaaaggttttgtcaaaaactcatgtgctattcaaagttttgaaaaacttttaatacttatcttgattgagtcctttctttattcttgaatcttgagtcttgaatcttgatcttgattcttgagatcttgaatcttgaatcttgattcttggatgaaggctttcttcttgagtcttgaactcttgacttgttcttga

SEQ ID NO: 209997 - DNA, 451 bp, Glycine max
  unsure (1)..(451): unsure at all n locations
agctngtaggatagttggttcacgacaatgtttattatgcacacaacccatgctgatgtagtccttgccaacaacacatactcttcaaggccgaatctaaagtacaaagtttatcaattttatttcacaaacttactcacttgatgataccaacactttgtgtcaacagtctgtaggatctctcatcataaacatagcatgtgctatacaatttatgtgtgtcaaacaaagtacaggaaataacactaccaacatgttaatagataactcactttataagaaaagtaaaatttctctgctgaaattcttgcaagctaatttgttcttctttagaatacttgcaccagagaatagtagataagtaacttgtagttcgaaaactgtagacatcacagaccatgtagcagatgcaaaaaacaatcttcataatcatcatgagtatatgaacatt

SEQ ID NO: 209998 - DNA, 409 bp, Glycine max
  unsure (1)..(409): unsure at all n locations
gttgcgagaacaaacatttagaagttagctntactttataatgcttatcttaacgcaaaaaatgtcgtgctattctctctgatttcagaatgaactgacccctcacctagaaacagctgaaacacgtatgtgtggaatatcctactatttatatcaacatagaggccatccaacacattctaattgtcatacatatatgcatttgaaaagaacatacattctcacgcccaaggcattgcgtcaaaactcacacttaatttatatcctaaacatttgctatttacaaactacctacgtatgtttgaaatatatatcatacaaatttttattgcttcactcacatttattcatattggcaagctatttacattatgcacacacttgcattcaaaagggaattccgtgctat

SEQ ID NO: 209999 - DNA, 482 bp, Glycine max
  unsure (1)..(482): unsure at all n locations
agtcacctgcggcatgcaacttacaagaggcaggagagtgtatntttcaactgngancattngaatattaaacttcagatttcagaactctcttagagcacaaaattccgtgctcttctcttcctctcccttcattcatctccttcttcctccaagctcttatccatgacctcctatggtggtgagcttcttctagactcatcttctccttgaagnggcatctcctctctctcttccttttccattccgctgccattcatcttccaagaacaaaggaatccattgatgaagaagatcttaggcctacaagctccaatggagcttacatcaggtttggacaacaccacctctgatgaagaaggagaagaggaagccaacctatgtcagatgactgatcatactatactaaaacaaatccatcaatctaaagatatcggttctttgatagaaactactcaaaacaatgaagcttatataccttg

SEQ ID NO: 210000 - DNA, 413 bp, Glycine max
tctatgcaagtggagtggtttaacattattattattatattagaactgtatgtttgatttatgggaaaaaaagtatcagaagagaaaaataaggaaggaaaaggaatacaaaatatataaatccttttttttttcaaattgtttgataagaaagaaataaaagataagaaaattaggattggtctcttcttgtttagttgtatagaaacaagagtaaaaaacgtgttcaaaattataaaaaaaattaaaactaaaaagataaatcaaaatgagaaaaaaaatatttaatttgtgcatgaaagagtatattttttttgttttgcatgatctttgaacagaataattttttagtttattcctacaaaaatgttgtcagtcttctaaataaataaaaaggtaaaagatgaaaagat

SEQ ID NO: 210001 - DNA, 371 bp, Glycine max
  unsure (1)..(371): unsure at all n locations
agcttatgcgaattcaaattctttaggattttaccaagaagntccatgacagcttgatggctaagaaggacttcgtggttggacaaaaangtttattgtataactctaggctcggactcatgagtggtaagttgagatcaaagtggattggtccttttgtggtgactaatgtttttccttatggtacagttaagatcaaaagtgaatccatagataagagctttaaggtcaatggacaccggctgaaaccattcctcacaaatccctccttagtggatgtagtggtggaggagacctccttacttcaccctacttctcttccgccatgacttaaggagattgttttttctgactccttctttacttttatt

SEQ ID NO: 210002 - DNA, 403 bp, Glycine max
tgatatctgaacggctgttgttgaacacctctattaatcttgaagcaatgcttaacctttgaatgtttgttgaagtaatcttgatcgcaaccttgtttgattattctttgacatcatcaaaattatgtattcatacattcacacccatcagtttagtttacacttttaatacaattggatcttatccaatttaaagcggtttggattagatggattttcagttttaatcttacttttaacttttttttagaaaatactaaataaaagataagatatataataaatataaaaaaaattaaaatatcaaatatttttatttgtatgtcattgtataactaataatagaatatttactcatttatctcaaataagcagtataagtatttttaattaaatatattta

SEQ ID NO: 210003 - DNA, 429 bp, Glycine max
  unsure (1)..(429): unsure at all n locations
ctcagcttntcattcattctatgtgcccgtagtggtccacattgtgtttcgtgcatttttattctcgctntgnttactttntataccccctgttgacgtgcttaagccattttacttaagtcatttctcgcttaacttaaaaataaaataaatttccaccgaacgtttgaattgtattatccattaacttcggttaaaataaattccgaccgtttggttgtgccgtaaccacgttggaaatcaaaaagaggtaaaaaataatataataatcaaaaagacatcttttagtaaaataaagcggaaaatcaatcggacgttttctctttgggatttctcattcttaatcgaattgattaataactaaagtgaaactaaaggctaaaatcaattcgcctagtcaagctcgtccataaaaataggcttttgaag

SEQ ID NO: 210004 - DNA, 474 bp, Glycine max
  unsure (1)..(474): unsure at all n locations
agcttatgatgatggatggctcacattcttcttaggttaacttatcactttcaaattgagctntcaaaactatcatgacatgtagaggaaaaacaaggatttcaaatcacaaaatgttaagagacttttattttcagaacaattacccatttcttgaacatatcctataattcaaagaaaaatatgcaaagttgtacatgcaaacagatgacttacattgatattattataataatgattgatttttatttatatccatcaattatgaataatatttaaagtttctttatacttttaacaatcaaataatgacttacattgatattaatttaaaacatttaagatgtcatattggtaataataataataatcattattttaaaattntgaaacagtcaattattgtaatatatcaaattcaaaaatatgaaatatttattccatattanaatcaaaattctctacctaaaactt

SEQ ID NO: 210005 - DNA, 415 bp, Glycine max
gctggcgagagctcatggagaaagaagaggggagaaaagagtagtggtgttcacgaaattgaaggaagaaaaagggagagaagttgaactttgagttgtgtctcacaagattctcattcatcaaagttacaacaagtgttacacatgcttctattcttgagaagctttcttgagaaaacttccttgagaagtttctttgagaaaacttccttgagaagtttctttgagaaaacttccttgagaagttagagcttagctacacacacccctctaataactaagctcacctccttgagaagcttccttaagaagattcctaaagaagctagagcttagctacacacacatctctaatagctaagctcacctccttgagatgagaagttagagcttagctacacaccccctataatag

SEQ ID NO: 210006 - DNA, 463 bp, Glycine max
  unsure (1)..(463): unsure at all n locations
agctntgagggtgcgtagcccaccatctttttatattttattatcgagaatgtggctaccctcacgattatcgtctccctttccatcattgggggtaccacttgggccgccagatccctccaccttttgggcgtgttctttgaaagatccgtccccctttttgaaaatgttctgtagttgcatcctatccagaaccatatcaaaattgtactaatactgcctaacaaaggcaaccattaggtccttccaagaatggactcgggaaggttccaagttagtgtaccagagaacagctaccccagtgagactttcatggaaggaatgtatcaacaattcctcatcttttgcgtattcccccatcttatgacaatacatctttagatgagtcttgggacaagtagtccccttgtactagtcaaagtccagcaccttgaacttgggaggggtgatgatattgagtact

SEQ ID NO: 210007 - DNA, 407 bp, Glycine max
caggaatgaggctaaaccgagagaggcaatgacttgttttgttaaggaatgagttgaagaagaatggacagagatgcttccagttctgcatgaagtgttggggatgcttgtttctccccatccatcaaggtcaatgttagaaggcacacaagtcatttcaccagctataacctttctaaatgactctgttttcacctcatctgagtctgttccattgccatcagcatatgttacatcactgccatttactttattctgatcacaaacctacaacaaagagttacaaattctagttaggcagttaattaggaccacaaaactgtgactaaatcaaccaaaagtgttatcaatacaatcagaaacaatattcgaaaagaagacaaagtaaaatcattctgataattact

SEQ ID NO: 210008 - DNA, 497 bp, Glycine max
  unsure (1)..(497): unsure at all n locations
tcacctgcggcatgcaagcttgnncgcacatcgttcgcgtgtatgattattcactctacaaggntngaagtaaaggagaccttcaatcctataatgcaacgtgacagacaaaaatgggtagttaacttgaatggccattattgtcaatgcggaaggtattccgcgcttcactatccatgttcacacattattgcagcttgtggttacgtaagcatgaactactaccaatatatagatgttgtttacacaaatgagcacatcttaaaagcatactccgcacagtggtggcctcttgggaatgaagcggcaattcctccttctgatgatgcatggacacttatccctgacccaactacaatttgtgcgaaaggtaggccaaaatcaacaaggaaaaggaatgagatggattggctcgaaccatctgacaaccgacaaaaatgtagtatatgtggagcagaaaggcacaataagcgctgatgtccaatgcaatctgaccg

SEQ ID NO: 210009 - DNA, 423 bp, Glycine max
  unsure (1)..(423): unsure at all n locations
gcttataagcgcgggtctaggagacaaaggtaaagcgttcgcgatatgctttgatgatattccgagtactttggatttggtacgaccatgccctcctgatttccagctgggaaattggcgagtggaggaacgccccggcatttacgcaacgagcataatgtaaacctttacggttttaaaagctctatagttgggcctaggctttagagtttttccttttgttaaggctttgtgtcttttgtttttgaatttataatacaaggatctttcttcatctgttcctggtctctacccattctcattcatttgcatgtttacttctttttctgaaacggcagatccgatgacgagtcccccgaaggtactaatacctgngacccgcctatcgacttcgagcgagaaatgaatcaaatggaagatgaa

SEQ ID NO: 210010 - DNA, 496 bp, Glycine max
  unsure (1)..(496): unsure at all n locations
atccttaagcacctgagctgcaagctgaacctggtttaaaaaaaatctgttactgttatttcagtcacaaggtaatgttaagttttttgagctcatgtgactgccattgcgtctgcatcaactgcatttgcccccaatttcccagaatgtcaaggatcacgctgaaattgcatccgcaaccacaatttaaaatatggcttgaagcttaatagcacaataaccttcaaccattccatctcttcatgctgttttaggctctatttaattgacctaaattatctgtcattctggtgattaatagagaatggcctgctgaaaagatgaaagatattaagcttgctgatgcattaaagcatcccatatggagtttggggagaaaaataactattgactctgctacccttttcaataagggttggtgcctttaacagtcaatgcattnggatgataaagtcctttcttgtgagtctatctatttgatttactatagcaatat

SEQ ID NO: 210011 - DNA, 394 bp, Glycine max
atatgaacccaaacaaagtcttttatcaatggcagtgatgcaaaaccacttgtttagatgactgagtatagatctcttccctggtgtatttatatagttacttgtacaatttaattttctttaatgccttctacaagcaatatgtcttgggcaatgcactgtacaaagggatgtttcaaattgtggtggaaatgggttgaataactcatcaatatacttataagtttattaattttatcaatatattacaaaaacattttcaacaaattgtatctcttgaaaaccaaggcttagacctgttggcttttgtaaaagctataatgcaaagtaagccttttaggttaggccaggcaaaaaacgaatagcctatttcttataatagactggactcaaa

SEQ ID NO: 210012 - DNA, 474 bp, Glycine max
  unsure (1)..(474): unsure at all n locations
accttaagtcacctgcggcatgcaagcttcagaccaaagcaacatagaatccaggtatccattttccctcaatntaatggattntcaaggtttgagaagtgaaattgagaatgaggtaaatttggagcaagctctcacctcacacaagtctataacatcaatctaaacttgctcaaactggatttacacctaaaattccaccgaatcaaaatttgactcctcaacacccaattttaccctagaaatggctctttgttcactttggtcattngtttttctctcttgcacagcccaagcttcctcataagtcctaaatgacatttcaaaactttaacctccaaataccactaaatccagatttggccttccaactctcaaaaactcactctttttccactcataacaccatattctcactttctaaccctaggttaactctacccttcatccctagcagttttccataagcaattt

SEQ ID NO: 210013 - DNA, 425 bp, Glycine max
  unsure (1)..(425): unsure at all n locations
ctcagcttataagcgcgggtctgggagacataggcaagaggtcgcaatatgcgtatatgatgttccgagtacattggatttggtacgaccatgccctcctgattcccaactgataaattggcgagtggaggaacgccccggcatttacgcaacgagcataatgtaaacctttacggttttaaaagctttatagttgggcctaggctttagagtttttccttttgttaaggctttgtgtcctttgtttttgaatttataatacaaggatctttcttcatctgttcctacgtctctacccattctcattcatttgcatgtctacttctttttctgaaacggcagatccgatgacgagtcccccgaaggtactaatacctgngacccgcctatcgacttcgagcaagacatgaatcaaacggaagatg

SEQ ID NO: 210014 - DNA, 275 bp, Glycine max
cttaacatatctatatcaccagaaaatcgtggtcctagttcgggtaagattgtctctagctaacagaaagtattcattgtctatatcaattgactttgttattacaccactttttgagtgttgcacgcatcctggaaggaaacatcttcttaataatgctaacaacgcgtgggaaatattttttgtcatatataaaagacttattttgcttcgtgcccctcacaaacgagggcttgagaataatctccatgcaccacttgattttctttggaccc

SEQ ID NO: 210015 - DNA, 407 bp, Glycine max
  unsure (1)..(407): unsure at all n locations
caccatctattggtgactatgataaagaaatntgtattggacctcatatcaataataagatctaaagaatattcttatgtcaaattgaaacttgggttgtctttatcatcctttgcttgtgcatcataaatcattgatttactaattatgcaggtagccaatatgagacacaacgcactatttagaagatttataagtgctcttacacgtggaggacctggtggattgcctcgaccaattgaagtgcatgctcatgacccactacgatatgtcggtgatatgctaggctggttgcatcaagtatgacatgaaagccttgtggatgaatgcttgaagccacttcagctcttctgaatgatattttttctgccatggcttatttgttcatcatatactatttttgtatg

SEQ ID NO: 210016 - DNA, 432 bp, Glycine max
agcttacttgtgctgttgaatatgagtgcaatgatggagcaaaaaggtaggcaatgcagggagattgaagtactgtgcagagggtgaaaatgctcaaaggaagtaaaatggcaactgcgtaaggtagttgccttatttactggcagtttcaaatgactcgcttagcacatggactcactaagcgagtcaacatgacgtttgaattttaaagctcatgcacttagcggatctgctcgctaagcccaatacacaaattatgaaattccagagaagtttttgggcctagcacgaaggtatgtgttgggcaagttctgcagctttgatcggtcctgcaactatcgcttagtgggccaaggctgcgcttagcgaataaactactccttaaatgaagtagtggcctgtgcttagtgccttcgtttcgcttagcgttat

SEQ ID NO: 210017 - DNA, 425 bp, Glycine max
gcctctcgacatattatgcgcccgaatcggacatgcgtgtgaaaagttatgtccatttgaatttctcgagagtttccgatgtttaattatgagcgtctcgatatattatcagcctgaagcggacctccgtgtgaaaagttatgaccatttgaatttctcgagagcttccgtcgtgcaattacgagcgtctctatatgtgatgcgcctaaagcggacatccgagcgaaaagttatgaccatttgaatttctcaagagcttccggcgttcaattttgagcgtctcgagatattatccgcctgaatcggacatccgtgtgaaaagttatgaccattggaatttctggagagcttccgacggttaattctgagcgtctcgatatattatgcgcctgaatcggacttccgtgtgaaaagttatgaccatt

SEQ ID NO: 210018 - DNA, 335 bp, Glycine max
tgggaaaagccatgctgacactcccctgagccaatttaattagaacctctgggataactttggccaacgttgtatgtggtaaatagtataatttttctgtccacagatttttcaattctggtacttataattgaacaggactgcctattgtcaaacaaattatcatgaagttaggattttcggggacattaaaggttacagtgtctaagaatattgaggttacctagtggcgtgttgctagtgaggaggtggtacacactgtctgccgataatgacactaactgattcagaagcctcatcttctggttatatctctctgatatttgttgtatgga

SEQ ID NO: 210019 - DNA, 418 bp, Glycine max
  unsure (1)..(418): unsure at all n locations
ttttgggttgagttaaacccanacccacattccaagaagattcatgttttatattcaaataaaacacacttacaaaacaagaagcattcaataaatacattttccagggaacaacatcaacagaatacaataaggaaaactcttagaagttaaaaccaagttcaatgtttaaattgagcaaccagcctggattgctccctactaaagccatgattaggcttcaactagaagaaatgtcaataaagaaaaacagtgagtaataagagtggaggataaaatataaatttaaaaggaaaaagaagacataggcagaattgacaaatcaactttctgccaaaagaattcaacacatcaaataagacaaatctggtccaaatttctgcatagtcgaccattgacaaccttaacacctaaccat

SEQ ID NO: 210020 - DNA, 214 bp, Glycine max
agaaatgcaagggacataacttttcgcacggatgtccgattcgggcgcataatatgttaagaggctctaaattgaacaacggatgctcttgagaaattcaaatggacataacttatcacactgaggtgctattgaggctaataatatatcgatacgctaaaaattaaacattggaagctctggagaaattaaaccggtcatcactttttacact

SEQ ID NO: 210021 - DNA, 427 bp, Glycine max
gcttccttgccgccgccgccgccgtgcgaggaggcggtgttcaccaccgctgttgatgatggtgaggacgatgaggagttttactcgccgagaggctcctcgttaggaggctccggcggaaccggatcgggttcccggcgaattttcgccgctggaggaagaagcgtcatctctagttcgtgctcttcctcttcttccgcctcgccggaaaggtcacactctatcgcgaattcgccgtcggcgagttcgagttcccggagaacacagccaaagtctcctgaaaattacaaccaccaacacgtacaatcttcttcttctccttcgttgggctcaacaccagaaagggtttttactgaacataattcaaatgaagcattaagtgcatgtacacatgcacatgcatcatcatcatcatcatcattacatg

SEQ ID NO: 210022 - DNA, 392 bp, Glycine max
acctctagaagaaatgagagaaactgtctagtttttttggtaaattttcgatatcccttctgtcaatttcattcatatatgtatagctctacaccctcagacataaaacagaaaagctctaacacaccctatcattacttgacacctgtaccactatgtgatctccctaatacagaaagcaaggataatgcaattccactgtaacataattgctttatttaacactactagagtaattgcctagagtaacagcctagtgaatgtattcctcccaatccgtgggctttcggctagtatgtctgggcctcttgtgctgactgctgtcacttaccaataaagaaatgagtgctgctaggtgcacccagcattattgctggtgcatccagcaatta

SEQ ID NO: 210023 - DNA, 388 bp, Glycine max
  unsure (1)..(388): unsure at all n locations
agctntggatgctgagggtaggggatttccttttatggggnctnacatgaatcaacaatcttacaataatgttttcaccaccactacagacaaggaggagcctggagatgactcgtttcttgactctttgctatgttaaaggaatattaattcgcttttgcatatatatggatatggatggagttcttggaaggggttggtttaggattttacttgactaatagagatacagttcattccatttatattaacttagatgcagncgtttaagtatttttatgtctgttggtcggttagagttatagtttcacctcgctaatttatggacaaaaacttgccttagaattcaacatgagttattaaggtgaaattctaattctaactaaag

SEQ ID NO: 210024 - DNA, 412 bp, Glycine max
  unsure (1)..(412): unsure at all n locations
tttaacaacctccccagctttctgtgccattaccattctgagctcatacccatcgctcaacataacttgggccaccatcaaggaggcaccagatagacgcggttgcagcggaggagcctccacataagcattgctcacaatttctaatgcttgaaaagatgtttccaatgactctttcacagcttgcacataaggcgtagaagatggacaactcactagtatatcttcttcccctgacactgtaatcagccatccttccaccacaaacttcaatttctagtgcaacattgacgggaccaccccaacagaatggatccaacccaacctagcaggcaattgtaggcggngtttatgtccattacttgaaaggttatctggcacgtgtgtggcccaatttgaattgggagaccga

SEQ ID NO: 210025 - DNA, 389 bp, Glycine max
  unsure (1)..(389): unsure at all n locations
agctcgccataatgccacgataatatttatnatagatcgcaacacttccgcataaaaatgtcgaactaatgagcctaaaatgatcatggaaccaaacacaaacccaacaacatgattgagaattgataacatactcaccagcgtatcacacccatactaatgtccaacaaggcacataacgattgtcatccaccaccactagtgctcagcctacactttatcgaaatcccttcgtccccaatattatggaaacattcttaacgacaaattggaatagtctcactttaaataaatatgatggtactactaataatctagaagaacacatcaatattgttgttacacaagatagcttgtataccaccgatgacatatgtttatggtgagtc

SEQ ID NO: 210026 - DNA, 344 bp, Glycine max
aacacgcaacaaaccggtcttgcacatcctcacaaaccaacgcactgcttcgacataaaggttgcacatcatggcacaggaaacgacggtggactaactgatgttggccattggaaccccattaccaaacaattggagagcaaggtcttctatcaacccaaactgtcttccaaacctcacagactccattgtgacattgtagaatatggttaccatgggaaacaagctctgagtcctgacccaatacacgaaaagattggactctcgccatggcttcaaagcgttgagcatcaacaaagccgttcctcttgaaatagggcgcggaaactgctccaaacaaacca

SEQ ID NO: 210027 - DNA, 494 bp, Glycine max
  unsure (1)..(494): unsure at all n locations
acctcagagncacctgcggcatgcaagctngaagccatgggtataaaaaagaatctgtttctttgtatttcagtcacaagggaatgttaagttttttgagctcatgtgactgccattgcgtctgcataaactgcatttgcccccaatttcccagaatgtcaaggatcacgctgaaattgcatccgcaaccacaatttaaaatatggcttgaagcttaatagcacaataaccttcaaccattccatctcttcatgcttgtttaggctctatttaattgacctaaattatctgtcattctggtgattaatacacaatggcctgctgaaaagatgaaagatattaagcttgctgatgcatcaaagcatcccatatggagttcggggagaaaaataactattgactctgctacccttttcaataaggtttgtcgcctttaacagccaatgcatctggatgataaagtcctttctttgtgagctatctattgattttac

SEQ ID NO: 210028 - DNA, 387 bp, Glycine max
  unsure (1)..(387): unsure at all n locations
ggcttgttgtgaacaccttgattaatcttgaagcaatgcttaacctttgaatgtttgttgaagtaatcttgatcgcaaccttgtttgagtattctttgacatcatcaaaattatgtattcatacattcacacccatcagtttagtttacacttttaatacaattggatcttatccaatttaaagcggtttggattagatggattttcagatgtaatcttacttttaacttttttttagaaaatactaaataaaagataagatatataataaatataaaaaaaattaaaatatcaaatatttttatttgtatgtcattgtataactaataatagaatatttactcatttatctcacataagcagtgtaagtatttntaattaaatata

SEQ ID NO: 210029 - DNA, 453 bp, Glycine max
agcttttgttattggatgagaaacaaggtagtatggtttgtttaatgtttttcttctttggattgttataaaaggcagaaagttttgttgtacaaataggaaggccaaagttttgttttccctgccacttaatctgtagatgtttacttgtttagacacttgtgtttttgagtcttctaattacttttggaggatcttctgatatcaagccacattactctcaatacatatttttgagaatccagctttatgttagaatcacttcattctaatgtgttgattaattttatgttttcatgatcctaaagttaaagtctttatggtgttaagatttatcccatctttttgtccataaatgtattatgtgttagcattaatcaatgctttatgttcattataatttgctcaaaatatattctcaatatacttattttctgctcatgattaagcatt

SEQ ID NO: 210030 - DNA, 368 bp, Glycine max
aagggatgccccacattatttccatgacacaaatgcaaaaatgatgatgaggaaactttatgcaaaactggtcatgcatgcgcttatgcggacgctcaagtgtcaaatttttatggtcaggtgatgctagggttcaggattcatttcctctattttaaatcaacccaatgtttccaaaatatgttcttttatcaatttgtgcattcctccaagtccatttcgggcgttcggggaaatttttacagcattcacccttcatgtgtagacacgttttttcttcaaaaatgggttatgatcaatgaattttttttcaaagataaagtggaaataatcttttttcagaagcatgatcgttattatcattacaa

SEQ ID NO: 210031 - DNA, 459 bp, Glycine max
  unsure (1)..(459): unsure at all n locations
tgcaagcttcgngcaactgaagcatggaataaggattgtcttatcttgcataagagatttctcaaagaatatcaccctgtcatcaattgaaagaagcttttaatggaatataggagtctagatttgccatgatacccttatctagaaacaaagtttatgagtgggtggagaacatatgtactatctttggaaagacccaaaagaaggatgcaaatgaataaaaaaacatatgaaagaagaggtcaatattctttaatcttccatattagttcgtcctagatttaaacattgtattgatgtgatgcatgtggagaagaatttctatgatatcttaatcatcaggattattaatattaaaggcaagacaaaaaatggtttgaatactcgtcaagatttggttgacatgtgtatatgtaagcagttgcatctgataacaaacaaaagtcaatggacattatt

SEQ ID NO: 210032 - DNA, 386 bp, Glycine max
tgggcatagcaccccacctgacgtccgcaaggtctcctgattcccgcgacatatctccaggtaccactctgtggtcaacaataaaagcaggaagtttcacccttcaacacttcctcatctcaagcttgtaggattatggggtacccatcacatgtggtactaagtggcggtcgggcgatggtgcacaacaagttttccacatccacaatgcgcgcataaacccaccatcccctgttgcccacctccatctgagctcacgtactcccacgtagcccatatcctcgtttctctcaacaccgggtccccatcaatcctcccaagctttcacaacatccaagcaaaacaacattcaaacagcacaagctatcacagccaagcaaaacaag

SEQ ID NO: 210033 - DNA, 484 bp, Glycine max
  unsure (1)..(484): unsure at all n locations
cggatccttaagtcacctgcggcatgcaagcttgtaatcgattacacacatactgtaatctattattttangagttnttcagaaaacattctcaacagtcacatctttttatctggttcttaagtggccatcaaaggcttatatatatgtgactagagacacgaatttgaaaaaagtttttcagaacaaaaaaggtcttatcctcttaaaaagcaaaatcgttttatcctcttacaaattccttgtccaaaacacttgtgattcaataaggaattatttgagtgctcaaattgttcaatttatctctttcaagagagatttcttcttctcttcttcttcattctgaaaagggattaagagaccgagggtctcttgttgtgaaaggattctaaacacacaggaaggattgtccttgtgtgtttagaaattgtaaaaggaatttacaagatagtggaactctcaagcgggttgcttggggactgga

SEQ ID NO: 210034 - DNA, 426 bp, Glycine max
tcaagctctaagaatcaagatcaagattcaagactcaagattcaagaatcattatttacttaatcatgataagtatgaaatggttttttcaaaaactgagtagcacatggatttttctcaaaacatgtttaccaaagagtttttactctctggtaatcgattaccagattattgtaattgattaccagtagcaaaatgaatttgaaaaagttttcaaatgaatttacaacgttccaattgatttcaaaaaatctgtaatcgattacaatgttttggtaatcgattaccagttcctttgaacattgaaattcaaattcaaatgtgaagagtcacatcctttcacataaaagctttgtgtaatcgattataccgatttggtaatcgattaccaatgattgtttctgaataaatcaaaagatgtaactc

SEQ ID NO: 210035 - DNA, 386 bp, Glycine max
gaatcgattacacagttgattatgagacaatgactgatttattattattctctactttaatcaattacaatgagatataatcgattacttctctttctataagtgttttagaagaaaacaagaacactttaatcgattgctttgagtatctaattgattatattgttcttgaggtgtttccagtttttggaagaacactttagtcgattaaaaagataatctaatcgattacttcattgaattaatcaattatcttgtagatttaatcgattacaggcggttataactattttctctataaataactacttatgttttttctaacaacacaacattttgtgcttttaaatgagctacgatcacatgttgttactagttaaagaaag

SEQ ID NO: 210036 - DNA, 466 bp, Glycine max
  unsure (1)..(466): unsure at all n locations
agctntatgaaacactagctctagatatgtttcttcagcgnataagtatagacaccattcttaatttcttatcaaattaacatcttgaaaaaaaaatcgtataccgacaaaaaaataataccaagaattaggcttctttctgttagatatatttaatgttaaaatgagctaatgattccatacaccaattgataaatcattaacggaaggtttattgattttatatatgctacgtcgaggctgtttataatgggtttgaatattataactagcgtaccccattgcccagaggttcttcgctatgcgaaggtatgagggaaggatattgtatgcggtcttacccttaaatattataaataaatcaaaagtaaaataaaagatttcactaaaaatatccagtcatgtttataaaactgatgataaatctaaaaaatataanataaaagtcttagacaaaaatcatatt

SEQ ID NO: 210037 - DNA, 409 bp, Glycine max
  unsure (1)..(409): unsure at all n locations
ngtgaaagtcctagaatgaatggaagcaaaaacatgtatcaagcttactttngcgcagaagaaaaggtaaaaaaaaaattgtaaaacagaataaaggtaaacaaaatgactaaagaggttgctactttaaaggcgtctgaagttcaaagagggaaaatagcaaaacttacttattaccaccattatctgcactacgctccactgtgaactcattaaaccaaggtaagacaagatatttgatgtactccaagcatgggtttccttccactatcttgggcgggcaataagccttttttattttcacattcacttcagcctatatccaaatataaagttattttggacacaacataangtttattttanaaaaataaaggaaagttacaaataaaaggaaccactgaaaata

SEQ ID NO: 210038 - DNA, 458 bp, Glycine max
  unsure (1)..(458): unsure at all n locations
agctnngaagaatctgtattagaatttctaattgttcacaattctttagntggatattccatgaaggtttaaaatcatcaacagcatcacagaggtttatgtgctttttttctacattgtgcaaaaggcatgactggttattttcttttatccatattgctgtctgaacttgtcgtgcaatgagtctccagcacattgctgtagtcaaattcatcaacttatcccaaattacaggataatctttgtcttttctataagcagggggagctgaataaacaaagtacccattgaagcgaagaaggcgattcaactccttcagtaaaatcccatctgcaaaaaacaaaataaattgacaattaacaagtctgtcagaataacgtgcagtttcatgaatcacttgaacaaaataaacaagtctgtcataataacatgcagattaatgttaatgtgtcacacat

SEQ ID NO: 210039 - DNA, 404 bp, Glycine max
aggcttccaacatatgtttatggcacttgtgttatttcattttatgggaatgtgatctaatactattccatagtcagatagttgttgcttcatccacagaatttgtgcacaacaactaccagcagaaatatattctgcttctgctctggataaagctacataattttgtttcttgctattccaagaaacaagtgcagaccctatgaattgacatgtaccactagtacttttcctatctgtttttgatccagcaaaatctaaatctgagtatcctactaggttgcataaagaattcttagggtaccataatcctaaactaattgttcctaatagatatcttatgattctttttactgccattaaatgtgaaaactttggatctgattgaaatcttgcacacatgc

SEQ ID NO: 210040 - DNA, 398 bp, Glycine max
  unsure (1)..(398): unsure at all n locations
ttcaattccaactatcatgaactactctttccaagaaaatagggcagaggcaaaaaactctgcccaaaacacattcacatataacagttttccttactcaaataccccagtaatattctctttgttccgattcgttaaccgttggatcgacttgaaacttttactggaggtttctagtacataaggctacattttgaccgttgggatcttctagaaattgtccagaacccaatatgtactacctttcccataactagcaatgcacaagcattttctgcacatgttgaaaaattctgctgcacaattcaacagcaattttctgcataatagggcagaatttgaaattcatcttgcccacatcctaatttgctcanattggatcctacaagtcctaaatc

SEQ ID NO: 210041 - DNA, 437 bp, Glycine max
  unsure (1)..(437): unsure at all n locations
agcttcttccgctttggctggtttactttatttataggaaggngaagnagtcgtcttatcttggctactataaatgtcttggcccctcataatcatggttttcttggtggggcattgacaagtaatgtgtcctcttccaagacatttaaagcactttatagagctagtcttctcttgcatactagccttagggggttgcttttctattgtcttccccttatcatctttgggcttagaaggtgctgcccctaagatgcctagaccttggtctttctttggataagagtgagagccgtaagggtttaaagtagactttcttttatgtctttactctacccttatttcccaatctaagttagcctctacattgtccttcccatggaagtataggaggttaacgttagcctctcgaggctttctttcattctctctcctat

SEQ ID NO: 210042 - DNA, 290 bp, Glycine max
ggaagaacgtaaagaacggagaacgttatctgacaaacccaggcccccccaaaagggcacaccaaagcgcatccaaaaaccgaagtcgagccccacacaaccaccaagggcgacccagcgcactgggacgggagaagacgacatacacaccgggccctgccaaaccaagaaacccccacccacccgcagactagacccacaccaccaatacaagaccgaccacgcccgatgacgaaccaacaaccagaccagcaaacaccgaccccgttgcaaacaacaccccgcgggca

SEQ ID NO: 210043 - DNA, 446 bp, Glycine max
agcttgagaggatagatggggacgcttttgttgatatatacgaggatatgggctacatgggagtacgtgagctcagttggaggtgggcaacaggggatggtggttttatgcgcgctctgtggatgtggaaaacttgttgtgcaccatcgccaaccgccacctagtaccacatgtgatgggtaccccataatcctacaagctatagatgaggaagtgtaaaagggtgaaacttcctgcttttattcgttgaccacagagtggtacctggagatatgtcgcgggggtcaggagaccttggggacgtcaggtggggtgctattgcccaaaaccaagcttgaccaatcctgacccaacccgggcatagtcagtcagtgagaacctgtgatgtacctaaacaggcgagctctctgcagtcaacagataaaaggaacatagaccaccaagca

SEQ ID NO: 210044 - DNA, 410 bp, Glycine max
  unsure (1)..(410): unsure at all n locations
tgccataatgtaataagaatttatgaaaaaggaacattctataggttctgcttaaaaacttccaaaagaaaaaggagaaaaataaatgataaaaaccttattgtgggggtgacagagggtaactggcaaataatttatcaattccagaaaaatagaatgtccatgtaattggctaaacacctaattgaatgccatcaaagattataaaaatatattacattgattcagaataaagttagctgatattaaccatacactnttctgaattttagtgttcatggaattgggatatgtgagaattgcctatatgaaaaaggtgccttggctaggcttcgaatgcaatcttatttggaaaaaaacatgaatggttatatttctctgctagctaaagcataatgccatcctgtaca

SEQ ID NO: 210045 - DNA, 393 bp, Glycine max
  unsure (1)..(393): unsure at all n locations
aagctaaactacaaattgcacagggccaattgaagagtgccattgaaacctatactcagcttcttgctattctcctagttcagagaaaaacttttggtcaaagaagaagctgtataaggtttgttggttttaatgctgattgatttataatacggaggagacattgcttgtttttctgcttaccccctttttctcacactttttgtaacaggactacatagatcatgctaggaacatggaagtggaaatatggcatgatcttgcttatgtgtacataagtctgtcacggtggcatgatgcagaggtgtgtctttcnaatctaaagccatcanactatactctgcttctagatgtatgcaataagtaattaatatgggttatctttgagtttat

SEQ ID NO: 210046 - DNA, 420 bp, Glycine max
  unsure (1)..(420): unsure at all n locations
ctcatgatgattcacgattgattcaggagttgtgtgatacaattttttgacaaacagctcaaaagtcaagattacttcatgataacaaagatgatgacattcaagaatgagttccagattgagtcaagaacacttcaaggatcaagaggaaatttgatttcaagaatcaagaatcacgattcaagattcaagactcaaagattcaagaatcaagagaagacttaatcaagataagtattaaaaagtttttcaaaacattgagtaacacaaaaagttttcacaaaatcattaccaaagagttttactctctggtaatcgattaccagattatagtaatcgattaccagtggttttaaaacattaagattntcaaaattcacaatgaagagtcacatatgttgatgtgtcatcgactacacc

SEQ ID NO: 210047 - DNA, 425 bp, Glycine max
ctcagcttaatgtgttctccctcgtagaactactaactacagtaacaattgctttccatctatctggtagtgatgacaatagaatcaatgccttcacctcatcctcaaatttaatctgcattgactccaattgggcaagaatagtattaaattctttaatatgatcagttacggagataccttctcccatcttgaggtcgaacaactgacgcatcaagtatactttgttggttgccgacggcttctcatacatatctgattgcgccttcattaagcctatagtagtcttcttcttgtttacgatgttgaacgcaatgttcttggctaatgtcaatatgatcacgccaagagtctgtcgatccagcaagttccattcttcttgcttcatgtcgtctggcttaacccttgataagggctgatacagc

SEQ ID NO: 210048 - DNA, 354 bp, Glycine max
ctgaatcgtatcgagaaggtcttgataagcggatgagttgaccacagagtgtttgatgtcggccaagcaatcaagagtggggatagagagaatgaagcattgtcccggtggcacaatgcgtgaaagggcatctatcgcgatgttgccggtgccggaatggtattgtatagtataatcataccccaggagcttggccaagtattgatgttgttaaggggtttgtatcacctggttcattaagtctttcatactctagtggtttgtgatgataatgaaatggtggttgaggagatagtgctgccatttgcgaacgacagaggtgatcgcatggagttctctacgtaagtagaggaa

SEQ ID NO: 210049 - DNA, 409 bp, Glycine max
ctcagctcgaagtatctgctggtataattgcctgatgcatatgctctttattctgtataggtgatgacctcattgacatcttttgtcttgaatggaatagccttgacacggatatcgttactgactctgatgtttggcatgggatattgtggtgctgcaggttatcccgactggataaactcgccatccttcacttgccattttgtgacgacaatcgttgacggatcacctatgaagtttattttcctagggtattgtatatcctttctgatctcataaacattaaatctgtctagcaaataggacaattatttagactctttcgacacacctgtggaatttgacttggattcgttttctgattagtcccttgttatgctggaaaaatcatcccccttggggtgcattc

SEQ ID NO: 210050 - DNA, 404 bp, Glycine max
taaacacttcaattaaattagtattaagacaaataaatgatttatttcaacatgcacacaaccattgaaggaggggaggtaatgatataatatgctaattttagatacgaaaagggatatactcagtacattataattttatccaagaaattatcatttcctatctccagcgtttaaatattcttttaccctcaatttaattttctttttactttatcttctagcatgccaatgtccattattaaatactaaattaaaaaacataaaaatgcatcaaagatatttggtaatgggtaaacgaataatcaatccataaaaaagcttaacaagttgtgctcaaacttcatattttaaaataagccaagctaaacatttaaatttgatttctctaaataaataagcgt

SEQ ID NO: 210051 - DNA, 469 bp, Glycine max
  unsure (1)..(469): unsure at all n locations
agcttctcaaggaagctacctagtctataaatataagcatgngnaacactgggtggaactgtgatgaatgagagtcttgtgagacacaactcaaagttcaacttctctccctttttcttccttcaatttcgtgctcccccctttctctttctctccctctttcttttcctccattgaagcatcctctccaagcttcttatccaaggctcatcttgggggagaagctccttcttccatggcttattccctagtggatggcgccgcctcttacctcttctcctttgtcttccgctgcatctcaagggtggaaaatcaccattaaaggacctcattgaagctcaaagatccagcctccatagaagccccacaaacaagcttccatcaaatatcaccaccaccaccatcatcttcatctccatcatcttcaagctcttcctcagttgagaaatgatctcccacatggtcattc

SEQ ID NO: 210052 - DNA, 424 bp, Glycine max
  unsure (1)..(424): unsure at all n locations
cttgaaactcagctgcttctacatatcattgatcaataggactgtgtaagatctttcttgtatgaaatnttggcttcggttgctctggtcttttttttttttggtgtgagtaggagagcacgcataaagattcagttagcaacttaaatgagcgatcacttcctatcccctcacgccttgaccaagttactatcgtttgccttcctttttacactttacctcaactctgtacatggttcacacattgtttgttcctaagaacttatctttcttttccatttcctcttgctcttctccattttgaatgatgaactcactgttttttgttcatgtcaatagtgacactccttttttctgtctatgatgaacagttcactttctttgaaaactcctgactaactcaaccaatgataaacgcctccct

SEQ ID NO: 210053 - DNA, 359 bp, Glycine max
  unsure (1)..(359): unsure at all n locations
agctngccacccagctcgcccaggttatcangttttcttcctccagaagcaacagcctcttggaggaatcttctggagggcccaagtgggcctggttgctatntgcaccccatttttactaagtacacccccctgcctttttttggtgattctttattcgtaaagctacggaaacttaccaatatcgtaacgatactcggtttctatccgtaatgttacggaaccttgtggattacataaccatcccctttttgacttacggaatgttacggaacctcactaattgtgcaacgatgcttccatttgatttccggtgcgtcacataaccttacggatggcgcatcaatattttcttttgt

SEQ ID NO: 210054 - DNA, 415 bp, Glycine max
  unsure (1)..(415): unsure at all n locations
ttgaactaagctagaagctggactacatctcccttggcaatttgtctttacatacttagacacttcctgagcaggtacgagcagttatgcaagtgggatcagcaactttcattatcagagtaatcaagcacagcggaaattctgcaagttgcaagtcgtttccaggatgtcaagacatctcacatgacatcagctttctgcttctgctccccctgtctccatgctcttactgcagcatcttctatcagctactagtcttttccaggatgtcaagacatctcatgtgacatcagctttcccttgtctccatgctcttactgcagcatcttctatcagctactagtagcttacatcagtcatcatcagcagcagcagtctccccctcanaatcatgtacatacaactccccctcaaa

SEQ ID NO: 210055 - DNA, 373 bp, Glycine max
  unsure (1)..(373): unsure at all n locations
agcttgngttcgatggccccaatgacatctattctgttagcgnttagctctactgagctgtaaaagattggctaagattntgttaaaacataaacacttatacaatgaaggaaagctggagttgctgcacatgatgtccaacgttatgtcaaggaataagatcgggctgcacaatgcacaaggcaagataaaatgtcacatgaagaattgaagttgcaggatccacgatgtcggatacaatgtcctgacatcctgcccgagaatactgcagttgctgtacaatgcaagataaaagtcaagtgcggaattgaagttgcaggatccacgatgtcggatacaatgtcctgacatcctgcccgagaatcctggagct

SEQ ID NO: 210056 - DNA, 367 bp, Glycine max
ttttgtcactggtaatcgattaccaaaacattgtaatcgattacagccttttgacaatatttggaacattgtaaatctcaacttgaaaactttttcaaactcattttgcgactggcaatcgattacaacaatatggtaatcgattaccagagagtaaaaactctttggtaaatgtttgctcaaaaactcatgtgctattcaaagctctgaaaaagctttttaatacttatcttgattgagacctttctctcttctttaatttcgagtcttgaactctgaacttgattcttgacatcttgagacttgatgtatgaattctggctttcttctggagtcccgaattctccttgattcttgaactctagac

SEQ ID NO: 210057 - DNA, 472 bp, Glycine max
  unsure (1)..(472): unsure at all n locations
agctnccgttcctgagagcatgtcttatnatttccttcagcctttgctttcgtgtagcttaggaaaaacgtcatttcttcttctttctttcttccaaagccatttctaaagttccaagcagtttctcaatcacccacagccaccattagtcaccacaaaccatcattgttctccattgaaaacacccacaccaagaggaacccttcaaccgaagcggaatcttccaacttggcttgcggtttcggtaaagaacgaaaaccctaatctgacctttcattttcttttgaggtaaccatggttctatgcttgtttcttgttagtttcatcttgtctttgcatcttttctgactttggaaccgccattgcatgtcttatgcttcttttgaaaaaccttagagaaagagactntgtaaacgttatcctttcatgagatgcatgttatnttcgtaacctacactgagacccggtcaca

SEQ ID NO: 210058 - DNA, 390 bp, Glycine max
aagtcctctcactatttggaggttgatccatgttctcagtatgaaaattagtagtggaatgctcaaaatcagaatattcagaatcaccctcaacagaatgctcaaaatgctcaaaatgctcaaaatgctcaaaatgaccaggatacacattttgcctaactaatctatgaaaggttctatctatttcaggatcaaagggttgcaaatcacctggattgcccctagtcatgcactatatgcagcaaataatgtgtttctcaacaagcatctaacaagggggtaaaactacagctatactcaaacgatatcaaaatgagccaaaattttgtgagcaacaccctaaaatcatgaaaagatagcacaaaaaatttcaaacagaaattcaaagtc

SEQ ID NO: 210059 - DNA, 456 bp, Glycine max
  unsure (1)..(456): unsure at all n locations
agctttgagcaaattcaaacgacatttatntttttctcggctgccttatcgagncccgcaatatatcgacacgctcgaaattgaatgttgaagctctgatcaaattccaacgacaattaaattttactcggatgtctgatatagtcccataatataacgagacgctcgaagttgaatgttgaagctctgagcaaattcaaacgacaataacattttactcggatgtctgattgagtcacgtaatatattgacatgctcgaaattgaatgttgaagcttctgagcacattcaaacgacaataactttttactcggatgtttgatcgagtccccgaacatatcgagacgctcgaaattgaatgttgaagctcttagccaattcaaacgacaataacttttttctcggatgcctgtatgaatctcgccatatattgagacgcttgaaattgaatgttga

SEQ ID NO: 210060 - DNA, 424 bp, Glycine max
ctaagctttagtgggtgtctacaacttggaatggagtttcacctctataatacactttatcatttgatggaaacctttattacacggattacttgagtgaaactccaattctgattggagagcaatgccaaaagcactaataaaactacatctaagttttgtaattgcttttattatttatactgtgttgcgagaatttgtttgattttgggaggaaagaaggaaaacaaagcacacaacattttttttaatttgattttaatctctaccattaattgttttagttgtcatctaagcgttaaaatcaattgttctcatttctcatttgaaacatcccattttatatatatatatagatgaaagcgtgttaaaactccccctgagtccaacaacttttaagcatgttaaagagaatatatagaac

SEQ ID NO: 210061 - DNA, 412 bp, Glycine max
  unsure (1)..(412): unsure at all n locations
ccatggcagaggtctccacagaggccattgcctccctcgcccaatattatgaccagcctttgagatgcttcacctttggggacttccagttatcacccacggtggaagagtttgaagaaatcctgggatgccctttgggaggaaggaaaccatacctcttctcgggattctatccctctttagctagaatttctaagatagtccaaatctcgacgcacgaattagaccgcggaatgcacgtcaaaaatggggtgtgtggagtaccaaggatatgtttagaagcaaaagcaagagttttggaaggtatggcgaatgggtcccgttcatggacatcctgtcactttngatcttgggagggggtcctctttccaaatgtggatgggttggtggaccacacagcgattgactgctt

SEQ ID NO: 210062 - DNA, 358 bp, Glycine max
taaagtgcatataattaatgacttttggtgtaaaatacacattaacattactcacacattttaatatttgtgttggtgattaaaggtgttcgtgactatagcaacttctagggccgccgctactactgtcataatataaaacttcgtaccccattgtccagaggctcttcgctatgcgaaggtatgggggagggatgttatacgcagccttacccttgcatatgcaaagaggctgtttccggattcgaacccatgaccaacaagtcaccaaagcacaactttaccgctgcaccagggctcgccctcctactactgccatagtatacttagcagaatttgcgccatcagctgcaagcag

SEQ ID NO: 210063 - DNA, 478 bp, Glycine max
tgcaagctggatatgtgcaatagcacactgactttgttcttattgtctgctgacccccgtgacatatcctcaggtacccgtccatatgtgatactacgtggcgatcgggcgatggcgcaaaacaaatatccgaggtccacaagccctggcgtacgcacaccattcccagttgcccacctttaaattgagctcacgtacacgtaggtagaccttctcctcattcctctcaacaccgggttcccatcaacccctccaagccttcacagtgtcaaatcaattcaattccatttgacatgaaactaccttggaaaaaaaacggagcggaggcagaaatctttacacaagattcattcgaattccacagagtttttcctaccaccatacctcattaaaggcctcatccctgattcgttaaccatgggattgccttgaaaatataattgggggttactaatacagaaatcctacgtttgaccgt

SEQ ID NO: 210064 - DNA, 387 bp, Glycine max
tgatgataacaaatattatgacaaaaaccccaagagaatgatttcaagattaagttaacaagtttcaagaatcaagagaagtttgatttcaagattcaagaaaagatgaactcaagattcaagtgaagaaatcaagaagacttcaaaagggaagtattgaaaagatttttcaaaacacaaacatagcacagttttgtttatcaaaagagtttttctcataattttctaagttactagagtttttactctctggtaatcgattaccaatttcctgtaatcgattaccaatagcaaagtttgatttcaaaagcttttaactgaatttgcaacgttccaattgatttcaaaatggtgtaatcgattacaagatattggtaatcgattacc

SEQ ID NO: 210065 - DNA, 462 bp, Glycine max
caagcttaggaattggtgcggaatctttgttctatatttggccaatgcgctcaggcactgtgagaaacaaattgctctgggctaagcgagtacctatctcgctaacccgattatgcagaacaaaattttgctatcataactggctaagccatttcagcatacacaacagataggttgtgcttaccagactgagatagagagaatgatatagagagaggtgtaatacaacctaagagagtgtgtgatgttgtaataaggtcaaatgcaacgcaagtgattatgctaaataaattaaaaggaaatacattgggcgagtataggatccatgctctcttataatctatgccttcgaatcatataaaaactaataatttttgtagcccagcctcactacatgcctattaaagaccttctgattctgtataggcatttctgactttctgacatacgacgacatacaaa

SEQ ID NO: 210066 - DNA, 416 bp, Glycine max
ctcgcagattagtgttgctgcaaaggatcgaaagggatgagtgatgcaaatttgattatgctgcttcgatgaaaaggaagcctgtggaaaatggagagaataagaaggagggagaaacctatgttgtgattgtcgtttctacatggccaaatttcccactagcttgacaatatcaatatgcatccaatatcagtccttcttattacccaccaccctaccagccaagaacacccaatcatccacaaagctcgtgatccaatcctaccccccaagggcattggatagaagactccaagaagatttgaccagagatgcaatagaaggccctagggttctcatgagccttagggtagattttgggcccatgggataagtatgagcccacttatctttgtacatattagattaaggtttca

SEQ ID NO: 210067 - DNA, 438 bp, Glycine max
  unsure (1)..(438): unsure at all n locations
caaattcaaatgataataactgttttacttgatgtccgactgagncccgnaatatatcgagacgctcgaaattgaaaacagaagctcagggcagattctgacaacaataactttttactcggatgtctgattgagtcccataatatttcgagacgatcgaaattgaaaattaaagctttgagcaaattctaatgaaaattaatctctactcagatgtctaattgagtcccgtaatatatcgagacgctcgtaattgaaaacgaaagctggttgcaaatgcaaaccacaataacttcttactcggatgtccgatcgagttccgtaattatcgagactctctaaatcggaacagatgctatatcaaagtcaacgacattatttttactcgacgtccattgagtcccgaaatgtcagacctccaattgaataatgctctac

SEQ ID NO: 210068 - DNA, 413 bp, Glycine max
  unsure (1)..(413): unsure at all n locations
tctcagctcataatggaatatcaagcttataaactcccttataatgttctgcanaatgggcaactgggccgcacaaaaaacactaatcttgtcaacgcaacttcccattgcgaatacaatgcattcttcaatagatctggtgcaaacaaggagaaatacacaaatctgtatatatattcttaaataattgtcaatattagtacaaatgtgtttctaatgtttacaataacacataaatataccatagttcgttgttctatatcatctaaacctttctacatcggatgtttttaacttttacaaaatatgctgcccatttcttgagaatagttgatatggtctccatgactaatgttgttccatcaccaaaccactacgaaatatgaaatatacatattataactgacgtacat

SEQ ID NO: 210069 - DNA, 424 bp, Glycine max
ctggggcggaaggctcggcatctgcatccaccattgaagagtggcaaagaaggggcaagtccgaccaaattgttacgaatgctactctactgcttaggaactaagaagtaaaactaattgagataattgttctaatatatcccattaattccacttctgtacatattaataatactttccttctaacaaaatataatttttttataacagaatttgttaacatcctactcacctaatttgtggaattgttataactgcctaaggtagtggatgctacaaccaactagtgctttatgctttggcacttcagatgtactccttgaaggtaaatgggcctctttgatattctctgtggcctgctaatgtgagtgctatctggtattaagggtgggtaaacgggcttcagtccatggattggcctgcc

SEQ ID NO: 210070 - DNA, 417 bp, Glycine max
  unsure (1)..(417): unsure at all n locations
aagccttgcttctacaattctaaaccggntctagaactaatttcttgacttttttgctctgaactgattcattgaaatcctaaccggtttatgaaccattaaaaatagtttggctatgaaaactgaatcacattatcagtttggtcttccatcctgaactgagtcatgcccatcacaacttccttacatcagaggttgaattgcactagaaaagctttgcaccaagaaacataaagagttaaaaacagaatttttttttcatgatttattcactttgcgcttgctttactgaagcaatgcttgcaataatggaaatggcaaattaaagcagtgttttggttccatttgggtttctataccagaccaaactgtgatgaaatgtacatgcaatcatattattcttaattcttatgggta

SEQ ID NO: 210071 - DNA, 481 bp, Glycine max
  unsure (1)..(481): unsure at all n locations
ttaagtcacctgcggcatgcaagcttcttatccaaggcacattcttggngactttttcttcttcttccatggcttattccctagnggatggcgcctcctctcacctcttctcctgtatcttccattgcatcttcatggtgtaaaatcaccattgaagcacctcattgaagctcaaagatccagcctccatagaagcttcacaagcaagcttccatcaagtggtatcagagcataagagcttcaagtaggtgctctttaaacctccactaattttcagctttaccttctcctccattggtgtttcttcatttttctccatgtatctcctcacatgtcttgtgctaaatgttgttaacatgattctttagattttccacctattaatcttgctatagaagctagaatttgatttctatggttcaaatntcttgtcttgttcttgaaccatgaattgtgttgagtttaggttcctttgagtttt

SEQ ID NO: 210072 - DNA, 410 bp, Glycine max
gcttacatggagctacatcatgtggtatatagagcatcttcgtctatgttagttctttcgcttcctctatttttttgtttggtcaattcactttaattcctttttcttcattctattctccatgtatatcctccattgacttgaggtttggtgctgtttacagtatattcaaaccaataaactgattaaatcttagatttacactcattcttgcatttctatggctcaaatttcatagatatactctcgaatcatgtttttgtgttgattttacgttgtataatttttcaggcataatcttccattgctgaacctttacatctaaactttcttccaaaatattgatttgaaaaaacacacgcccttctaagtgtgaattacttaatccatgtagtcttagagtcatgttt

SEQ ID NO: 210073 - DNA, 440 bp, Glycine max
  unsure (1)..(440): unsure at all n locations
ttaagtcacctgaggcatcaagctngaggagtgaagtctaatccttcacatatctcagaanacacatgaagaacaaattaaatgcatacagtcatcaaatcatataaatcaattctaaaaacataaaaaatggctaaattaccaaacacaaaccatcaattcatgacaacaagaaaaagtattttagggtaattacaactcgtctaatcaaattaaaaacaattataataaatcaaaatgtctactacacaattaacttgagatctaagatcaaccctattactcacaaccaaacatccattataaatcattatctaatccctaacgttaccaatataaccaagatggggaaaaggggaaaataatcaaaatcatatagtaaaagacaagggaaaggtaagggaaacactcatctanaaaagcacatagataagctttga

SEQ ID NO: 210074 - DNA, 414 bp, Glycine max
gaagacagtttccaatcatgctatcttatgcaatgacgattattaagtgtcagggccaatcactttctatggttggactttatttgccaaaaccagattttagccatggacaattatacgttgcattatcgagggtcaattcaaggcaaggattaaaagttattattcatgataaagaccaaaaaaatatgacttctactactaatgtagtcttcaaagaggttttcaaaaatcttacaaggtaactctaaattttcaaacaagaaattgtactatctattggcaataattccaaactattatcttacttatatacattctaacatacagccaaagatgatatcatatattacaatgttaaatttaacattgccaggtatgcaatcttaatcaccacattaatatcttccattt

SEQ ID NO: 210075 - DNA, 417 bp, Glycine max
  unsure (1)..(417): unsure at all n locations
tgtgaaagtcctagaatgaatggaagcaaaaacatgtatcaagcaaacattngcgcagaagaaaaggtaaaaaaaaaattgtaaaacagaataaaggtaaacaaaatgactaaagaggttgctactttaaaggcgtctgaagttcaaagagggaaaatagcaaaacttacttattaccaccattatctgcactacgctccactgtgaactcattaaaccaaggtaagacaagatatttgatgtactccaagcatgggtttccttccactatcttgggcgggcaataagccttttttattttcacattcacttcagcctatatccaaatataaagttattttggacacaacataagttttattttaaaaaaataaaggaaagttacaaataaaaggaaccactgaaaatatattcatc

SEQ ID NO: 210076 - DNA, 406 bp, Glycine max
  unsure (1)..(406): unsure at all n locations
cttctatggaggctggatcgttgagcttcaattatgttctttaatggtgatttttccaccatggagatgcagcggaagacaaaggagaagaggtgagaggaggcgccatccactagggaataagccatggaagaaggagcttcaccaccaagatgaaccttggataagaagcttggagaggatgcttcaatggaggaaaagaaagagggggagaaagagagaggggggagcacgaaattgaaggaagaaaaagggagagaagttgaactttgagttgtgtctcacaatactctcattcatcaaagttacaacaagtgttacatatgcttctatntatagactaggtagcttccttgagaagctttcttgagaaaacttccttgagaagcttctttgagaaaacttc

SEQ ID NO: 210077 - DNA, 413 bp, Glycine max
  unsure (1)..(413): unsure at all n locations
gctttatgaaacactagctctagaaatgactcttcagcgnataaggatagacaccattcttaatttcttatcaaattaacatcttgaaaaaaaaatcgtatacccgacaaaaaataataccaagaattaggcttctttctgttagatatatttaatgttaaaatgagctaatgattccatacaccaattgataaatcattaacggaaggtttattgattttatatatgctacgtcgaggctgtttataatgggtttgaatattataactagcgtaccccattgcccagaggttcttcgctatgcgaaggtatgagggaaggatattgtatgccggtcttacccttaatattataaataaatcanaagtaaataaaagattcactaaaatatccagtctgttataaactgtgat

SEQ ID NO: 210078 - DNA, 412 bp, Glycine max
tgctcaccatcgctgaaggagaagccttcagggtgtttcttatattccttgtcctctaaatcaccattaacaaaggttttttttcacattcatttgatgaaactcaaggtcaaaatgagcaactaatgccaatgtaatacgaagagagtctttattagatataggagaaaaagtctttgggtgatctatttcttcgttttgagtaaatcccttagcggcgagtcttgccttgtatcttttactggctcctaatgaatcctttttggtcttaaagacccatttacagccaatggccttttccctattagacaactttacaagggttcagactccattactctgcatggaatttatcttatccttcatggcgtcataccataaatttgactctttacaactcatggcttgatca

SEQ ID NO: 210079 - DNA, 444 bp, Glycine max
  unsure (1)..(444): unsure at all n locations
gatccttaagtcacctgcggcatgcaagctnggccaatggtcaagtggaatgattnctttcttatgcgnngncngccttcccctgcctgttntgcctagatgactagaacccaaatctataaaggtattaactctatatctttcctcctttttcatttgaatacttttcaagagctaaaaagagagagagcaaaagcatcccttgctatcaagtcacttcgacaaaagatggaagacaaactgaagatagaactagaacaaagggtgcacatttagtttttttggtggttttacacgtactgttttcccactttctcaacatgtatgctggcaatgttattagttactatatagtatttgttaaataaaatgtatcgctggcaattgcaggaaattgaaactgatttgatagtgaaacaaacttaggaattagcaaaggaatac

SEQ ID NO: 210080 - DNA, 407 bp, Glycine max
cactatttaggctagataggtggtcttgttctcttgattcttggaatcaaacttctctttatccttgaatcttcttgatttcttctcatgaaacatcaaattaaacttgatcttgaatttgttgactcaatcttgaaatcattctttgggctttttgtcatcatctttgtcattatcaaaattacttgaatcacatgattcatcatcatgaagcttgcttctacacttatttcaggcttagataggtggccttgttcgtgctcgtgcgcttagtgcacttatggaccgcttaacgcacattagtgaatttcagcttagcgcgtgcctttctcgcttagcggatgaactgaagcggtgcgcttaatgagatgaagcggtgcccttaacgaacctgtacagctcatctt

SEQ ID NO: 210081 - DNA, 441 bp, Glycine max
  unsure (1)..(441): unsure at all n locations
ggctgcaagcttatcctttgttgtatcttaggntattgttgataggntccaacgctgctggaaataaatcatgtagtttaaaaacgaaagtttgagcatttaaggttttgagttttgaaatcggggatctggatcattcgatgagtattggtgaaaagctcctatttgagaagactttnttttatttatgtattggaattgatataacatggtttggatctgttttgggatgattcgaaagccctgagaggaaattctacacaattttgaaattttgcataacttgtgtccaatgactagtttgggttccaatgactagtctcgcgtccaatgaccaattttgagtccaatggccagtattgagtctagtggctacgtttgatgtggatgcgattaatctttgttcccttgacgaaataatattttagtatgcttcgtttt

SEQ ID NO: 210082 - DNA, 379 bp, Glycine max
  unsure (1)..(379): unsure at all n locations
catcattaatgtttgtttattgcattngtatcttntattttgtctttttgtttgtttttttttgtcagtatgtgatagggtgcacatggtggttgtaatattgattagaataatgttttttttgggttaattttttctatggattggcaaagatggctttttctatgaaggataatcatggggataatttcattcgtaaccctattttgaagtatgctggtggagacaaaatgttgttccttgacatacatgagaaaaagtagtcctttttcaaattggttggcattttgaacgacgacttgaactgcacaggtgagtttaagctgtggaggacaggggttcgtgatgctggtctaaaagagttacccttgatagtgat

SEQ ID NO: 210083 - DNA, 427 bp, Glycine max
aacttctcgacatcatcaaaatctacatgatttacattctccccctttttgatgatgacaaccacctggtggttaggagcaacaacgaagaaaaaatatctatctgcatatagattactccctcttggttttgcaatgattgcttatatgagacagctgaagatttcatatttttcatatgtaaacaattcctcataaacaatagatcatttctcttactattttatcttttatctttctctccccctttgtcaacatcaaaaacaaatcatgaatagagaggagatagatgttaccacttgttgcaatgtatgagaatcaagtgataccaaaaggcattaaaacaatcattcaattataatgaagctaagacaagttcaattactcatcaatctaacacaatcacatacaatcaatcatcaaatat

SEQ ID NO: 210084 - DNA, 423 bp, Glycine max
ctcaagcttctttgaaagattcctaaagaagctagagcttatctacacacacctctcttattctaagctcacctccttgagatgagaagctagaacttagctacacaccccctataatagctaagctcacccccatgacaaaatacatgaaaatacaaaaaacgtccctactacaaagactactcaaaatgcctcgaaatacaaggctaaaaccgtatacaactagaatggccaaaatacaaggcctaaacgaaggaaaaaacctactctaatatttacaaagataagcgggctcatacttagcccatgggctcaaaatctagcctaaggctcatgagaaccctagggccttcccatggtttctcaccaactcaatgagaggtgctacaagtatagaaaaatatgggacaaaccttttgtaaa

SEQ ID NO: 210085 - DNA, 362 bp, Glycine max
aaaacccacttgaccgctaagccgtacctcaactaccctgactccacaaaattctctctatgcttctgcaacactgacttttgggataagcccttcatgtcatggtcaaccaagctcccccttatgtgtagctacccttgccacatcaaggcacttagatctcatgcccttatagacaaaggcgggtctgtttccttgaagaaattcatgaccacaactctatcttgaggtagcacctttcttatacgatacctatctttctcataacaagagttaatcatgtagaatatcactgacacacatgttgcgcaacctgtgattgaaatcaagttgtgtttcaccattatttcatgacatgggag

SEQ ID NO: 210086 - DNA, 386 bp, Glycine max
  unsure (1)..(386): unsure at all n locations
tagaatccatcttgggtctttntcccacaactctcgtaaatgggagagaaatgttcatctaaagcatacaagttcctaatattatcaaatcctaaaatttgagctcttagggagcaaaacaatgtgtgtcttctagagagggcatcaactaccacatttgtttttccctttttgtatttgataacatatggaaatttctctaggtactctacccattttgcatacctcttgtttaacttgctttgccctctaatgtacttaagtgattgatgatcactatgaatgacaaattccttggaaacaaagtagtcttcccaagtttggagggctcttattaaggcataaaactctctatgataagtggngtagttgagggtggcactatg

SEQ ID NO: 210087 - DNA, 397 bp, Glycine max
  unsure (1)..(397): unsure at all n locations
agctnttacaaaaaggttcatcacgtcaagttttaatttgttttaaccatcctgcaaaattgcggcaaaagatgaatcgagtcacatcactgcttcgtctactgccaaacatatttaggattattgacgtccttgttacttccagtttcaccttgacaaagatgtcatggaccatgttgaaaatctaaattgattcaaccccatatcctgcgtaaaaattcgcaatacttcgactgtgcatcattcgcatgcatccatgcttttcattggatgcattgctcatcgcattctttccttgaaaaataaaataacatagaatgaacttatcaaaaagaaaaggaaacgctctacggcgcccttaccaaactcgtgctagagctagagtaatgggtgaagc

SEQ ID NO: 210088 - DNA, 402 bp, Glycine max
  unsure (1)..(402): unsure at all n locations
cacctaatgtcatattagatgggaatttttatcttaacataagagattntagatggactttaatcctaatcccacaaccgaccttttcacgagatctctacttaaccctttggttaaatgatcggccaaattatgctgagttctcacaaactccactgatatcacaccatgcatgattaactcccgaaccatgttgtgtctaacacccaagtgtctagacttcccattatacacttgactatatgccttagccaaagttcatatggggtaaccttattccttttgttaagaattcggttcaacaagtaacaggctgtcaacatagcctcaccccaaaatccttcacttaaacccgaataggataacatagaattcaccatttctttcaaggttctattcttc

SEQ ID NO: 210089 - DNA, 408 bp, Glycine max
ggcagaggatcataaaccacagagtcttgcgacaggtacagacttctgattcaaggccagctgggttaccaggttaaccaaggcatctagtttaccctcaagcttcttagtttcaactgatgaagatgaattcgtggctactttatgcactcctctaatgacaatagcatcatttttggtactaaactgttgggagttggaagccatcttctcaattaaatttctagcttcagcatggttcatgtctctaagggctccaccactggcagcatcaatcatacttgtctccatgtactgagtccttcataaaacaatcggagaagaagctgctcacaaatctggtggtgagggcaactggcacatagtttcttaaatctctcccagaattcatataagctctctccactg

SEQ ID NO: 210090 - DNA, 408 bp, Glycine max
gatcatcttccttgacgactccttgaaaattattgtcatcaatataaagatatgacaatttagagagtgatccaagactttcaaatggatttccactgaatttattaaaagagagagagagagattttaaatctatctcccttaagttgcggagattacccaaaaaagtcggaattgttccttcaagttgattacgtgataaatcaagttcaacaagagaagtcaaatttcccgaagaagttggaatggttccttcaagttgattatatgacaaatcaagttcaacaagagaagtcaaattttccggggcatcagaaatagtcccatgcaagttgctggaacttaggtccaaagacttgagacgatgaagaccgcataagcaatcaagtatagaagatgagaatgaat

SEQ ID NO: 210091 - DNA, 485 bp, Glycine max
  unsure (1)..(485): unsure at all n locations
taagcacctgcngctgcagcttatgaaaaagtaaagagagctattgaattttatctaacgatattatcttcaggtcaagtggaaaactataggttgcttctacttcttcttcaactcttcatatttagtgagaaccttctaaatctcatcattaacatttaaggcctcaaaaaccattgcttcattatcccaagcagtctcaacgaatttatggacactagtctgggattgacgatattgttgtactaatgtggtggtcaactcatcttgcaaatatcgtcagaaacaaaaggatgtgcatataagtaacatcacaaaaaaaataattttaacattataacttatagagtaaaaattgacacgcaacaactaagttattgacatggctaaaacaaatgaaattgtatccataaataaaatattttagttcaaaatttatcgatgtcaactcanataagagcaaccaacaaggaacatactaatgc

SEQ ID NO: 210092 - DNA, 417 bp, Glycine max
gctgcttgagggctttatggggctgatcttgagcttaatgttgttctttaatggtgattctccaccatggagatgcagcggaagacaaaggagaagaggtgagaggaggcaccatccactagggaataagccatggaagaaggagcttcaccaccaagatgagccttggataagaagcttggaaggatgcttcaatggaggaaaagaaagagggagagaaagagagaggggggagcacaaaattgaaggaataaaagagggagagaagtgaaactttgaagtatgtctcacaagactctcattcatcaaagttgcaacaagtgttacacatgtttctatttatagactaggtagcttccttgggaaactttcttgagaaaacttccttgagaagtatctttgagaaaacttccttga

SEQ ID NO: 210093 - DNA, 450 bp, Glycine max
  unsure (1)..(450): unsure at all n locations
agcttgcctgtccgatgcagtagtaatgatgttccnatgttatgttggggaacggttacgaacccgaaatgggtttaggcaaagacaacggcggcataactagcctgataaatgccaaaggaaatcgtgggaagtatgggttaggctataagcccactcaggcaaatataaagagaagcatcacgggaaggaagagcggtagtcaaagctcgcggttgagacaagaaggtgaaggaagcccaccctgccacataagtaggagctttataagcgcgggtctgggggatgaaggtcaagtggttgcgatatacgaagatgatgttccgagtacattggatntggtacgaccatgccctcctgatttccagctgggaaattggcgagtggaagaacgccccggcatttacgcaacgagcataatgtanacctttacggtattaaaagctctat

SEQ ID NO: 210094 - DNA, 416 bp, Glycine max
  unsure (1)..(416): unsure at all n locations
tactcaagcttncacttatatatacttcatacgtatgcgcgcatacacacgccaatttatattcataacccaccatgtatgtgagtggaatatacaaaatggaagcactgaccgcggctattatatcatgcaccgcatgaccaccatcattttaggaagtttcacgaatctccgacaaacacgacgctaaatgcacacaaatacaatggtatatacgatttgaattacaatagtcactcatcatcgtctatactcatgaatcagaactacaacgatactacaccaatgaagccgcacagactaaacgcactggcgatacatgagcacaatgctaagtacaacccaaagcccacagctaggatttaaggacattaacgagaggtgattccacgttggaaaaacatgggagccacctc

SEQ ID NO: 210095 - DNA, 418 bp, Glycine max
  unsure (1)..(418): unsure at all n locations
agctncgatatcttgacttgagcgacaatnatttttgtggtacggcaacnccttcttttctttgtgcaatgacctccttgactcacctcgacctctcttctggattcatggggaagattccatctcagattgggaatctctccaatttggtctatcttggccttggaggtagttatgatctgttagctgaaaatgtacaatgggtatcaagtatgtggaagcttgaatatcttcatttgagtaaagcaaacctatccaaagcatttcattggctacacactctccaatctcttccttctttgacccacctatatttgtcagactgcacactccctcactataatgaaccatccttgctcaacttctcatctctgccaactctccatctttaccgtactagttattcccctgccatttc

SEQ ID NO: 210096 - DNA, 405 bp, Glycine max
ttaacatcacaagtaagttccttgctctgttctttggtattttattgttctttaggatagagaaccttagattaagttttagatttttagggttttactgttttagaagtagttaacattttaggacttgtcactcgttttgcattatgtacattgtactaagggctgtgcatgtttgatatgcctgttagaggcccggaaaaaggaagaaaacgagctgcattttctgaattttttctggaaaacgtgatgaactcgctaagtgagcatgctacgctaagcgagttcatcaatattcattgaatatatgcgttttctggaagaacttgctgagcgcgcctaccgtgctaagcgagtttatcttttgaggatgaatattcattctcttgatgaagtacatgtggc

SEQ ID NO: 210097 - DNA, 401 bp, Glycine max
  unsure (1)..(401): unsure at all n locations
tgttctcacttccncggccggtaggtgcgtaattctctattatttattttcccttcccttcacaacactaccatgtgtgtacgttggttgaatctgtgggtgtgcagtgaggctgagatatacctgtttggaggttgcattacttcttggaaagttcccagaggtaaggacctcctctttgttcgccctgacgctgttttcaatgggaacaaacccataaggttagcttcttctctttaattactcttttaagtctctccaggtattctttttccatcaactatggtctatgcaaagcatatagtttcattttttttttatactatttttggatcccccagacactaattaattttatattattgggcagtggaggtgttccgcattgttttccacagttt

SEQ ID NO: 210098 - DNA, 459 bp, Glycine max
  unsure (1)..(459): unsure at all n locations
agctntgccctcagatccgtgttgttggactatgtcttaattagacagccctcctaggtttagactaacttaaactaagcttcatccttagatccctcttgttggactagacttatcttatatagcttacgaaagtttagactaatttagcctaagctttgtcctctaatccctcttgttggactagacttagaccaaacagcattattgtaacagcatacttaaaaccaaaacttaatccgcagattcctcttgtaaggctaagtttcaattctgcttcattcaagttcttaggcaacaatacatttcccaatgctaaagtcacctaactatgcacacaaatgggtgatcagaccaagagcatacggaatttaagcactgaaagaagcattgaacacaagatacacaatcaattagatgttaaaataattacatcagctgttctttagaaaatcccaa

SEQ ID NO: 210099 - DNA, 462 bp, Glycine max
  unsure (1)..(462): unsure at all n locations
agctnaaagcatgcaacagactctttattgttattacatgactaagaatagcctttacaganaaaataaaaaagagtgttgtccgcatattggagtaaattaacctcaactttgagggtccccaccaaatagctagaaaagatatttttcttaattgctggtctcatcatcccactgaagccttcaactacattgttaaaaagaaatagggctacaggatcgccttttctcaaccctttttgtgctacgaactcagaagtagggctctcattaaccaacaccgaaatattattngattgaagccaaaccttaatccaaccaatccacttatcaccaaagcccaacctcctaagcttgtagaacaataaatcccaccacaccaaatcattggcgttctcaaacattgctttgaacaagaggtataccttcttctcccttcttgcatcgacaataacctcattg

SEQ ID NO: 210100 - DNA, 363 bp, Glycine max
ataatgtttgtgatgtttatatgctgaaattgcctatggaaaactgttagagatgaaatgtagagttaacctagggttggaaagtgagaatgtggtgttatgagtggaaaaagagtggggctttgagagttggaaggttaagtctgaattctgtggtaaatggaggttaaaatgagttaatcctagcttgaaatgtcatttaggacatgtgagaaaggttaggctgtgctagagggaaaaacaaatgaccaaagtgaacaaagagccatttctagggcaaaattgggtgttgaagagtcaaattttgattcggtggaattttaggtgtaaattcagtttgagcaagtttagatggatgttatg

SEQ ID NO: 210101 - DNA, 349 bp, Glycine max
gaccttaagcaccgagctgcactggaagaggaagatgagtgcttttgtggaacagtcaggcagtaatggagcttgaattattgcacagaagccaaatggcttcatgtggttggcagcacgttatgagtatcctaacaaaacctgatgcactaaaaatatgaggatctgaaggaacactccattggatttgttccatcacactaggaatatacctacacctgtaccacttgatctcactggttgggactggtgacaaaggacacatgcacaagttttattgcaagtctccctatctgagtctaaaagaacatataacttgcccttggaaccaaacatgacctggcacgct

SEQ ID NO: 210102 - DNA, 405 bp, Glycine max
ctatatgagatccccttgtcgttgccttccaacgagggtgtttcttatcgagaacccaatctcctatctggtagttcacttcacgacgtttcccatcagcttggcttttcatagcagcttgttccttagaagcttatttcgaatagcttggaaagtgttatccctatcagttaacatctcttcaacggcctcaatgttcgaagaccctgtaatatattcaggaaagataaagggttttcggccaaaggtgacaccatacggattggctccaggtcccgcattccatgaagtattatgggaccattcgacccacgggaggagcttcccccccatgcttggccgacgatggatgaaggctcgcacatattgttcaattatgccaattcaaacctctgtctgtccatc

SEQ ID NO: 210103 - DNA, 423 bp, Glycine max
  unsure (1)..(423): unsure at all n locations
caaattcccttacgaatcatccaaattaaggacttatcataacttgacaagcgtaccaaatttgtcacaagtagtaagggactctgcttgacttggattaatgcaaatcaaatttaaaagcaatggataaagaatttaaaataaagataaagaaatttattatataagataaagatttaaagatgaaaataaaagaattaaattaaaagatgacaaagatagaagataacgaaaataataaagatatacgattaagataaagataagataaaaatagataatactaataaataagaatgtgataaggttgggacctgacctgccttgtttgcctaggatgtatgagtttatgatttntctttatcacattaggtgattgtattctacccacatctgtgtaattacttgtctctgattnctcac

SEQ ID NO: 210104 - DNA, 414 bp, Glycine max
  unsure (1)..(414): unsure at all n locations
cccagctcgccaaggcgagcaatgtggcttgctccagaagctactgcnctttggaggaatcttctggagggcccaagtgggcctggttgctatttgcacccccatttttactaaatacacccctgccttttttttggtgattctttttttcgtaaagttacgaaaatttacgaatttcgtaatgatacttgttttctttccataatgttacggaaccttgcggattacataatcatcccttttttgacttacggaatgttacggaacctcactaattgtgcaacgatgcttccttttgacttccggtgtgtcacagaaccttacggattgtgcatcaatactttcttttgatttccggcacgtcacggaacttcacaaattgcctaatgatgggtgccaagcacctcaaaatga

SEQ ID NO: 210105 - DNA, 325 bp, Glycine max
agaacatcgctttcttcgagattggaggtgccacatgagctgccacgtctctccacctgtgggcgtattttgcaaaaagcgggccccctcttgcatatgctctgttactgcattctatccggagccgtattagaattgcaccgatactgtctaaccagggcaacaattaagttttttcgagaatggacttggggagggcccccgatagaatacccggtcaccactgctcttatattaactccttggaagaaatgtattagcaggttctcatcttttgcgaatgcccccccatcttctcacatacatccttagaagggccctgggg

SEQ ID NO: 210106 - DNA, 367 bp, Glycine max
aaaaaaagaagttatatattgacaaaagaacacaatatatttctcatttaaaataaaatatttctcttaaaatttactttatgtcttactaatgtgtccgtggtctgtggatagcatgtcattaaccatcactctcgacaacataataattgttattaaaagatacataaataatgtttgattaaaatatttttcaatctataaaattatggagcttttataaaattaataattactttaatttgtttttgttcctgtctctaaaaaatatgaaaataatgtattttatttattgaaaaaagattaaaactatagagtgaatagtctacatatacactcataatataaataatttttacactcttat

SEQ ID NO: 210107 - DNA, 430 bp, Glycine max
  unsure (1)..(430): unsure at all n locations
gatactcaagctcaccatgggagaganactctncgaataatcacacccaacacctgatttgtgatttngngnngaacggaccggttagctggattatacacctatgcagagtgattttgcgttgaacaatagttgtaagcatttaatgtgaaaaaacttatgagataacctatgtgagtatggcagtttcaatacataatgtgtaagtggattaatgacatgcaaacatttttaggagacggtaacattcattgtatggatactattaataccactaagctattttttacttttgttgttgcgttaatccctcagcataaaataagttttagaattgtggcgacaagtgagtgagttgccattcctattgtttcaataaataaatattgcaatcctctcattgtaccttaccatgttttccagcaagacc

SEQ ID NO: 210108 - DNA, 487 bp, Glycine max
  unsure (1)..(487): unsure at all n locations
gagtcacctgcggcatgcagctngnaaagaacttagaagaataggatttgcttgtttaacatcgntcgcgtgtatgatatccactcaacaagggttgaagtagaagagaccttcaatcctataacgcaacgtggcagacaaaagtgggcagttaacttgaatgaccattattgtcaatgcggaaagtattctgtgcctcactatccatgctcacacattattgcatcttgtggttacgtgagcatgaactactaccaatatatagatgttgtttacacaaatgatcacatcttaaaagcttactccgcacaatggtggcctcttgtgaatgaagcggcaattcctccttccgatgacacatggacacttatccctgacccaactacaattcatgtgaaaggtcagccaaaatcaacaaggataaggaatgagatggatttggatgaaccatctgagcaccgacataaatgtagtatatgtggagcag

SEQ ID NO: 210109 - DNA, 426 bp, Glycine max
  unsure (1)..(426): unsure at all n locations
ctaagctntgctgcatggggttcaacaataatgtacttggccttgaacctctattgtatccagatcaacggtctacagatactctgcacagaaggaaccaattgaaggtccaaacatgtgataaaacaaaaatgtatctgccacacacttttctgccacgtggcaaacaatcaacggtcaatttccctttccactgtccattttgtctttagccttagcgcaagtccatgcccacctcaaactttcttataagtttaatcactcagatataaatataaagagagagagaaaagaagaagctatcaacttattagcaacaaggagaggccacaattgctctcaaatcctgaaaaaggttaaaactcgatgacccttatcctatcttcttctaaacaattttacaaaacaatatatcattctcttctc

SEQ ID NO: 210110 - DNA, 481 bp, Glycine max
  unsure (1)..(481): unsure at all n locations
atcctcagagacacctgcggcatgcaagcttccatggagaatgtgagagctgtaaatgtcattcttataagatctgagacggtctctggattgataattaattttgcatagagtcagcttggcgctatacgtcaacctgaggaatggtgcaattctgctgctgtctaccttaagagcgtactgttacaacttcctttctgttacttaggaattccaattggggttaatccaataagaagggcggtctgtgatccaattataagcangtttgaggctaagctgagcaaatggaaccagataaatatctccatggctggtagaaccactcttattaatgatgctttaacagcattacctctgtattatatgtcttttttcagagtctcctcactgccattaataggatctttgccatttaaaggcaattccttcgtgagctctaatactgagactagtgtggagagttggcacaacattgttg

SEQ ID NO: 210111 - DNA, 427 bp, Glycine max
  unsure (1)..(427): unsure at all n locations
cgaagattagaggagaatttgatatttaacttgcctgtaaacctcactatattccttttttttttaacaaaaaaaattctatactggggctcttatgtcttggctactgcaggaaatatattggttgggttgtcagagtatggtttatcactttatctaagtcccttgagtgactttccatttgcaattgcatactggccatacttatattgatgaaaatctgaatttgcagtggtgaaagtgcaagtgacggaactactgaaggaagtgatgagaactcccagaatgtaagttctctgccacttgtcaatatntatctaaccaagaagtgacaaaatccttatatccatgtttgttcttgcttgcttatgtagacaaatgatgtctgaatgagtggtctacctcttnctagaataccaatatatat

SEQ ID NO: 210112 - DNA, 415 bp, Glycine max
  unsure (1)..(415): unsure at all n locations
ngctaacccatggaagatcctaatatctcccacactnnttgtggtggttcattcttggatggccttgattttctcaaggtccacttggaccccatttctaccaactacaaaccctaagaaaactatattatctacacaaaaggtacatttctctatatttgcatagagggcgtttttcctaaggactggaagaacttgcctgagatgtcctaagtgatcatctaggctcctactgtagactaaaatatcatcaaaataaacaactacaaatctacctatgaaatcccttaagacatgatgtgtaagcctcataaaggtgcttggtgcattagtgagcccaaaaggcatcactagccattcatacaaaccaaacttggtcttgaaagcggttntccactcatcaccctttttcatt

SEQ ID NO: 210113 - DNA, 417 bp, Glycine max
ctcagcttatgatgatgaatcaagtggattcaagtagtggtgatgatatcttatatgattacaaacagcccaaagaatgatctcaagatggagtcaacaagttcaagatcaagattaatttccagtgtcatgagaagaaatcaagaagattcatgaatcatgagaagttagatttcaagattcaagagaagataaattcaagattcaagagaagaaatcaagaagacttcacaagggaagtattgaaaagatttttcaaaaaacaaacatagcacacttttgtttttgaaaagagttttcctcaaaattttctaagttaccagagtttttccaaaagatgtaactcttccaatggttttaggttttctcaaggtcgtaactcttccaatgggttttgtgaccagacatgaagagtct

SEQ ID NO: 210114 - DNA, 465 bp, Glycine max
agcttttaggcggaatctaagtatttattgtttctttacacacctcataattaataagcgcttgtagctcattggatagagcgtctgtttcctaatcagaaggtcgtatgttcgacccctacctggcgcgtcctcttttttattattttggtgtatattattatttattattttctgtgtattctatgttcatcaccttttgttctgtatattttttgttctgccaaacttttgtttgtttatctattcaaactttaaccgatgtacaacaacaacaacaacgccttatcccactaggtgaggtcggctacatggatcaactttcgccataatggtctatcaagaaccatacttctatcctaatcattaagttcgagatcctttttgataacctctcttatagtctttttgggtcttcctctcgctcaaattgtttgccttctcttcctctggactactttcctc

SEQ ID NO: 210115 - DNA, 411 bp, Glycine max
  unsure (1)..(411): unsure at all n locations
ntacatttatccatggcaggcacgagatttatgatggtatcatagctcttccattgaaaagctctgttgtgcaactctcttctcttgcttcttctttagtttccttttgatttcttcaacatgactaacaattcatctttgaaagatcaatatctaaatatacacaacccatactatcttaattcaggagaaaatcttgcaattgctttggtttctccagtaattgattcgacaaattcaacttgtggagttgatcaatgcttactgcattgagtgcaaaaaataaattcgaatttctcgatggatctattcaaagatatgcatcaaaccatacacttcatacaacttggaagaggtgtaataatatggcgctttcttggcttgttcactcagtctcacattcgattagac

SEQ ID NO: 210116 - DNA, 437 bp, Glycine max
  unsure (1)..(437): unsure at all n locations
agcttcttcctcgcatagccgtctccttgacttccacccncctgacgcacttcgggtgcacctcctgaactcttcttcgtcacctggttcgtccattatcaaacaccaaaatcaaaaatgtcaacggcaaattgttgaaagttgaaactctctctaactctgaatcataaacacggaaatcgggatgatggtgctaaggaacacagccatggactgaagaacaagacagagacaaattaattaaggtgatggtagtaccattataagagtgtgggatgaaaggggaaaacgcagtgtgtcagtggagagactacagagagagggctagtgtttggagaatcccttaacgacaaacgacggtgtactatgaaatggacacgtaacagttaatgacccacacatgccacgttttaagggcggattgatgtacatatatc

SEQ ID NO: 210117 - DNA, 428 bp, Glycine max
  unsure (1)..(428): unsure at all n locations
atctcagcttgctaataaccttgaaatgagaganaagtattatgatacacacaatatgtttttctgagtatttattacctatacttaacagaaaatacttatagcactacaaaataaccataatttggaagagtttgatacaattttcacaagttttatacacaaaagctagtcgttttcaccgactaacaactttcccaaatttacagttttacttgtcctcaagcaaaaagagaacagctcacttgtcctcaagtgacaatgacatacagtgactatgtacaaaggtgtatgcaacaaaagttactgatttcatgataagggaatagagtaaaacgccctcatcacttgtctttcacaaggtatgcagttatccaaagagaagaataaaatgtaacctgaacaaatagatggagttacgcctaaga

SEQ ID NO: 210118 - DNA, 447 bp, Glycine max
  unsure (1)..(447): unsure at all n locations
acatacttagtagagaaatgagtggttctttaaacatgtnaactaagattcaatttctagtagtatatattcagaaagctcaattggaagaaacaactcttaagctatatttggcgagacatttaagttagcttctagtttttttttactaactgaaaaactcatttgactattgcggaaacaagcttttttttagtaattcttcaatagcttctagcattttttgagacatgttgaagatatacttttgtaactgcataatattttatttttcagtttttaaaataggatttagtaaataagttgatttcctatattgtaggggtaagtcagttttaatggattagcctagtcaataagtggttcttatctttaaggagcaagttagctntaatattatggtttactaatatctcggtatctaattagcctatcctttgctattta

SEQ ID NO: 210119 - DNA, 93 bp, Glycine max
agcttgccacccagctcgcgcaggtgagcgtttgtttctataacgggccaagcgcgctcggtgtctatatgcaccccacatttactaaataca

SEQ ID NO: 210120 - DNA, 329 bp, Glycine max
aggaattttctggaagacccaagcgggcctagttgctatttgcacccccatttttactaaatacacccccttgcctttttttggtgattgattttcccgaacgctacgaaactttacgaatctcgtaacgatgcttggtttgtttccttaatgttacgaaagcttacgaattatgtaatcatcccctttttgccctctggaactttacggattgcgtactaacacttctttttaatctccggcctgtcactgaactttcacggattgtgcctcaccgcttcttttcgaccattggcttgtcacggaacttcttgaattgcctaatgatg

SEQ ID NO: 210121 - DNA, 463 bp, Glycine max
  unsure (1)..(463): unsure at all n locations
agctngagaatatcatgccttgtccttctcttcacgtcaattctgatctgccaagaagctcgtcctctacctttcaccttctcaagaagtaatcaaagccatgcattttcagggagtgccacaaaattggttaaggagcttttgctaaggaagcaattgcttggtacggaaaattatgagcctaatcgactcagtccaggtggtccagaccctcttcatcactaatgaatgtgcaattaatgcatgaaaacttgagaatcatagattcatgcaacaggaaaaggaaagattgttattgtcactgcatttaccttcccacgtacgcattccttttagaattaggagtccataaatcattttattgcataaaatgatttatttgaccattnttagttgattcttaagaagaatcacaaagagggtaggtggaatgatcctagaatattctctgtcgtctgtagct

SEQ ID NO: 210122 - DNA, 427 bp, Glycine max
ctcagcttcccaatatccaagcaattcaatttccaaatatcatgaactaccctatatcaagaaaacagggcagaggcagaaaactctgcccaaaacacattcacatattacaactttccttactcaaatatcccagtaacattctctttgttccggttcgttaaccattggatcgacttgaaaattttactggaggttcctagtacatacatctaaattttgaccgttgggatctgctagaaaatgtccaaaacccactatgtactaccttttccataaccagcaatgcacaagcattttctgcacatgaacaaaattctgctatacaaaatttgacagctttttgctgcacaatttggcagattttgaaatccatcttatccacctccaattttgctcaaattggatcctacaagtcctaaatcat

SEQ ID NO: 210123 - DNA, 410 bp, Glycine max
aagaaaatggtctagtttgtcctgctcatttcaacttgtttatatattcttaaatttataattactagtgtaataatttgtgtcttggaccgacctaaatttataatatatatatatatatatatatatatatatatatatatatatatatataatcttattattgcaaaaaaaattatatttttaatgtattttttattcaatttttgtaaaaaatatttttttttattattttgtacttttcactaacactattatatataattaaataattttaaaataaactttgcaacatttcttaatttgaatataagggaaatttgaatcaattagtgttattaggttggtttttagtggagattaattatatataaaggcagtgaatactttacacccatatgatgatgata

SEQ ID NO: 210124 - DNA, 472 bp, Glycine max
tgcggcatgcaagcttttgaaatcaaactctgccactagtaattatttacttgaaactggtaatcgattaccagagagtaaaactctggtaacttagaaaattctgagaaaaactattttgaaaaacaaaactgtgcaatgtttgtttttggaaaaatcttttcaatacttcccttgtgaagacttcttgatttcttctcttgaatcttgaattcatcttctcttgaatcttgaaatcaaacttctcttgattcttgaatcttcttgatttcttctcatgaaacttgaaattaattttgatcttgaacttgttgactcaattttgaaatcattctttaggctctttgtcatcatctttgtcatcatcaaaactacttgaatcaacttgattcatcatcatgaagcttgcctctacattctctctcgaagagaccggatttacaattgaagtcatatagaactcttaatggat

SEQ ID NO: 210125 - DNA, 400 bp, Glycine max
ttcctaggatcatgagcaactaggtgtgttctactatgacttgagaaataaaaggtgatcaaataacaagcaaaaatttaaaagttactaggttgcctcctagtagcgcttctttaacatcttgagctggacgccttatgacttgtcggtcacggacctaatactttgcttacctttggctttggatttggtcgcctattggtcggccgcgtgccgtaggcaatgctctaacctttttgtggatgagctgaggtgaactctagaggtggtggcggtgcgtctattgcccgctgccagccctccccaggctgctgtggtgttttgccttgcgcctgtctaggggcgcagtacttcttgatgaaagtccggttaatagggggcctgatgaacttgctggggg

SEQ ID NO: 210126 - DNA, 422 bp, Glycine max
gctcaactacagagagtagttcaggcttagcacaacacaagcgctatgttcccttccaaacattcgaaagacagtaagggattggagcttagcgcatcctgccgctaagcctaactcgtgaaagttcaattccagaatggatatggggcttaactcagaacatcgcgcttagcgctgccctaaaaaattttccagagaaggagtggcacttagcgcatcacctcccgctaagcccactacttgaaattcaattccagtgaagatgttgggcttagcacagtgatgtgcgcttagctgaactaatcaaccaatctatccatgggtctatacacttagcgcgagcaaagctcgcttagcgcgtgaagacttgatgcttagcgcgtgaacaactgaaaaaacttctaagttctttttctattcac

SEQ ID NO: 210127 - DNA, 418 bp, Glycine max
gctggatacacgcagagactaacgtcgtcttttgcggccttcgtcaatcgtggccgacaagcccgttgacacgcagagatttatgtcatcttccgcgcttacaagatctgtcatactgagttttgagtcacgctgacgggcggaaatacccgagtggttatccgtataaactttttgttgtttgtaagacgaaaagcctggtagcacgcagagactaacgtcgtcttctgcgcccttcgtcaatcgcggccgacaagcccgtttacacgcggagatttacgtcatcttccgtgctcacaagatttgtcatactgacttttgagtcacgctgacgggcggaaatacccgagtggttatccgtataaactttttgcattctgtaagacgaaaagcttgataacacgcagagactaacgtc

SEQ ID NO: 210128 - DNA, 394 bp, Glycine max
  unsure (1)..(394): unsure at all n locations
taatgtggttatcatatttntaactgtttaatacataagcccaaaagacctaaaaaaagtaatttatgatgcatcgatctaagtattgttttgctaatagtaagtcccataccttgtctatttcaaggtcatacagttgattcacacccgaaagataaatttcaataaacaactgaggtagcacagcctgaaacattttaaaaactcaaaatattaatgaattttaaaggtatcttacaattggctatttaaagagaaataccatatttggattatcacctgcaacacaccaataaaaaatgatagagatatatccgatagtttttccacggcaagaagtgacgaagataatgcgcataatgtctgtccaaagaagaattaaaatgacacattt

SEQ ID NO: 210129 - DNA, 439 bp, Glycine max
  unsure (1)..(439): unsure at all n locations
agcttgtaggattatggagtacctcatcatatgtggtactagggggcggncgggcgatggtgcacaacaagtttccacatccacaaagcgtgcataaacccaccatcccctgttgcccacctccaactgagctcacgtacttccacgtagcccatatcctcgtttctctcaacaccgggtccccatcaatcctcccaagcttcctcaacatccaagtaattcaacaatcaaacaacacataccatcacagccaagaaaacagggcaaaggcagaaaactctgcccaaaacaccaaccaaaatcacagcttttctcacttaaagaccctagtaacaattccctcgttccagttcgttaaccgttggatcgactcgaaaattttactggaagtctctagtacataaacctacattttgaccgttgggatctactaaaaaac

SEQ ID NO: 210130 - DNA, 417 bp, Glycine max
actcagcttccatacatagtctgatatcgcataagacacaatttttaacctttgtatttatttgcatttaatcaaaattttaaggctcctgattcatcttaagacataaatgtcttttgacttaacatgcatgctagtatttttagctttccaagccattattctcatttatgaaactctatcagttaaaactaagtattctcaacttgccaggtgataatactatcttgcatagactttgagaatttttaactaggttactaaattatttgtcatacttaaatatgcccctaaaccatttttttaattggatcttgaagttgcatgtgttttttaaattaggtccatagttgggtcttaaaacttgtatttgttttttaattagatcccaccagggacctaattaaaaaagcaaat

SEQ ID NO: 210131 - DNA, 429 bp, Glycine max
agcttctttgagagaacttgcttgagaagcttttttgagaaaacttccttgagaagctagagcttagctacacacacccctctcataactaagctcacctccttgagaagattccttaagaagattccttaagaagattcctaaagaagctagagcttagctacacatacctctctaatagctaagctcacctccttgagatgagaagctagaacttagctacacaccccctataatagctaagctcacccccatgacaaaaaaacatgaaaatacaaaaaaaaagtccttactacaaagactactcaaaatgccccgaaatacaaggctaaaaccctatactactagaatgaccaaaatacaaggcccaaatgaaggaaaaacctattctaatatttacaaagataagcgggctcatacttagcccat

SEQ ID NO: 210132 - DNA, 353 bp, Glycine max
gcgaaagctaggagtgacttagtattaaacaatatttaagtgtcttagattcaaaagaagtctaagggtgtgccagaagtggcctagaaaatactgttatagctagctgatacaatcctacccgccaagggtattggatagaagactccaagaggattgggctagagttgctaaagaaggccttggggttctcatgaacctaagggtatattttttgagcctatgggccaaggttgggtccactcttctttgtaaatattagaataggtttttccctcttttgggccttgtattttggtcattctagtagtatagggttttagccttgtatttcagagcattttgagtagtct

SEQ ID NO: 210133 - DNA, 430 bp, Glycine max
  unsure (1)..(430): unsure at all n locations
agcttctcaaggaggtgagcttttttatgatatgggtgngngnagctaagctctagcttctcaaggaagttgtctcacagaagcttctcaaggaagttttctcaagaaagcttctcaaggaagctacctagtctataaatagaagcatgtgtaacacttgttgtaactttgatgaatgagagtcttgtgagacacaactcacagttcaacttctctccctttntcttccttcaatttcgagctcccccctctctctttctctccctctttctttttctccattgaagcatcctctccaagcttcttatccaaggctcatcttggtggtgaagctccttcttccatggcttattccttagtggatggtgcctcctctcacctcttctcctttgtcttccgctgcatctccatggtggaaaatcaccattga

SEQ ID NO: 210134 - DNA, 411 bp, Glycine max
  unsure (1)..(411): unsure at all n locations
ccttatctcagctaaggttatcactcatgggattgaacattattttttttaatngcgcgtttgcgaaagctaggagtgacttactattaaacaatatttaagtgtcttagattcaaaagaagtctaagggtgtgccagaagtggcctagaaaatactgttatagctagctgatacaatcctacccgccaagggtattggatagaagactccaagaggattgggctagagttgctaaagaaggccttggggttctcatgaacctaagggtatattttttgagcctatgggccaaggttgggtccactcttctttgtaaatattagaataggtttttccctcttttgggccttgtattttggtcattctagtactatagggttttagccttgtatttcagagcattttgagta

SEQ ID NO: 210135 - DNA, 412 bp, Glycine max
agcttcaacattcaacttcgagcgtctctttatattatacgactcaattagacatccgagtaaaaagttattgtcgtttgaatttgctcaaagcttcaacattcaatttcgagcgtctcaatatatgacgggactcaatcagacatccgagtaaaaagatattgtcgttttaattggctcagagcttctacattcaatttggagcgtctcgatatatgacgggactcaatcagacatccgagtacaaagttatctgcctttgaatttgctcagagcttcaacattcaatttggagcgtgtcgatatattacgggactcaatcatacatccgagtaaaaagatattgtcgtatgaattggctcagagcttctacattcaatttcgagcgtctcgatatatgacgggactcaat

SEQ ID NO: 210136 - DNA, 344 bp, Glycine max
tgcaagcaagcatgatatggggtaccaatcatatgttttactatgtggcagccaggcaatggggcacaacaaatatttccacatccacaatgcgcgcataaacccaccataccgtgtagcccaccttcaactgagctcacgtacggacacgaaccccatatactccggtctctcacaccgaaaccccatgaatcctcccaagcttccccaacatcaaagtaatacaacattcaaacagcacacactatctcagccaagataacagagcaaaggcggaaaactctgccgaaacaccaaccaaaaacacagctttcctcacttaaagaccccagaaacaattcctt

SEQ ID NO: 210137 - DNA, 429 bp, Glycine max
  unsure (1)..(429): unsure at all n locations
caaagcnctcaaaacatcttatacatcttgagagaaaagactaagtgcttagattgtatattcatctgttagacaattaagaactagtcagtgagccaaccaaacaacaaatcttcttatttggtttagagccaacagtggcgtgatacgacacagaatattgagttgtccaaacttgatgataagcttggtttgtaagagccaaaaatgacggtgaaaaatacttgtaactttgaaaagttagtgaaacttggttgtttgtcgagaaccggacgcagtctcattgaaagagacaaactagtataagacttcatgtatctaatatttatctttctctgtgttgactaatcaagagtttgatataattntattttgaaaacacattntataaaaactgttgatcatcatatgatcatatttgagccagtg

SEQ ID NO: 210138 - DNA, 370 bp, Glycine max
  unsure (1)..(370): unsure at all n locations
ggcaagaagngtacatntatagctgagagaagcgaaagtttgtcccaacctcagcggccaatcatcgtggaatgcttgatgagagagaccgcgcaggccggcggaaactctggtagagaatgaagcagccttgaagggagaaactaaacagctcattatccattgtctgatatcaataacactaaggaaactgccagagctcaagtattcctacaatggaaaacactcactagaacggcctatgctagcatatcttgatatatatcattgtgacaagctgaaattgtcacatctgagcataatagtggcgaagccgcagatatagaggatcaagctggtatttcaaatcatcagcaagccattntcatag

SEQ ID NO: 210139 - DNA, 436 bp, Glycine max
agtctgggccggaaaaagtgtatggtatcacccttatcctgatggtgatctgcgccatttgctctggactatcgttcggcgcaacaccgaagtccgtcatggggacgctctgcttattccgcttctggctgggcttcggcatcggcggagactacccgctctccgccaccatcatgtcggagtacgccaacaagaggacacgtggcgcgttcatagcggccgtgttcgccatgcagggcgtgggaatcattttcgcaggtttggtctccatgaccctctcagcaatcttcaagcactactaccctgctccagcgtacatcaacgaccctgtcttgtccacgcaacccgagggtgaccttttgtggcggctggttctgatgatcggcgctgtgccaccgatgatgacttactactggcgaatgaagatgccagagac

SEQ ID NO: 210140 - DNA, 330 bp, Glycine max
  unsure (1)..(330): unsure at all n locations
cactattctctgcttagcggacaggcacgcctagcaggctcatcagntacggtcatcagcagggatgaacgcgcctagcgcgacatggtccggctagcgcgctcatctggatatccaaacaattggacaacgtgcgatgaataggctaagcgcacacgcgcacttagcgcattcatcatgaattccagatagaaccacaagggtctccacccctttcaaccacatttgccctacagggattctaggttacctaaaatcctacattgactaaccctaaaactaataaccttaacctaacagcagacaactaacaagacaaaaagcatctat

SEQ ID NO: 210141 - DNA, 482 bp, Glycine max
  unsure (1)..(482): unsure at all n locations
tagtaatgaattgcttggcttcatagaatgaacgtggaatttttcttgttaaaagggatttgataacaacttcagtatcattgacattgctttgtcactcattctgcatagacatttgatgtgatacaacttgatcaagaaggaaagttttgaatatttatcatacccttcatacaaaattttgttctccatccttcattaactccaaaagctctgttatatcatctggcatcatttggcttgcttatggagacacatctttgtcttcgtccattatcattgttctcaagataaggcccaaatgcatcattagccatgtcacatatgggatcattactaagaactntatcttcatttggttgtggcattgtaggtgtttcaaccgtagtatgtaaagaacttgtcttcccatgtctaagccaaattgtataccctttcggaaaaggtctacgaatcacatggtcgtatgtcgcttcctgagt

SEQ ID NO: 210142 - DNA, 306 bp, Glycine max
caacgagtcaattggctcttatggcgctaagtgcacctggctcgctaagccacaaatccactaactctcacttagcatgaaaatggtgctaaacgagccttcgaggacagaaagcccttaaaagctaaagttggcgaaaaataaaggagtgatgacaaagatcggatacgctctgcgaaaagagacgcagtacagtgaaaaatctcatctttcaagaggattattaggtttagaagcgatttttaggcttctagacgcggaggagacatcctcaccaccagcgaatcctaatttcacttcacaaac

SEQ ID NO: 210143 - DNA, 423 bp, Glycine max
tctccggtcttagcaccgagctgcgctgtttggtgaaagtttagtgtctttttaagactgaaaaactgaaagttggcaaatcaatgtcttccttccttagtatatttctgtaattcttattgtaaatttttcttgcagcccctgaatcattggaaaataacagtatataaacatggacacgcagtatgaacatttttgtttttgttcctaattgttagtattggatgctaaattatatctatatacttacctggatttttaattaccaatatacatacacatgtgataattaatccaaagatagtcacaccaacagctattgctacaatctttttgttgatttttctttggccaccatgatctaaaagaaacagagcatgatcagtcatcgactttaaaataaacagccctattgactgaagc

SEQ ID NO: 210144 - DNA, 420 bp, Glycine max
  unsure (1)..(420): unsure at all n locations
ntgagccanaatcctgactcaccatagaccttgacccagtgtgagaatgncaatccttaccctcggaagcgaaaagaatagaagggaaatttccaatcaaagaaagggaaagaaggaagatttccaatcaaagagaaagcaaaaaaggaaaagaaggaaaattccccaatcaaagagtgggagaaagcaaaaagaaagaaaggaaattctccatcaaagaatgggagaaagttaaaaaggaagaagaagaaggaaagaaagctcctgatcagggatcgaaggaaaaacagaagatatgtgcagagaggtctttagaccggacaatatctgaacaatacagaattgtcaccaaatgaacaaaaagaaggaaaggaaaccacgacctanaatggtcttcttcctttgattaccaaccaaaat

SEQ ID NO: 210145 - DNA, 423 bp, Glycine max
  unsure (1)..(423): unsure at all n locations
agctnttaagggcagaggaccttaatttatcttaaggtgtggatatagggcccactaagagtgagaacgcgtagccctcaaatggtgagggcgtgcagccctttgaaggcgagggcgtgtaacccactgaaggtaaggacatgtagtcctctaaaggcaaggacgtgtagtcctctaaaggtgaggacatgtagtcctcggaaggtgagggcgaggacatgttgtcctctgaaggtgaaggcatgtagccctatgaaggtgagggcgtgtagccctatgaaggcgagggcgcgtagccctctgaagatgaggacgtatagtcctcggagccgagggcgtgtagccctctaaaggtgaggacatgtagtcctcggaaggtgagggcgtgtcaccctctgatggtgaggacatgtagtcctctga

SEQ ID NO: 210146 - DNA, 463 bp, Glycine max
  unsure (1)..(463): unsure at all n locations
ntataagcgcgggtctaggagacaaaggtaaagcgttnctatatgcgaggatgatattccgagtacgttggatttggtacgaccatgccctcctgatttccagctgggaaattggcgagtggaggaacgccccggcatttacgcaacgagcataatgtaaacctttacggttttaaaagctctatagttgggcctaggctttagagtttttccttttgttaaggctttgtgtcttttgtttttgaatttataatacaaggatctttcttcatctgttcctggtctctacccattctcattcatttgcatgtttacttctttttctgaaacggcagatccgatgacgagtcccccgaaggtactaatacctgggacccgcctatcgacttcgagcgagaaatgaatcaaatggaagatgaaggagatgaggatgtggcgacttccccagaactagaaagaatgg

SEQ ID NO: 210147 - DNA, 441 bp, Glycine max
agcttcaatatcatcaaccaaactgtcctttttctcactctggcctttaaatttcattatattatgtcatcagtcatcatcacgagcaacacaaaataagtatccattcataaagaagaaattgaattgacctgttaaaggatcttcaaaaccatttgcagcatccaatccctcatctaagctagtttcagcactcaaaaaatcagcatcatcattcaatgagcttcttgttcgaagctcctgaatttgtttatgccctctccttctgacaatgtttgccaagtcattcctataagtagagaaaacaagtcaaaaataaaaggctataataaaaataaacataacctcctccagctacagctaaaaaaaagagtaaacccccattttaatcctgtgaattgaaagcattgcataaaaatcccagaattaaatgttgcattt

SEQ ID NO: 210148 - DNA, 367 bp, Glycine max
  unsure (1)..(367): unsure at all n locations
aagagaaagagggaggggggagaagagaaagcgtttaacaaagaanaannaaaaagagaggagaggagaccagntgactgcaaccggaaggagccagaagctcaaccgacaaaaccacgtagtgacgcggcagcatcccctccgcatactccaaggcactctcacacttgcctatcaagaggagagccacaattcggccggaaaaagaaaagataagaggaacaaacgggcaagctcaccctctctcctcggagcaacggcataggataaacacacccggagcacctcactcctcatgccactccaaattgaaacccacgtgatcaggtgaggtgtccctgcacacaccaaaacaaacaaacaacac

SEQ ID NO: 210149 - DNA, 407 bp, Glycine max
  unsure (1)..(407): unsure at all n locations
agctntacatattcacttatatttgtttgttgattagaagcttagggaaggtgctgtcattgtttacagtgaaaaattcgcaaatcaaatctcaattcataattttagagtatgtgcgtttttgtatgagcaggaagtttagttcagatggcattttgatatgtaagaaagccttacttggccaattgatgttgccatctgtaacagattgtgtagtggtgggaatgttgtgtatgtatggtttaggggtgggatttatcagtaaagcagcctatggctctagattgtgttgtgttattttttttcccagttgacctctagattgtgtgtgtgtaacttcatgaattccataccatatgtttagaagttagaaccatagatgacacagactagttgatcagggatta

SEQ ID NO: 210150 - DNA, 371 bp, Glycine max
  unsure (1)..(371): unsure at all n locations
tatagagtttcccaacctcatacaaggaanattctgtatttanttgacgtgcacttcatggagaatgggaaataaagttggaatgatactgaaaagatgccaatagttgaccctttgcaaaatcaagatgagttaattgatgatgcacccatgagaggcactagattgctctcagatatttatgaaagatgcaatgtagcagttctagaacctgcaggatattggaatgcaaaggaggatctaaaatggagtgctgcaatacaagaggagcttgtcatgattgataaaaatcagacttgggaactcgttgaatagcctaaacacagaaaagtcatatgtgtgaagtgtgtggttagaacaaagctgaatgc

SEQ ID NO: 210151 - DNA, 413 bp, Glycine max
agcttggaaggaaacaccactgtctgttgtaactttggatccattcggaaaaataaaacctaatgtggagttcacaactatctaactgcttgtctctcccaagaatgccatagttttttgtaagatttgggttgatactgaaacttgtgctttcttacaaggctaggttgtgccatatatatagaagagttctaatattagtgctgcattctttaaagattgaaaatacgcatgcacatgctttctgtatgtgttgtcaactacacgaatgacatgacatgctttagcttgcatcagatctgcatgtgtagtcatgctgtgcagggtcctttcacgcgctttatgttaatgcagacaataatttatcatacacggtttttaacaatgtatagtcaagtcagacaacgatatat

SEQ ID NO: 210152 - DNA, 385 bp, Glycine max
  unsure (1)..(385): unsure at all n locations
tgtctcagcgnnaatgcgagagagagacgagcttgttatttatcgncagcaagnaccaagaagaattaaatctatccacggcccactagcacaaagtggcggacgagtatgcccgagtctacgcggaaaaggaggctagaggaagtgtgatcgactcgttacaccaagaggcaacaatatggatggaacgaattgctcttactttgaacgggagttaagaacttccccgattgctagccaaggccaaagcaatggcgaacacctactccgcccacgaggagatccacggacttctcagctattgtcagcatatgatagacttaatggcccatatgattagaaaccgctgggaagtttgtattgtcgttcatatcttgactaggta

SEQ ID NO: 210153 - DNA, 266 bp, Glycine max
aaaaaaaaggaaaaagaccttttaccccccgcacacaaagcgaggcgaaaaaaacaccacaaacccaaaaaaccagcaaaaccaagcagacagaaacaacaaatcacaaaaaccaccaaagcaaacacaagaaaaaaaagcaacccagccacccaacaacaacaaaaaaccaaacaacccaagccaagaaaagacaaaacaaccaaacaaggaagaaaaaaaaaaaaaaaacacagaggggggagccagacagcaacaaccacacc

SEQ ID NO: 210154 - DNA, 461 bp, Glycine max
  unsure (1)..(461): unsure at all n locations
aagcacctgagctgcagctttcacaattgattatctattttaagtctatttgctttagacgataactagggttttgttttaagaacggttaaaaatttctaaaaacacaattcaacctcccttcttgtgttatttgcctctacactctccattttcaacttcacactcattatctctttcattttgagtcatcttttgcttctccacaactacgtgcttcttgcattattagtcttctcatttttgttgtttctcttttgcttctcaacgatttgacaaaaatcagttttcattgtttgtctataccatacacataataaaantatattttgttgtatattatggtgtataagagatttaatgaatttaatgtatttgacttttgtttatgtaatataagttctattngatatcatggngtatacttgngtcctctactatgcatacatatagcaagaaga

SEQ ID NO: 210155 - DNA, 425 bp, Glycine max
  unsure (1)..(425): unsure at all n locations
tgatccatcatacaattggtaactgtatcaggtatttaaagccttcataaatgctgagttgcaatgaagttgtaattgcaagttgagagacagactaagtaagagtgagttaatgatatacaaatgctaatatatcaattatggtcaataattcatctttagtcctttaaaagtgaaaatactataatatagtagatgtatcttgttgtcccttaaatttatacaaatcaaacagattctaattgtcttattcttgctggtttctaaactntatttaggtttgtggttgcattcagagaggaatttaataagttgtactttccgactctgggtgacatcaaggaaagggtaagatttaagctaggattgcctatcttgagcattatttaactntttatgcactctaagtatattccttggttaat

SEQ ID NO: 210156 - DNA, 381 bp, Glycine max
tcacgaggtggaggttgaaaattagtagtcgaatgctcaaaattagaatattcaaaatcaccagcaacagaatactcagaatgctcaaaattctaaaaatgcacaaaatgactaggatgcacactatgcctaacaaatctatgaaaggttccatctatttcaggatcaaagggtagtaaatcacctggattgcccctagtcatgcactatatgcagcaaatcatgtctttctcaaacaagcaccaggggagggttaaaactacagctatagtcaaatgatatccaaataagctgaaattttgtgagcaacaccctaatatcatggaaatatagcacaagaaattccaaacaaaaattcaaagtctaactattgaaaatacc

SEQ ID NO: 210157 - DNA, 404 bp, Glycine max
  unsure (1)..(404): unsure at all n locations
gagggtgtgccatgttcttagaatattcaaaatcagaatgctcaaaactataatgctcaaaatcaccaataacagaatgctcaggatgctcaaaaggtactaaatgatgcctaactaatctatgaaatgtcatgtctatctcaggatcaaagggttgtaagtcagatagatttcctctagtcatacactaaattcagcatgcacaattagttgccttcttatgcaagtaataatgtaggtttgaactacagctaccatcaaatgatgtccaaatgacttgaaattntgtgagcaaccttataaaatgatgagaagatagcacataaaattggtaagttaagaaaaatatgagaaanaaactcgtgaaataaaaaattntgacagaatcaccttttttggacgat

SEQ ID NO: 210158 - DNA, 355 bp, Glycine max
aatggacttaccttgaatttatttctttgatatccccggtgagcctatgttcccctttctttgtattgaagctcattacaagccttaagtgaaaaaccatgataacaccttacccttaaggaatttttgagctttgaaattgttttgggaataagtgtgggggggtatgtttcattggaagatatgatttttggccatgcttaatgttcatattttggccatgcttgatgtatatatatattgcctagctcatgctttaatcttcaaattcgtactgtctaataataaaaagaggaaaaaaatgaataaaattcgattgctgcgaattatgcaaattcttactgttaaaaaaatg

SEQ ID NO: 210159 - DNA, 468 bp, Glycine max
  unsure (1)..(468): unsure at all n locations
ngcaagagttaatgagcaattcaataaagaaactgagttgttgacattaattatcaaagactatcaacgtaccaatgaggaaggaggaattgtgaagacatgctcaattcaagcaaggaaatgatatttattccctatctgtaatagaaaacagattttgttgtggtcatattttgatggtttagatgtggatgtttatacaacttctaattagttctcaacttttgtgttatctattattagtatcttttgtgaacaaatattgttttatattgataattattataaatgttcaactatttgcattttgttaattttctatgaaagattgaatgtgatagcagcagaacccaaatgggtagcatgcccaatataatgcaacaaataaaagcttatgtaagcaattatacgtaatcccagccaaggggatattccatgctttgtcagcaaacctacaacaaacttaca

SEQ ID NO: 210160 - DNA, 438 bp, Glycine max
  unsure (1)..(438): unsure at all n locations
agcttttaagatatgctcattngtgtaaatatcttctatatattggtagtagttcatgctcacgtaaccacaagctacaataatgtgtgaacatggatagtgaagcgcaaaatactttccgcattgacaacaatgaccattcaagttaactgctcacttttgtccgccatgttgcgttataggattgaaggtctcctctacttcaaaccttgtcgagtggatatcatacacgcgaacaatgtgcgaacaagcttggtttttattttttctaagttctttaacaagcttagaacaatatactcgtccttcatttaattgtctttgggcttggaggccacgattaagaaagtactttcgacacctactatatgttgatttgaccaacgctggtattggtatgttgcaacaatccttcacaactttatttatacattctga

SEQ ID NO: 210161 - DNA, 410 bp, Glycine max
  unsure (1)..(410): unsure at all n locations
ctaatagctaagctcacctccttgagatgagaagctagagcttagcttcacaccccctataatagctaagctcacccccattgacaaatacatgaanaaaacaaaaaaatccctactacaaagactactggaaatgcctcgaaatacaaggctaanaccctatactactagaatggccaaaatacaagacccaaacgaaggagaaacctattctaatatttacaaagaagagtggatccaaccttgacccatgggctcaaaaatctaccttaaggttcatgagaaccctagggccttctttagtagctctagcccaagccttttggagtcttctatccaatacccatggggggtaggattgcatcagttgcaatatacaagtggaagcgtatnctatctcttaaaaatac

SEQ ID NO: 210162 - DNA, 403 bp, Glycine max
catgcaagcttctcaaggaggggagcttatttattataggggcgagcgtagctaagctctaccttctcaaggaagttttctcaaagaagcttttcaaggaagtcttctcaagaaagctcttcaaggaagctacctaatctataaatagaagcatgtgtcacactcgttgtaactctgatgaatgaaagccttatgagacacactccaaagattcacttccctccctttatattccttcaatttcgggctccccccttctctctttcttttcctccattaatgcatccttttcaagcttcttatacaacgcacattcttgcgagagacgctcctctttccatggcttattccctagaggatggcgcctcctctcacctttctctttggcttcgctgcatcccat

SEQ ID NO: 210163 - DNA, 455 bp, Glycine max
tgaaggtgtgtaacccaccatcttctcatagtagaacagtgtttacatgtccactatcattgttatcatctcctattccatcattgggggcactacttgaggtgccagatccctccacctttgggtgtattctttgaaagattcatgctccttcttacacattgatgtaagctccattggagcttgtaggcctaggatcttcttcatcaatggattctttgcttcttggaagatgaatggcagcggaatggagaaggaagagagagaggagatgccacttcaaggagaagatgagtctagaagaagctcaccaccattggaggccacggataagagcttggaggaagaaggagatgaatgaagggagaggaagagaagagcatgaaattttgtgtctaaaagagctctaaatctgaagttaatattaaatgatcaagttaaaaaatgccacaatg

SEQ ID NO: 210164 - DNA, 375 bp, Glycine max
gatggcgaatattgaatccgatgactatgcagagtatctgaaaacagagcttgcgtaccaaacagggttgtctcaggaccccaacaacactctcctccttgccaactatgcccagttcctctaccctcgttgcacacgattatgacaggttcgtgcatataaaacatgatacgcctttactttatattgatatattaacgtttaaattgactgtacagagcttgcgttttttacttctatatatgtgagtgataatagtttcttataaaaaaattgcattcttaagtaaagatggatggattaactgatataggatgtttcactctaataaatgatctcaaatttatattacaaaaagggatctcagatgctaat

SEQ ID NO: 210165 - DNA, 422 bp, Glycine max
  unsure (1)..(422): unsure at all n locations
ggataagggcttcatttggtttttatgaacaccccatgaatgtatgcatataccacaaggtcagtgggaataaaatatgttctcttgttctatttgtagatgatattttacttgcagccaatgatcggtgcttgctacatgagatgaaacaatttctctctaataattntgacatgaaggatatgggtgatgcatcttatgtcattgacattaagattcatagagatagacctcgaggtatcttaggtctatcacaggaaacctatattaacaaaagtttagagagatttcggatgaaagattgtntaccaagtgtcgctcccattgtgaagagtgattagtttaattcgaaccaatgcccaaagaatgaacttgagggggaactgatgaanaacattccttatgcttcagtcgttggaagt

SEQ ID NO: 210166 - DNA, 183 bp, Glycine max
  unsure (1)..(183): unsure at all n locations
ccaggagaggggngaaaggaggagaaggttgcaaccacggacccaacgacaaggggccgccccccaaccaaggacagggcgacaacaacaggagccagcacgaaaggccgcccgaagcggagccaagaagacacgccccagggccaaaaaagccggaaaaacaaaaaaggcaagaaaagggca

SEQ ID NO: 210167 - DNA, 437 bp, Glycine max
  unsure (1)..(437): unsure at all n locations
agcttctcaaggacgtttctcaaggttgtattcttagttattaaaggggggcgtatagctaagctctagcttctcaaggaagttttctcaaagaagcttctcaaggaagttttctaagaaagattctcaaggaagctaccttgtctataaatagaagcatatgtaacacttggtgtaactttgatgaatgaaagtcttgtgagacacaactcaaagttcaacttctctccctttttcttccttcaatttcgtgctcccccctctctctttccctccctctttcttttcctccattgaagcatcctctccaagcttcttatccaaggctcatcttggtggtgaagctccttcttcgatggcttattccctagtggatggngtctcccctctccttttctcctttgccttccgctgcatctccatggnggaaaatcacc

SEQ ID NO: 210168 - DNA, 462 bp, Glycine max
  unsure (1)..(462): unsure at all n locations
tgcctcanagaggtccaggaaggacagggtggccgtatgttctatttccgctcctaagtatgacagtcaccgctttaagagcgctgtacactatcagcgcttcgaggccatcaagggatggtcgtttctccgggagcgacgcgtccagctcagggacgacgagtatactgatttccaggaggaaatagggcgccggcagtggacatcactggttactcccatggccaagtttgatccggaaatagtccttgagttttatgccaacgcttggccaacagaggagggcgtgcgtgacatgagatcctgggtaaggggtcagtggatcccgtttgtgccgacgctatcggccagctcctgggatatccgctggtgttggaagtgggccacgaatgcgagtatggccagaggaggaacctgtcttgatgggtcgatgaggacgccatctgcccaatactatgtata

SEQ ID NO: 210169 - DNA, 413 bp, Glycine max
agcttgataactaagatagatctagatatttatattttttagtggaaatccgctcgtgagaagaaatctatatacatgcaatcaaaacacaaagatcctttgtcattgaaattccagcaagtggccgacaaatctagttgtggctatgggtgaagtccactagggttgctggaaagatgatgaaatcaagtggtttgctggactaatagtggttggttgtgttagcgaaatctcatcttgaagaatgaggactatatgtatcccggggttagggtgaacaagtataaaaatcattatgcatcatcttcttcctttcattttacaatgattctgaactatctgacacctagtttttatcaatcttttagtcgagctaaactctttataaagaaacatataactaaatctttcca

SEQ ID NO: 210170 - DNA, 462 bp, Glycine max
  unsure (1)..(462): unsure at all n locations
tgtaactcactaaacctcatacaactgtgtatctagtgactaataaaagtaaaaataaaatattattcctattttctgactnttcattatctcactttttttttcatgtgcctccttctctaaacctttctctccaaatgtcgcaccttgaccgccaatgagggttgtatgacctactgttattttctttttgctcattatttctttcttttcattgntaatttattcaaatgttttcatagtcattttccttcttgtcactatgtttttttttcttttggccaactctagtgaggtcatgtcgtgccactgccgccatcatcgtgatcctatggcggcctcgagccaccaagccctgctcctgctagcgttaggggccgcacctcctcgatggaggtgtgatgaggacatgaccaagagcaaaggcaatgatccacttgaaggacttggaagacctatgac

SEQ ID NO: 210171 - DNA, 465 bp, Glycine max
  unsure (1)..(465): unsure at all n locations
agcttatgctgcanacatttatagtagatctcttttgttcaaaaccaacaacaacagaataattatgacctttcaagcaatagatacaatctaggttggaggaatcatccaaatctgagatggacaagtcctccacaacaacaacaataacctatccctccttttcagaatcctgctggtccaagcaagccatatgttcctcctccaatgcagcaaatgaccatccagaatatgcaatttcagcaagagacaagagcctccattcagaatttgacaaatcaaatggggtagatggctactcagatgaaccaagctcagtcccaaaattctgacaaattaccttcacaaactgtgcagaataccaaaaatgtgagtgccatcaccttgaggtcttgcaaccaaattcaagtgcctccaccagtagcagcacctgcacctgaacctgtcaagctcattctacacctg

SEQ ID NO: 210172 - DNA, 359 bp, Glycine max
ctgtgtacaagcaaacaaataactacacgagaactgttatttaaagaactgaaacataaaagctgaaatttaaatgacataaatcataaaataactgaaaataaactaaaatgttccgaatgcaaaaaattaaacgtcctgctcctcctgaggccgatcttcattaaaatccagtgcggagctgctgatgaatcctatataagctgctcaggctccatgactggtgtggcatcatcaggaataggcgcaggggctagagatggctttggtataatctctggagaagattcctcctcccgagccataggtacacctgcatcaaaatcaaaaggcccaagaagagtcagctcatcctcacc

SEQ ID NO: 210173 - DNA, 416 bp, Glycine max
agcttcttatccaaggctcattttggtgtgttaagctctctctttccatggcttattccttaatggatggcgcctcctctcacctcttctcctttgtcttccgctgcatctccatggtggaaaatcaccattaaaggatcccattgaagctcaaagatccagcctccatagaagccccacaagcaagcttccatcaagattccctccaccttggaaaggatttgtcctcaaatcccgaggttcttcatactctgggctccttccctcaacacctgtaaaaagaacaaaaacatatgtattagttgtttttggtatattgaagtaaggtaaggtctgaaaacccatttcctgcgcattcttccatgaaggaacatggtttctcaccaactcaatgagtggtgctacaagtatagaaa

SEQ ID NO: 210174 - DNA, 459 bp, Glycine max
  unsure (1)..(459): unsure at all n locations
tcaagncttcattgtataattagtcactagatgtttttatttgttcactggaaactcttaattagtcattggatttgtctgcttttgattcctgttagttttttggtttctgctgcctgtgtcgtgttgagctgaggtacatttgactgccagtgtcgctgccattgtcgctgttgggtttgaggtaagctntatgtcttcattgtataattagtcactgtatttttctcttaattagtcactggatgcctttatttgttcattggattagtcactggatttttctttgagtgaaggaaattatttaattccacatgcttgcatcaagaaattaaattagatggaaaattgtttaattgctgaattggtctataaacgagtattccatcaagaacattggtccttgaaaattggtttggcggtgtgagtcatgattagtgaaagaaatgcacatttaat

SEQ ID NO: 210175 - DNA, 365 bp, Glycine max
ggacaacaatcacatagtttgtccaccatggtatgctttatgttcctattgggtataggtttggtatgctttatgttcctattggttatagctctggtgctagaatgttcaatttggagtccacaagaggaggatctccatatggtgctggagtttttgctggagatggtacaagacaagcaagtgaaatggagctggagcttgtagagtatcatggcaagtatatatgaaattagcccataaaagctagattgaattctgtgattaaaattccattaagccctactagccaggtcagcattctagtctgtcccaagttggtgacctctaaatcaaacttcttaatgcactcaaacaaaccattg

SEQ ID NO: 210176 - DNA, 480 bp, Glycine max
  unsure (1)..(480): unsure at all n locations
tatgtcagagattcatgacacttactagttttttttccctcattctatgcaccaaaagaagcaagcttgtcagcataagcattgccttcatggtagatatgtaaaattctaaaactaaactttttagttggatctatacaattcacctagcggttgtaaagagtcatgggggctgaaaaagcatgattatataatgcataatattgagaatattgttgtatgattgtgctaatcctaattgtattgagaatattgctacatgattgtgctgatcttaattgattctatttgtattaattcttattgtattttaattttattttgtatcttgatctcttgattattgggttcacttattnttaggataaatagctgtatcagatatgtcaggaaaaagctatagagaaatcctagttaggtgggtggatgaccttgtatatatatctatcgattggttctaatagaggcagaacaacaagg

SEQ ID NO: 210177 - DNA, 445 bp, Glycine max
  unsure (1)..(445): unsure at all n locations
agcttaatcccttgaaaattgaggggatgagatttgtttgtattcagctaaggactactttccttagcacacatatgttcaatatgttggatttgccctggagattcgccctgaattttctcctttgaaaactattctatttggaaatcctttccaagacaccattgaaccactgatggaggctttggaggaagattataaagatggaaataagataaacgaatcatggcagtttattgaaggagtattggatcttgaaaagagaatcaatagactagatacattgacttagaaattaaatataacaaatgttgtcattgttgaacaaattattagcttataaaccaaatctttaccatttgttaatnatgtttacttattgctgatacgagcataataaaatgacatgaatggtcaaaaaatcaaactacaacatgatcttgta

SEQ ID NO: 210178 - DNA, 408 bp, Glycine max
  unsure (1)..(408): unsure at all n locations
gcttcgccgagtgtccccattgaaaaacctttattcaaacctttcaaagttagtgataaggctaaacgaanaattagggaacttagaaaaactaaatccttaattgaaggcgtaggtgacaatcatagcgaattactaaacaagattagtagtttgcttaaggtcattccagatactccccaagcttcggaaaatacttccaaaatggtaacaagaagtacctccaaattaattaatgttattaatgaagatagtgaccaaaacttagataacacaactgagataggatcagtgtcagaaaagaatataaatccattaaactccaaacactggaaaaccccctccaaattatattatcaacgtccaactgcccctgaccttctattagaagaaagaggtgaaaacaat

SEQ ID NO: 210179 - DNA, 395 bp, Glycine max
  unsure (1)..(395): unsure at all n locations
cctgcggcatgcaagcttcttgcgtaaccgctctaggngcttattatttctataaaacaaatccctcttattactagctattttgaattctttagtccctgaatgtacaaccttcaaattgttgctcgttcccctctttcttttctgcaaaaaagaaaatcaaatgctgtcaaaacaaggatgaagctctaagacaatccatatcaaagaatacatggatgaaatcacaattaaaaagcacaactacctatctttcagagtcctttggttaatttgtcttgtctccttatatggaggggttttgtttaataatcttatacttttgccttccaaaanaagacttatcactaatcctcttttcattaatccaacttttgtatgttattgaataaaag

SEQ ID NO: 210180 - DNA, 420 bp, Glycine max
  unsure (1)..(420): unsure at all n locations
tcatactgagttcgatgagttcaaagtggagttagagaggcgtaatctacacaaacgcctcaccaacctccaagatggaagcatagacgtggttgtggttaaggaattatatgctaacttatacaccctagaggaccaagctccaaagcaagccagagtaagaggacacctgatcaaaatagatgcagacagcctgaatgagtttcttcaaactccagtggtattagaggagggggaatctttacccacctactctagactntgcaggttgaggtctaatcctcaagagattgaagctaggctctgaattccccgcaaagggtttgttatgaatgctganggccaaccatggaaacttcttacaaaggatctgactacactgacccagacatatagtgcttctcttactcccactagctc

SEQ ID NO: 210181 - DNA, 410 bp, Glycine max
agctatacatattcactatattcttgcttggtgtatattaagcttagggaaggtgctgtcattgtttacagtgaaaaattctccaatcagatctcagttcataattttacagtatgtgcgtttttgtatgagcaggaagtctagttcagatggcattttgatatgtaagaaagccttacttggccaattgatgttgccatctgtagcaaattgtgtagaggtgggaatgttgtgtatgtatggtttaggggtgggatttatcagtaaagcagcctatggctctagattgcgttgtgatattttttttcccacctgacctctagattgtgagtgtgtaacttcatgaatttccataccatatgtttagaagttagaaccatagatgacacagactatttgatcatggatta

SEQ ID NO: 210182 - DNA, 465 bp, Glycine max
  unsure (1)..(465): unsure at all n locations
ttcatagaatgaacgtggaatttttgcatgctaaaagggatttgataacaacttcagtatcattgacattgctttgtcactcattctgcataaacatttgatgtgatacaacttgatcaagaaggaaagttttgaatatttatcatacccttcatacaaaattttgttctccatccttcattaactccaaaagctctgttatatcatctggcatcatttggcttgcttatggagacacatctttgtcttcgtccattatcattgttctcaagataaggcccaaatgcatcattagccatgtcacatatgggatcattactaagaactntatcttcatttggttgtggcattgtaggtgtttcaaccgtagtatgtaaagtacttgtctccccatgtctaagccaaattgtataccctntcggaaaaggtctaagaatcanatggtcgtatgtcgcttcctgagtt

SEQ ID NO: 210183 - DNA, 418 bp, Glycine max
  unsure (1)..(418): unsure at all n locations
cgatgctcatggagaaagaagagggagtttttagagaggngggagcacgaaattgaaggaagaanaagggagagaagttgaactttgagttgtgtctcacaagattctcattcatcaaagttacaacaagtgttacacatgcttctattcttgagaagctttcttgagaaaacttccttgagaagtttctttgagaaaacttccttgagaagtttctttgagaaaacttccttgagaagttagagcttagctacacacacccctctaataactaagctcacctccttgagaagcttccttaagaagattcctaaagaagctagagcttagctacacacacatctctaatagctaagctcacctccttgagatgagaagttagagcttagctacacaccccctataatagctaagctca

SEQ ID NO: 210184 - DNA, 413 bp, Glycine max
  unsure (1)..(413): unsure at all n locations
aaactntatatcaaaatgatgcttaagatgctcactntcaattggcatgacttcacaacaacttcaagccgaagaaacaaaacataacacataaagtcaacatagacgaaaaaaatatattcgtagttgtaatataacgttcacgattgtttaccacaagccaacacatacactgcatgaacatttcgttgaggattaaattatatgtgcttgctttcaaagctttatattccgtaaatctactttntaaaggtagaatttatacgacttacctgattcctttttggggtgcttaattaanaagctattactattagttatcaccttgcagatgttattcttctatctctggcttaaatctgatgtccccagaggattatgtgacaaactagaaaatgtattntcaaacaatc

SEQ ID NO: 210185 - DNA, 419 bp, Glycine max
agcttcaagatattgagggaaggataaggtaacctatcaactacacctagttatataatcctccaaactctggcatgattgtaataaattacaaaaactgtcttcttcaattagtcaaataaatttagtaattagtatgaagttaattttgaactatatctggttccctactcaaattgtcagcctatggttgtgtagatagatgatagattagaggatgagtaaatgccacatacaactagccaagtactagcaaatgccatttgagggtagtgaaggatcatcatattctaaccacaccatgtactaaactaaacaagacaatgggaaagtggagcaataaaggattggtacagtaacaaggaacattaatcaactaaaactaatcattgcatgaacaagtaggccaattcagtcta

SEQ ID NO: 210186 - DNA, 365 bp, Glycine max
  unsure (1)..(365): unsure at all n locations
gcancactttcttgagagcagggcccacccagctacttactatggaagtaaatgagggaaacgaaagaaggataatcttatctggaccacttatctgtttgttaatcatgaaacaggaaaatgtattgtcatgctttattcctatcttctgcaatattaattattcgaaccttgttttcctctatcagctggttgatgggtcgatagtgcattataacttgtgcttttcacaccatcaattgctgattaatgcttctacagtaggtgctttccttgaccctgcanatcttttagcaatagctgttccatcacgctaatgtcataagagtaatgttacatctgcacattnttttacatattcttat

SEQ ID NO: 210187 - DNA, 426 bp, Glycine max
  unsure (1)..(426): unsure at all n locations
ggacacaagaatactaagcttatgtgagaaccaagcattgtgggagtgccgtatgctcnatttgattgattcaagattaattcaagacttcaagatcaagcattaagaatccaatccaagattcaagattcaagagaagaaatcaagaagcaacaagtcaagacttcatataggataagtattaaaagattttttcaaactcgaaaaatcagccgtttactaagttttctttttcaagtattattggcttatttttctaaactttgcttaggtagttttcatagttagacgaaagagaagataaacaaccatgacttggaatgcgtgaagcaatcaccttcttggttaccaaccaaatctttatgcccgtgtttctttcacattgcgccagagagaaaatagaaaaggaaaatgccgaaacaccca

SEQ ID NO: 210188 - DNA, 465 bp, Glycine max
  unsure (1)..(465): unsure at all n locations
agcttatgatgatggatggctcanattcttttttgtgtaacttatcactttcaaattgagctttcaaaactatcatgacatgtagaggaaaaacaaggatttcaaatcacaaaatgttaagagacttttattttcagaacaattacccatttcttgaacatatcctataattcaaagaaaaatatgcaaagttgtacatgcaaacagatgacttacattgatattattataataatgattgatttttatttatatccatcaattatgaataatatttaaagtttctttatacttttaacaatcaaataatgacttacattgatattaatttaaaacatttaagatgtcatnatggtaataataataataatcattattttaaaattctgaaacagtcaattattgtaatatatcanattaaaaatatgaaatatttattccatattaaaatcaaaattctttact

SEQ ID NO: 210189 - DNA, 475 bp, Glycine max
  unsure (1)..(475): unsure at all n locations
ngaaggcatgtatcccaccatcttctcatagtagattattggtaacgngtctactatcattggtatcatctccctctccatcattgggggcgctacttgagctgctagatccctccacctttgggcgtattctttgaaagatttgtgctccctcttacacatgttctgtagttgtattctatctagagccatatcagagttgtactgatactgcctaatgaatgcaaccattaggtccttccaagaatggactcaggaaggttccagattagtataccaggtgacggctgccccaataagactttcctggaagaaatgcatcaataatttntcatctttcgcatatgctcccatntacctacagtacatctttaggtgattcttgggggcaagtattccccttgtacttaattgaagtcgacaccttgaactttggagggatgacgacgtcagtcacttagcacaactctggcat

SEQ ID NO: 210190 - DNA, 293 bp, Glycine max
acctcaacctcaatttcatatatcggcttgccctaaataactgctactgttaataataactctcgcgtggtttccaattctggtgcttcttcttctagaactcctaacctttggcattctagattaagtcaccctaatgggcatgtaacgaaactaatcttcaatcattgcaacatttctccatcaaataaaaatttctcaagtttttgttcttttaattgtatgggacagtctcatagaataccatctcacacttttgttttcggttactctcctttggagcctattttcac

SEQ ID NO: 210191 - DNA, 420 bp, Glycine max
  unsure (1)..(420): unsure at all n locations
tacagatgaccagggcacagaattccagagcagccacaggcctatttggggaaaagagccttagaagcagaaaagaggagcagcttgtgcattgaagcctaggttttgtaatttgagagagattattgagtagagagtgagtgtgagattctgagaagaggaggaggaatccctcttcttgtgtaaggaactatcattctctgcttttaatctcatttattgttagtatttctttgtaatggctggctaaacaccctagttggggatttctaatgaacaactgatgtaaatacctaatatctaattgattatgctntctgtgttcaatgcttccttcaatgcttaatggttgtatgcttttggtctgatcacccatttgtgtgcatagntaggtggctttggcattggaaaatgtactat

SEQ ID NO: 210192 - DNA, 461 bp, Glycine max
  unsure (1)..(461): unsure at all n locations
taagtgaccgcggctgcagctgagttaattattcttgcgtatgtgtctatataaacaatnggattactgatgcttctgtcacaatcaagttattgttaacatctccacatggctgtacattgcgatcatgtttttgtttctagaattcatttgaaatgtttgttgttaatttagaatgagtgatccttcttgatttaaaaattatcgtctcctaatcgatagagagctcatcttgctattggctgatcatcttccaatcacgacttgatagactgcttgacatattgtcatgctgatacttctgatactaatagagagagacttcgctcttgttaatcaccgtaataagcttcgaaaggaattacttgagtacgcattatcattgttacctatagatgaaagtcaacttagtcagtcgtgtccttgtgttccttgaggatgtgctagttaccacttaagtg

SEQ ID NO: 210193 - DNA, 477 bp, Glycine max
  unsure (1)..(477): unsure at all n locations
tatctaaacatgtccgaaacaaacaggttgtgtgagtgttgtacttgatattcccttttatgcataataaaagaaaaacttacgcatacaacctcacaaaataaatgctttaacaattggtttcttatactattaaatgggagacgagactgatatatttgatagtaaaaaatntttggtcatcggtcataaaattaatatagatatcttttaatttattgggttacatactctaatttcactcactatatgtaattattgttaatttaataaatttttacacaccataaaagttaaatataaattcttttgataaataaattattctgacgtatataaacataacgtgatattacactgtatcattgcatcanacatatgaattagttgttagtaatntatatatgcgtttaggctgttccgaatttattcgtttaagacatgcttagtctgatctacttcgtggtctaatccaat

SEQ ID NO: 210194 - DNA, 351 bp, Glycine max
ctgcacgcatgcatgctatcgaaggacaatgaggaactaatgttttctgattgtggatggacaaagggtttgccggactgagtgtgcacgggggaaagaatatggttttttaatttatcaataacacaacatctggtttctcggaaaaaccgatgttaaggttataaacttaacatcggttatgatgaaaccgatgttaacaaattaatgttagcatcgggttttaaaaaaaccgatgttaacatcaactatttcacattagttttttcaaaatctatgttaatcaaccgatattattaccaccatgctcttgttaacatcagtttttagaaaaaccgatgttaacatatt

SEQ ID NO: 210195 - DNA, 289 bp, Glycine max
gcaagattggatgaggggaagtgtggttttcgaaatctgcactttgtgcagaattttgctgtgaaattgtgcagcagaattttgcacaagtgcagaaaaatgcttgtgtgtgattggctgtggaaagagtagtgcggaatgagttctggatgtttgctagtagatcccaacggtcaaaatgtaggcttatgtactagagacttccagtaaaattttcgagtcgatccaacggttaatgaaccggaacaaatgaattgttactggggtctttaagtgagaaaagatgtga

SEQ ID NO: 210196 - DNA, 488 bp, Glycine max
  unsure (1)..(488): unsure at all n locations
actcagcttagccttttccncggaaacaaaatgtgcacgttctactttcatagttttgaaagggttaagagcagcataaactntacacattcactgtagaaagcctataatgtaacctagttatgttaatgtaataggtatttaaggttgtttccacagtacttctatacttccttttttaaggccgtaaaccactttggtcgttttcacacttttgttgtaatgagatgattgagactgccatacaacactaagaaccaaatttgtggcaataactgtccccaatccaacctgttctttttggcgcaatcgggtccgcggtagcttactttctcaaaagatctatttcagccaaaaactttgtttaagcaatttaagccaaaanaaaagtgcaagctgaatagaaagttcaacctacttataattccatatgaacttcgatattaaatactaactttcaagtattcaataaaatggcgttacttgaa

SEQ ID NO: 210197 - DNA, 418 bp, Glycine max
gaaaatgagcattgttttttaagcatgactaaaaatgttagtcaatttgtcagattgattgtgaaggaatgcattaaccgtatcccggtgaaagggtgatccttaaattttgagagaaataactatcatttaatactgatttttgcgtgaatgtctgaagtatggactgaatgcatggaattgaggatgatgaaggccatgtttgattctgatagccacttatccaaaaagccgaccatgtgcttcaatgaattaccccttgtacccagtttgagctgaatgaattattgattgattaaaccctgagcctatacagtgttatctcctgctaccttgacttacggttgaggagagcatcatctacaggaagtgtaggtccttgagttcaaacacggattcatctatttaattttaaaac

SEQ ID NO: 210198 - DNA, 416 bp, Glycine max
  unsure (1)..(416): unsure at all n locations
attatcatagtntttctttagaatttttgttcataattgggtgttttgttaataaatngtataaaatgattttaaaaactaaaaaggatagtttttaatgtttgtgtaaaatttgaatgtcacaagagcagatttttcgtgctttaaagaataaggagttgcagacatgatctcgccacaacgagatgcgattntgccattcgccaaaaagaagttatccctcaccacaacgattctgtacagctaaagaccttagagttaatagaaactcaccacaatgagttaaactttcacccccaacaaacaagtttcaaaagcatgaagatgaagtgtagaagtccttagtgcctagtgtaatttcactacaacgaannatctttgtggtagaaaaaataatgtaatctcagctctatata

SEQ ID NO: 210199 - DNA, 468 bp, Glycine max
  unsure (1)..(468): unsure at all n locations
aatctaggtatccaaaacctatcatttttgtggattntcaaggtttgagacgtgaaaatgagaatnggttaattntggggtaatctctcatctcaatcaagtctataacattgatttagacttgctcaaactggttttaaggcgaaaactccaccgattcanaatttgacccctcaacacccaatttaccctagaaatgactcttgctttcacctttgtcactcatttttctcatttgctctgcccaagctttcctacaagtcctaattgacattctaaactagaatcaactcactttagactccaatttccactaaccccaaatttggcttctctaaccctcaaaatctcacatttttctacctacaacattgtcattctcacatttaaccctaagttaactttccccatcatctcttaccaatttctatcaacaatttcagcacaccaacatcacagagcatcatc

SEQ ID NO: 210200 - DNA, 444 bp, Glycine max
  unsure (1)..(444): unsure at all n locations
gctgaagacaagactatacgatgtatcttccttgggtatagcaatatctctaagggctaccgtgtctacaacttgcaaactaagaaactcgtcatcagtcgagatgttgaagttggtgagtacgcttcttggaattgggatgaagaaaaagtggagaagaacattcttatacccgctcaactacctcaagaagaaactgaggaagaagacctaagtgaaccaccttcacctccaccacaacaacaagatcaaaaactatcttcaccagagtctactccaagatgagtaagatctttggtggacatatatgaaacctgtaacttggccatacttgaacctggaagctntgaagaagtgtcaaagcaggaagtatgggtccaggcaatggaagaaggatacagatgatcgagactaacacacatgggagttagtaaatcgtcccat

SEQ ID NO: 210201 - DNA, 438 bp, Glycine max
agcttaagaaagtttttttataatttgcttttggttttttcatctaaaaaagttttttacaaagcttgagcttggcctttatagtaaacaagccaagccaagccaagtcttaaatatgtcgagccaaagacccttgacaagcggcgtggctcatttccatcccaaatttccaccaataatatgctttaatttaacatttattcccaccgaaataactagccccacatacgctaatccttcaaccgtcctccaataatagcatttattccctccgcactaactactctgatgccaatccttcaactgtctttcaataatatggtttaatttaacatttatatattctcacaaaccaattatcttccaaacctatccaagcttgtgaccttcctcatctcaaactttggcatctatgcccacatgaataggagtattata

SEQ ID NO: 210202 - DNA, 475 bp, Glycine max
  unsure (1)..(475): unsure at all n locations
ntacttactctagagaccaagagagggagagggcaccttattctttttggggnccccctcaaatggggctattttctaatatgttgnctctatcttagtcttacgagtttatgaattattgattgatctttacaaaatcagaaaaaccgtggatgaactgacttctcttcctttatgaattcgttgtctttgaaataaaaataagtttcaaatatagatttcttattactaaaatttacatacattatacaacttataaaatgatactcgtcgcttcatttaaatttagtttgtctttagtttaattcttaccagtttgcacattgacctataactactcttaccagtttaatattcaatttaaatttgaagttaattcaagttacttcaaaagttccttggccctacanattaaatattgtgcgcgtgtactanataattgatataacacaatcatgctgcacatgccacagtt

SEQ ID NO: 210203 - DNA, 387 bp, Glycine max
  unsure (1)..(387): unsure at all n locations
agctntataagtgcgggtttaagacatgttagtttagtcgccgcgatatgcgaggatgactccccgaggagatcgtatttggtacgaccgtgtcctcctggtttccgactaggaaattggtgagtggaggagcgcccagaagtttacgcaacaagcataatgtaaccctttgtagctttaaaactctacggttgggcctaggctttagagtttccttttgttaaggcattatgtcttttgttcttgaagttataatataaagatatttcttcatctgttcatgcgcctttacctattctcattcatttacgtgtttatttctttacgcttaaaatgccagatccgacgacgagtccctcgaaggtactaatacccgggacccggtca

SEQ ID NO: 210204 - DNA, 484 bp, Glycine max
  unsure (1)..(484): unsure at all n locations
ngaaggcaaactggatgcattggttaactggggaacctagctgttcttgaaccagaaatctgtacctatcgcaagggtctgtggtttgtgctcctctgctgaccaccatacagacctttgcccttccatgcagcaacctggagcaattgagcagtccgaagcttatgctgcaaacatttacaatagacctcctcaacctcagcagcaaaatcaaccacaacagaacaattatgacctctcaagcaatagatacaaccctggatggaggaatcaccctaatctcagatggtctagccctcagcaacaacaacagcagcctgctccttccttccaaaatgctgctggcccaagcagaccatacattcctccaccaatccaacaacaacaacagccccagaaacagccaacagttgaggctcctccgcaaccttccctcgaagaactngtgaggcaaatgaccatgcagaacatgcagtttcaacaa

SEQ ID NO: 210205 - DNA, 381 bp, Glycine max
acctaaaccaccgcagctcaagctcagctagaacatacaatttttttatgaagaggccaatacaatgaacaatacagatcaggagtatataaccgggctctattaagcttctcagaaaaggcacaaccaacccgaaccataaatgatgcaaaattcaagtcagattccgctgctagtattgtaaaaagcgcacgggagactctcctagcattcaaaagcacacaaagtcgacgaattatcaaagcaccacgcctacgatggtataaataaactaaaatcaacacttaagaacgcggaagttaggagtaaaaacatattttagcaaaaccatatatagggccaggttgtttaaactttaacaaaaggattcttaacaaggga

SEQ ID NO: 210206 - DNA, 481 bp, Glycine max
  unsure (1)..(481): unsure at all n locations
ggacctatgaaactcagcttcttgctcctttccttgtggagagtggctactaaattataagaggaaatatcngttgcggcgggaaacacactatttacaatccacaagtagctgcagaattttcagtagtcatcaatttatttggaacttagccgaaaaaactttatttatttggatctattgccctgttttcccttgcggnggatgtagagtgatatcagtttaatgcatattgtgagattcaatttcaataatgtttctagtgctcgagtatctatccatgtcctatacttntaaatgacccatgcatgggaccatcgcagcaataatgccttggtgcgctattttttctggctgaattcaatgcataatttancgatagattgggaattagatctctttgtactcgcaaaataagagtcttatgcaagagagagattaatttggagactcgacatttttttacgcaagtgtaattaac

SEQ ID NO: 210207 - DNA, 423 bp, Glycine max
tgctctctttagggaagtaatagtaacggaagaactcagtgtatatgttcccacttgaatctcgaaggaatcatagcgaagaaagaactccacaacgaaaagcctcgaaaccaaggtgacgaagtcttttccggcgcattgcttgttcccaagtgttggagactcagtctcaggcccattggaccacagcacgtgcttgaggagcttctccccttcctccccgacgaacctgtccccgacaaactcctcggccctctcgaagatcctaggatccttcgtcgcgaatggttggtacccgaacagcatctccccttccttcacctgaaacgcgtggtcgtggctctcaatgatcaagtctctcttcgcccttccgaactgcagcgccaccggcgggtcgattcggaacgcctcgtacaccacgga

SEQ ID NO: 210208 - DNA, 389 bp, Glycine max
agcttacccacccatataccacttttattttacttcagcagcatatttacaaacttgtccaccggcacaccacttgattggtggtggttcaccctagatttccccatgcaaacacaactattattacatcgccacttttgccagagcaaaatactccctttcctctaccttctcttttatttcaagtatgcattggataaacaatcagaattggttgtgcttacattcaagtatgaatatttgcatctaaatagaatcaagtgctacttatgtgataaaaatgaataaatgtacgcttgaagaaaaataatctaattgcatgcttggattgactaggttctaagatgtaatatttttttatataacagtttctataacaagatttggat

SEQ ID NO: 210209 - DNA, 365 bp, Glycine max
  unsure (1)..(365): unsure at all n locations
actaagctgctctcttagggaagtatagtaacggattattcaatggataagncccactngaatctccaacgagtcatatcgaagaaagaactccacaacggaaagcctctgcaccaaggtgactaagtctttgccggcgcattgattgttcccatgagttggagactcattatcaggcccattgcaccacagcacgtgcttgaggagctatttcccttcctcctcgacgaacctgtacacgacaaactcctcggccctctcgaagatcctaagatccttcgtcgcgaatggctggtacccgaacagcatctacccttacttcacctgaaacgcgtggtcacggctctcaatgatcaagtctctct

SEQ ID NO: 210210 - DNA, 405 bp, Glycine max
  unsure (1)..(405): unsure at all n locations
atgcaagcctttttttttattgaaaattaatattttggangatgagttaacatcaaacttccttctctaaagtgacccaacggtcctacctaagcacgtatcttttttagcatcaccccctattttgacattgaaaggggcttcacggtgttgagcgttaagaattatataattcctaattaagtaatatgggctacatatcatattataacatttatattagttatttacatttacgcgggattaatataactgaccctattacactgcgaatagaaaattgatatgggtttaatgagaaaaaatcgatcggcccattacgagcttatcgaaattctaataagtcaaacctgaaccatggtatggccccaacaactacctcgaacaatctcctctcccactaaa

SEQ ID NO: 210211 - DNA, 462 bp, Glycine max
  unsure (1)..(462): unsure at all n locations
ttttggaatcaaacttgccactggtaagcgtttacttgttttggtaatcgannactagagagtaaaaactctggtaacttagaaaatnttgagacaaactcttttgaaaaacaaaactgtgctatgtttgttttttgaaaaatcttttcaatacttcccttgtgaagtcttcttgatttcttctcttgaatcttgaattcatcttctcttgaatcttgaaatcaaacttctcttgattcttgaatcttctagatttcttctcatgaaacttgaaattaatcttgatcttgaacttgttgactcaatcttgaaatcattctttgggctttntgtcatcatctttgtcatcatcaaaactacttgaatcaacttgattcatcatcatgaagcttgcttctacagaaatgtagttgttgtacacattcaccccaaaacagtaaaagtacttttgactgaaacaat

SEQ ID NO: 210212 - DNA, 422 bp, Glycine max
  unsure (1)..(422): unsure at all n locations
ttctcttgaaacaatctcaggttgtgtttggtcctgtattcgcattctttgttgcgtctttgtgcattcttggttgcgntctttgttttggtcttattcttggttctttcaaattctgtgtcaaaaattatgtttgaattntgttttcaaattctgtttgggaacaatttggcttactggaagaatttangggtttaaggtttagtaggctcttgaatctattttcctatttgcctattgaaaaaattgcctaatttcctattgaacgaatngcctaaataatcctagacgaatnntgaaagaaagcactatataaaaaaaaagttgcagacagtttgaaaagaaaagttaaaaaaaagtgggtgttaatctttgacgtggattgaggcagtagaggcgttttggcanaatcatgacctaat

SEQ ID NO: 210213 - DNA, 450 bp, Glycine max
  unsure (1)..(450): unsure at all n locations
agcttattcaaaaaattagcacttcttttatatatcacaaataaaaaaataaacttattagattagatttaatataaaaaaccaattttatctaattaaaactgaaattgtacatatatattatttataaatttatgatatcactaaaatttgtgtatattttttaataccctcatatttatattttatttcttatatatttataaaattattaatatcttatatttataactaaatttattttcaactatttaagtgaaaatacgtatatttatcaagttaagtaaatgtacttttaagagtatatatctaaagagttatattgagttacacaataacttatagaagaanacatttaaatttatactatctctaatatgtctaatatatatattatcggttagtaatattttcaaaatgaaaaaaagcacactagaattgaaatctatc

SEQ ID NO: 210214 - DNA, 398 bp, Glycine max
taatgcatccttatttcaaactagggatgttttctaagttcgtaattatgagattcaattattttttatattgaatgtagagccacgttcaaagtggaggctgagtgtggctattatgtcatgcattggatgtggaacatagtaggcgtggatttaaagaatgattgggccattgtatatttactttaacaagtttaacttattagttggctatcattttttattcattttacatgtacatgactaatttgtatatttcatattttgtagtgggttggtgatggcacaccattagacaaggagaccataacaacaattcgcaacaaatgggcagcttattttgtaaaagttaaagacacttgattagacaggttagatgatataggaccactactatg

SEQ ID NO: 210215 - DNA, 474 bp, Glycine max
  unsure (1)..(474): unsure at all n locations
gttgatgctggtatgtgtgaatgtatacacgatccacattactgaacacagctaatangtgcagaagggttatcttgtgtgttattatcagctatgtcaagctgagacttcctcggaagaatatctaaattctgatcatacatgtgaaattgaacatttcatatgcatctaacctctttctagctactcactggataatgcaatgacttggatgcattaaaaacttcagggaaattacactaatcccaaggttagagcacattacactcgtgagactcctgttgtatgggacacaacaccagtctttgttgattgtaaggcgtcagctgctgtataatctatgggtaaaatgtctaaaattcctattcaagcttgccttttgctcataatgaaaagcatatatttccatcttcatcctcacacctctaanactcaccaacccatgacctaagcctcaccgacctgttctctaat

SEQ ID NO: 210216 - DNA, 237 bp, Glycine max
agattgaggcgggttttatttaacagctcgccggttctgaacacgattcggcaccaataaaaagtactctatagataaaaaatccaaattcaacaaacgaactgtggaaaaatttcgaatatatacctatatcatttaaatataaaaaacgataagctaagcgaacacctagacgcactgtataattacacacagcgtgctaacaattaaaaacaacttattcattttgataaaccg

SEQ ID NO: 210217 - DNA, 451 bp, Glycine max
  unsure (1)..(451): unsure at all n locations
tcatttgggtttaaagtattactgtgttggattgtcatttttattcgaattgtttatacgtgtagaatgaaataagattttggctttntactaatgatgagttattatgtatagtttagtatgttatgtatacttcggttatgtgttgtatgtgtgagtttaaacttttgatttattgttaagatggacaaagatcagtggatgtatgacaatataatgtctgaagaagtggatatgaattatcaaaatgaagaagcatgtggtgtgaatgaaccacatgttgattgttctgatgcgttcgatacttttcaggtaataatgttcatgattgtgagtgatttaataaaatcaatatgttgtagaacactgaaattatgtggattgctttgtaggtgtttgacagccgagaagatgtttacggtggctcgatcctgtgctatgaaacggattg

SEQ ID NO: 210218 - DNA, 460 bp, Glycine max
  unsure (1)..(460): unsure at all n locations
agcttggaaggtggtcatacctcaccaaattattttatatgtatgtttacgtanaaagataccttggatatgcatgtatgtaacaaaaaatacttcacaatatatatatatatatatatatatatatatatatatgtatgtatgtatgcttaggtagaaagataccttggatatgcatgtatgtagcaaaaaatacttcacaaaatatatatatgtatgtttaggtagaaggataccttggatatgtatgtatgtagcaaaaaaatatttcacaaaatatatatatatatatatatgtgtgtgtgtgtgtgtgtgtgtgtatgtttaggtaaaaagataccttggatatgcatgtatatagcaaacatatctcacaaaacatatatatgtatgtataggtagcaagataccttggatatgcatgtatatagcaaaaatatctcacaaaacatatatatgt

SEQ ID NO: 210219 - DNA, 474 bp, Glycine max
  unsure (1)..(474): unsure at all n locations
tctagtatntataggctntcatcttcaagtgtccattgcttctatatagatctacttcttctcttttctcttgagcttacgtctaatatttgtggttgttggaacaatttaatgtttgtattaaatgcatgtccttttcatgttgaaaaaccactgtggtgagttttcatgttgacacttcaacaaaaaaaaccattcctttgagtcagagaaggttagtcacagtagagtgtgcctcttgccttttgatgttgttcaataacttctagatcttaaacttcatttattcttcataggattcaacggatcctatgagaatgtcttgcgaaacaatttatgcaaatataaattcagacacaaaatattaaatgaattctttaactttatcttcaatattgtatcaaatcatgacanatttctattataattcgaaaatatagacatatatacacgagtcaagggttgatatcgcat

SEQ ID NO: 210220 - DNA, 443 bp, Glycine max
gtcttgctcatacgaacatgccctttttttctcttttttcacttaaaaaccattctgggctgagatttcgcgattctgtattgagcgagtctgcgcgctaagcacaagtaagtggttgggcgcttagtgcacaacgtgcactaagcaccctttcgcatgacttcagattctccaagttgcttcttcacactaagcggaggccttcccgctaagcgacaatagctcgctaagcgaacctagcgcgctaagcatgaattctcaggcttcaacttctctgtctatcccttgcatgtgtttctacaagatacaaacctaccaaacagtataaattaccattttaaggcatctaatgcacaaaaactcaatggttgctgaattccaatgattacacataaagagcactaaacgcgacatattacaatctttgttttattcatattatt

SEQ ID NO: 210221 - DNA, 423 bp, Glycine max
  unsure (1)..(423): unsure at all n locations
agcttgaggggagnngcttcttaacgtgttattgaaacttaagcaattnggggggggagctatagtggagcaacaaggattacacttctgaccacttggtgacaaaggctctcaagccaagttaagaaccaactctcctttaaatngaagctattaggcgcagttgaatggttttatatttttaacaaaagttgtacttcatttgcagttaaatggcttccatgtaagcttgtacccctgaatattacaaaaaaattgaatattaagagagatgatctaataggagatcgtttgatgttgcattaaaataattatttagtcttccacacacatataggggctaactggttgatccactntattgcaatcaaagatacagaattatacangtgtctatgataaaaacatttcttaccaaaagca

SEQ ID NO: 210222 - DNA, 440 bp, Glycine max
  unsure (1)..(440): unsure at all n locations
cgcaactcatattcgcacatcctgcctgttgtgtttatcttaatatatgtgagataaatgtccttcgcacgtatctgtctttttactacatacatacgaacccatcccaggaaatatatgatattggactcagtcaccatcggatcattgtgtaatttgaacaccactttagtgaagaattttctaacatcctaaccatcggatgtgtgagataatgactacgctgcgagaaatgtccctcacacgaagacaatgatatgaaagctccgatcacttttgcttgtccctaacgctgggaaatcctatcagagcaaccagccgatacgcttgagaaatcttatacaactactagagatgccgctatcactttcagattagacatgggagcccactnataggtaaaggatggagtattcacagcttgcgagtggcgagaacat

SEQ ID NO: 210223 - DNA, 457 bp, Glycine max
  unsure (1)..(457): unsure at all n locations
agctngggaatactcgaataaacggctgaattgatgtattgacaaaagcccattttagtacaatacccaaagtggacaacatatgcaacaacacatgtgaggtattcaattccaagattttgtagtgtaagtgcaagcctattctcaccatgcttaaataaattatatgttacataatgaaaatcatggctgcccgcaaggttaaactttctggaaaccctggaccattatgtacagtttagtacaaaagactagaaaaagagattcattttgctaatcaatggactctccaatttggtgtgatgataacatgggggaataaggttgaggtcaatttatctgaatggacatgcaattgtagagtatggcaactaacaggttgtgttctttacagttgtttttttcattcctaaactacatgtctgctgatttacaaccttgatgtagggatgccatg

SEQ ID NO: 210224 - DNA, 282 bp, Glycine max
  unsure (1)..(282): unsure at all n locations
tgtctcaaccgcgagcgccgaccaccgancagccagaccgcgacgcttctcattacacaagcccgagagggcacatagcgcacaccacacaacccacgaagaccgcaggcaccgagcaggcgagacaagccgacgacgccaatgccaaaacccataccgggaacgaaaccgacccccaacaaaacccgggccaacaataccgctgcaacagacagacaaacttgcccacagaaggaagccacggaggaaacgcccaccaccaccaaagacgggaaagcggag

SEQ ID NO: 210225 - DNA, 450 bp, Glycine max
  unsure (1)..(450): unsure at all n locations
agcttcaatggtagcgtatattattacttacattatgacttatcaaagaattactacaaaaaatggaaattgatgtttgattcttcgagtccacaaattagaacttgggacttttttccaattaattgacgcactagctcctcctactttaagtcaataaacagaatgcattatcattttatattaaacaggtaaattttaagaatgacaatcgaacttgaattgaactaatgttcttaaagattatttacaacgaatgaagtttttatttgtcaaatgagtctcacttctgacctaaagaaaagtctgaaagatttttaactntttaatttgaattacacgcacatcctatataacgcatcacattacacacataatattatagtataaatatatattttttacattatataattaaagtctgaagatattaactcttttttaatttga

SEQ ID NO: 210226 - DNA, 474 bp, Glycine max
  unsure (1)..(474): unsure at all n locations
tgtcagataatgaatagcaaggtgggagttatgacaatatattatgcttaaaaaaggatctctagaattattctacgttgttgaaaggcctgattaaagactgatgcccatatgttggttgttaatttcaagagaaattatgagatgaattcattttactatgacttttaggttgatgatgagaggctaaaatatgtgtttttaggaggagggtcttcgtaaaaaaaattactttgttcggagacatggtttcattcgataccacatacaatacaaataagtattgtatgatttttgcaccatttactgacataaaccatcattagcagagtaaaacttttggagctgccttgttagtaaatgaaaaagctgaatcatttgagtggttatttgaaacattnttgaaagccatgggaggtcataaacttgtcgtgatcataacanatcangacccagatatgaagattgcaatga

SEQ ID NO: 210227 - DNA, 433 bp, Glycine max
  unsure (1)..(433): unsure at all n locations
agctaggaatcaattacacatataccgcttctatgtctctagcagatnttcagaaggaattcgcaacagtcacatctttttatgtggttcttgaatggctatcaaaggcctatatatatgtgacttgagacacgaatttgctaagagtttttcagaacaaaaaggtcttattctcttataaagcaaaatcgttatatcctgttacaaatgccttggccaaattacttgtgattcaataaggaattatttgagtgctcaaattgatcaatctatctctttcaagagagagttcttcttttcttcctctttattctgaaaagggattaatagacccacggtctcttgttgtgaaagaattctaaacacaaaggaagggttgaccttgtgtgtatagaacttgaaaaggaattacaagatagcggactctcaagtg

SEQ ID NO: 210228 - DNA, 451 bp, Glycine max
  unsure (1)..(451): unsure at all n locations
tcactcctacattgcatctctagcatgcattttctttctttacccactcctcacgtttggttttttagggaaaaacaccataactaaacgcgccgcaagggatccctatcgcaccagatccaaatctagaacgatgggtgatcaagaggagacgcaggaacagatgaaagccgacatgtcggctctgaaagacaaatggcctccatgatggaggccatgttaagtatgaagcagctcatagagaagaacgcggccaccgccgccgctgtcagttcggctgccgaagcagacccgactctcttggcaactacgcaccatcctccctcaaacatagtaggacggngaagggacacactgnngcacgatggcagccctcacctgngatacaaccgagcggcttacccttatggattgccgcccaactattcaccacccgtcttgcaagaagatg

SEQ ID NO: 210229 - DNA, 482 bp, Glycine max
  unsure (1)..(482): unsure at all n locations
tagctaatgctactgcgcgaattaaagtaagaggagganattatcttcatcncnancgaaatcacgaggaaaaccactaatgaaacaattaaggaaagcctcatcactcaatccaagagatctattatccaaggacatgaattttaggtaataatcagaaatagaacttgtttactgcaacttaaacaacttagccataggaaaattgaatggagaaggaccaaattgtgactccaaagcacgagtcaattccggacaagtagacaccatagatagcttctgagacatttgaaacaaagccacgacattattatcacagtgcattgcagcaatgtcaacccgagttgcatctggagtgtttaatatgagaaaattntttctgccttgaaaatccattccataaccagtgtagtcccatcaaaatgcaaacattcaagagagatcttctttgctgtaatgctacactaatcagcgcacacatg

SEQ ID NO: 210230 - DNA, 446 bp, Glycine max
  unsure (1)..(446): unsure at all n locations
agcttttcctcgcacacggtacctcttcttttcttcatttcatgaataaaattaaaaactccctcatttctcctcccttgttatccctactatgcacaccttgtctctctgacgcccttcttacacaattgtaatctcccaatacacaccactccttaatctctgaattttctttccatagcttcaaatcttcccacaatcttcttcttgctactctttcacatgaagcataaacattaaccatcactacatcgatccccttctatttccatcttccttgtaaagaaatgaaaccttccccaatgaaataatgaggtcattcaaaaaaatntgcaccctatatacataataaaccaccggttgaattcactgttggactcatgacccactatacatcattntcctcccacaacccttngacaaaattcttctcaatcacatcattt

SEQ ID NO: 210231 - DNA, 401 bp, Glycine max
agcttgccgcccagctcgcccaggctacttgtgttgcttctctagaagcaacagccttctggaggaatcttctggagggcccaagtgggcctggttgctatttacaccccctttttactaaatgcaccccccttctatttttttggaattcttttccgtaacgttacgaaactttacgaatttcataacgatacttattttccttccgcaaggttacgaatccttacggattatgtatttactcttttttagctttcgaagaagttacggaaactcacggattgcgcaaaaacacatcttttcggtttccgccacattacagaatttcacggatcgtgcaagcctgctttcttataatttctgagacgtctccggacttcttttattgcatgtcatcaagt

SEQ ID NO: 210232 - DNA, 361 bp, Glycine max
agattttaggctacagattagaacacaaaagcatgattgattaaataaacatcttcatatgcatcagcttgtttgttagaaagacccgactttttttacctattgctgtcaacttttatttacttgcatccattgtttttaccataaaaatagtttatttctgttttaaccatccattatcaatgttattccaacaatgtcttatttctgaataaaactgtctaataagcaagttcccttagttcgatactcggatcactctgttttaattataaatacttgacgaccctgtgcgcttttcggtgtttcatttcccttcgaatatatttgttgaaaatggagagtgaacaaagtatttatg

SEQ ID NO: 210233 - DNA, 447 bp, Glycine max
  unsure (1)..(447): unsure at all n locations
ctagttgccagcttcattttttcantattngaattgcnctcttcaattggaaaatacaagcttgagaatgataattttttaacacattgtttgttagtgtgcagttagtctcaattgtcactattataaaatacatcttctacatcggttatttaggactttctacatcggttnttaaccaatgttgaaagtattattgttaacatcagttttccaagaccgatgttgacataaaattgacaacgtcggttatctaaataaccgatgttatataataagaattacaccaaaaaaagtgtatgaatgttgatagttgacatcggtttttccacaaaaccgatgttaacttatagattaacatcttttttgtataanaatcgatgttaacttatatattatcatcagcttcttataaaaactggatgtaaatgggtatagggtaacatc

SEQ ID NO: 210234 - DNA, 447 bp, Glycine max
agcttaagctccttcaactgcacaagactctttatatttaaagagtatccttgtggaaccttcacccgacgaagacactgacaaaaacttatcttctacttcttggacaaagtatggcaggctgggggcaagaaaattttcttcccatcataccttggatgcaactgtgatcgtatacccatatcagctagatcttgatgggtattcaagccatccttcgtcttgccttgaatgttaaggagcgtcccaatcacaatgtcaccaacatttttctccacatgcataacatcaatacaatgtctaatgtcaagatcacaccagtacggaaaatcaaagaaaatggacctcttcttccatatgcgactctgacttttatccttcttttgggtcttcccaaatacaatattcaggtgttgaacccactgatatacctgctcaccagtcaat

SEQ ID NO: 210235 - DNA, 495 bp, Glycine max
  unsure (1)..(495): unsure at all n locations
gctccatggaatctcgaaatactatggcagcataannaagggagtagcagaggaagttgtttgttacaggagataatcaggatattcaagaatacctacagcatgatgtaataaattcatcaaatgaaaggtaaaatatccattcataattctcataatttcaaaatcaattttaaccaaaatcaattttgcctcgctcatccaaacttacacttaatgaatgttctgttagtttgttcttattgacaaggatattacatatgctattgctgttataatccaaacttgcattcttcaatcaggtacaaatatgaaaacaacattgttatggatgtttcgtcatctgatgggagctctcctctacagtatcaactttatggcaatggaaagattgntgttgatgtgcctccaagagggagtcanaatcagcttcttgatagataggtcatgattcatcattaaatgcatatntttgttcaggagggatatgtgtgt

SEQ ID NO: 210236 - DNA, 479 bp, Glycine max
  unsure (1)..(479): unsure at all n locations
tgcccaagcaagctagagtttgcccaaacgagcttttgtttatgcatgaagctatttcatggcccaagcaagccagatgctagcctgtgttagctagggtctagaaaaatccaaaaaagacccttttgccccttccttggtatcattttgttttcttgatcaaaacactgagtgattccttgctttgcactgtaactgacgccaaatatcataatccgactagcaagaatcaaaatattagcgaacgatagtccctagatgaaattagggtatgatagctgtctctctttacttatcttttattgaaaatgaaaaggtaagtaaagataatgacactaatttcatttaagtgatcttgctatttggcgaatgccagagaaaacaaaggaagtgaaacctgaataanaaataacaaacggatattgacattgaagtattgaaagcatcaagcaaaagacatcgtagtcttgtaaaacatg

SEQ ID NO: 210237 - DNA, 444 bp, Glycine max
  unsure (1)..(444): unsure at all n locations
agcttgacccttaagcctaggtaagttgaatatttcttatgggaaggtaataattcataagccactttcataagtcaaataagctctgtatgagttcttccaaatgacccctaaatatttacatgtgttacacaaagcatccattaaattcttggacgaatcatttttcaaccacaaagcagaagttgctgttgcattagttaaattatatatacattgtttatggtctcttgctttaaatttgcaggctgagaaacatgaagctccagtgaccaattggcatcaagaaccaagaattttctgattttcaccaaacaaagaattttctgattttcaccatctagcaatntttctataatgccagtgctacgtaataagtagtgctagtgacgtagtaggattagaatatatattattcataagaatcgtatccgatgattccat

SEQ ID NO: 210238 - DNA, 432 bp, Glycine max
  unsure (1)..(432): unsure at all n locations
tgtagaatggctagacacgatacatgtcagggtttgttttttttcaaggataaaagggatgccccacattatttccatgacacaaatgcaaaaatgatgatttggaaattttatgcaaaactggtcatgcatgcacctatgtggacgctcaagtgtcaaatttttatggtcatgtgatgctagggctcaggattcatttcctctattntaaatcaacccaatgtttccaaaatatgttcttttatcaatttgtgcattcattcgagtccattttgggcgtctgggaaaatcttcacagcattcacccttcaggtgtatacacattttttcaaaaactagttatgatcagtgaatttttccaaagaaaagttggaagtcatctcttttcaaagcatgttggttttcagcttgaaacttaatttttttttctct

SEQ ID NO: 210239 - DNA, 335 bp, Glycine max
agcttgagggaaaacttgatgctcttggtcttctaggaactcaccttgccatacatcaaaaatctgcatctgcacctgttactgttgcaagagtctgtggactatgttcttctgctgatcaccatacagatctctatccttctttgcagcaatctggagtaaatgagcaatatgaagcctatgctgcaaacatttataatagaccccctcatcagcaaaaccaacaacagcagaataattatgatctttcaagcaacagatacaattcaggttggaggaatcatccaaatctgagatgagcaaatcctcaacaacaacagcagtagcaacaacag

SEQ ID NO: 210240 - DNA, 468 bp, Glycine max
  unsure (1)..(468): unsure at all n locations
tccttgagaagctagagcttagctacacacacccctctaatagctaagctcacctccttgagatgagaaactagagcttagctacacacaccccctataatagctaagctcaccccatgcaaaaatacatgaaaatacaaaaaagtccctattacaaagactactcaaaatgccctgaaatacaaggctaaaaccctatactattggaatggccaaaatacaaggcccaaaagaaggaaaaacctattctaatatttgcaaagaagattggacccaaccttcgcccatgggctcagaaatctaccctgaggtttatgagaagcctagggccttctttagcagctctagcccaatcctcttggagtcttctatccaatacccttggggggtaggattgcatcaactaaaatgtttnttgggttggacctgaatcaggagggagaggccttgacgaactcttaagagtct

SEQ ID NO: 210241 - DNA, 421 bp, Glycine max
  unsure (1)..(421): unsure at all n locations
agctttctaagttntctggtttccaaatcttgttctttcacagaaaacaaaagngtgttattcatctttttcattctcttttccctgtgctattcacaaggactaaccacctgaattctttttgtgtctctcttctcccttttccaaaagaacaaaggactaatcgcctgaattcttttgtgtctcccttctcccttttcaaagaattcaacacgacacagtatgagaattcttttgattcttgcctttcccttaaacaaaagatttcaaagaactaacctccttagatatcttttgtttccccttcacaaagtttcaaaggactaaccgcctgagaactttgtcttaacacattggagggtacatcctttgtaagggagaagagatctcatggaccgcaggttgcttggggactagatgt

SEQ ID NO: 210242 - DNA, 442 bp, Glycine max
agcttgccacccagcttgcccaggcgagctcatttcttccaggcgagcaaggttgcttccgccaaaagcaacaaccttctggaggaatattctggagggcccaagtgggcctggttgctatttgcactcccatttttactaaatacaccccctgccttttttggtgattcttttttcgtaaagttacggaaacttacgaatttcgtaacagcactcgttttctttccgtaatgttacggaaccttgcggattacataatcatcccttttttgacttacggaatgttacggaacctcactaattgcgcaacgatgcttccttttgatttccagtgagtcacggaaccttacagattgtgtatcaatatttgcttttgattactggcatgtcacggaagttcacaaatagcctactgatgcgtgccaagcaccttaaaaatgac

SEQ ID NO: 210243 - DNA, 429 bp, Glycine max
  unsure (1)..(429): unsure at all n locations
caagacaattctccacatccacaaatcacgtataaacccaccatcccctgttgcccacctccaattgagctcacgtactcccacgtagcccttatcctcgttcctctcaacgccgggtccccatcaatcctctcaagctcccacaacatccaagaaattcaacatcccatcatcacaaactaacaaaaccaagcaaaacagggcaaaggcagaaaactctgcccagaacacaaaccaaaaatcacagcttttcacatacaaatactccagtaacattntcttcgttccaattcgttaaccgttggatcgactcgaaaattttactggaagtctctagtacataagtctacantttgaaccgtgggatctactagaaaacgtccagaactcattatgtactactctnntcacaaccagcanatacataac

SEQ ID NO: 210244 - DNA, 421 bp, Glycine max
  unsure (1)..(421): unsure at all n locations
ctcaacccctccaaaaaacagggatcttaagtcaaaatatcaataaaactaaaaaatcatccgaagaaaaagggaaatactaaaaaatatacaagaagaaagagcatgacgctacctgctttaaacaattcanaacatctgcacaaatagatttatgcatacactgaatctgcaataaagttccacactgtggggcaatcaaaggtgatctgtgaaaatttaaaaatagagaacaaattgtagacttacaggaaacacattaacattctgattattcaaacttgaaaggatacatgaacatatcatatggcaacaatttaaaacaaaaatcaattaccataataacatgttccaaactgctcaatgtannaattaaaccatctaacctataaaatccttaactagtagtaactctcaatct

SEQ ID NO: 210245 - DNA, 374 bp, Glycine max
aaaaagcataacaagactttttgtgattggtttaaagatacaatctttgcagatgagaatgcttcagaaacattaagaaagctagcaaatgggcctaaaagaaatgttataactcggcaaggatacgacataaactattattcattttacacaaaagcacaagatgacaaaagtacaatgcagaacagcagggtcatcctaagggctgaatctcaacactttgcaagtgtgaatgacgccaatccctgtgtagcgtccatcccttactttgggttcattgatgaaattagggagcttaactatgtcaaatttactgtatgtgtttttaaatggaaatggcttgacaacaacacgggtgtgcgcacagatgatat

SEQ ID NO: 210246 - DNA, 293 bp, Glycine max
tttcgtgccatgacatcaatcaaccttgccgcaactggtaactattcacgactgctgagcctctgaagaaattcattgtcggtcatttcatcgtgttgaacaaacggtgcctctattgacaaagttggagaggttacagactactttgaatccaatagttccctggaatctctcctttcaccaacataatcacttccaaagcaccaatcttcatggacgacttcattagctctatcaattaatacacttcgctgaagacttctacaccgcaatcctttccatggaatagaata

SEQ ID NO: 210247 - DNA, 400 bp, Glycine max
  unsure (1)..(400): unsure at all n locations
cccatgnggcacttagagacacattccaaccttcacgatatccctgctacaagagcacggatgtctgacccttatgaaccgagctccccaaccaacaagctatctctaaccaaactactattgtcacaacctacccttcggcgggagggcgacgcgagactcgcgggatgcctgttccatcaaaggaatacgcgcggagtcgccaccaacgtttatttgaggaaaacgtcggaaaaaccggaaaagatgccatctacgaacttttaagaggaaggtccttgagatttatttacaacctgtgagaggtttaacaccccacacgtcatcgaatgcgcaaacatgactttgagaattgatggttccctgtttatgtctttatatccattatacacattttata

SEQ ID NO: 210248 - DNA, 489 bp, Glycine max
  unsure (1)..(489): unsure at all n locations
tgtcctattatgtaaggacactccaccatagaatatatgttcctttttctgttgagtaatgccatagtgttgacaacttctaatcatctcttggaacctttcctaggcttcaagtagactcttttactccttctgcacaaaaatgtttccaatggtccttgatgtactgatccttcttcatgggagagaaatatctccttaaaaaggtacttgggcactagttccacgtagtgatactattctctggcagtgaacatagccagttccatgcattcccattaatagagaagggaaaggcataaagattgaagtattctgcttgcacatggttctgtctcactatgttggtcaacttgatgaacttcctaaaaatcagatcttcatgggaagctcactaaacatattattcctcaagatctataagaacccatgctngaaatcaaatgtgacttctattggtagcttangcagntggatggtattggtttc

SEQ ID NO: 210249 - DNA, 398 bp, Glycine max
caaccgaattgtaccctcttggaagttccatatatgcttcctcaaataaattgccattaaggaaagcattatccacatcaagttgtaagatggacccatttttagcaactaccatagccaaaagaactctaactgatgtaagtttagcaactggggagaaagtatcataaaagtttatgccagcctgttgtgtgtagcccttagctaccaatctggctttgtggcgatccacaatgtcatcaagtttgaatttcaccttatacacccatctgcagccaatgcattgtttttcagctggaaggggaaccaaggctcatgtgttattagattctaaagctttgatcttgattgtcatgacttagcgccattctagagaagggagagcttgatgatataat

SEQ ID NO: 210250 - DNA, 369 bp, Glycine max
  unsure (1)..(369): unsure at all n locations
gaacttggtagtttgccaagaatcggatatagtctctatggtagagatgaaccagtataaatccctgtgtctaatatttgtttgctttctctttgctttatttgacttgaggacatgaattgtttttggattttgaaagatatcttgtgttctgcaaaaacattcttatatcgtttgatattgttttttaaaaatatgttatctaccttttacatagtttaatcagacaaaaaactttgttctgtgtttacaaaggctttaaaatttctaaaatcacaattcaaccccccttcttttgatatttgccttatagagtgaaaantaatttaatgcaaacaacatactatcatccaattctatgcanaacat

SEQ ID NO: 210251 - DNA, 463 bp, Glycine max
  unsure (1)..(463): unsure at all n locations
gacctatgaaactcagcttaacatcagaaccacttcaggtgctggaactacnttacatggtcttganggggcctatgcaagctgaaagccttggaggaaagaggtatgcctatgttgttgtggatgatttctccagatttacctgcgtcaactttatcagagagaaatcagacacctttgaagtattcaaagagttgagtctaagacttcaaagagaaaaagactgtgtcatcaagagaattaggagtgaccatggcagagagtttgaaaacagcaagtttactgaattctgcacatctgaaggcatcactcatgagttctctgcagccatcacaccacaacaaaatggcatagttgaaaggaaaaacaggactttgcaagaagctgctanggtcatgcttcatgccanagaacttccctataatctctgggctgaagccatgaacacagcatgctatatcca

SEQ ID NO: 210252 - DNA, 468 bp, Glycine max
  unsure (1)..(468): unsure at all n locations
tcctagttatggagagctaaatcctctgggggtttttcttgtttgtactaanngaaatacatgtatatctatttaatgattttttgtgtgttcactgcgctatcagaacttcattctaccatgcttatgccttgatcacgtagatgcatgtatttttaggatcattcaacagtggaaactggtttgattcttagaacttgataggacagggctagtttattgtattatcacgagggatttgggtacgataggctagttgttgtatgtttgtcttaatgcggttctggtcgagtttagtccaacaagaggaatatgcggatgatgcctgattaggattacgctcgactatcatgaggaatcggggtttagcatttcaggaagaccaacatgttgtctacttggctttatgcatcattactcacgtgattttcgttntatagttagttacatacctgtcataatccgaca

SEQ ID NO: 210253 - DNA, 446 bp, Glycine max
  unsure (1)..(446): unsure at all n locations
agcttacccacccatataccactttcaatttatttagcagcatatttacaaacttgtccaccggcacaccacttgattggtggtggttcaccctagatttccccatgcaaacacaactattattacatcgccacttttgccagtgcaaaatactccctttcctctcccttctcttttatttcaagtatgcattggataaacaatcagaattgtttttgcttacattcaagtatgaatatttgcatctaaatagaatcaagtgctacttatgtgataaaaatgaataaatgtaggcttgaagaaaaataatctaattgcatgtttggattgactagtttttaggatgtaatattttnttttataaaagttcttataacaagatttggattgtaaatatcttaacagatataggctaattatacaaacacacatatgtgttaaaagaa

SEQ ID NO: 210254 - DNA, 368 bp, Glycine max
tacccagaccgggacggtaacacaatacctctttttctttgtgaccttgctaatcgcacgacggggttgccctccaccttccttcttagttgctttatctccggcctcatcccggagatacggagagaagtttaagcccaccagccggccaccctggtttaagccgcgggtctcgcgcgcttgcaggaggagaagttctccgagatgcgtcaacaccctcgtcctcgtgcttcccctttgccccaattccagagatcaccctcagtgtttccctcctttccccaagtcaaccctactgctcccgtatcctctccacccctttctcctattctcaagacaccctcaccggcactatcttcgaccttacc

SEQ ID NO: 210255 - DNA, 475 bp, Glycine max
  unsure (1)..(475): unsure at all n locations
tgtgacacgtganantaattaaaggggatgtatctttttcattaacgagaaattaaaaggataatcaatttctaattgttagaatatgatatattttaacacacccacacagtcgaagcaggagaggtcgacagatattgagactgtctcgaaaatcctccaataacatcaaagaaaatcctttagtaaatatgtccgatattatcatatattntaacactaatggaatgcacaaaaagacttgaaattgtaatgatagtaatattgttgttacaattttaaatatggctaactgatattttaaaattgtaatttgttagtagtcatattgtaattaaggaatagttntgtgtctattttaattgtgttggatttggtgcanaaggtgttgtttatactttggtgatattagctagtattatgtagaggaggtgggntgagaatatgaggaatgacacatgataaatagtctacg

SEQ ID NO: 210256 - DNA, 407 bp, Glycine max
  unsure (1)..(407): unsure at all n locations
agcttgcaggcattanaatcagcgaacattttttttctccattggnatctccattagaccctattgccatataacatgtatacaccatgccagacttgtaatcatgtgatcaagtctttcatgagtctttctccattggttctttctccattctttcaatgagtctttcatgcattgatctagcttgtaatcatgtgaattctccattgttgatccacttttgctcaatatactttctccataaagtaccttgtaattttcctcatggtcaaacttaagtggattatccacaatggaagagtcaagaagtgaggttagggaatcctcggtggtacaatttaccttggtcaatgaattgtcattggtgttgtcaatactttggggngttcacaagtatctatgacact

SEQ ID NO: 210257 - DNA, 200 bp, Glycine max
ctcgaacatacacgtgattagttctcgccatattcatatctccagagctttccacgtggatgtccgagcgtgtcgatatataagacgcgaggctcggacttgcgtgtcacaagctctggccatatgaaactggcgtgagctttcgcagtgcaactctcagcatatccatatgtgaagcaccttactcgcacatgcgcgag

SEQ ID NO: 210258 - DNA, 476 bp, Glycine max
  unsure (1)..(476): unsure at all n locations
ctcagcttacagtattttttcaacctgaggtttgggagacctatttcttatgtttttcttactagatgatataaatgatggatgttaatgtgttcaaccctacaatgccacaaccatgaatcatcatctatcttactcaccaagcaacttagctcatgaaaagatgcatgctcaacattcagcatataaatattacctattctcttaccaatgtggacaactttaccagatatggcttcacttataagatagcaatttctgtcaaactcaatcttgaaacctttatcgcaaagttgactaatgtttagaaggttatgctttagtgcatccatatgtagcacattctttatctgagttttgtgttaattccctatatttccttccncagntattnttcctttgttattgtctccaaacatgacatatcatccatcttttgacacannagtagagagttnggacttgtcacccgtcat

SEQ ID NO: 210259 - DNA, 452 bp, Glycine max
  unsure (1)..(452): unsure at all n locations
agcttgactagacgagttgattntagccttagtttcttcttagttattagtcaattcggttaagaatgagaaatcccaaagagaaaatgtccagttgattttccgctttattttactaaaaaaggatgtttttttgattattatattattttttacctctttttgatttccaatgtggttacggcacgaccgaacggtcggaattcattttaaccgaagttaacggataatacaattcaaacgatcggtggaaacttatttatttttaggttaagcaagaaatggcttaagtaaaatggcttaagcacgtcaaaagggggtataataagtaaatgaaacaagaatagaaatacacaaaacacaatgtggaccaccatgggtacatagaatgaatcgaanagcttggttcgaggtacttacccgttgaagatcgaagaacgaatgaagaacgt

SEQ ID NO: 210260 - DNA, 475 bp, Glycine max
  unsure (1)..(475): unsure at all n locations
ctaagctcacagttattttttcaacttgagtttggaagactttttctaagtctttcctaactagatgatataaatgatggatgttaatgtgttcaaccctacaatgccacaaccatgaatcatcatctatcttactcaccaagcaacttagctcatgaaaagatgcatgctcaacattcagcatataaatattacctattctcttaccaatgtggacaactttaccagatatggcttcacttataagatagcaatttctgtcaaactcaatcttgaaacctttatcgcaaagttgactaatgtttagaaggttatgctttagtgcatccatatgtagcacattctttatctgagttntgtgttaattccctatatttccttccccagttatttttcctttgttattgtctccaaacatgacatatcatccatcttttgacacaaagttagagaagttggacttgtcacccgtcat

SEQ ID NO: 210261 - DNA, 479 bp, Glycine max
  unsure (1)..(479): unsure at all n locations
ctaagctcggctctggacatcaactgcaaactgaccatgccgatagtacttattcacannctgcaaggatgcatagttaatgaagttatgcctcttaatcatcaaagaaaactaaaagaggtgaaaaagaatcaaaacgcaaaccttgagattcatatgaccttctagcatatcatgacattgagcactacaagattccacttgacttaatagattctgaagcatgtctatctccgggagttgaacttgaagatccacaaactattgtaaacatgaatttcatattataaatttataatctgcaggtaaatcatgttctgcacaatgtgtgtgttgtgtctgtgtacaatgtatactactcacataaatgcaacacacatgaaataattaacaatgcatgagtagtccnataattaaattataagcacttcattatacattatacgacgaacaatcaagttagatattaattcatacat

SEQ ID NO: 210262 - DNA, 384 bp, Glycine max
  unsure (1)..(384): unsure at all n locations
ggccgccacggagttttccgactatgctcttgtgtggtggttttatctacanaaggagagagcaagaaatgaagagccaatggttgatacatggactgagatgaaaaagatcatgaggaagcggtatgtgccggctagttactcaagggacttgaaattcaagctccaaaaactaacccaaggcaacaagggggttgaggagtatttcaaggaaatggatgtgctcatgattcaagcaaatattgaagaagatgaggaggtaactatggctcgatttcttaatggtttgactaatgatatccgtgatattgttgagctgcacgagtttgttgaaatggatgatttgcttcacaaagcaatccaagtggagcaacaattaaaaag

SEQ ID NO: 210263 - DNA, 433 bp, Glycine max
agcttggatttccttttagagggaatctattctttctaagatggagccaaacccagtcccccctcattaagaactagctcctttcttcctctattgcctttagttgaatagacctttgtttggttctctatttggttcttaaccctctcatgcaacttctttacaaactctgacctagattccccttctttatgtataagtgaagtgtcaagtgggaggggaataaggtctaagggtgtcaggggattgaacccatagacaatctcaaaaggggattgcttggtggttctatgaacccccctgttgaagaaaatttacttgaggaagaactcatcccaagattatggttcctttataagacccttaaagggggataagaccatcactacttgttgcctatagttgggtacatgggaaataaaagctacttata

SEQ ID NO: 210264 - DNA, 196 bp, Glycine max
aacttaatccacgggaaaggaaagagaaccatacccttggcctcaattcgaccaaggctagagggtgcaccgaggataatattggtacacacgacttaattgaaggaaaagtaggttccagccttgctaagcccctctccatgattccaaccgcctttttttgttattagactgactatcactcgtggagaaaatt

SEQ ID NO: 210265 - DNA, 391 bp, Glycine max
cattctacgcgacaatgatatattggatgataagttctgagaagataacaattgcatcaatccaatttataaattttttattaaaaaactaatattttgagcgctttaaataacaaataacaagaaactaacattttgaaaatttaaaataaaaatatatagctcattaactaaaaatatttgttaaaaccaaaattatacataatttaatagttaaagaaaaaatgcaactaagatatatatatatatatatatatatatatatatatatatattggtacttacattacttgattaccctcaaccacatggataaactaatataaattatctcaaattaatgatctcggatttgaatattaacatacaggtatgttaacaattttctatg

SEQ ID NO: 210266 - DNA, 153 bp, Glycine max
  unsure (1)..(153): unsure at all n locations
agctngtatttaaaaatgttntaaaaatactcttaattaatatttgaatttttattcctttcttaatatatatgtggggggtagaggccgcnccctcntccccgctattttacctaaaaaggaggtccttcttattctctatacaccccctac

SEQ ID NO: 210267 - DNA, 453 bp, Glycine max
  unsure (1)..(453): unsure at all n locations
agcttctatataagctgaaccatttatctttttcacaagnngagtnntattcagaaaattagagtttatctcttttatcttagtgagagtgattctcctaaattcttgagtgattcaagaacaccctggctgtatcaaaggactttcacaacctttgtgtgttgccctcgctggaaagagtgattctttccttcctatcatctccacccttgttctttcaaaccacaattccagaaaatccacctctgcccaaaattatctcgtgaccataactcccatttcacacactcaaattaagtgattcttgatcctaaattgaatttcaaaacgagatctttcacctcgttttggaatcacctcatttggagccctggtagcttcgttattgccatttctatatttcttgccagccaccacttaacctaccgtttaccattccattcatncatttta

SEQ ID NO: 210268 - DNA, 476 bp, Glycine max
  unsure (1)..(476): unsure at all n locations
ctggattagcatcctttgcttcacttgctgcatcaagatttgtttctagatctaaaatcttgaacgacaacatttgcattnttattaaattgagtttgcattaagatattaagatntgaattgaaggttgtttggatattgaattgttttcaaatttggagccaaaattctggtagaatccagatatggataattaaaatttgtaggatctaaatttgttttcagatttggagccaaaattttgttacaatccagatttggataattaaatttgctaggatctaaatttgttttcagatttggagccaaaatttcgttacaatccatatttggataattgaagttgtttggatctgaatttgttttcaaatttggagccaacaattttttagaatccaaatatggataattgacagtgtaggatctgaatattgtcttcaaacttgagccaaattctattacagctacgttggatt

SEQ ID NO: 210269 - DNA, 459 bp, Glycine max
  unsure (1)..(459): unsure at all n locations
agcttccaaacgtgaaaggaacaaattcatatattgcagntgaaaaataaacgttgaaacaaacaacactttactgaattcaccgcttatggagacgtaagcgtatgctcaataacgtagcagcgggaatgaaaaaacaggatttatttaataagcattaaaaattaataaacgtaatattaaaaaataataaaaataaatttaattatgcatagactaatccaatgtattaactggatctcatcccgtgaatccggatcaggtaatttttttatccgccggaaccgattgaaacgttagtgaacccacattaaaaatattatcttttattatggaagtaaaaaatattatctctccctcaacaaaatatattataacaaatatattcttaatattatgacaccccaagtgagtaactgctaagttaaaatttatcatcgagtagattataaatttttt

SEQ ID NO: 210270 - DNA, 291 bp, Glycine max
  unsure (1)..(291): unsure at all n locations
gtgaatttttatcctcggcttgaatatatatgtagaaggtgacggagtggacttgggcactgcgtacctcgtgcttagtattgggtgcctatatttgcgcttagcacgcctcttcctcgcttagcgccaatgcttgttttcgcgctaagcgcgtcttgagttaggccctttacaatcattntctagtattgcatttcttatgactttcaatccctcttttacgtatctgcaaaccaaggataggaaaactttttaattcttaacaattaagcctgaataactgctaaataa

SEQ ID NO: 210271 - DNA, 435 bp, Glycine max
  unsure (1)..(435): unsure at all n locations
tatcaataccattgtagaggccatgcaccacttcattattactgtcaatgttnggattggtgtaaaagaactttgaatttagataataacccgctgcatgcaaagggtggtgaagttggcaatcccatcttttatcaatgattgcaaggatatcattatactccccttcattgttactgaaagctctttgaattgtttctttggccctatccattgcttcataaatgaaacccattgcaggttttttttcattatccaccaacctcaacacacttacaagaggccccatagcctttaaagcataaacaacatcattccaaaatgatggcataagaacaacttctgttgcttgcttccccttcggctctttagatgccttagacttcaaccattcatatgaagtaaacatccttctaagaatgaccttttgcttat

SEQ ID NO: 210272 - DNA, 387 bp, Glycine max
  unsure (1)..(387): unsure at all n locations
agcttctatataagctggaccattttttttattaacacaagtngagttttattcagaaaattagagtttatctcttttatcttattgagagtgattctcctaaattcttgagtgattcaagaacaccctggctgtatcaaaggactctcacaacctttgtgtgttgccctcactggaaagagtgattctttccttcctttcatcttcacctttgttctttcaaaccacaattacagaaaatccacctcttcccagaattatctcgtggccataactcccattttacgcactcaaattaagtgattcttaagcctaaattgaatttcaaaacgagacctttcaccgcgttttagaatcacctcatttgacgccctgtagctttagtta

SEQ ID NO: 210273 - DNA, 465 bp, Glycine max
  unsure (1)..(465): unsure at all n locations
gaactaagaaactaagctgatagaacatataggtgtagagatatggatggtttgtcctacaaagctatggggttgaactaatgtttcctataaattttgacaacagctgacctcaatctcactaagcttggtgggtggaaactttaacttatatggtggaggccaacagtgcagaatgttaggaacataagctgctattcaaaggttactacttagtggttagaggtactcctatttctaaggagcataccttgccgccaaattaagctagatatgaaaggctggatgttctgccacttacgactagtatttgtgactntattatgttctcactacatgactgacttactatacatttaaacaattgaaatttcttctagtatagctctttaagatgttctacatagaactcgctttggattgataagctctcaataatcactagtaaaatttatagatgatatg

SEQ ID NO: 210274 - DNA, 282 bp, Glycine max
aaatcgactgcagcatgcaagcttcacatctcacactacccactatgtattcttataacctcttaaccaaatcccaacccttatttcaaaactactccacagtataacgcaacaacaacggttgatgatataggcggttaactccctggtcacacgagaaaacaatgcaggaaaacaaaccttactcactgaaagcatgatgcgcattaacacggaggggacataacacgggaacaataacacgatgcgcagaacaggaggtgacaaacacaccacccctga

SEQ ID NO: 210275 - DNA, 429 bp, Glycine max
gtcaatgtctatcaaaataagcagttagagttacagaggctttatagttaggaattgaaatgcaacttcgtctagttatcaagccaagccttttaacgttcattttgcattaaaattcatacgtgccgttttcttgagatgatatacaattggtttcacagacttcgttaatccctttttcttcttgatattctcctttaggatggtgcatagctattgcaataatatgactttattctcattattcaatctcatctacaaaactttcttaagtcaatcagaagaatatattgtgttcacagacaaagaggttgttgataatttaatttaaacttgattgatgcccaaaccacaaacattacataggaaactggaaaccaaaaaagaagttatgaacatcacatgatacccaacactgatgtcatatcg

SEQ ID NO: 210276 - DNA, 462 bp, Glycine max
  unsure (1)..(462): unsure at all n locations
agctgggagaggatgcttcaatggaggatattatatagggagagaaagagggagggggagcacgaaattgaaggaagacaaagggagagaagatgaactttgagttgtgtctcacaagactctcattcatcaaagttacaacaagtgttacacatgcttctatttatagactaggtagcttccttgagaagctttcttgagaaaactttcttgagaagctagagcttagctacacacacccctctcataactaagctcacctccttgagaagcttccttaagaagattccttaagaagctagagcttagctacatatacctctataatagctaagctcacctccttgagatgagaagctagagcttagctacacacccnctataatagctaagctcacccccatgacagacaacatgaatgatacagaaaatagttcttattacatacacagctcataatgc

SEQ ID NO: 210277 - DNA, 330 bp, Glycine max
ttcacgagaaacgttaccgaaacgcttcggaagcgcctcggcttagattctcttcacggaaacaattgttccaagcaaaatttcaagagagagaggtgcctaaagggcggaacccttgtcttcttcacttactcctctatctatagcaaaagaggggagatgcttgtcgcccaactcgcccaggcgagctcagctcgcccaggcgagccaggttgcttcctccagaagcaacagccttctggaggaatattctggagggcccaagtgggcctgggtgctatttgcacgccccattttactaagtcacccccctctgctttttttgtgatc

SEQ ID NO: 210278 - DNA, 413 bp, Glycine max
  unsure (1)..(413): unsure at all n locations
tgcagcatgcagctctgtntacaatggagcgcatgtatttactgtcctcatccgacatccgtgtgaaaagtcattgactgttgatatatctcacaactatccttttcaatacgagcgactcgatatattacgggacacaaacggacaccctgagataaaagctattgtcgccagaaatacgccacagcatctattttcaattacgagccgctccatgtatatactggactcaatccgcaatccgagtacaaagttatcgtccttcgaatctgcacaaagcatctgattcaataacgagcgtctccatatttacgggactctatcgaacatcgaaaaacagccactgccgctgaatttcacagagccgatgcttaataacagcgtccgaatactactgtgacacaacggcaccc

SEQ ID NO: 210279 - DNA, 291 bp, Glycine max
gagtcttattacattttcttatgcctgggatggacgactgaagcccttagcatatccagacgctcgtaactgttgactcaggcattcgactgagtcccacgacatttactgtccactcggatgtgcgactgaggccctgaatatatccagacgctcgtaactgaagactgaggcgctcgacagagtccagcgacatttcctgtctcctccgatggccgactgaggctcggaatatattgagacgcccgtaactgaagactggggcgttggactgagtcccacgacatttac

SEQ ID NO: 210280 - DNA, 450 bp, Glycine max
agcttttatccaaggcctcctatggtggttttcttcttctagactcatcttctccttgaagaggcatctcctctctctcttccttctccattctgctgacattcatcttccaagaagcaaaggaatccattgatgaagaagatcctaggcctacaagctccaatggagcttacatcaattgtctattcttcacaaagaaagatgttttatagctgatacacataaggagatgcacttaagaaacacaacaactaacaagtatgataattgtaaatttctgttattgttagggtttaggattgaacggataaaaataactggcgttgtttacttgcttgtgtatatcatatgcaaggatgagtttgcttattgcgccttaaatagactactatagaatagcgttgaagacctatgtagagtgtgggaagccatgaacaacatgatcacact

SEQ ID NO: 210281 - DNA, 459 bp, Glycine max
  unsure (1)..(459): unsure at all n locations
agacctcgacaaggganaatgatctgaaaaatgctttgcatgtgaccaagtgcctaaagaagtggtacttgaagttgtcaaggatgcatctgaagcaaagcaacaccaggttaaaatagctgaaagagttgaaacaactttggagaccagttgtgaaatcttctataccacttttgctaaaagagaagctgagcttgaaccagctatgatgtatgagcagatagttgaggaagaaaaaagttcttgaagaagctatggtgcaatttgttattgaagcatctcttcatgaggaagaagagaacatagcaganatagatcttgttgcaactcccatcagacaaagatctatacagacacaagaaatgttgatgatgtcttatntgaagtaatggacaaagataagttcagacgctttggagctatctattgacctctagatctagataatgttgatgatgt

SEQ ID NO: 210282 - DNA, 382 bp, Glycine max
agcttgtaggaaaggtggagaaggctatatctttgccaatctaatatttctatcaacatcaaaatttgggttataagacttataacctaaatgcaagacaactacactcattcctataataatcctttaacatcaccacatataattatcatccctaggctacttcaaatgcatctgttcttgatgagaaaagactcattacttgaccagcaataaccatcggcattctcttaataaatctccatgaccatgtcaggaactaagactataccaaacaaacataattttctagtggaactgatgttagaaaaatgcttgcttacaaaattcactcacagggggtagaaaatatatcagaagtcatcttataaaaatgcacaag

SEQ ID NO: 210283 - DNA, 451 bp, Glycine max
  unsure (1)..(451): unsure at all n locations
ctccttatttccattatggaattctatcaatagttctccaatctttaatggagagggttaccattactggaaaacccgaatgcaaatttttattgaggaaatagatctaaatatttgggaagccatagaaataaggccttatatacccaccacagtggaaagagtttcaatagatggtagttcatcaagtgaaagcataactatagaaaaacctagagatagatggtctgaagaggatagaaaacgagtacaatacaacttataagccaaaaatataataacatctgccctgtgaatggatgaatattttatggtttcaaattgtaagagtgctaaggaaatgtgggacactcttcgattaacacatgaaggaactacagatgttaaaagatctangataaatgcactaactcatgagtatgaattatttagaatgaatgcacatgaaaat

SEQ ID NO: 210284 - DNA, 414 bp, Glycine max
  unsure (1)..(414): unsure at all n locations
nagcttatgagaccaaaacatgacgtttagtattttcaacaatctaattctcacgctaatctagtaaatcttgtcctattgtttatatagtgttatgattatccaactgatttaagagcaaagtgcaaccctacacatttgtgtggtatcgtggagtattgtataaaaatctttccgatcatcatcaataagcaaaacatggaggttgtcgtcagttaattgaacaatagtatattaaaatcaaatagatattttgtgacacaaaaatactaacagcgcactcaattcacgataacaaaacaatcaagcgtacaatttatacgtacgagaaacaagagaaggacatacattattaatatagagagatntaaagcacaacaagggaatagaaaacatcaacttgtcaacaatttt

SEQ ID NO: 210285 - DNA, 401 bp, Glycine max
  unsure (1)..(401): unsure at all n locations
gatccaattggggcaaaattggatgagggcaagagtgatttcgaanatctgcactattatgcagaattctgctggtgaaatgtgcaacagaattttgtgcttgtgcagaanatgcttatgcattgctggttgtggaaagggttgtacattntgggttctggacgttttccagcagatcccaacggtcaaaatgtatatttatgtattatggacctccattaaaattttcgagtcgatccaacggttaacgaatcacaacanagagaatgttactgggggtattgagtgaggaaaattgtggtattggaatgtgttttggngcagaagtttctgcctttgcctantgatagaggtgacgtcatctgatgaagaccctgatgaggacccagaggagctacctc

SEQ ID NO: 210286 - DNA, 425 bp, Glycine max
tgcagcatgcagctactacagaggagcgggctgttttttgtctctccaactttgggcattatcatcaccaccgcatgataagacactaataagggctactggtttcaacggtcaaaatccaacaaagtctggatagaaagaaaagatgaagagctccaactctaccctgcataaaaaaactagcaagcacaatagccggcctcgtaatgaaaccgagacgtcactgcagtgcaaatcggaagttaatggcaatcatgacacccctgcgccatataaaatcatctctggaaacacatgtatggtgaacaggaatccagctgatctcaccataccagaaacagggaatatctatatgatcagaggagaagatctgatatacgagaagagatctcccaaaaacaaaccttcgtctctccattcatatg

SEQ ID NO: 210287 - DNA, 444 bp, Glycine max
  unsure (1)..(444): unsure at all n locations
tgagaaacaaagtagtcaagccttgtttctccctgctgttaatgtgaacattcgcgcgtttgncttctatgcttcttaacggcgttagcatttttaagcacatgctcaaaataatccgccttaatttgttccaaagataacacactatcttttataataatttgcgtgaacaaataaacaattattttttaaaaagtttcgaaggaaacttaaaagtaatcgttnttaaaaatcaaactaaaataagcatgcatggagtggccaattatatatgtattgatgaattagttcagattagcaactatattccttaaaaaagaaagattagcaagtatattgagtcatcttaccaacgagttagtttagaatattctccttgtggatatcacagctgagacttggacaactgaataaagatatagcaacacccatgtgtttgagcat

SEQ ID NO: 210288 - DNA, 394 bp, Glycine max
aactaagcttgaaccacgctgtcgggagaacatgactaaatactaattctttataaaggctgccaaaaaacgaaaatttaaaagtacaattataaaatataaaaatacattccataatatgatcatattatgaaatagagagacggtattttgtctataataaaatacattaaacttttgaacccttaaaattagtggccgtgttctatatgttactctgaagtctgaacccttcaaactttgacagattataatacatatagagaaggattagcaactagcgcccaaggcatttcccaccataatttgcaaggaagtggaacttgggagaaaaatcaagtttactaatcactatatatgcaatgtgctaaaacatggataacctaaatagcat

SEQ ID NO: 210289 - DNA, 472 bp, Glycine max
  unsure (1)..(472): unsure at all n locations
cagcntctcaaggaagtatacttaatatatcttctcacggaagctacctagtctataaatagaagcatgtgtaacacttgttgtcactttgatgaatgaaagttttatgagatacacttcaaagttccactcttttccctcttttattccttcaatttcgtgctcaccccttctctctatcttttccttcattaaagcatcctcttcaagcttcttatccaaggcaattcttggtggagaagctccttcttccttggcttattccctaggggatggtgcctcccctatcctcttctcctttgccttccgctgcatctccatggcgaaaaatcaccattgaaggacctcattgaagctcaaagattcagcctccatataagcctcacaagcaagcttccatcactttgtcttccgctgcatctccatggtggaaaatcaccattatatgacctcattgaactcaaagatcacc

SEQ ID NO: 210290 - DNA, 415 bp, Glycine max
  unsure (1)..(415): unsure at all n locations
ggccacccagctcgcccaggcgagcttgntgcttcctctataagcaacagccttctggaggaaggatctggaaggcccaagtgggccacattgctattcgtacccccctttttactaaatgcaccccctttctattttttggtaattctttttccgtaacgttacgaaactttacgaattttgtaacgatacttatttttcttccgcaaggttacgaatccttacggattatgtatttactcttttttagctttagaagaagttacggaaactcacgaattgcgcataaacacctcttttcgatttccgccacattacggaatattacggatcgcgcaagcccgcttccttttgatttctaacacgccctcggacttcatttattgtgcacacaggacaccgagtatcttaaagc

SEQ ID NO: 210291 - DNA, 382 bp, Glycine max
agctctaagaaaaagatggctctatcatattccttatttccagaaggaaactctatcaatagacctccaatctttaatggagagggttaccactactggaaaacccgaatgcaaatttttatcgaggcaatagatctaaatatctgggaagccattgaaatagggccttatatacccaccacagtagaaagagtttcaatagatggcagttcatcaagtgaaagcataaccatagaaaaacctatagatagatggtctgaagaggatagaaaacgagtacaatacaacctaaaagccaaaaacataataacatctgccctacgaatggatgaatatttcagagtttcaaaatgcaagagtgctaaggaaatgtgggacactc

SEQ ID NO: 210292 - DNA, 465 bp, Glycine max
  unsure (1)..(465): unsure at all n locations
tagaacaacttgtgtaatcaatcactataagtctgtnatttattaanacagaatgttctaaggttagaagaaattatctattgttagagactttctccttactactacatgatgatgcatgatgcacatatgaaatgatagagattaagatgcatcacacaatacaacaatcaatacaaatgccactcaagagagttgggcatgtaaaagacaaaacttctttaagcttcatggctaagtcttcatgttgctccccctacctctaacaatctcccctttntggctntgatgatgagaacttgaatntgccattgagtgcatttggagagttcgactcttaagagtagagactcgattntcttagtcaaccgganagtttcttaacactaagagaagtatcaattcatatcatcatcatcatcattagggagatatatattaaaatatacagagcagatgctaatg

SEQ ID NO: 210293 - DNA, 451 bp, Glycine max
  unsure (1)..(451): unsure at all n locations
agctcgacgatatacctcaagtataggaattattagangagggcctagcccgtaagaccttaaattcttgtgccttgtaggcgcccaaaaaaagtattaataggcaccaaatccccaaaataagtgatatgaagaatgtgctgagtgctgagaccctcttgtgtaaaaacagtcatgcatccaccatcttcatgattcacgtacataaggactcaatacgtaggttagatcttatttctggttttaatacatacctaggcactcatatgagacaccttacgtttgtcagatcttcttgtatgaatcatccacatgacaatacacagaaaggcacgttttattgcactactctccttaattttaaaatagcgagcaaagggtcccatggacctagagaaaaatgcatactgatagcccactcaccacgaaaaggaaactgggctgcaagaat

SEQ ID NO: 210294 - DNA, 449 bp, Glycine max
  unsure (1)..(449): unsure at all n locations
gcttcactcacaactttacttgtttcatttttatcattctgataccttaaccaatttcgaacattattgccccaatgtaaggctctaaaacactcttttgtttttaccatgttttgaacactttcattccaccaccaagattttattttatcgcatttcccaaaacctcatgattcccccaagactaaacatggcatccataaaataaaaatctcaaataagcttgaaacttgaaaacaattattttgttgtgcggcggattagcttcatatactactggggttttcaaattgattgcaattaccattgaactgaccaataggatatacaaattgatatatggtccaaagctttaaattntattattatttaaatgcacatcagacttatttatggcagatctttaatcctatagctgttgaggtttatacccatacacagtgtaacat

SEQ ID NO: 210295 - DNA, 456 bp, Glycine max
  unsure (1)..(456): unsure at all n locations
agcttattcataaccttanatctgaagcttatcgagaaaagaaattgtagaatgtttgtaaacaacattgttaagttcaactaaaaccctttgtagagcattattcccaagtgctgtaagaccaactgtaaaagaaaaaaaattaaacacttgacaatggatgcatgcactactatcactataccagctagcttcattcgtctctttcaagcatctatagcaattctttgcaataaaatcttgaaactaacacttggacagctagatctaaccgttgttgtcggagtgtgaccaaattaatggttatatttattatgaataattgaatattaaaatactcttggcagtgcatacctacaaagctcacttgtggacaaaaacattacgggtcttaatgganagataagaattaatatcaatcanagtaaagatcagggaggatcatcatcaattttc

SEQ ID NO: 210296 - DNA, 446 bp, Glycine max
  unsure (1)..(446): unsure at all n locations
agtttccaagtgccaattcgtcttcttctttagtccagtcttcttctggcttcaattcatcagtgggctttccttctgtgtccagcatcttgggatgttcccagcctttgatgacagctttccaggttctgctatccagtgatttgagaaaggccaccatccttgctttccagtattcatagttggtcccatccagaattggtggtctgttcactggtccgccttctttctccatgttcatcagaatttatctccctagatctcactcagtgatttcgagtgcctgctctgataccaattgaaattctgatactgnggacagatgtcgtacaggatgtcacgacatcacgcttcagaacatgcagattatnattgacagtgtgaacaaattatacaagtaaataacacaagagaattgtaacccagttcggtgaacctcactacat

SEQ ID NO: 210297 - DNA, 435 bp, Glycine max
  unsure (1)..(435): unsure at all n locations
agcttgtgcgaagagataaacatgaaaagactctttattttttttgcaattgtctatccactaagcgctcagttttcacacgctaagcacagatacacctgattggttggctgaatagttcagctaagcgcacatcactacgctaagcccatcatcttcagtgtaattgaaccttaatcagtgggcttagcgtggatgatgtgctacccgccactccacctttggaaaaatttaattgtagcggcgctaagcgcgttgtcctgagctaagccccagatccattccggaatataagctntcacgctgggcttagcggngcaggaagcgctaagcgccaatctcttactgtttatgaattcttggacttagcgcgcctattgcgctaagcctgaactactctctataagcttgatggtacactaagcctcacattac

SEQ ID NO: 210298 - DNA, 388 bp, Glycine max
atgaggacgtgtagaagggtgaaacttccttcttttattcgttgactttagagtggtaccaggagatatgtcgcgagggtcaggagaccttggggacgtcaggtggggtgctattgcccaaaaccaagcttgaccaatcccgacccaacccgggcatagtcagtcagtgagaacctatgatgtacctaaacaggcgagctcctggcagtcaacagataaaaggaacaaagaccacaaagcaaggaggcttgtgtggtggctggccagctgtgaactttgtttgatatatgggatatggcctttggtaatcgattaccaagggtgggtaatcgattacaaggcttaaaaatgaagacaagagactaagatggtctctggtaatcgatta

SEQ ID NO: 210299 - DNA, 484 bp, Glycine max
atctctaagcacctgcggcatgcaagcttgggtcgaggtacttacccgtcgaatattgtagaatgatgaagaacgaatgaagaacgtcgaagaacggttgaaagctctgcgagattcctcacggaaaacattacggaaacgtttcggaagcgccttggcttatattttattcacggaaacaattttctccagcaaattcaaaagagagagaagtgcctaaggggctggacccttttcttcttgcattcctcccctatttatagcaaaataggggaggtggttgccgcccagctcgcccaggcgagctcagctcgcccaggcgagcagggttgcttcctccagaagcaaccgccttctggaggaatcttctggagggcccaaatgggcctgggtgctatttgcacccccatttttactaaatacacccccctctgctgtgttgtgtgattcttgtttcgaaagtacgggaactacgaattcgaac

SEQ ID NO: 210300 - DNA, 411 bp, Glycine max
  unsure (1)..(411): unsure at all n locations
tgcatttgggcacctattgtgaatctcctatgtttgtcctacatattataaacagtcccactctcccaattntacaaaatcatattcatacatcattggggcatttcaccgagcacttggtgagcgcatgtttggacataaatcgcaagacgatggggacaatgtggcatgccccattgcttcagaatacagcataagcctaaggccttctcattcaaatcctcaactcaagaaaacaagcataaaaacaaaccaaaactgccccacaaatataagcacattctcacaatttggagcaccaaaagatgaagaaaatataccaatgggaagctaaaaacatcaaggattgaatacttacttgttggagtgaataataacaccaaaaatgaaagcaaaaggcaaccgaaagtg

SEQ ID NO: 210301 - DNA, 453 bp, Glycine max
agcttcttaggtgttatagatcgaagtctcttttgggacatctattcaaaacataagttgttgtggtgacaacttctccccagtagcaatttggtagtcctttccctttaagcatacacctagtcatatccaatagggttctgtttctcctttctaccaagccattgtgttaaggtgtatagggagctattacctcatgttcaattcctttagcttcataaaattctttgaactccttagagttatatttaccctctccatctgttctaaggatctttagcttcatatcagattgtctttcaactgatttgacaaatttcacaaagagagaaaatactgcacatttctctttcaacagatatatccaaatcttctcggtacattcatccacaaaagttaggatatacctgttaccaccaagggatggagtatcaaaggatccacacacgtctg

SEQ ID NO: 210302 - DNA, 439 bp, Glycine max
  unsure (1)..(439): unsure at all n locations
atcaagtgaatcagggtgttatagtttatgtaattaatattttccgaactctttaatttcttttgccaacctttgntccttatctctactgatataattaattctagcattcagtacaaaatattcaacttgaatgtataaaatattcaacttgaatatggtctaaagaggttacaattaaattaactatatacgagagatngaatacaataatacatattggacttttttttatcactagaatacatatcggacttggtaaaaaataaattttaaaataagaattacatatcaaattatagttacaagaataatgagaacaaataaaaaactacacttactaaaaagaanagcaaaagtgttttgtgtgtgtgtttagtgggcaatggacatgaatgggcgtaatgagggatgatggcagcgcactgaactaagctcg

SEQ ID NO: 210303 - DNA, 451 bp, Glycine max
  unsure (1)..(451): unsure at all n locations
agctntacatcagattgtagtgatgattcttttttctattattaaaataacttaatgccactaacctatggaattaaaagaacttaatggctgagtgtaattgaaattgtggcaaccaaaagtcacccccaacagccatcaagccaaccaccatttggtctcccaaaaggctgatgcctatgttgccaattgggcccttatttcaacttgaactaaaccaaactaaagcccttttagttgattaacccaaaacatatttttggttagccaactctacaaggattgggccattatttagacaaactaaacactctaaaattaagacaaagtggtgccatttagtcctcctctatttgcgccatgatacaactcacaaccttggacttttctacttgaacttgtgcttgattcaaaagtatgggcagacctgttgaaaagcttcttgtctttc

SEQ ID NO: 210304 - DNA, 414 bp, Glycine max
tatatgtgtctctcttcatgagagagacgtgcttgttacatccagcattattgtttttacacctagcatttttgctgggcatccagcaacacagtaaaagggtcaaaatgtccttcactttttcacgaatcggcaatttgtgatccgtatgagcatataaactgtcgatccgcatgaatttgtttcttttttttttatatacgaattgacaattcgtattgggcctaatcgaacttgcggctcttgcattattaatagaacactcaaaacaactgaactattagactcattatggtattaataaataatatatctatgtataacactaaaatttctaatttatatttaatgtacatgtaaatttatataataaattctataataaattatttttatttataaataatttgttat

SEQ ID NO: 210305 - DNA, 412 bp, Glycine max
  unsure (1)..(412): unsure at all n locations
ccccggaccttaagcgcctgcagctgcagccgtaactcctttaaacttttttatatttaatcncaaangtctgcttcataaaacaaaagattactactttaatatgggggttacactctatgatcatgactaactttatttattacaatttcagtgctccagcaactaataagccaccagccaattcacatgccattagtggaaaaggaggatagaaagcatgaaactcaaaggatcccaaacagggcaatattctttcattcttcaagagagtttgagaactacactacgaatcacaatgttcaaaagagatgatccttctccgngatcatctcagaatgctagctccttcatgattaacggtattgcattatgcagctctcgttcttttacatgacgatttcactgtatc

SEQ ID NO: 210306 - DNA, 438 bp, Glycine max
  unsure (1)..(438): unsure at all n locations
tcctgcatcaaatcgtgactaatgttgagagaaatattacaactattcacttaaaacatccatccacggaataaataagcagtgacaccaanattatattactcacaagcaagtttagtgccaaagctagttaagcaaatggcaaaagcctggaaagcagataggggctgtctataatccatggtaaaagtatcatcccctactttaccanactggaggagaactgtttcctcatctcctttccctcctgggtggctntggtccactgttgcaaccagctgaaagttcttcaccgaggccaccgtcacacggncgtggaaattcaagcaccaacattgcaaatgctcatgccaccttggagctttattcttcaagattgtgtagccagatgcagctggttctttatcgtgcatcttatggncattgacaggcgtgcta

SEQ ID NO: 210307 - DNA, 458 bp, Glycine max
  unsure (1)..(458): unsure at all n locations
cagcttaccttcacagcaacagaaagatagttatcatatggtgtatatatcatgtagcgtgcttgctcctacagcanattgatatatataagctttaaagtttaatgctcatatttttctacattaggtcaatcacaagcaagagcctagaggtttactttagcagaatataaatcggatgacaagaaatgtctcttaactatatatacacaacaaaaaaagaagtcataaacaatattgaattattgattcatagtagaaaggaaagctaacacgaattggaccacacaaccatccactggcataagaagatttttaattactctcacatgtcaacgaggtattggtagtgaatgattattccacaagactacgctcaaacatagtttaatacacaagaaattttataacagccttatgatgatgctttacacgctacacaattgtgnttcacctca

SEQ ID NO: 210308 - DNA, 459 bp, Glycine max
  unsure (1)..(459): unsure at all n locations
ntcatatgggatgtctccattagctgatggactacgaattttatctctaaccttggctcctaatgatcttggaagaccgactagaaatttttctttccaaaaaggttgttgactatcttctctagtataaaccctagttaggaaagtatccctgtacaacctanagtctgctaaggttctacacttaaggtttgataataattctacagacctatctttccacagagatgggtctccaatgaaatgttgggctattgtaaaaattaatgtattaacagcgtcaggaatctctttatctttatcattagtaatgacttttccattgagatctatcttaactgtgccgtacaatttttggttttcttcattcgtgatataattatcccaccaaccttttaattgtccggaaaatcctgccactaaaatatctataatgggttcttccaacactcatgggat

SEQ ID NO: 210309 - DNA, 466 bp, Glycine max
agcttattggattatggcgcacccgtcatatgtggtactaggtggcgatcgggcgatgatgcaaatcaactatcccatttccacaagtcaggcataagcacaccatccccagttgcccacctttaaattgagctcacgcactcctacgtagcccttattctcgttcctctcaggaccaggtccccatcaacccctccaagcttttacaatatccaaacaattcaatttcctttgtcatgaaaccaccctaaaccaagaaaaatagagtggaggcagaaaactctacacaaaactcattcaaattccacagtttttcctactcacatacctcagtaacagtctctttgtttcgaatcgtcaaccattggatcgccttgaaaaattaactgagagttcctaatatagaaatctaagttctgaccggtgggatctgctagaaaatatatagaacaccagatgtactacc

SEQ ID NO: 210310 - DNA, 459 bp, Glycine max
  unsure (1)..(459): unsure at all n locations
taaggaatggaatntctcatattntggaaatgtccatgatgcacataagggaattgttgatgagttgaacaagttagataagaaggagggaagtttaccattgaatgaaaaggacttttggttaaggcttaagttgcaagaggacttttagaatgtggctaggaggaagtgttagtcatcatttatgacttacttttgtattgaaaagttntataaaatttatgtcttttccccaatttatggttctttttgtaggtttgtacatatttttatgtttagtttaatttcttctctgtagatattccctatattgtgaattaatatggttcaacttcaatttcaggtgaaaagatgaagaataagaaggttgaagtagttggtgtctcactaagtgagacatatgcacttagcgagtaacatccgctaagcgagacactcagctcgcttagcgggttggaa

SEQ ID NO: 210311 - DNA, 371 bp, Glycine max
  unsure (1)..(371): unsure at all n locations
agcttcaagaatcaagtttgaaagaatcattattctataacaatcaaggttcaagattcaatcgagtgtcaagaatcacgatccaagaacaatcaagatcgagattcaagactcaagattcaagaatcaagagaagactccatcaagataagtactaaaaaagtttttcaaaacattgagtagcacaagaatttttcacaaaatcttttaccaaagagttttacactctgataatcgattaccagtagccaacattgtttctcaaactgatttacaaagctgtaatcgattaccatgagcatgtaatcgattaccaatgtnttaaaatgttagatttcaaatttcaagagtcacaacttgtgataaaacat

SEQ ID NO: 210312 - DNA, 443 bp, Glycine max
tgcagtagtctatacacattctgatgcaatcctacccttcttggcattggatagaagactccaagaagattgcgccagagaaggccctagggttctcatgagccttagggtagattttgggcccatgggctatgtatgagcccacttatctttgtacatattagattaaggttttattatttatgggccttttatttagtgctccataatgtaggtagggtaccctagaaatgtaggatttttcagcccttgtattttaggacatctagactagtttttgtatgagtgttagttttgtaatttcacatgcattacatgaatatttgatgtgtgtgctgggaaataaatttaattgaattgggagaaacccaatctaattaaattttagagggggaggtgagcattttcttgctacaccccattgccacatcatatagtcacac

SEQ ID NO: 210313 - DNA, 342 bp, Glycine max
tgccgcaagcaagcttctatttcaagacacgcgtttcttatattacgggacttaaccggacatccgagttaatagttatcgtggattgcaatagctacgaagttctgatttatattccgagcatctagatatactacatgacacacattaacatccgagtgaaaagttatagtcgtttgaactatctcaaagcttctgatttcaatttcacgcgtgctgatatactaccggagacaatcggatattggagctaaaagctattgtggattacattttctacgagctactgttcccaattacgagcatatcgatatcataccggtataattagaaattcaacta

SEQ ID NO: 210314 - DNA, 381 bp, Glycine max
  unsure (1)..(381): unsure at all n locations
ctcggatgtgcgagngagtcctgttatatatccttattctccacaatcgaagaagnagctcctagcaaattcaaaccataataactctttactcggatgtccgattgtgtcccgtagtatatcgagatgctcgaaattgaaaacataaagtgtgagctcatataaacgacagtatcttttttctcagatggccgagtgagtcccgtaatatatcgagatgctccaaattgaaaatagaagctcctagcaaattcaaaacataataactatctactcggatgtccgattgagtcccgtacgatatctagacgcctcaaattgaaaatataagctttgagcaaattcaaacgacattaaactttttctcggatgtacgatatt

SEQ ID NO: 210315 - DNA, 450 bp, Glycine max
  unsure (1)..(450): unsure at all n locations
agctntgacagccacgactattatctaccttcatttgatcaactgtaggagacgatgatggaggatggggacgacacggaacataaggctgattggtatcatttttattcacacaattctgctcaatcttcttcttttgtgatgggtttcttgagagacttcaaaaaacgaaccaactatttgtgtctttgatcggcacatatagcaatgatcaaagctggaaataccaaaggtttgtcagctgaatcctcttccccgaaatgtatggacgaggcaaggctatgaattttgcccaaaattactttccctatgttaataggcatattagtccagatgctatagatgagacaagcacgttgtctgttgtcgttggaagtgtgcaatggtggactacccttgagaatgcaaagactcgaatctgataatggcccaatgctccttcttgattcg

SEQ ID NO: 210316 - DNA, 447 bp, Glycine max
tgttgaggaataagagatagtgtagttgaataatgaagttgactaaccaagtgggctagtatacaactaatcatagaaaacaaaagaagcattaacatcactatgaatgatgttttactgcttgaaattatatttttctgaacatgtttaataaagaaagcgtgtatgttatttttgtgatgtgcatcactttagagcatatgaaatactgcaaattttcctcatctttcatgctaaggaaaaatcgatcaaaaggagataatttttttgcttttattttattcgaagttgatgtaagaccgaatgctagaacatgtcaaaattatttattttagaataagtgttgattttcttgtgcctataaagtgttcgaaagaatgcataaacaaaactaaaaagcatctgtcatacactaatttcgtccggggacctttgcttgatgacatg

SEQ ID NO: 210317 - DNA, 455 bp, Glycine max
  unsure (1)..(455): unsure at all n locations
agctttcttgcacccaccccttttgcatgatgtctcacacttgcttctgaatctccttagtctcttgtggattgcttttgtaagctatcctattaggcaatgaagctcctggaagaaggtcaatttgatgttctatgcctcttgaaggtggcagtccatgaggaatctcctttggaaaaacatctttaaattcttgcaataggagctcaacactaggagaaatagaaatagttatctcattagaattatcagcaaaaaattaattgtctttgcagtgtcatagatagagtggctcacgagcaagtagtactttcctcactttactcacctttgttaagcaattaaattttctcttatgtgtatcactcttctttttcctattcctctcttggggcttactcttctctttctcttgntctctcttttctctcattccgagttggncatcacacact

SEQ ID NO: 210318 - DNA, 480 bp, Glycine max
  unsure (1)..(480): unsure at all n locations
gcttaaattaaatngaaatttctaaaggctggtacaaaacatttaaaacttctggtaatcgattacaagccttgtgtaatcgattacaggcttaaaatttaaattcaaattttttaagagcatttcagaaattattttggccactggtaattgattacagcctctggtaatcgattaccagagagtaagtttcatatttatgaaatctcaatacttttggaaaatatcctttggccaaacctgtgcatcatcaattaagaaacttttccttagattctaggaactaagttcatcaattatcttgaatttttggattcttgacttggatcaaacgtgcgaagcgcttatctttggcatcatcaaaacttcataaaacttcatatcatatntgcttctacagatcgaacttcaatccanagaagaaaggagaagattcctncttagttccaaaatgctatgaatgcgattaacctggacact

SEQ ID NO: 210319 - DNA, 435 bp, Glycine max
  unsure (1)..(435): unsure at all n locations
agcttgtgaaggagtcacctcaatgggggtgtcttccaattgctgagtgataagtgtcggccattgaggaggtatcttgacaataaaggactgaatctggtgagtccaagttggaggaggcaaatggactatatcatctaatggtgagtgtcataccctaatttcgtccggagactattgcttgatggcatgcaacctttaattgaccgcttcatagtacttggcaccctttgttgcacaatatgtgaagtcccgagacatgccggaaatcaaaaggaagcgttgttatgcaatccgtgaaattccgtaacgtgacggaaatcaaaaggaagtattgttacgcaatccgtgagttttcgtaacttttttgagnagctaaaaagagtaattacatgatccgtaaagttccgtaaccttacggaaagaaaataagta

SEQ ID NO: 210320 - DNA, 395 bp, Glycine max
  unsure (1)..(395): unsure at all n locations
tgaaactcgctattagcanagttaagattactcaatttgttcatgtttccttcgtccaataaaactgacagtgttacaacacttgtttattttgtctcagattattctcttatgatttgacactcttaacatgaacatattcaagctttatacagacttcagagctttgatccattgaaagatcccagctagctgttgtctaatattcttggcacttgacacgaggccactattatgcaaagagagagagagagagtgggggactagaaacactttctacaacatatctttagaagaagtacaattgttagtgttgcctagtgctcanagttgactnttcgcgtacaaatcanaagaaacattaacaacataagaataaaggaattaagaagatc

SEQ ID NO: 210321 - DNA, 405 bp, Glycine max
agcttttgtttcaattttgagcgtcacgttatgttacttgactcaatcggacttctgagtgaaaagttattgtcgttcgaatttgctacgagcttttgatttacatttcgagtgtctcaatatattacaggactcaatcggacttccgagtgaaaagttattgtcgttagaatttgctacgaagtatcgatttaaatttcgagcgtttagatatgttacgggactcaatcggacttccgagagaaaagatattgtccgtcgcatctcttacgagctcctgtttttaatttcgagcgcttcgatatgctacgggactcaatcagacttctcagtgaacagttatttgacgttcgaatttgttaccagcttctcgtttaaagttccgacgtctcgatttattacacg

SEQ ID NO: 210322 - DNA, 439 bp, Glycine max
cgacaataacgttgtactcggatgttcgattgagtctcgtaatatatcgaggcgctggagacttaaaaccgaagctcgtagcaaattcgaaggacaataacttttcactgggaagttcgattgagtcccgtaatatatcgagacgctcgaaatttaaaaccgaagctcgcagcaaattctaacgacaataacttttcactcgggagtccgattgagtcccgtcaaacgctcgaaattgaaaaccgaaggtcgtagcatattcgaacgacaataacttttcactttgaagttcgattgagtccctgaacatatcgagacgctcaaaatctgaaacaaaagctctgagactattctaacgacaataactatttactcgaaagtccgattgagtcccggaatatattcgacacgatcgaaatttataaccgaagctcgttca

SEQ ID NO: 210323 - DNA, 469 bp, Glycine max
  unsure (1)..(469): unsure at all n locations
agcttgcctaattaacctaaaattgagagttaattattattaaacacacaaaatgaaaatactaagtatttattacctatacttaactgaaaaatacttataaaattacaaaataaccataaattgggagagtttgatacaatttatacaagttttatacacaaaagttagtcattttcaccgactaacaactccctcaaatatacagttttgcttgtcctcaagcaaaaagagaacagctcacttgtcttcaagtgacaatgacatgcagtgattatgtacaaaggtgtatgctataaagtgactgattgcatgataagagaatggagtaaaatgccctcatcacttgtctttcacaaggtatgcagttatccaaagagaagaataaaatgtaacctgaacagatagatgaagttaggcataagacagatatcaaggaaagtagcttanaccacagtctcacgactac

SEQ ID NO: 210324 - DNA, 478 bp, Glycine max
  unsure (1)..(478): unsure at all n locations
ctctataacactcagctntagggagggaaaaatattaataaaaatacgcanacacatcatgtaattttctcatnaatgatattaataaccattagttaacatcattntttttatcatgttaacaaattcattttatttataaatatgtcataattcttttattaacattagttctcgaagaaatcgatgtaaattctacatgttaaaaatatattctttcttacggtgaaactaggttctaaataaccaaaatatcctattgttaattagtcataataacaatacctaaatcagggtttttttttccgtaaatacactctctctcctgtttttttttcctatgtacaccactttgcaatttaattctcaatctatactactttgcattttgtgctttgattcacaccactttacaaatgaacgtgggcaaagagatccgacagctgcnaactcaagtgaacgtgaatacattctctct

SEQ ID NO: 210325 - DNA, 406 bp, Glycine max
  unsure (1)..(406): unsure at all n locations
agctnnangatcaaacatgaagactgccttttcctctaatttatactgcattcttcttcctctacagataaagctcatacatttttggcgcacaaattatgtggcttctccataggtgatgatcatggaaggctaaatacttatgtaatccatggatccactccaagcacgactaaatttgagttctggtttagcattcctaattatgtgtgattgatcattattttcttcaatactatatttgattctcatgatcatgaatatgcttaagattgaaagctaactaaacggtctggatgatattctaacctaatcagtgatcccaatgaatatacggattaattcaattaactaactctatgacatttattgaactttacaacttgacatacttatagaactgtat

SEQ ID NO: 210326 - DNA, 461 bp, Glycine max
  unsure (1)..(461): unsure at all n locations
tctancctatcaattggcgcatgttgatgctctagactcttatactcgctntttcctgaagatgatggcaggactaactgatgcctatgtcgattntgtaacatacattcaacaacatgatcccttgccaccatttgaaactgccaagtctagattgcaactcaaagagtcaacaattcttctacgggctactcgtgaatctggctcatcttcctctacaacttcccttgttgcaaattcccaaaattttgatgatgatatgaatcgccaaaattcctctcaaggtattcataataataataataatcataggaataggggcaacaaaaataacaaaaatttgggtggccagaactccggcagaggaggtcgtggctctagcgacgatggcttcagtggtgggcaaggtgctggcagtggcaatcgcggacaacaacagcaatgaccaactcctttgcaat

SEQ ID NO: 210327 - DNA, 423 bp, Glycine max
  unsure (1)..(423): unsure at all n locations
agcctgttgccttctcattgaatcttgtctaccatacaactgctgtgcaattgggtataagagcagcctttgatcacccattcgattattggagagagattacgattcactagagattttctacatgcgcaaagtcagttaatcgaaaccattagatgaaaatcggataattcatcttttaacttggtaaactaaatagaaaatgtttgtcgcggatagcccgcaccgtgtatattttcaagatttataaatatattcttgacaatgagaatgtgatattccatatttatcacgaacttcccaaatttattntcgagaaaatacactaccttatgttagttattttctattctcattctgagatatgagaaatacattctcattgacacatcaaaggttatttaactttattatacctctatt

SEQ ID NO: 210328 - DNA, 425 bp, Glycine max
  unsure (1)..(425): unsure at all n locations
ccgctttcctttgatagcttcctagggatttcaagctaatttatttgatnagggaatacagccttcatgtcaatatctttgtgatatgtgtggtcgccctaaataatgactggnttaatagtaataaattaaatagcagaaaccatgcgaaatgtttgtttcttttttttgcgaactgttatttatttcacgataattaattttagaaggataattatcactatagagtcctgagtggccatttcacaactctattcggattcatttctttctgatcacttatataacctccaaactattttttttctttctcagaaagaaataccagccattatgttgggtctgtacgtgagatatataatgtgcggcagaaaactctttccaataagtcgttacattctttctcaatacatataaaaataatt

SEQ ID NO: 210329 - DNA, 437 bp, Glycine max
  unsure (1)..(437): unsure at all n locations
tgtaactcttggcaatgtctttaacactaggcacgctaattgttattactttngaaagaatcttcagaaacaagctacttgaagaattgtgacttttggaaatgtatttttcaaaatcaggcactggtaatcgattaccattaaggtgtaatcgattacacatcaacagatgtgacttcattttgaattttgaatatcttaacattttaaaacactggtaatcgattacatgattatggtaactgattacagctttgtaaatcagtttgaaaaaaatgctggctactggtaatcgattactaccttctggcaatcgattaccacagaggataacactttggtaaaaaatttggggaaaactccatgctctcttcaatgttttgaaaaagtttagtactcatcttgattgagcattctcttgattctcgaatcttgag

SEQ ID NO: 210330 - DNA, 463 bp, Glycine max
  unsure (1)..(463): unsure at all n locations
agctagagaacatctgccttgctttctcttggaagtttttgctctctttagctctttgaactgagttgtcctggttggctgaggtgggtggcaggagtaattgcagtaaatggtggttgataaggtgaagacgaagagatgtaaaagattacacacaaaaaacacgcaagtaatcgattaaaatgacattgcaatcaattaaaatggccctcagtttcactcaaaaccaaaagctgatataactaatcatttaaaacacaaatgtaatcaattaaatatgccaaaacaaactccccctaaggcctttgtaatcaattaaaatgtaaggtaatcgattaaaatagaacacanagccaaaagaagccataacccataacatgtaatcgattaagatgaagcagtaatagactataccaaaacataattccaagacaaagctgtaagcccaacatataatcgatta

SEQ ID NO: 210331 - DNA, 387 bp, Glycine max
tcccttcaacgtttattcgaggaaaacgtcagagaaatctgaaaggtgtggtctacgaaccttaagtgtgaaaggttcgggagttgtttttacacacggggaaggtattatcaccccatgcgtccatcacaaaggacggcaaccttcaatcaagtgtgcaaatatgacttcaaaattatgtattttcccttttatatgtttttatgtcttttatacctttttgtattttttatctttttgtggtcgacaagagtgtttccctcgctcctacgtatcctcaattgtgatgaggaaatcagacttatgtagttcttttagaactaaacattggttaagttgttatgatctttttccgcaagatcgatcttagccacacaaaagttgttt

SEQ ID NO: 210332 - DNA, 452 bp, Glycine max
  unsure (1)..(452): unsure at all n locations
agcttgactntggnttagacatgattgattcatgttttgagacttgtaggatttgatttgggcaagattggatgagaggaagtgtggttttcgaaatctgcactttatgcagaattttgctgtgaaattgtgcagtagaattttgcataagtgcagaagaatgctatgtatttgctggttgtggaaagagtaatgcagaatgagttctggatgtttactagtagatcccaacggtccaaatgtagacttatgtactagagacttccagtaaaattttcgagtcgatccaacggttaacgaactggaacgaaggaattgttactgaggtctttaagtgagaaaagctgtgattntggttggtggttttngcagagatttctgcctttgcctattttcttggctgtgatagtttgggctattgagtgttgattacttggatgttgggaagcttg

SEQ ID NO: 210333 - DNA, 166 bp, Glycine max
tcaacttctctccctttttttctttcttcatttttggctcccccctctcttttctatcccctttcttttcttcattgagcatctttctaagcttctatccaagctatcttgggggaaatctctttttctggctattccagtggtggcgctcctctactctttcctt

SEQ ID NO: 210334 - DNA, 463 bp, Glycine max
agcttgttggagaacccattcgcaccaactgttgtccttggcttattggatattttggccactacggctacaactccaacatgacagcgaagctccaaggaatctaccatgccttattatttttgtattttatattaatggtttcttttttcaacgcaataacctttttcatgaccatcacccttcaccttcatttaccgtcgtcgaagacgatctccatctatcatagccggagatgatttccgacgacgtcgtttttttcctacttttcttttttttatctcctcttcttttcttccgctctccttctccgaccactgcgcgcaaatttgaatgagatctaaaatgggaagcaagcctcaaacaatgatccatagtagcgaagattcaaaccaaaaactaatcgtaccaaaaatactttcttccacgaaaaaccccagatctgaaacctttcatcgacaag

SEQ ID NO: 210335 - DNA, 452 bp, Glycine max
  unsure (1)..(452): unsure at all n locations
ntagcaatatcccttntcagagttggcatctctatttatgtgataatgaatggtctctgatgttgtatatctccatttgttgaagtgatacactgctcgttgaaaatttgctgctactttttgcctttttgtttaatttgtgtgctagaatctgaatctattgtgctcatgaacaatacaatcatattaagatatatcattacccttaaactagataaatagaaattagtgtcaaaatttatggaattgaagttgattctacacagcctggtttggttattgacttatttatatcactgaacgatctgctttggttgtaggagagcagtttatatgttggagaatataatattcatctttatatagtcagntaaccggctagtgcattttcgtttacatgcgtangttattggtgatngttgtatatcaagtgattatcattgaatacaata

SEQ ID NO: 210336 - DNA, 106 bp, Glycine max
agcttagccctagaggagatggaccttattttgttttgttgtacgatcctcacactgtctattgggtggaattctcaaaagattctggagacagcaccactcttaa

SEQ ID NO: 210337 - DNA, 293 bp, Glycine max
  unsure (1)..(293): unsure at all n locations
agctgccggtaagaacattactagctatgtttatcttcaaattttattcagacatttgatctacatgcacgcttcactgttaaaaaagagagagaattttgaatgtgtggtatagatctcagtccataaggtaatggggagtccattcagttgttttttatttatggagattcagcatattaatatacgctatanaaaattcttgtgttgctcaacaatttattatgcttattttcctcctttttccatgtctgccggagagctaaatgaccaccatgcctacccaaatgggc

SEQ ID NO: 210338 - DNA, 149 bp, Glycine max
  unsure (1)..(149): unsure at all n locations
cgctggcttaccncatgcggaagatgccttctttttacctgtgtctaccacccctaattgttctacctctgaaatcgtttatagtactacacccactcactcgtcttgatctttgcccatgcataatgttattgtttttaacattaatg

SEQ ID NO: 210339 - DNA, 335 bp, Glycine max
  unsure (1)..(335): unsure at all n locations
atactcaagctnggactcatgagtggtaagttgaggtctaagnggacaggttcttttgacgctatctaatgttttccttacggcacagctgagatcaaaagcgactccacacacaaaagcttcgaggtcaatggacaccgacttaagccattcctcacaaacccttctttagtggacatagtggtggaagagacttccttaccccaccctactttttctctattatgacttaggcgagcttagctcactatctccttctttacttttatcacattagtgcaatgctatctcacggctaattgctcttattcctttaatcgcgcccattgaagaca

SEQ ID NO: 210340 - DNA, 458 bp, Glycine max
  unsure (1)..(458): unsure at all n locations
agcttgtagagagttcatagctctggtttaatctattaccatatattcataatcaattacatagttctttattagaccatgtctattttcttggatctctggtataatcgattacgaggatatagtaattgattacattgttattgaaagtgttcccaaaagtgatcaataacactntaatcaattaaattaagattctaatcgattatattgttcttgaatgttttccagattcggggaagaacacattaatcaattagatgggaaatataattgattactttctgagataattgattgagcatttgtagtttaatatttttctattcttctaagctcaattgacatctctttgacccttattttctcaccttaactcagttttggtttaaggcanatgaatgagcttaatttagaattggtggctaaattcagaatttgtgcttacttgacctatc

SEQ ID NO: 210341 - DNA, 469 bp, Glycine max
  unsure (1)..(469): unsure at all n locations
tgcttgtggagcttctatgaaggctggatctttgagcttcaatgaggtccttcaatggtgattnttcaccatggagatgcagcggaaggcaaaggagaagaggagaggggaggcaccatccactatggaataagccaaggaagaaggagcttcaccaccaagaattgccttggataagaagcttgaagaggatgctttaatggaggaaaagaaagagagaaggggggagcacgaaattgaaggaataaaagagggaaagaagtggaactttaaagtgtatctcataagactttcattcatcaaagttacaacaagtgttacacatgcttctatttatagactaggtagcttccttgagaagctntcttgagaaaacttccttgaaaagcttctttgagaagacttccttgagaagctagagcttagctacacacacccctctcatactaagctcacctccttgagaagc

SEQ ID NO: 210342 - DNA, 451 bp, Glycine max
  unsure (1)..(451): unsure at all n locations
agcttcaaggcagtcttcaattgttccctgtgtttatttcttaacataaaggagatgaacaacaaatatgatcgacccataaagattgaagttaaattacaactggttgttagtccacctccacaaattatacaaaaattgatttgatttacatcatacattccaaaattcgctgaacaaggcaacgcacaaaaaaatggagatcagggcttgaacttttgagtgagcttctcaactccttctctacaatcacctgcaactcgctttgcctcttctttgatagtaaatccaaattcaagagcactttgctgcacctcatgagctgacttgcctgcctttgagatggcagattgtttcaattcttcagcttgttttccagttttgcatgcccattctctcaatcttgatacanattgngaaattatgtggataatcttgtcaatcatatctc

SEQ ID NO: 210343 - DNA, 420 bp, Glycine max
  unsure (1)..(420): unsure at all n locations
gtagaatctattcctagctagagcatgttgcttagtaccatactattccaaaactaacagtgtatgtaggatatattctaagtaagtttttaatttgactaagaataatccggcattctgaaatatctttgacctcattgttgatccgatctgccaccaatttacaatccaattcaatgaaaactgaataaaaattaagctgaataagccaaagtaaagcctcgagaactgcataagctttaccttccataactgatatatgctgaatcaaaaccagttgctgcagctataaaaagccccaagctatctctattacactntagcacaccaattggaggtttattccaactaacgacttggtgctgatctgaaaactgtcgtatttctttaacagcaacttgttgagaagctgttcaatct

SEQ ID NO: 210344 - DNA, 454 bp, Glycine max
  unsure (1)..(454): unsure at all n locations
agcttaggctaaattagtataaactttctttagctatttaagctaagtttagtccaataagagggatttgaggatgaagcttantttaagttagtctaaacctaggagggctgtctaaattgagcctagtccaacaagaaggatatgaggataaagcttggattgattcactctaactagggatcgagggttagtaatttaggctacaacatagaacacaaaagcatgattgattagagaggcatccttatacacatcagctggtctgttagaaagacccaacacttctacctactgctgtcaattttacttacttgcatttttactgtttttagcctagacttagtttaatcctgttctanatcaccgattattaatggttctttcaacaatgccttatatttgaatttaaccctgtcttagactagttccctgagttcgatactcggattca

SEQ ID NO: 210345 - DNA, 440 bp, Glycine max
  unsure (1)..(440): unsure at all n locations
aagcgcgagtctgggggacgaattgtaagtggttttgatatacgaagatgatgttccgagtacattggatttggtacgaccatgccctcctgatttccagctgggaaattggcgagtggaggaacgccccggcatttacgcaacgagcataatgtaaacctttacggttttaaaagctctatagttgggcctaggctttagagtntttcttttgttaaggctctgtgtcttttgtttttttgaatttataatacaaggatctttcttcatctgttcctacgtctctacccattctcatccatttgcatgtttactcctttactttntaaaatggcagatccgatgacgagtgcctcgaaggtactaatacctgngacccgcctatcaacttcgagcanaagacgaatcanacggaagatgaanggaacgaggatgtggga

SEQ ID NO: 210346 - DNA, 463 bp, Glycine max
  unsure (1)..(463): unsure at all n locations
agcttganacctgtgagtgacaactatcttgtatccatcccaagagtggnttggattccaagattcccaccattggaaccaacccagagctttcccgttcatcgcaaccattacaaccttcagcttgtccccttcccttacggcgtgcaaccggaaatatctttcgatctttgtcaancagcccatatgatcctcaccatcgaatatgggcatttccaaattcctccaccgattgccgtcatgcgctgcagtgccctcatttcctccgctcatgtcagctatgtgaacgtttgtagtaggagattntttctcccatgttgctgccgacctttgtatcatccctttgatcaaactcaaccgtgattctcttctattgctatctccatggcttacatgcacgtcttcttattcgcgttcgccttcgtcaccattaactatattgctgctcagaacggatctctga

SEQ ID NO: 210347 - DNA, 456 bp, Glycine max
  unsure (1)..(456): unsure at all n locations
aatactcacgctntgcttgccactaacctaatggaggatatnggtcctacacttgcaaaagcacatgatttcatcaagaagactcaggtttgcttaatttttattacaagcatataaaanaatcataattctccttctagttaaggagtgtaaattccccaatgaacctagtttatttaagttatacaattcactaattggaaatattcaaaatatacttgggtcttatttatagagtgatttaacctattaagtaatcaatttactaactaatttaccagctaactaataatattaattaaaactagcataactatattattcgaattaaaatgcatatttaaattggacgacgaatttagtgttcattagattattgattaatatgtaatttgctagctntacatagcagtaatgaactaacactcttatttcacangtgaaggatgacccttt

SEQ ID NO: 210348 - DNA, 484 bp, Glycine max
  unsure (1)..(484): unsure at all n locations
cggatcttaaacacctgagcatgcagcttcatgttcttaagcagaagttattttatgcccccatacttgcgttgccaaactatcaaaaatcttttgaaatcgagtgtgatgcttcaaatgttgggattggggctgtgttgatgcaagaaggccatccaattgcttattttattgaaaagttaagtggtcctacccttaactatttaacttaagataacgagttgtatgccttactacgtgctttgaaaacatggcaacactacctttatcccaaggaatttgtcattcatagtgaccatgagtccctcaaatatatcaaggggcaaggcaagcttaacataaggtatgtgaagtgcgtggaattcctacacaattctcttatgttatcaaacataanaagggaagaggtaatattgtagctgatgctctttctcggcgtcatgcattactatctatgcttgaaacacaattgattggtcttgat

SEQ ID NO: 210349 - DNA, 464 bp, Glycine max
  unsure (1)..(464): unsure at all n locations
tcaccttctggtcctcctcatagttgttgcatgaganatcatgctctattttcatctcccactccacgtaggcctccggatcattctttcctttaaatggaggaatgttgagtttaataccatcaattcggttttgtctaggaacaccatcattccctcttctcctcctttcttcttcattatgatctctattctccatttgatccaacctctcatggagcgcatcatctcgttgtttcattaacctctccaaatgttgcatcaaagcttgcatttggaattgcgaaagccccactccatcattaggattagtacctgacatctcaaacaaacaaatcaaacgtaacaagacaattatagttgttgtttgaatacctcacccactcaagtgtatcacacaattatggcttttctctaatgaaacactcttgcctttaccactctaattcccttgagttcttagg

SEQ ID NO: 210350 - DNA, 442 bp, Glycine max
  unsure (1)..(442): unsure at all n locations
agctggccggctgtgcagaaganagtgcttgttctctgaaagttaatatctggttgccggaaggtgtcgttcccgaagctcttagaagaagccggtgactattatttcggctgtcggagatgcatgtgcgagccatgaatgctctcgccgacctcctcgccaccggtgctccgccgccagctccgatcgtgttgagctgaccgaagttgttaattcttactattaggcgtttcttcatatatagtctatattagtttttagagttcagttacatcttcgccacttattttatttgttctcttcattttttattatttcagttaaaaaagttataatagacaggaagatatgtnctatattgttatattacataataatataaatgatatggtgtataattagtctacacatataatcgcgctgatacatatgatatggagga

SEQ ID NO: 210351 - DNA, 456 bp, Glycine max
  unsure (1)..(456): unsure at all n locations
ntaatntactgatagctcacttatgttagagaattngtgcttttntatgtatctcaataaaaaaaaattatagttttagttacttaatatcttaggaacattgattaatatttatctttaattttataatacattgatgggtccgtcggccaaaatttgtccatgatgcaacatgttcaacctttggtaaaaaaattaaatatggaggaatagttatatgcatatattctttactaatattttattgtccatacaaactaagctaacaaagtaatcattaattaattagtatgatatatttgttcaattacttaaccttttgtaaatctggattgtaatgcagactatgctgacaaaaaagaatactataactggattgacatatcagaatgatccaacaatttttgcatgggaacttatgaatgaacctcgttccaaaatgactattctgggaaa

SEQ ID NO: 210352 - DNA, 416 bp, Glycine max
agcttaactatctcacataaccttgatattttagtggactcgatctcataggatgagatcaaatcatttgcatgcatgtcattttaatattgagtttctttcatatttgtttgagtttcatgagtaaaactaattcttctgaataatgtatgccataccattcgtcaattggaccaaagtggcttaatatgaaaataagagctgtcataataactgccttgtggaacaggttctctgaagcatcacttgcaataacgtctttgttttgaatttgatacatgagccaagcaccaattattgctaatacacgtccctgattaccagttgaagttggcacgagagttgaagaccaatcacaagggatcacaccgaaagaaaggtgttgcataaggtaatccacactctctaatcatttg

SEQ ID NO: 210353 - DNA, 430 bp, Glycine max
  unsure (1)..(430): unsure at all n locations
gggagcacacaatttatatgctcaagcttgagggggagtgttaaagttgttgtttaataatgttttatatttctagcttgttgtagaagctcatagaagctgtcctgtaatctgtctccataggctaggctgtagtcttcatcatgaactattttttgtactatctggtaattctctctctctctctctctcacacacacacatatatacatctctcagcaaactaaggctgaggatcctttttgtgtgcatattttcatactcaaacatttctagtgtaactacagcacanaactttattccattgtttggtgagaggggtccagttaaagggaaagaacccgtacttatatcttctgatcattctactaataattatatctgctgatcattctactaataatactgctaaagcccaattctagaaaca

SEQ ID NO: 210354 - DNA, 434 bp, Glycine max
agcttgttcaattctacttctttcttcttttgttcttctccatccgcagtatgcagcattgtcgtattggatgattttgtttcttctctcattggtgccgcagagccatagatagcaggaacaatagaagataagagaggggaatttgagaagtcatttgattttatattttgggtgatgttcaaaaacttgttaataagtaagacatgaaagttctttttggtctgccaaaagaagaatatattatacaagtattatataatcatatattactattactggttgaattctaaaaaccaacaaataatctatcatgatagaatatgattgaatgttagtttataatatttcatttttaatctcacacttgaaatatgttaaaaggtaacaacatatttgaaatgtgtgaccccatctacatacatatctatttt

SEQ ID NO: 210355 - DNA, 460 bp, Glycine max
  unsure (1)..(460): unsure at all n locations
tgaagacataattntaactttcaaatagactaactctttttactctggaggataatgttntgttttgatcttgaatgctggtcttttcccttccaagcacatcagtctaactgcctcctccgaggacttgggatggaagggatgtgtaccctctatcatctgggtccataaagataataaaataaaatttgttgaatttcaactaatatacaatagtatatgaagattagagagataaatttagaaaatctaaatgattttggaaaagctacagtttttttcttcatgaaaacagaagtgcatcagtaatcttagggaactacaacgttatataacagacgaagaaatgtcaagacaatgttgtcaaattcctcatccttcccnccagcccatgcccttctgagcatcaactcatgatcttagctctgtagattgagtgtttaccactanggctaaaact

SEQ ID NO: 210356 - DNA, 440 bp, Glycine max
  unsure (1)..(440): unsure at all n locations
agcttatccttatggcttgcctcctgacttcactccccgtgccactccggaagatttaagacaagccctacttttgaggggcaactcccgccttatgacgactatcccgggcaagacgatgaggaaggagatacccatctcggccccctgctccacctcaaagatccgttcccacatgaactaccccaaccgaacatagtccgccatatcccggcctcacccacacctgtaaaagaatctgttcccttcgtggaagataagggaaagattgaggcgcttgaagagaggttgagagcagtcgagggcctcggcaattacccattctcggatttagcagatttatgtctcgtgcccaacatcgtcgtccctcccaagttcatagtaccgggctttgataagtacaaagggacgacatgtccgaaggggcatcttcngatgta

SEQ ID NO: 210357 - DNA, 451 bp, Glycine max
  unsure (1)..(451): unsure at all n locations
actatgaaactaagcttaacaatacatccttctgaacgggtcgtatttctcacatgatntgagcctatgtagatatctttcaatatgatacattcaatgatattgcattttttggatcaagtggcctcaaaataattaagaagggggggttgaattaattattaacgtgtcttgactaattaaaaatttatccttcttaatgttactagattcaatcaggctttactactaagttatgagaaagtaaagaacagaaacaataacttatacaaaagtaaagcgaacacaacaaaaagataaagagtgtagggaagaagaagacaaacacaagatttatactggttcggccacaacccgtgcctacatccagtctccaagcaaccaccggttcttgagatttcaataatcttgtaaaatccattacaagcaaagacccacaagggatgtaccc

SEQ ID NO: 210358 - DNA, 441 bp, Glycine max
  unsure (1)..(441): unsure at all n locations
agctngcatcacttgagaagacaacgatatttattcatcttgagattcagaaaatgaagtcgtgaatctgagtctcatggccaaaaactatgatagcgaagaagaggtaacatcttctaacaataacctatctatatcctttgatgaactataagatgcatttcatgacttgcattagaatcagcaaactttccaaacaaactcgtttcagtttctaagaaaacaatttcaaatttagaaaaagaagttatgaaattaaatatagaactagaaaatcttaaaattgaagtcaaaacattaaaacagattgatacaaatcaatcttctaccggacaagatattggtggataagtgacctctataacttaagagggcggtgaattaagttctacataatatcccactatcaaacttttaacccccattcanatgattgactca

SEQ ID NO: 210359 - DNA, 391 bp, Glycine max
  unsure (1)..(391): unsure at all n locations
agatgaggaagngtagaagggtgaaacatcctgcttttattcgatgaccatatagtgtttcctggagatatgtcgcgggggtcaggagacctaggggacgtcatgtggggtgctattgcccaaaaccaagcttgaccaatccctacccaacccgggcatagtcagttagtgagaacctgtgatgtacctaaacaagcgagctccttgctgtcaacagataaaaggaacaaagaccacaaagcaaggaggcttgtgtggtggctggccacctgtgaatcttgtgtgatatatgggttatggcctctggtaatcgattaccaagggtgggtaatcgattacaacgcttataaatgaagacaagaggctcagatggtctttggtatctattacc

SEQ ID NO: 210360 - DNA, 502 bp, Glycine max
  unsure (1)..(502): unsure at all n locations
cgatcctcanagacacctgaggctgcagcttacgcttcccctttttggtgggttatgtagaggaacacgcaaggatgagcatacatgataacaaatggtatgcaattttgcagatcaaaaagtttgttgaacgcatatgcatgatgatgccatgactcatgcaaaatgtgaggctggaatatgataacggacaaatgcatgatatgtccattatgatgttatgaagagatgcttatgcgatgcatgatatgaatgcattttacggacacgagagcccacaatattatctcttcttacttgcgcatttgggggtgcagtggcccatgtgtacaattaagaaggtgatatggacctttcggcttcccgtgacaaaggacgagaccaacatacaatgcatgctatagataaaatgcgggagtgacttgattcgcactgatttttggagtaaaaacgttggataaactcattttattcaacatagtataactagtcaagatctgac

SEQ ID NO: 210361 - DNA, 430 bp, Glycine max
  unsure (1)..(430): unsure at all n locations
ggtggctatggaaaagctaactttaatatctacaattngtgtnctcataancncaaaccaattcaaacttcttcggggtcaaaaagtcaactctaagctggaggcatctccacctaatttacaacaacatttttttttacttgggcctaatttaggtgtattaattgtgggccttatggcccatgcaattttgagttagtctcattagttgtgagtgtcagtatataatagttagagtgggtttagttataacatttaattctcatcttttagattctcacttagagtacaaagcatggnttagtcttcaatggtgaattctatgacaggctaaatccctccatgaatatcaagttcaagtacggtaggttttgattctcgattctttctcacgacttctagtggctcttttttttctttcaattcttat

SEQ ID NO: 210362 - DNA, 314 bp, Glycine max
ttggtctgagcaccaccaccagcagaagacatgaatcacatggaaaaagaagctgacaagagcctgctcaccaatgaatcccttgtgagactcttacgattgagaagacggatgctatcatccacctccatcatgagcaccatagccaagttaacaattccttagaagacattacgactaggcttgagaacatacaaactaggctaaccattagtaaccttcccaacccggatgaggaagaagtgtagccatgctcttctgcttgattacgatgagtgataattctttagccatgccatgtactttctgtctat

SEQ ID NO: 210363 - DNA, 401 bp, Glycine max
  unsure (1)..(401): unsure at all n locations
tactcaagctctgcctttagcgcttgcacctcatcactttcttccgaatctgtaacctcattgtctctcacagnctgtagatntgggagccaatccaatccttgtgtccggactctcagccacttatgatagccaccgatgatcccattactgcttcccctaagctctctgtcctttcttcatgccgcatcccatgccttgcgaactccttggagtacctttgcattggggtcactgaaaccccgtgtaatgaaaggcgtgatgctttcgtctaatggcgctcctctcatggggtagccaagctgtcttatggcgaggacgggattataattaatacaaccccatgttcccatccagggaacacttggacatccttcgcatgaagatacaatcctgattct

SEQ ID NO: 210364 - DNA, 496 bp, Glycine max
  unsure (1)..(496): unsure at all n locations
gcgatcctcaaagtcacctgcggcatgcaagcttgtagaattcaccccaattccagtgttctatgctaacttgctcccatatctactcgataattcaatggtagccataaccccaaccaaggttcctcaacctccatttttacgaggatacgactcgaatgcaacatgtgcttaccatggaggagcttcggggcattccattgagcattgtatgaccctgaaacataaggtgcaaggtctaattgatgttggctggctgaaatttgaggagaatcgctcgtgaattctgacattggcaagcaacactatgcatgggcaatttgaaggttgttgttagatgtctctaataactcngtaggattttcaagtttataccattattgcaaaccacaattacaatgctaataatatggataagtttgacatccttgtctctcatcctctcacaattacatctttgcttacttgacttccattggaatgtgagtgtaagtca

SEQ ID NO: 210365 - DNA, 450 bp, Glycine max
  unsure (1)..(450): unsure at all n locations
cactcaagcttgtctcaacgtttatgcgagacatagaccnncntgttagttatcgttagcatgttcctagaagaattaaatctagcccccagccacgagcacaaagtgacagaagagtatgcccgagtgtacgcgaaaaaggaggctagaggaagggtgatcgggagtcaagaacatccccgattgctagccaaggccaaagaaatggcggacacctactccgcccncgaggagatccatggacttctcagctattgtcagcatatgatagacataatggcccatataattagaaaccgctaggaaatttgtattgtcactcagatcttgactagttataaactttctgaataaaatgagtttatcccacatttttactccaaatattagtgtgaatcanatcactcncgcattntatctctagcatgcatttnattttctttacctact

SEQ ID NO: 210366 - DNA, 460 bp, Glycine max
gtcttggaggaaaccttgctgtagaaagaacattatgttcatgctctataaaactaagacggggctgctgcagccaaaggtatggagatatgcatgtcttggttcatttattgctggactttggcaactcattaacaagtacactaaagtgtctcaagtaataaagtactcggaagtccgagtgttgaattcagatggacttttgttatacttagattgaagcaaacttcatttataagtaagagataagaaacttaaatggaaaatttaaagaaagtaagggataaagaatttaaattgaagatcaacagaggtatgagataagataaagatttaaaagacaagatcagagattataaatgcttgaaatacgctaaacaatattaatctatttctagcaatgagtttatttagatactcctttctagctctttagaagataaccatttcttaatgcata

SEQ ID NO: 210367 - DNA, 332 bp, Glycine max
acgccgacattgtttccaaattcttatacatcgtaatagatgactcatgacgatcggatctctcttgatacacggctacttataacaaatttcacactcataactatctaaatgagccctatcacgacttaaaaatggaaacgatcgaactacttcctggatattacacgaagattgcgccgccttgcgtgttcactttgattacaggattgtgcataaggaacacattccccttacgatgaactacaactgacataaattcttagctcattcagccgtgaagttcaacctactatcagcttggccttcccacaaatggaacattcataact

SEQ ID NO: 210368 - DNA, 426 bp, Glycine max
gcgatacttttttttgctaagcggaaaccctctctatggagaaatttgtctctgtatagtccaaacacaaaaaccctttgttgttgaaagtctaataagtggctgacaaatgttgtaaccagtggtgttgctagtctatagtgcctacatgtgaagactagtgtggtagctaccaagttgttgaaatcaattattggttggcctaacaatagctagttgtgtgattgagagttcatcttacaacttaattataatatatttttcaatcatactagtaggaaagatatttgccacaaaattttcacactaactatcatgcgaattaatcatattctactctcttatgtaaagttattagaagatcgcaagtgcaccaccaatatgaacattatttgattcttcccaaggatattatagaaaattata

SEQ ID NO: 210369 - DNA, 460 bp, Glycine max
  unsure (1)..(460): unsure at all n locations
taacgatccaaggataaccaataactcttatcctatntttagctctgatggtnaaggggggttttcccactgttcaagataaagagagtacctttcaatcacaatctcatcccaaaatgataaggaccaacttatgagcatgggccttgaagcaaagcatggatttggtggaccaatcacaagaacacgtgctaatcaaatggtgaatgaagtccaatctgaaatgaaaaacgtgaaacccaaacccaaattggtcaactacttgaggaataaaaaatagagctaacctgataaaaagatccaaaaataaatctgatttgtcatttgagtccaatatttttgtttgaattcttctttatcaaaataatgggctgcaagttaatttctttatttgtattataatttttagctaagaataatattagtggttgctgacttgcttacaaatatttaatatcca

SEQ ID NO: 210370 - DNA, 352 bp, Glycine max
gaaactaccttcagacttatggacaatttttaactctttttttctcatcggcttcacggtgggatcttaaccggtagtctaagctgaagttgaatcatctagcccctagggccatctgcatgatgactatcttatctcgcacttcatattttttctcatttaacagttaaccaatcgttgaccgatctactaataaattaaagaatccaccgacattgtgtgaatctcgtaattccttaaaaaaacaacgacgtcatgtgaacctattatcataatagaaatcaccaatttctttaagtctttaatgagtgaaaaaccagtgactaagctaatcactaaacaacttgcccaa

SEQ ID NO: 210371 - DNA, 336 bp, Glycine max
acaagtgcatctttatcgcgaacagcttgtctcattgtaaattgatggatgatatcttgtccgctatttggcctttcactattgcggtattcaccttttttttctccctcttatattctattgatagctaacccgactacatgcttatcggacctgtataatgctatggctcaacatatacatttgaatgttctagagacaacaaatgggatgtccaaacttctgattggggggtattttttgtgttgaaagttataactccctctgagtggggatatagatacttctgatcgcctaatgattcatgctttcgtttttatggttacgacctacatc

SEQ ID NO: 210372 - DNA, 433 bp, Glycine max
  unsure (1)..(433): unsure at all n locations
ctgcagcttggactcacaatcggctatccttttttgcccctnccgggaaatatggaaaccattctggaggacagaggaccagtggaggacttctactagttggtgggagttctcagccaattaacagggtgtctcaatctgcgggtagaagtagtggtggtagcggtgctcctgctattgttactacaccactcacgtgggggaaatgtggtcgacttgtgcatattgctcgtgagtgcacacatagagaggtgacttgctttaactaccaaggtaagggccacctcaggaccagttgcccatattcgaggagggagaagaggagtggaagtctgaataaccaaagtggacgaccaatgaccacagggagagtgtttgctcttattgggctgatgccgacagactgtgaactcatccatgtatgtgttcataa

SEQ ID NO: 210373 - DNA, 459 bp, Glycine max
  unsure (1)..(459): unsure at all n locations
ggcaataaaaggaaaccttgtgcatgcatgcaagtatcacatagtgtaagcatggtatgtctagaaggtatcatgataatatctagcatgcatgatatttggacagattctctccctctcccgacttgagacacacacacacacctcacatgtccattattagacaaaatatgtgttgctacacacatatcttagtgtttttggatcgaattcgattcaactattaaaataagttaacttttgggctagaacacaactnttgatttctaaacttattggctctttagtccaacccgtgaactcatttttttataattattattattattattatcatcataatagttagtgaagactacatatcactcttatattatatacgttcttttactcacatggtcgaagtaagagacgctatggagtttatgcatttgctnntcgttatccttttataattag

SEQ ID NO: 210374 - DNA, 300 bp, Glycine max
taatgtttctccacaaaccccccgacaacaagttggctaacatagcaccctgcgcggacaagagaaagctctccagccacgtgacaatgatatccactgtgaccaactccatcctacccacgggcttatacgggagagggaggaaaatgaagctgtctcctctgaagacggagacaatccaccaactgggtggaatatatatgaagattaatacgcctgaggccactgcatggaccataattacagattatatggccgaatatagactaaacacggccttagaggctgaatccaacaaac

SEQ ID NO: 210375 - DNA, 469 bp, Glycine max
  unsure (1)..(469): unsure at all n locations
gacactataaaactcacctttacggaagagccctaacttgctcgcctttngattttgcttncctcgccggaggagataaagggagatgacatgtttaacctaaacagtaaacaattactatataattcacaacaaaaactttctcactttataatagttactgtatatttgtttgagatgacagaaaaacaactaaaggcaagtttaagctatacatttcgaaaagatatatatgtctttcgattatgaaactcttaaagagtcacatagcggcattattaaagcttcaagttaagccgttctttcttgaaattggacccacaaaagttctcaatggacccccctagacaagtactagcaccacccatctttatatatacctctggaaagaagttaatggaaaggttcatcattaactactctgcatgggagggtgtagtcgctttttatctatcgatgcatggaaaat

SEQ ID NO: 210376 - DNA, 477 bp, Glycine max
  unsure (1)..(477): unsure at all n locations
acccggatccttnagtcacctgtgctgcaacttaaagatgactggtttgatcttttaattgctgaaacgtctcaagcacctagtaatcgattgcctaaggtggtaattgaatacaggctcacacagagagtacgactttttgtcttcactaaaataatcgatttcccaagttggttatcgattacaagtttacccacagaactttgatatttgcctcagctcataataattgactacatgatacaataatcatatgatgtgtaatattcaagaatacaaatcacatgtaccaacaaccaatcaaacaaatgtaaatgcatatgtacatgaatatactccctaattggcttaagtaagattaaactcacttagaatgccaagttcattgcgaaggtggaagaacctatccctcgctaaaggtttagtgatgatatcacccagttataagtctgtatcaacaaactatatcacaatcac

SEQ ID NO: 210377 - DNA, 442 bp, Glycine max
  unsure (1)..(442): unsure at all n locations
acatcagattntagtaatgacccactaacctagaattanttaacttaatgtcattaacctagggaattaaagaacttaatggctgagtgtaactgaaattgtggcaaccaaaagtcacccccaacagccatcaagtcagccactatttggtctcccaaaaggctgatgcctaggttgccaattgggcccttattacaacttgaactaaacctaactaaagcccttttagttgattaacccanaacatatttttggttagccaactttacaaggattgggccattatttagacaaactaaacactctaaaattgagacaaagtggtgtcatttagtcctcctccatttgggtcaggatacaactcacaaccttggacttttctccttgaaacttgngcttgtattcaaatagtatggaccagcacttttgaagagcttccttg

SEQ ID NO: 210378 - DNA, 448 bp, Glycine max
agcataaagcccttatgacatagatgtggtttcataattttacaacgccaaacatgtttaatgtgacatcctataatttctatccgaaatttaggaagtgttacattcaaataattatatatatatatatatatatatatatatatatatatatatatatatatatattcctggtagaactatgtatattggagacaagatacgcggattatacttattaacgaagagtaacccatacccggacggttataaattaatctgcaactcattaatctaaaaattatctgtttgcgtgcaacttaaaatttaacagaaccaacctctgaatcacgctcagagtcacatttagagcgcttagatatatatatcgcctactatcaaaatcgtgccccgacgggtgcatagaacgccaggaactgagtcagaaggtatccacaaccgagaatga

SEQ ID NO: 210379 - DNA, 436 bp, Glycine max
  unsure (1)..(436): unsure at all n locations
cgtgtcacccaccatcttctcatagtagaacacttgtaacgtgtccactatcattgngnncatctccttctccgtcattgggggtgctacttgagctaccaaatccctccacttttgggcatattctttgaacaactcatgctctttnttacacatgttctgtagatgcatcctatccggagccatatcagaattgtattgatactgcctaatgaaggtgaccattangtccttccaagaatggactcgagaaggttccagattagtgtaccaagtgacagttgccccagtaagactttcctagaagaaatgcatcataatttttcatctttcgcatatgcccccatcttctgatagtacatctttaggtggttcttaaggcaagtatccctcttgtacttatngaaatccngcatcttgaacttcgaagtaatga

SEQ ID NO: 210380 - DNA, 441 bp, Glycine max
agcttggactatacgatgtccttgcttatttaatataagaacacacctgcatagatgaaaaaatattaacgtcaatcaccatttaaaaaaattacaataagaaattatatactacaatgggaaactagagaagaatttattaattaatggcaacatttaaataaatcctagtcgttggcgtgacatcacagagattcaataatgcaaaaaaaaaaaagggtacagtattaaacgtagcgtgccccattgctctctcactgacagcatgttccccacttacgtgtagctacgacaaaccttacctcttctccctatgatttctcgaccttagtcttacacatactatatagtagtatcacatcactccctcactctcaccaaactctcttcattcattctttatggatcaagaaacaacaagaagaaacaccatgcaagaat

SEQ ID NO: 210381 - DNA, 349 bp, Glycine max
  unsure (1)..(349): unsure at all n locations
atgtttgacaaaatccctttttcatcactnggtatatctatccaaaactccccatcatttcttcccccacctggcaaatttgagccagctgcatcaatggcctctcccgtggacacgccctttcggtacaataaggctccattattgaaaaaccaatcaacagaagaaggcaagtaaacttcctcaggatgaaagaaaacagtaggaccataatgctctataagtgcatgtatttggtggaggcgtggcattgctggcagcacaggatttatgttcttcaagcacacaacagatagctcatctccattgttccaacaactagtgcagaaaaaagtcctactgaaactcc

SEQ ID NO: 210382 - DNA, 347 bp, Glycine max
  unsure (1)..(347): unsure at all n locations
aaataattntaaagtaaacacatcttctatttgtgtgcatgtgatattatctcagtggaagaaggggcccaaaccatttagcatgtgatatatgtgtctgttctgtaacacactccataaaatcatatgatcgatctttttaacatttacgtaaagctcacaaactgacctcaatatgatatttaattattacacattgtttatcttttgaattctctttatttttccattatagcagcatttatctcatctcacacattatctcactgtcatttttattcctctcttgtctctactaatttcacacccaccgtagatctgagaacaaacattattcttaaatattg

SEQ ID NO: 210383 - DNA, 366 bp, Glycine max
tcataattatcttttgacagcatggatattttatcccacctaccaaccatgtggaggaaatcactctaatcaactcattttttctattcttgaaaggaggaatgatattgctaaatatttacattgagatataagcatcctccatcagatatcccacattctgattgaattaatttgcactaatctgatcatctattacaggtcaactctaccttctggttatatatgttataacaccagcctcttaattttacatggcgcatactgctatatgatttctttctcacacacactattcatttaaacctgaatgcttatatatgaaaaaaaaatcatacttacatatcatactcttcactggaaacc

SEQ ID NO: 210384 - DNA, 357 bp, Glycine max
  unsure (1)..(357): unsure at all n locations
gtcgattatgggcttaaatgttggtgttgggctgttttcgggattgaatgcttgtgtcggacttgactgttggtgtcgggtcagttctaagcttgattattggtgccaggtcgattccaagccttggctgctagtgtcgggttggttccgattttgactactggtgccaacgtggttctaggcttggctgttggttctgggtcggtctcagggtttaaagatggaatgttgatgatagactgtttggncattgaaactgaaatgaacataagctgngctaagccaaactgggcttcagaaaaacactataacttgcgccggtacagactatgcttcaaggtgcctgttagtattgct

SEQ ID NO: 210385 - DNA, 407 bp, Glycine max
caatgatccgcaagaacctgtatgtgagcctttatttctttgtaagattttctattcaacctccttccctctttggaggcagcaacaatcaagtcatgagccctgtcgaagaattcctaataaggaccttgaccgtctatgagacaaccatgggaaatcccaatgacacattcaatgttgacccttgagatgacaccattgacaaaggccttaaaccaataaaagagtttgtcaagctacaacttggacctaagcctgagcaatacatttagctcagtatacacctcaccaaccatgaacacaagcatatagctgaagccctacaaaggaacacaaacttgttttgctaacaaccatctgacatgttcgggatccaccctaacatcatatgctacaaaattgctatt

SEQ ID NO: 210386 - DNA, 299 bp, Glycine max
catgtcatccgaatatcacagaatattgctggacacctaccttggttagtaaattaactaagattagattatttccgatttagtattaaacttacgagatcatacaccaaacgagtttttcctatcttaagacaatgatttatttgataattgaattagacaaattagtttaatcaagaactattttagtagaatattattatattctttgctagcacaaagtgtacgattaatataaacaaataatattattctatgaatgtgaaaggtatctctaaaatcagaataacatgagatta

SEQ ID NO: 210387 - DNA, 470 bp, Glycine max
  unsure (1)..(470): unsure at all n locations
agcttgacagaagtaccanacatttgcactatgcttctttcgtccatcaaagatgtactagtatgtgtggtgactatgacttccctttcaaatagattgctgtgctgctttcctgaatctgaatccacttgcagatccttctcaatttttccaccatcaaatgtacaataattgcgaacaccccttgaacaagatgaaaaatctgtctttagaacagaaaacaagtttgataagttaccctcaccacaaagttccatgatgtcttcttcctttttggcttctgaacagcatactttttcctctactgaaacacctttattatgatggttatcagcaatatgcagcaaatgattttcattttcaccagagataacatctaagatctaatccagagaaccagcctgatccactttatctttgctggctgtgatcaaatntttatcattattattgtcatgccgactatctat

SEQ ID NO: 210388 - DNA, 461 bp, Glycine max
  unsure (1)..(461): unsure at all n locations
tgtacaaagttagtactcagcagaactcatttaatcaatttcttgggtatcttaggggataacagatgggagtggaagcttcaatggaggagaaacctatttgaccacgaagttgatacggcagcagcctttatggcagatattgctgagtttcaaattcaacctgcaagcagggacgttctgctatgggggctngattctggtggaccctattccacaaaggcagcttatagcttcttgaaggatggtgacagccaggttactgaagatagtgacttcaaggcaatctggaatctcaaaattccacctagagcaagtgctttttcttggagaatattcaagaaccgaatccctaccaaggttaacttaaggcggagacatgtggagcttgcttcctataactgcccgctgtgcgatgaagaggangaaacagntggtcatatcatgtactcatgtataaa

SEQ ID NO: 210389 - DNA, 465 bp, Glycine max
agcttgttgtattgtagctagacaattatttattactatcatttatctcctatattcttcttccatcttattcttttcttgctcgctctcttttcgctcctttttttccatgagatattctgctacctaaacatacgtatatttttgagaggtatttagctatatacatgcgcgtccaaggtatcttgctacctaaacatacatatatatgttttgtgagatatttttgctatatacatgcatatccaaggcatcttgctacctaaacatacatatatatattttgtgaagtattttttctacatacatgcatatccaaggcatctttctacctaaacatacatatatattttgtgaggtatgactaccttccgagcttgcgctttgtttatttaaagtctatgatcatgagcaactatgtgtgctctgctttgacctgagaaacaaaggtgatcaaatatcccg

SEQ ID NO: 210390 - DNA, 406 bp, Glycine max
  unsure (1)..(406): unsure at all n locations
tgaaggcanactggatgcgttggtcattctggtaacccttctggccttgaatcagaaatctgtacctgtcgcaagggtttgtggtttgtgctcctctgctgaccaccatacagacctttgcccttccatgcagcaacctggagcaattgagcagcctgaagcttatgctgcaaatatntacaatagacctcctcaacctcagcagcaaaatcaaccacagcagaacaattatgacctttccagcaacagatacaaccctggatggaggaatcaccctaacctcagatggtccagccctcaacaacaacagcagcctgctccttccttccaaaatgctgctggcccaagcagaccatacattcctccaccaatccaacaacagcaacaaccccagaaacagccaaca

SEQ ID NO: 210391 - DNA, 339 bp, Glycine max
ttaggatcactacctgacatcacacacacacaaacttaacgcaacaagacaattacagctgctgttcgaataacccacccactcaagagtatcacacacatatggcttctctttaaagaaacactcttgcccttaaccactctaataacccttgagatcttaggcaacccaagagattatggccacaacaaagaacaactcaccaatatgtgtaaggtaaggctagacaacgaaaaggttaaccaagacaacagctaacaatgtctttatgcacaaatgacggaaataaaactcacaagttaggagatccagtaacaatccttcatgcaatcaatatat

SEQ ID NO: 210392 - DNA, 456 bp, Glycine max
  unsure (1)..(456): unsure at all n locations
tactcacgcttgcctcanagaggtccaggaatgacttgtggtcgaatgttctatttctcccggagtacgacagtcaccgctttaggagcgttgtacaccatcagcgcttcgaagccattaagggatggtcgattctccgggagcgacgcgtccagctcaaggacgacgagtatactgatttccaggaagatatagggcgccggcggtgggcaccactggttactcccatggccaagtttgatccagaaatagtccttgagttttatgccaatgcttggccaacagaggagggcgtgcgtgacatgagatcctgtgttangggtcagtggatcctcgtcgatgccgacgctatcagccaactcctgggatatccgatggtattggaagagggccaggaatgcgagtatggccagacgaggaaccggcctgatggttcgatgatgaggcatccccaac

SEQ ID NO: 210393 - DNA, 396 bp, Glycine max
  unsure (1)..(396): unsure at all n locations
tgcagcagcaagcncacaatacacaacagatttttttcttcattgcgcacttgaggagggaaggcaaatatttgatgagacaagaataacagagctcctttacggcgatgtgaatctatatatcgactggaaacaaacccgaaaataatatacatatgaaaaatgaagcaaccaaacaacatctaatattaatgcgaatcacttctcattatttgagaaaaacacacccattctatgttaacaaaaacactctcactatcatcccataaattgcaatctacatggaccatcacacttacaagtggactgaagatgcactcaccccacaagtcccaaagaaatgcaaatactctccaccacatcagaaggacacacaaacattttcacaagttaaaa

SEQ ID NO: 210394 - DNA, 440 bp, Glycine max
  unsure (1)..(440): unsure at all n locations
gaggcctccagctataaatataataataatatttttattcttttagaagcaccagnaatttcctagtctaaccggttatcaaaatggtctagatttttcatagaattaaaatgaagtatcaatgcttaaacagtacaagaggaaactataattatataagatattgataataacttctggttttcaaattttatatttctttgcatcatctttaagtccttacatttcagaattaaaaaagaaaatataagtcttgttgtctccaaagtccgtataatagaaacatacgtagaaaatcagatcgctctcaatatagtcaaatgcatacaaaataaatcctaagcggttaaacgatagcagcgtggcaataagtccatatctctgtaaattatcgagaattctttaagccggcaatatcattagcataatgataagaaaca

SEQ ID NO: 210395 - DNA, 440 bp, Glycine max
agctagtgatgcaatcctactccttaggtcttggatagaagactccaagaacattgggccaaagatacaaaagaaagccccagggttctatgagaccttacggtaaattttgggcccatgggctaagtatgagctcacttatctttatacatattagattaaagttttattatattctgtgccttgtatttagggctccatagtgtatggagagtatcctagtaatgtatgatactccagcccttgtattctaaggcacctaaactaatatttggattaggggtagttttgtaatttcacatgcgttaagtgccttatagatgtgtgtgatcgtgagagaaatttatcgaattgggagaaactcaattcattaaattttgaacattctaaagggaggtggcatttgttggtcacacattgcacatatattgtacacttgt

SEQ ID NO: 210396 - DNA, 411 bp, Glycine max
  unsure (1)..(411): unsure at all n locations
aggataggtgaataggangcttcgctgtctacctganagccaaagccttgacaatatgaacctcataacaagcaggaagaagacgtgaagcagcaaccaggacctcgccagagtggtctcaaaagataacattcaaaccaattccctcatcacaattggcttttatgaccccttgggtcgagcacttccagattgagctcttctccacacttaaatatggtttcttgctcaaatccattaggaaggattgggctctatctagagtaacatacaaaggatactcggnttggtggaaaacccattcaattcgctaaaatcatatgctgaatatgagtccttcatgatcttaggattttgagaggtgatcccaagataaccggagagtgcaactaactagtcaaagctagcaga

SEQ ID NO: 210397 - DNA, 393 bp, Glycine max
  unsure (1)..(393): unsure at all n locations
tatgactntttgtcacgtcagagtttcacttgaatacatatacgagagcagggccaaagtgaatcattaaaatattaataacaatcacataatatatcagattctcttactgtggtaacacaatgtatataagtgaaattaaaagaaagaatattgtgactggacactagtggngcatncaaatgaaataggtattttaatatcaagaagggcttgagatagtcaagcaaacatcacgtaattacaacaagggatattagcaaacaccagtgtcgtgtccaaaagaagtgcatcagtgagtgtgactcactatatctatcatacaaacatcactagttccatcacacaaacaatatagtattactgagcaacacactactcatcaaacctacg

SEQ ID NO: 210398 - DNA, 449 bp, Glycine max
agcttgccacccagcttgcccaggcgagctcatctcgcccaggcgagcaaggttgcttccgccaaaagcaacaaccttctggaggaatattctggagggcccaagtgggcctggttgctatttgcactcccattattactaaatacaccccctgccttttttggtgattcttttttcgtaaagttacggaaacttacgaatttcgtaacagtacttgttttctttccgtaatgttacggaaccttgcggattacataatcatcccttttttgacttacggaatgttacggaacctcactaattgtgcaacgatgcttccttttgatttccagtgtgtcacggaaccttacggattgtgtatcaatattctcttttgatttctggcatgtcacggaatttcacaaattgcctactgatgggtgccaagcaccttataaatgaccaaacac

SEQ ID NO: 210399 - DNA, 454 bp, Glycine max
  unsure (1)..(454): unsure at all n locations
tacccatcacatgtggtactaggtttgggtcgagcaatggtgcaagacaattctccacatccacaaatcacgtataaacccaccatcccctgttgcccacctccaattgagctcacgtactcccacgtagcccttatcctcgttcctctcaacgccgggtccccatcaatcctctcaagctcccacaacatccaagaaattcaacatcccatcatcacaaactaacaaaaccaagcaaaacagggcaaaggcagaaaactctgcccagaacacaaaccaaaaatcacagcttttcacatacaaatactccagtaacattntcttcgttccaattcgttaaccgttggatcgactcgaanattntactggaagtctctagtacataagtctacanttttgaccgtgggatctactagaanacgtncagaactcattatgtactactcttttcaca

SEQ ID NO: 210400 - DNA, 451 bp, Glycine max
agctttacaacgagaggtggaggagatatataatctataaaggtggagtaaattgaagtaaatttaagttcgaattcaagaagtcaaatttatctgatttacgaagacaaaaaggtgattttacaagccactgtaattatcaatatgaaaaaattgttcttgttggttttttaagacagtggatagcaaaaaatagtagaatatcttcatcttgatgaataacatgactgtccaacatcatgaaatgattttgtctttttaagttttcataatcattctctttcaaactccctaccctcgtgtgtaccatttgtctgtctgtattttacttttctcgtatcagaatgtataatacgaaagtcttcctattttattttaaaaataattaattactctctatctctatagtaatctttgatggacgaattataaatactcttcttccaacaca

SEQ ID NO: 210401 - DNA, 403 bp, Glycine max
  unsure (1)..(403): unsure at all n locations
acacacacttaaacttgtgggttaaaatctgaaaagaaattgattatttatcataaacctaaaacatatctaagcttttataataaaaatattcaaacataaattatatgactttaaaagtaattntaaccaaaattatcgatcatccaaacactcttctgggttaaaatctgtaaaggaattgattttgaacagacacggcccacacccaaacatacataaaagttattagttgtaactttcgggttttctacaaatctgatgtggttttctgtgttataaacgtgtgtcgaataagcaccaagtaaaatatatttaagggaaggagtataccanattacaaaacagtaaaaccagatttctttgtgctccttgtcacaatngcatgtccaaatatacacta

SEQ ID NO: 210402 - DNA, 440 bp, Glycine max
  unsure (1)..(440): unsure at all n locations
tgcaagcatgccagcttatcacatgtgagatagacaagacctctcttacctattgcatantataaatcacaactaactacgtcatattatagttggtaaaataattatacaccacatatatacttatcactaagactatattatcatgttttataaattgagcaacctacaagcttggaagattttctaacagcttacaagctaacctacttataccagaaagaaacattttaaaaagtgtgtgcatgacattcttgctaaataaactagggtaggccataccttaagtagaataagcattataccttaaatgaacaacctaacaacttaattatatctgaagccctagctcatacaagcatgattgcgtataaaggaaatgaatccaatgtaatgattccgatcctatgtgcgtgtacgtatcaatagatggatagaga

SEQ ID NO: 210403 - DNA, 366 bp, Glycine max
  unsure (1)..(366): unsure at all n locations
atacttgaagtgtcaattctttcgtttttcaaataaagttatagcttcatgaactctgtatgatcaaacatgaggaggtggtactgagggggcaaatgaacttttttgtggatctcccaacatgaatttaaccttcaacacatctctcaacaagtacagttcatccctcctaccatgacttattgctaatttcacaaacttagaacaatactattctccttcaaaccttgctttatagatccagcatatctagatgctattactattagtactcattgtgcaacanagagaattataacactccaccatcactgttctatgaaggacaagatngaaaggaaaccagctgatctgcacgttcacccc

SEQ ID NO: 210404 - DNA, 447 bp, Glycine max
  unsure (1)..(447): unsure at all n locations
agcttgccactgtagcagttaagtgaacttttgttgtgtccacagtcattggatgggtgcttggtagaggtacatgctaataactaataagatttcctgtgcagggtatcattgtttttgcatgactgatggctaccttggggctggagatattggttgaatctgcctcaagtgttattttgaaggtaattgagataatcttttgttgttgtttgtttattatatacctaaatttgggttgaagactagttattcaacatgtggattatctaccatgataagtgattttatcatttgagcagatgatattatcattcgaccttngcttttgcttgattccgctcctaaagttcagtagcagcatagtgactagcagcacaagcattgaagaggtgtgtttcctccttgtgtgcggattcatgaactataagttaatacatgaaactg

SEQ ID NO: 210405 - DNA, 434 bp, Glycine max
aagataactcagctaatcatattatcacaaactctttatatcaatcaaacaagacagacaaataaaattttgttagtcatcatataaacaagttaaatgaaagaaaaatttcaaccatcttaatttaaaagataatggttttgatgttacctttttcatgattcaagtgcttagatctttaaagatggaagtcagacttttgtttttcttgcttaaacttcttgagagatgttctcatcactttaatagtccttggatagaaggttgatctccttctccgaaccatcgaatgagtcattgtcatcccaagcaatatacgccttctaggatcttctttcttcatgggttttcttctcattcttttttggccataatctcattgtggagcagtgtgcctttatgtgaccggctcgattacacttatagcatttaag

SEQ ID NO: 210406 - DNA, 378 bp, Glycine max
agctcggctcgaggcacttactcggcgattatttattaacgatgaagaaccaatgaagaacgtcgaagaacggtcgtaatccttcgcgaaatcactcacggatacgttacggaagcgcctcggcttggattttcttcacggaaacaattatcctaagcagattctaaagagagagaagtgtcttaggggccgaccccttttctacttcacttctccccctatctatagaaaaatgggggagaagcttgtcacccagctcgtccaggcgagcagggttgcttcctccaaaagcaacagccttctggaggaatcttctggagggcccaagtgtgtctgtgtgttatttgcacccccattattactaagcacaccacctct

SEQ ID NO: 210407 - DNA, 361 bp, Glycine max
  unsure (1)..(361): unsure at all n locations
accctgtgttgagagaaacgatttatgggctacttgttagtaccngagctcagatggaggagggcaacatgggatggtgggtctatgcgcgcattgtggatgtggaaaacttgttgtgcaccatcgtccgaccggcacctagtaccacatgtgatgggtaccccataatcctacaagcttgagatgaggaagtgttgaagagtgaaacttcctgctcttattgtgaccacagagtggtacctggagatatgtctcgggggtcacgagaccttgtggacgtcaagtggggtgctattgcccaaaaccaagcttgaccaatcccgaccctacccgggcatattctgtcagtgagaacctgtga

SEQ ID NO: 210408 - DNA, 284 bp, Glycine max
ggccaggaaccttataagaatgagggactgcagccttgttcaggatatgaagacgcgcataacaaagcaataagatacccgaggaatgaaatgtaaaataaatggctataacccagagagatacacccttgaatcaggagcctataacgtcactacctccaataaaaatacacaatcatgaggctcgaacaaaaaaccttatcagaaccactgtagtagcgacaactcgacaagtacgggagggacacttttatgcatgagtccagtattggggccgaaccaga

SEQ ID NO: 210409 - DNA, 410 bp, Glycine max
cgctcttcatgcttgcgagcaacagtctcttttaattgacagcgctccaagctctacagcaattaataaaatattagacttacggctagaaaatcttcatcaaacacgaaaatggatttcaattggcgcattacttaccttccatattccttcatctgtatattgcccaattggatcaatgttgcttctgacagttccttcaaaaagcactggcttctgaggaatgataccaaaccgtgatctaagatcatgaagccccaagatggatacgtcaatatcatcaattattattttccctcccgaatgttccacctgcctaaaaactgagtattctaagacacattattgttacgagaaagaatactaatttataaatgacaataaaacatacgttaaaactcctgtgtcac

SEQ ID NO: 210410 - DNA, 462 bp, Glycine max
  unsure (1)..(462): unsure at all n locations
tatgtgtcttctctgancttggtattgttnntttgttattggnganggaccncactaaaagctggggcttgtgtttttggtatactctaaacaagaatccactctccccacctagaggaagacaaaaagctcagggagtttttggtttctgttgaggaattagaaagaaattgctgccatatacaaaatattggaatgaagctggtcttctttggccttatataattatatataatgctcatatgaagagagaactagtaagtaaatgcccctaacttcttggtattattgtaatatcctaaacagcaatacatttttctctttttcatttaattcttagctcatatacatntatatgtaatattntaatatttgtgtcattctcctataccataacttattgtatggtttaaaatgatgcgatcccgacttaatttcatatgacatgtaattacattaatt

SEQ ID NO: 210411 - DNA, 309 bp, Glycine max
aaatttttgatgacgacgacacaagagggggctctctctcccctctaaaccccacatgactcacagactcatctcatgcgaccaggatggctatcattcagcgccagacacggcagcccctcacagaaaagctctcaaaactcttcagaaattggacttattctctaccgagaaatctataaaaacgcccaaactcaaggaaaagcccacactcccacttcattacacaacactggcataaataagtggccttgttggtgcatgcatgcatatagcaatcctgcgtcgctaaacacgcataaatgaata

SEQ ID NO: 210412 - DNA, 345 bp, Glycine max
  unsure (1)..(345): unsure at all n locations
acaaaataacgagaaantggggaaaccatacaagccccggaaaacgttctctatacaaaagttagtcgtagaagacgactaacactcaaatctgttggaaaaaatccctatgttgacaaaaattgcccccaatctgagtatcttgttcatttctttccgtaacatcgcgaaaccctacagattgcataacgattgatgttaagtagctcaactcggccaatgaaaattctcatgctgacaaacaattgtctccagacgaaataaggggatgacaactatgaaacaaatantaaaggacgntgagtcctangaggctaaagacacaggacatngagtcctatgaac

SEQ ID NO: 210413 - DNA, 383 bp, Glycine max
  unsure (1)..(383): unsure at all n locations
actttgtcaagaatgaagctctgataccacttgtgtaccttgtggctcaaaatcttaagaggatagcttaaatgcagaaaagcacaatggttccagctcaggcatgacaaagaaacatggtcctcaaccttacctgggcatgagggcatcggcatgaaccttaagtgaacatatgggcagatcacaagtacactccttatcgatgtttttaaacaagaaaaaaaagggggagacatgccctngaatttcaatacattgattaaacatcaaacggctccattcccgtcactcaacaacggtcaagtgactaaattcaaccaaacatacactctgagggagtcaccgagagattttcaaaagaaggatgaagttgttgaattata

SEQ ID NO: 210414 - DNA, 301 bp, Glycine max
agaacacaccaccgatacaaacaataagaagaatgacagccgaatttggctaatacgcagcatagtatcctacaaccaatcagaagaatttcctttaacagacagaagctacataggcatattaccggcaacataggtgcctactaacaggggaacaaagacgctaaaattaaaaaacgcggagaccagacgccaataatattttcaatagaccctattgttggcacaaaaatggaatgcatcggaggccaaatgtgcatctcttattcacgctgacaaaagtgagggatacactgaacaa

SEQ ID NO: 210415 - DNA, 441 bp, Glycine max
  unsure (1)..(441): unsure at all n locations
tgtacacgtctganacctgatgaacatcatatcctcaatttctgtcgaattcaaaggggattccaaattccaattttatatgtaattcagattcagattcagattcgcttagcttagctataaatgaatttgttgagtaaaattatctagctggagaaagctactccttatttaaccgatgattaactcaattattgcatctaaacttaattaccagaagacaaaaaacaatcaacatttgtattgagaagtatatatcatgctctaccaaccaaaaataaaataaaaaacaagccgagtgcaaattaaattcgtgtcaaccccaacaaggatattcttacacaggtacgggatgagtgtgtaattcaatattatttagaaaattatgaatcgcttctaaaaactcaaaaaaaaaatgttcctatgacagncatgtgatat

SEQ ID NO: 210416 - DNA, 428 bp, Glycine max
  unsure (1)..(428): unsure at all n locations
actcacgcttatagcggcatctttctatattatgactcatatatctgtttctgaaaaagcacttgacatacttgatgatgtcgataaagtcaaatatgcatggtcatgctggaacttgagtgtaatgacctgactattgaaatgtttaagcattttctgaggttataaagttagagccttgacaatatgtctttaatctgtttcttcctgttccagacttctatatgtttcttttattccaattacttttttaacaaatgaacataatctctataaaattcatgtacccaacttttaagtttattctcttcttagtggatggagatctgatgaaatagttgacatttaaacacatctgcaaatttggtgaagtgtgttgaagctgatcacataacangaggatcatagttagaatttaatcatgtctc

SEQ ID NO: 210417 - DNA, 423 bp, Glycine max
  unsure (1)..(423): unsure at all n locations
agcttctagccaaagggacttaccttgaattaatccctttgatagcccttttgagccttgtttccctttccttgttttgaagctcactacaagccttaagtgaaaaaccatgatatcaccatatccttaaggaattttggagctttggaattgttttgggaataagtgtgggggggtttttgtttcattggataacttgttttgttggctatacttcatgatgtattttgggccatacttgatgtacattgtatattggttaaatgttggacatgctgaatgaaatggtgtttctcacaggatatagagtaaaaaaaaaaaatcgaacatgaaaaagaaaagcaataaagttgagtgaataagatcttatatggcanaagaatgatgagactctcggctctactctntatcgttaaatttatc

SEQ ID NO: 210418 - DNA, 454 bp, Glycine max
  unsure (1)..(454): unsure at all n locations
tctttgggaccttgaacaagcaatcaactcctctttcataaccatgctatgtgctcgcgactggtccctttcttcccttcgcaacttgagttcattattgctaccccatagagctccgcgaaatttgttccggccatactcttccttgcgagccctcttggtctcttgttcaagggctcttgcggtaattgcattctcttcccgtaacccggcacactccttctgaacgtgtgtagcagccaacttgaacttctccttggcgagttctgcctttcctaactcgctgttgagagcttggacttcttcgtcctcttccggtgcttcanaattctcttcgctgacgacttttaacttggcgaagccatctaaacctcgtatgcgaactatcagccattcgtggtacccaccaatgatgccattacgaatgcctctaagctcttgatctttccttaac

SEQ ID NO: 210419 - DNA, 394 bp, Glycine max
  unsure (1)..(394): unsure at all n locations
ctgacgcatgcaagcttgacaaaaagtaactaaatattnttttttacaaatgaagcaactaactaactaaattccactaataatatagagtgaatactctaaaggaagggatacgccttgattacgcccatctaatcttgctaattaaactaattacacaaaacaagcccaaactcaaacccaatattcagtgactgaattggccaagcttaatttgaccctggaaattgctgaattggccaaagcttatttgtaaaaaaatcgaatatattctttgtagacttccaaagacaactcacatgcttcatttggagttctgccatatactctagaccctgcactaggcagatacgtcaagtacgaacacaatccaaaaatcacttccattcataat

SEQ ID NO: 210420 - DNA, 298 bp, Glycine max
atcgattacatcatttgtgtaatcaattactagactcttttattcaatttcaagtctgaagcgtacaactctttagaaactaactgtgtaatcgactacctcatttatgtaatcgattaccagtaaggaatttttgaaaataactcccaagagtcacaactgttcaagacgattttgaatggccatcaaaggtctataaatacgtgacttgggatatgaaatatcttacagtttttctgaacaacattgtcttatcctctctaaaccaaattatcttatcactctcaaaatattcctt

SEQ ID NO: 210421 - DNA, 142 bp, Glycine max
  unsure (1)..(142): unsure at all n locations
agctcttgagctgttgtcatcacaactcgtattgtttcctgaagaacaatacctgcgatattttatgagtggattgaaacctcacatctggcggagggtgcctactctgcattctcccaatangatggagattatcagaatt

SEQ ID NO: 210422 - DNA, 420 bp, Glycine max
gatctctcagtcacctgaggcatgcaagcttcacacaacttgatctttggagatattacattgacattttctcacttgatagattagaagaataatgcacaactaatgggcggagtaagaaacaataggtacgatcgaaaatgacaaactgattattattccactaatctattagtcatttttatttttcattcgataaaatttaactttgatattggttagatataagacacaaataaaatatataagtgagagacatcttttatgtcataaagtagcttttagattaaattagattcaaatctatcaatctatcatttttacagacattctataaaaatcaaattgattttaaatatatactcctacatatcactctactattttattaactttaaagactacttcgattgactatta

SEQ ID NO: 210423 - DNA, 143 bp, Glycine max
aaaattttttttatccgctgacaagaaatatgggcaagaacagggaacaaggaaaacatgctggatgcattcttagggcaatttcccacccactagattcttaccaacaaactctcttaaccaaccgtatcaaaagtcatcct

SEQ ID NO: 210424 - DNA, 408 bp, Glycine max
ttaagtcacctgcggcatgcaagcttataatatgagaaagtatgctgcgatatttattatatatcggttaatttattcagcggagggagtggtattttttttttccttggaatcttttcctttactcttctctttcttttcttcactcaatttcaacatataatttcgatttgaatcgtttgaaattaattgtgcattttaccataagaagtacatacgtcatcttaaaaaaacatatataagtaataattaaagaatatgtctattatcattagctagttaatagcgtattttataattctaaaaattggaacttttttatttatctatatttctttacgcatttattttatgacatgcgctgtatactttctaaaattttcaatccccataacattaatgataata

SEQ ID NO: 210425 - DNA, 341 bp, Glycine max
  unsure (1)..(341): unsure at all n locations
tactcatagatacccgcnnaaaagaaacgccgaggatacatactcattatttttcacttgatattgatcctcaagaaattaacatggctcttctacaagcctctaataaacttcttggtcgcccatcttcttttttattttaaaagcagacaatcaatcttaaattaaaattcatcagcaaatcacatcttgttaacgagatgattgttcgccttttctttcaagtaaagcgtcttagttcttgtaaggaaaagttagctattcgcttattataacaattaccacaatgtgcactcaactcttcaacgtgaaaggtctccgataatttctttttggggggg

SEQ ID NO: 210426 - DNA, 472 bp, Glycine max
  unsure (1)..(472): unsure at all n locations
agctntgggttcgatggccccaatgtctatctatcccccacatggaanaaggccaaggggcggacatgacattcagaggatgtggcggaacattgacattgtccgtgtacgcttgacatttatggcatttccttacatgggcgcagcaatcgctttccagagtgagctaataataacctgctctaaggatcttcctggccatagcatgcccattggcatgtgtcccaaatgaacccccgtggatttcctcaatcatgtagttcgcctctggcatctacacatcgcaggagggtcatgtcgtggtttcgtttgtacaagatggtaccactcacaaagaaaacagtagccaatctccttaacgttcttttgtcattgacagacatccctggtggatattctctgttctcgacactagtattgatgtcgaaataccacggtttcccatctcactattcctctatcgcacagcaat

SEQ ID NO: 210427 - DNA, 253 bp, Glycine max
cggagttctatagtcaccgatttagagcgctgacaccaccctcgcttcgaggccatcataggatgggccgttctcttagagcgacgcgtccagctcatggacgacgagtatacagattttccggaagaaatcaggcgcctgcgcgggacactactggttactcccctgggcaatttcgatccaaacataccctttgaattatgccaacgcttggccacagatgatggtgtgcgcgacttgatacccccggtac

SEQ ID NO: 210428 - DNA, 446 bp, Glycine max
agcttggtgtgagaaagcatggaagagtctttcttcctacttttatttgctgaccacaaagtggtacctggagatatgtcgcgagggtctggagaccttgcggacgttaggtggggtgctattgcccaaaaccaagcttgaccattcccgacccaacccgagcatagtcagtcagtgagaacctatgacatacctaagcaggcgagctcctggcagtcaaccaataaaagaacaaagtccaccaagcaaggaggcttgtgtggtggctggccagctatgtatcttgggtggtatatgaaaattaccctctggtaatcgattaccattcgtgggtaatcgaatatagggtttaaaaatggagacaggatgttaagtaacttctggtaatcgattaccaattgtgtattattgattgcacagtatgatagggcactggtaatcgagta

SEQ ID NO: 210429 - DNA, 447 bp, Glycine max
  unsure (1)..(447): unsure at all n locations
cttcgattcattctatgtacccgtagtggtccacattgtgtttcgtgtcatttgattctcgttntgcttactttttataccccctgttgacgtgcttaggccatgttacttaagtcgtttctcgcttaacttaaaaataaaataaatttccaccgaacgtttgaattgtattatccattagcttcagttaaaataaattccgaccgttcggtcatgccgtaaccacgttggaaatcaaaaagaggtaaagaataatataataatcaaaaagacatcttttagtaaaataaagcggaaaatcaatcggaccgtttctctttgggatttctcattcttaaccgaattgttaataactaaagtaaactaaggctaaaataactcgctagtcagctcgtcacanaatagctttgaagtggcattcatttctcactagaaaatgacatttta

SEQ ID NO: 210430 - DNA, 426 bp, Glycine max
  unsure (1)..(426): unsure at all n locations
agcttaaagagattcccgatctgataggtttctgttccgncggcaaaaacataactcaggtcaagatacaccaaatttgagagattcccaatctgaggaggaatcttcccacggaatccagtatgagagaggttgaggtgagtcaaggaagtcattgtcccaagaaaagaaggaattgacataccttctccaagaaatctattgccgctcaagtccaagtaattcaaatgctttaaatcagccaaacaaggacttatctctccaccaaagctccatctcctataagcttcccaatcgaagagatagttgccatcatagtaatgatacaaaacaaaaggtgaagtgtggaggtgaagctgaacaagatgggaagtagtgttgtggcagaggacttcctaccagcggcaacagttggtattattatga

SEQ ID NO: 210431 - DNA, 423 bp, Glycine max
  unsure (1)..(423): unsure at all n locations
gcatcttngaacaatttcactntattattgtgtcccaattggattcctaattgtcaacttacctatntggaagtgacatcatggcaattaggtcccagctttccattgtggattcagtcacaaaacaaacttaaatatgttggactatctaacacggngattttcgattctattcccacacagatgtgggaagcactttctcaggttttgtatttaaacctctctcgtaatcacatccatggtgagattgggactacattaaagaatccaatatctatccgaactattgatctaagctcaaatcacttgtgtggtaaattaccctatctttcaagtgatgtgcatcagttagatctttcaagcaattcattctctgaatccatgaatgactntttatgtaacgatcaggacaagccaatacta

SEQ ID NO: 210432 - DNA, 455 bp, Glycine max
  unsure (1)..(455): unsure at all n locations
agcttctatgtgttgctctctctactaatgttgaccataaccccttatattggtaactcccatcagttatcccacatttgataattataatttggtccctcgtcaaattataatatcactaatggtatctacacaattagctntcatgacatatatgcccttagccataattctatattgattagaccactttaatattttgtctaataatataatgatcctaacttattcaattatgtgatatatatgtatgacccaaaattgctaacacttatttcataaatagtttatgtaagttagttagctcctttttggatgcataaagctctcagtactttggtactggtttttacaaatggattggactcttgttcattacaacatcactactaaaaatattttttttacgacagtatataagtcggtcataaaaaaccgtctttgtttatatcata

SEQ ID NO: 210433 - DNA, 466 bp, Glycine max
  unsure (1)..(466): unsure at all n locations
tcttaattgctctgatagggttttcaagcgttttatatatatataagagattaaagccttcactttgtactatcttcgtgcgattcacttttctctctccatgaatattaaacttgaaatgcaaaccaggtgtctacatttcacgacaatccaatggttaacaagtctgggattgtagttttactagacaggttttgagtctctataggaaaagagaaagctacggtgcgaaagacatttctcttagtccgtcaattttttcacaatttcaacggtgagaatgctcataaatgagttttgaaccgggtgctgaattatcacaacaatccaactgttaacgagtccaaaatcatcattntactaagacacgtttgagtgtatgtgggaaaaagagaanggtttgggagaggaaaagagaatatgacattgagagaaagaggacgcatagaacttatcgtcagtctga

SEQ ID NO: 210434 - DNA, 415 bp, Glycine max
  unsure (1)..(415): unsure at all n locations
tgtaaaatccacttgagttttaaaagaggtttaacagttttagtattcctatatgctatatcaatcacacttcaaccaagccagctaaaacagtaataataaaatagcaaagataaagggatacagagcacaataacttacagagtgatttatattcctatcgtctccattcaaattggatctagcagttgaacgatcaggaggacatatatctttcctgctaaaagtggaatgaatatgatctacagaaccattaaatntattttctttcaccacagtgccaggagcattagcaccctttcccaaaaccaaagctctagaagaagacaaaatgaccacgcatacgatcaagtaccttgtccagtacttcacggtgaactgttgcagaacaatttacatgtgaatatctgattct

SEQ ID NO: 210435 - DNA, 413 bp, Glycine max
agcttgtctcttcgaaataaatataatttgtaatatatctctaagaaaatcgcgaatagaaaataattgttatactacgcaattgtatgggcatggcagaggaatacgtcaaaaacaaaatcttagggaaaagaaattctataatgaagattagattaaaagaaacaatctaataacatcttttaatatatactcttaaaattctgctcaaacttacatggccctcacttgataacaacattatgtaattgcaccagatagcaattcagtgcaatacatatcgagtaattagtctatctgtctatgcgtgaagagtatacaagagttatagacatctaataacaaattggtatatatggtaattctttttaccataaataactggaaaattcatatttaatataatatttcat

SEQ ID NO: 210436 - DNA, 451 bp, Glycine max
  unsure (1)..(451): unsure at all n locations
tgctngcttgcctgaataccaattntagaagtcacatgttgtcccaagtcggntgttataaacgagcgataaacaattatttgttaactaaattaactntgctatcacgacaatagttntatagaatgaaattaatttcattattttttgtcgttgctctcttctatatttcttcaattaaatatttattattctataaaatatttctttatgacaaatttatatctcagtaaaggttctttatttttaaatttcttaacgagcttttagaatttaattgaaaagacgccgaaagagacattaaaaaaaaacttgattcttaactctttagttttaatgttttatatgttgaaaaaggaagattaactnttcaactactcggttcgatgaacttcaattcattcagagacacattanacacattagcagtgaactgcgactttgtaattat

SEQ ID NO: 210437 - DNA, 414 bp, Glycine max
agctctacacgtatcagtttagtgtatggtccatatcatagccaacgtgctcatcgataatggttccagtttaaacgtgatgcctaagagcactttggagaaattaccattcaatgcttcccacttaaagccgagttcaatggtggttcgtgccttccaccgcactcgctgagaggttaggggagagattgatctcccagtacaaataggccgtcacacctgtcaagtcaccttccaaataatggatattaacccccactatagctgtctgttggggcgcccgtggatccactcagtgggagttgtgccctctacactccaccaaaagttgaaattcgaagtggaggggcatttggtcatcgtgtcaggcgaggaaaacattttggtgagctgcccatcctctatgccttatgt

SEQ ID NO: 210438 - DNA, 409 bp, Glycine max
  unsure (1)..(409): unsure at all n locations
ctcacgcttgatttgtgagttgattttatccttacattataagagattctttcaagtaaatgttcgggtgaaacttgcttttttgatgattatttgaggttacaggataaatgattaattgaggttacaatgcaaatgatcggttgaaattcatttaaacattgattaagtgagattatggcttanatgatcgatcgaaactcgcttaaaacgaagaanaagaataccaaaagtagacgagatgaagatgaaaacttacaaagcaagaatggacccctaagggtgcatagaatgaattcaaagcttcgaaataaaaaactaaccggttgaagatcgacgaacgatgaagagcggacgaggaacgatgaanaacgttcccctaaattgatcttttcacccncattttgag

SEQ ID NO: 210439 - DNA, 219 bp, Glycine max
tttggtacatcccagaacgcaaaaccattcttgggctttcattagtgataactacgatgaacacaccgggagcttctttagggattctccccaaccgattggcagggcttactaaaatcccaactatgcccttatttgcccatttcttgaattcgaaacaaccagtttcttctcttgccttgaaccatatcacgttactcatttatgaaatgaaacttg

SEQ ID NO: 210440 - DNA, 383 bp, Glycine max
  unsure (1)..(383): unsure at all n locations
tacatgcacaactcctttgagtgacatttgtattggttggtaacttgattgttgcatcttaatatatccgatatttgtttcgctttgtgtatcattatagcgcgagtgaaaaagaatttctttgtgcatcgagtggcctcagaataattaagaagggggggtggaattaattattcctaaacctttactaaattaacaattactcttctaaggcttttacttatgttgttaagagaatatggagtacaagagaaacttaacagaaagtaaaagcgaatattaaatgcacagcggaaagtaaaagagtagggaagaaggaaacaagcacacatgagttnttatactagttcggcaacaacccgtgcctacctctagtccccaag

SEQ ID NO: 210441 - DNA, 442 bp, Glycine max
  unsure (1)..(442): unsure at all n locations
tgcagagcttcgatctaataaataaactaattcttctatatattcttttacaagagctaaagggccctctcgagaagtgtaggcaacttacagttgctcaaaaagagtcgatgaatgccttatccacatgactcgaagatttcaatgagctaaagatgagtcattttattcgatctgctaaatcctccttagttatggattctcaaacaaattttgtaatttgtttttatatntttagtattcattaatctcctcttgaacaatttgcactttaattctctatgttatgggaatgtgtatttcggctattattggtctatatagttttaagtactttccatttatcgaaccaatggtaatgtccgtatttacttcttgaatcacataagcattttccgaaaaaacctttttgataacatatggggccttccaatttggtgac

SEQ ID NO: 210442 - DNA, 438 bp, Glycine max
  unsure (1)..(438): unsure at all n locations
tctcacctcttatcctttatcttccgctacatatccatggttgaaaatcaccattggaggacctcattaaagcttacagatccaacctncatagaagctttcatgcaagctctcatcaattaggcataaaagacaacttggctcttaccaaaagaaggaaaactctatctaattaacctagaccatggtgctaattaccacaggtcaacggaataaacacacttaatcatacatagtgtgaatatacattatttaagcttgtacaatgtaattttatacaatgtaaacatcatattctaatgcaattctaattcctactanacttatcatataaaatagcatatatataatcgaaattttaaataactgctagaattaatactcattgtaataattctcatgtcaatttattctataatcactcacatagaatttcta

SEQ ID NO: 210443 - DNA, 359 bp, Glycine max
tagctgagaagtccagggatctcctgcgcggcggagaagatgtccaccaatgctttggccttggctaacaatcggcgaagctcttgactccccttcaatgtaagagcgaatcggtccatccacattgctgcctctagatgtaacgcgtcgaacacccttcctctagcctccttttctatgtacacttgggcatactcgtccaccacatggtgctcgaggaccgaggctagatttaattcttcttggtacttgctgatgatggctatcacgtaggtatctgtctcgcataaccgctgagacaagtatctctcggacctcaagcaagccttcaactcatgcttcaagatcaaactgtgtac

SEQ ID NO: 210444 - DNA, 399 bp, Glycine max
  unsure (1)..(399): unsure at all n locations
ctgcagcttctcgctttcctataatggggcaattgattttatgacgtcacctctggatctgagtctactgaatagtgaaaaaatcgtttcgtgaagaaattcaagccgaggcgctttcgtaacgcgtctgaaactgttccgtgggtgaattcgtgaagattttccgccatctattcgtgcgttcttaatcgttctttcggcgtcctgcggtcttcaaccgatgagtncccgaaatcgaacttttcaatttcattctatggacccttgctggttcccacttgtttcgcgacttttattctcatttcatttacttattggatcccctcttgacgtgctttagtcatttatttaagtcattctctcgcctaatcaaaagataaataaatttccaccgatcat

SEQ ID NO: 210445 - DNA, 419 bp, Glycine max
  unsure (1)..(419): unsure at all n locations
tactcaagctntataagcgcgggtctgagagaccaacgtcgagtggtcgcgattttctattatgatgttccgagtacattggagttggtacgaccatgccctcctgatttccagctgggaaatcggcgagtggaggaacgccccggcatttacgctacgagcataatgtagacctttacggttttataagctctatagttgggcctaggctctagagtatttccttttgttaaggctctgtgtctttcgtgtttgaacttataatacaaggatctttcttcatctgttcctacatctctacccattctcattcatttgcatgttcacttctttatctgaaacggcagatccgatgacgagatctctgaatgtactaatacctgtgacccgcctatcgactgcgagcaagacatgaatca

SEQ ID NO: 210446 - DNA, 431 bp, Glycine max
  unsure (1)..(431): unsure at all n locations
tggattccaagattcccaccatnggaaccaatcaagggcttccccatccattgcgaccatcacagcctccagcttggtcctcttctttacggtgcacaatcagaaatatctttggatctttgtcaaccagcccataggatcctcaccatcaaatatgagcatttccaatttccttcatcgacttgattccacaaacatttaaactttctactccataaccaccgttctatgttggtaatggcaaacttcaattacttcattcacatgaatcgtgttgctacatttgcttcttggatagttaaagttagctagtgagtaatacttgcaaaatacccaaactaaaccatatattcaagtggtttagcagagtttcagttcctttaacagtccataagagactagattatagtntccagaagaggctactacat

SEQ ID NO: 210447 - DNA, 437 bp, Glycine max
ctcagctgatctttggaacatgaacgacatgagtgaggattgtttactatctttcggaacaagacatcggttgagacgtggcggggctcttgaaccgaacacggattttacaattgcctccccctcctcccccctttcctctccactcacctctctcctccccttctcttcactctcccctctttctccttctctccccccttctctcctccctcccctctcccttctaccctctcctctcctcctccccctccccctctctttcccctcctccccctcttctcctctcccttccccctctccttctcattctctctccactccacctctctctcctcctcctccttctccctcatcccttccccccaacctcttctcccacacgctcctcctcctctctctctccctccctccatctcttccctctccctccccca

SEQ ID NO: 210448 - DNA, 438 bp, Glycine max
  unsure (1)..(438): unsure at all n locations
aggtcatgggaagcagatagtgtattatacanaatggacaagaggatataaatgaacgatagacaatggaaaaacgacaaaaaatgaatattagcttggatattgctcanatgagcaaatctcactcattacataaatgcatcgcgcttatataacataattggttacaagattaactaacttgtaactaactaaaccaacatgtaactaattaaactaataactaacttgaaactaactaatactagtagtctatatctctaatgcccccacaagttggaaggtgttgaaaacacttctatcttggagaagataataaataaaggctggaaaattggaatatagctaaacatgccggaaatacatcagccaaaacagaagattaaaaacaaatcataatgtaagtgcggctatggtgcatagctcctagaaatcttc

SEQ ID NO: 210449 - DNA, 425 bp, Glycine max
  unsure (1)..(425): unsure at all n locations
agcttacctatcgactatacagatntttatttgttatgccatccaagccttgtgttcggactctcagccacttatgatagccgccgatgatcccattactgctttcnctaaactctctgtcctttcttcacgccgcatcccatgccttgcgaactccttggagtaccctcgcgttgtggtcactgaaacctcgtgcgatgaaaggcgtgatgctntcgtctgatggcactcctctcatgggacatccttcgcatgaagatagaatcctgatcctccttcctttagcgagggaaccatttacagacgcccctcctgctagccaagagtatggcacaacatacaatacttgcgccgctctttatcacatcccggtcgaacgtgtcatacatggccaaaatggcgacgaccgggctttcttgccatga

SEQ ID NO: 210450 - DNA, 405 bp, Glycine max
agatactcagctcggatgttcctagattcacacatcttttgaaggctaatgttatacatttctctattctattttctgtggtgtgagtgtactaagagtccttacttcgcgtttctttggttgtaatagcaatggttggaagtggggatatgcttctgctttataggctttaatttattttatgcctaatagtgtattttattcttactttgcatcatgaaggaccaatgacacagtaatgaatatattctgatattaattataataggtttaacaattgctatcagagccttctcttaagtcttgttacacacacatttatattacccatgtgacgttagcattattataataaaccatttattcctcttgaacacacgctatgcttattagcaatgtgaccgt

SEQ ID NO: 210451 - DNA, 432 bp, Glycine max
  unsure (1)..(432): unsure at all n locations
ctatanaaactcaagcccttctccctatttgctatcaataggagaagaagcgaatattattctggtcagccccttacgcacttctctctctctcgacattgcttacgaaaatcgtctccgcgaagaaaatccaagccgaggcgcttccgcaacgcttccgcgagaaaatacgcgaagattctcgaccgttcttcaagattcatcgatcgctcttcgcattcttcagtcttcaacgggtaagtacctcaaaccaacgctttcaattcattatatgcacccgcggggagccacatcttggttcatcgatattcattctgcgactcaattcactttttatactcccctttgacgtgctcaagccatatattaaagtcattcctcgttaatactaaaatagaataaatatccaacgatcgtttgaactgatcatcc

SEQ ID NO: 210452 - DNA, 464 bp, Glycine max
  unsure (1)..(464): unsure at all n locations
cgtgaaaaagcataacanaactttctgtgattggcttaaagatacaatcttngcagatgagaatggctcagaaacattaagaaaactagcagatgggcctaaaagaaatattataaccttgtaaggatacgacataaacaggtattcattttacacaaaagcacangatgacaaaagtacaatgcagaacagcgaggtcaccctaagggctaaatctcaacactttgcaagtgtcaatgatgccaatccctgtgtagcttccatcccttactntgggttcattgatgaaattcgggagcttaattatgtgaaatttacagtatgtgttntcaaatgtaaatgggttgacagcaacaccggtgtgcgcaccgatgatataggaattaccctggtagatctaaagaaacatggttaccacaatgaccctttcatcatggcagaacaagctagacatgtattttacg

SEQ ID NO: 210453 - DNA, 447 bp, Glycine max
  unsure (1)..(447): unsure at all n locations
aaactcaagctttttggaaaagaaaaagcacagggcaacggttagagaaagattgttataattgatcgtttggaaggatatcatatatcttatgaacatgtgccanagtcatgcttttatagactcttcatgtttggtcaaagagaccattggaagagttatgacttttgagaaaaccatgttaagagttataactcttaacattttctctaaaactatttactggtaatcgattaccacaaaggtgtaatcgattacacaatgcactttatgaaaagttgtgactcttcacaatnggatgtgaatctcaacgttcagattcacttctaatacgatactaatatagtgtaatcgattacactactttgaaatcatttttgaacgttatacatcattgaagacattttgataaccaactggcactgtaattgatactgatactggaat

SEQ ID NO: 210454 - DNA, 450 bp, Glycine max
  unsure (1)..(450): unsure at all n locations
tttacttaatatacctgtagaacgaatgatattattttgatggagnggaaatgtattttcttagagactaaacatgagtagttagtgggaatatgcacctaatatattgaaaatctatatgaaatagaaattcaaagatttttcttaccaaaatgtgttcttcgttagtacatacttgttggttagatttttaatcgttggctacaatcttgtatatattagaactgaattgtctgcatgcaatagctctcccatttgagttttggtagaagtcatatttctagatcttgaattatgcatgtgaatgagcattcgtagtttaatattttctattcttcttagctcaattgacatcattngtaccctttttttctcacctaactcagtttggtctaggcaaatgattgagctaatcagaattgagctaagatttgtgctacttaactatta

SEQ ID NO: 210455 - DNA, 374 bp, Glycine max
tatttgctataataggcgaagaagtgaagaagattatgttatccccttaagcactactctctctttcgaatatgctgtggaaaattatttccgcgaagaaaatccaagccgaggcgcttccgtaatgtttccgtaacgtttccgtgagtaattacgcgaagattctcgaccgttcttcaaagattcatcgatcgttcttcgatttcttcagtcttcaacgggtaagtacctcataccaagcttttcaattcactctatgtacccgtggtggtccacatcttgtttcatgtatctttattcttgatttcgcctgctatatatacccccttttgacgtgcttaagccctctattttaggcatttctcgcttaatct

SEQ ID NO: 210456 - DNA, 53 bp, Glycine max
  unsure (1)..(53): unsure at all n locations
cccagccganatcttgagcagaacacagaacctcaagaaagaagcgcaacagc

SEQ ID NO: 210457 - DNA, 199 bp, Glycine max
tcaacctacacattcttctgttttgcacgttatacattgtaccatttgtggggaggcttatgacataggcccaatgtttcccattgaagaaaacactcaagaagttactatatgggaaaaaaccgagacaggatatactcaggaggatctcaagcttccgcagggtcctataatcaacaggacagtggagacacaccct

SEQ ID NO: 210458 - DNA, 410 bp, Glycine max
tcaaataccagtgtgtttgaacgctgaaattcaaattcaaatgtgaagagctacatcctttcacacatacagcttgtgtaatcgcatacactgatttggtaatcgattaccagtaatagtttctgaacaaaatcaaaagatgtaactcttccaatagttttaacgtttctgaaagcataactcttccaaatggctttaagattttatatcggtataactcttctatagtttgcttactagacttaatagctataaagcacgctttgatttgaaacagtaactttttaacaatctttaacacaaactttgccatctgattttgatctcttgaactattcttttccttagcaaagccctcaagtttctgatttcacacttgaaacatgcatcatatttcattctctccttgc

SEQ ID NO: 210459 - DNA, 390 bp, Glycine max
  unsure (1)..(390): unsure at all n locations
agcntttgaaggatcacaaagagccttatgaattttncctttcttatgccaccagnacctggaaggcctctctatttgtcatgacaatcttggacgagtcaatggggtgtatgctggggcaacatgacgaatccgggaagaaagagcgcgtttgttactacctaagtaagaagttcacgacctgtgagatgagttactccttgctcgaaagaacgtgttgtgctttagtattggcttcccatcgcctaaggcagtacatgctgagccatactacctggntgatatccaaaatggacccgtgtaagtacatttttgaaaagccagctctcacgggacgaatcgcccggtggcaagtcctgctatccgagtttgatatagtctacgtcaccc

SEQ ID NO: 210460 - DNA, 418 bp, Glycine max
  unsure (1)..(418): unsure at all n locations
tgcgcagnccaccatctttatatagtagagnactcgtttatgtgtctaccatcacgattatcgtctccctttttgcacatgtactgtacttgcatcctatccggaaccatatcagaatagtactgatactgcctaacgaaggcaaccattaagtccttccaagtatggactcgggaaggatcccagttagagtaccaagtaacaactaccctagtaagaacttgtttggcagaagaagtaatagcatgtacctcatctctgtgtatgcccttatcttccgacaatacatctttggatggttcttgtgtgcagtagtgcccttgtactcgtcatagtccagcaccttgaacttggaggggtgatgatattggtactacgacaactcttctatgttacaaagcataactttactcctcaa

SEQ ID NO: 210461 - DNA, 439 bp, Glycine max
  unsure (1)..(439): unsure at all n locations
gcttcaaacttatacataaaacatagatatttctttatggctacnccgctactatgagggagcggatatnctcttaactattgtacagttctcttttatgttttanaatgtaaaataacttcaataatattcatgtaattctgcattcaattctaattttcatgatcatcatttttgcacaacgaacattaatttttgggacatttaacttgaggtgctcgtgctatgttagtatcgatngacaaggaccaaccaagccttatttcacgtttgtggggttggccacattgatcaatcgataccattgggctcaatgaaaaactaaattttcatttagacttattgcaaattcttcttcttcataaaagtggattttgctcagttggataatttttatctatctctatgggagatcttctttgcgggctctacatcctct

SEQ ID NO: 210462 - DNA, 322 bp, Glycine max
  unsure (1)..(322): unsure at all n locations
ttagacatgattggtacatgagttgngacttgttttattcaatttgggcacaattggatgagggacagagtggttttcgaaatctgcactttatgcacaattatgctgttgaaatgtgcagcaaaattttgtataagtgcacaaaaaagcttgtgtatggctgtgtgtaaaaagggtattacatatggggttctggatattctctaagagatcccaacggtcaaaatgtagacttatgtactagagacttccagtaagattntcgagtcgatccaacggttaacgaattccaacgaatgaaatgttactcgggtatatgtat

SEQ ID NO: 210463 - DNA, 320 bp, Glycine max
  unsure (1)..(320): unsure at all n locations
ttttctcttcacattggagtttctttcccaatcaacactaaacttattggtgccatggaggctattgaacttgctatttctaagggttggaggagcctttggttagaaagtgacttgtccttagttactatggcatttaagaactattatatngttcattggtagctatgaaaaacgtggatgaattgtgttgctggtactaaatctatgaatttattattatcacatcttttgagagggaaatagttgtgctgataaaatggaaaacttgggtgtctcggatcaaagaattcactagtggtaatctttgcccaactata

SEQ ID NO: 210464 - DNA, 382 bp, Glycine max
  unsure (1)..(382): unsure at all n locations
ggccacccagctcgcccaggcgagctatgtggcttcctccatattgctccgncttcaggaggaacttcctggaaggcccacttaggcctgtattctatctgcaccccatgtgtactaaatacaccccctgccttattttgctgattcttttgtcataacgttacataactttacgaattccgcaacgatacttattttccttacgtaatgttacagaaccttacagattacgtaatcatccgttatttggctttcagaatgatatggaacgtgacggatttgtaacaatgctaccttttgatgtctggcatggtacgaaacttcactgatcgtgcaacaatgctctcttttgacttctggcacgttatggaacctcacgtat

SEQ ID NO: 210465 - DNA, 458 bp, Glycine max
  unsure (1)..(458): unsure at all n locations
agcttgcttggggagctnctatgtaggtttaatcttttgagctcaangagggccttcaatgatgatnttccaccatggagatacaacggaaggcataggagaagaggagaggggagacaccatccactanggaataagccatggaagaatgagcttcactaacaagaatgtgccttggataagaagctcgaagatgatgctntaatggaggaaaaaaagagagaaggtggaagcacgaaatgaaggattaaaagagggagagaagtggaactttgaagtgtgtctcataagactttcattcattaaagttacaacaagtgttacacatgcttctatttatagactaggtagcttctttgagaagctntcttgagaaaactnttcttgagaagcttctctgagaanacttcctagagaagcttctttgagaaacttccttgagaagctagagcttagct

SEQ ID NO: 210466 - DNA, 299 bp, Glycine max
aatacacctctatgttattgtctctaaccaaaaggacaacccatactaggtcctttagctagtccggcacatctctccaattggtatgaacaattggaatgctgttctctaactgtgacccctagatagttgtggaacttatctttacgagggcccgatcctctcccagtcgcgacatcaacgattacaatcggtatgggctattccaaggtgcttatagtcagacttcctagctgtgaggattgtctagtatttctaaacatagtgtctaactgaacatctgactgactatgggacgg

SEQ ID NO: 210467 - DNA, 415 bp, Glycine max
  unsure (1)..(415): unsure at all n locations
atgctctttaatgtgattttttttggaatacattcaattattatgtcaacaattcgaatgaatttcacatgcttagaagaggggaaaacacaactaatctagttatcttgtcatttttattttcttagaagtacttttaaagaaacttatccaaacagacccttagaacaatngagttggatatatccttcatttcttcctaaagtaaaaggctttttatacttgttacttaattctctgtgatcctcactgaacctatgggaatgggaaggttgctctaatttattctttntctnntgtttgattaagtctgctgaatacaatttagntnttgaaatagtgtctccaaaatctcattcacgtttgctatttgtatgcaggcatgtattgaactattacaacgaagtggtgtaag

SEQ ID NO: 210468 - DNA, 496 bp, Glycine max
  unsure (1)..(496): unsure at all n locations
ctaagcttggtgttaacacatatttgaaaccctggggtacatttaatctctcattagtttgttntttttaaaaaaaaaaaatcataactgttatacatggcttattcatactcttatttctgcctgatatagttgtttgcagcagatttaatgtttttactgttgctttcatatacagaataaacaactgtaataatttcataactgtcttgatcacagagtagtgtgcagatagaacttctaccatactgtttatgctaacaattacattttcttatgcttctaatgtgggttatatgaatntgcatatgtatactaagttctaactctttcctcgttttcaaagtttgaccctaatatttcattctactctgcttcctagtatctggaactggaaagatggtagcaatgaaggaaacttcttatatgctcgtactttatcttctgaaagttggaatttggatcatgtgagttcctctcaattagtatggaatat

SEQ ID NO: 210469 - DNA, 408 bp, Glycine max
  unsure (1)..(408): unsure at all n locations
ctagggccatcaactcttagatgtccaggntgactacattcataccactttgtgacagaaggagagttttcttcttttttctttggattgaaatcggtcttattgaattcctttgctccttagaaacttggtgaatatctttacgaagaaactaanaacatcatcttcttatatttcattcaagtcttctctgcactttcttcttgaataaaagatgaggcttaaaatgcaanttctttctttttcttgccattttcttcatgtggaattagtctcataaagttcattgtgtgttcctgaagctttacagataaagttgcaagagacatgttagtgagatctcttgattctgcantcgcaattacctttggttgccattccctgcttaacatcttagactttgtaatg

SEQ ID NO: 210470 - DNA, 266 bp, Glycine max
ttctctttgcgggtagatatcatcactagatacttcgccttttactcctttaattacgagaacccccctctctctttatttatctctttcttatcctccatcgaagcttcctgtctaatcatcttatccacagcacattttcggtggtgatgctccttcttccatggcttattccctagtggatggcgccttctctcacctctattcctttatcttcccgagcatatccatggtggacattcaccattgaaggacctcattgaagc

SEQ ID NO: 210471 - DNA, 466 bp, Glycine max
  unsure (1)..(466): unsure at all n locations
agagagagatacctttttattccaacanaagatcaaacacactatatatacttgagaaagagaataatcacaccagaagtaaaacaaaacttatttcttaataaaacaattaagctccagagacatgaacctgcaggaagattcagagctttcatactggcaatagcgcaggaggggcaaaatagcattagggaaatgttnggcctctgattgtttggtggttccaaaagcatctccatagtgaacacttttttagaatttgcgggccagatcgtctttggctgtgtcctatcattacaggatcagtaagcaagacatatcataattgatttcttcttataaggctgcactccccataaccattagatgctctggttgacatcatcacaatatttcagggtaactctcctctcttgttgaaaatacctatttcacagtctgctttattggtatactcacaaacctg

SEQ ID NO: 210472 - DNA, 436 bp, Glycine max
  unsure (1)..(436): unsure at all n locations
actcgaagagaaaccctgcggtatgatcttgagctcagcgagtgaaaacacatgcaggttagaccccactagagaaacggagagatcctccgaaagcgctgagccaggaaaactcaagtccgctatagagaccctgttggaagaagaaccacccttcgtagccaccactttggttggctttggagaaggagacacagattcaccctcataacaactagagaagcttgatcccatgtcaattatccttgtggtgtgaattaacaagaatcaaataagtcctatgctatataaatatntatgtttctctaggaagagagttatgtctgatgaaggtttataactatatgggaaacggagagagatggggtattacacaatggataacgggtagaagatattacacgaatgggttagcatggatttctattcttaactg

SEQ ID NO: 210473 - DNA, 238 bp, Glycine max
  unsure (1)..(238): unsure at all n locations
tctcttggtcgtgttgtaaagaagcttcccagtatgggaagctaaatcctctgttggatcttccttataagtacttgatgtaaatatcctttatctatntaatgatgtttgtgcattcactgtgctatcaaacttcattctccatgcttttgcttgataacgacaccatatgttctttagacattcatagggaaattggttgatcttagacttgtaggaggggctagttgcatatatc

SEQ ID NO: 210474 - DNA, 503 bp, Glycine max
  unsure (1)..(503): unsure at all n locations
agcttatgcgcatatttcattacgaacgttctctttgtcaagacattctattaaccgaaaaagaatgcacncatatacaatcaaggcagctttgttacctagattatatacacgtacttccaaggtgtatttgatacttacatcacacacatcttcttggctaaattcacatacatgcatactccaagcantttggggtaccaaaaattgcacatgtgcacatcttggtatttctaatacctatacatacacaaactacatgatgaatcttgactatctacacaataaagtgctacatttcatgccctattttcaagttattgctacctaaagccgcatgcaaattcaagcatattatccttcgctgactaaaattgtattcaaattatatatatatctattggaatatgttttctttcacataacattcaacatatttatatatantttcttgtgagacattttgactaccaagaattatatatacatacattcaagtattt

SEQ ID NO: 210475 - DNA, 391 bp, Glycine max
  unsure (1)..(391): unsure at all n locations
tactcagctttataaaggtattcctaattctctcaattgcctcttttataatgacctagngaagaagaatgtggcatttacctgtgctgaagaacaagagcaagcctttgctttgctcaaagaaaaacttactaaggcacctgttctagctcttcctggcttttctaaaacttttgagctagaatgtgatgcccctagagtgggagttggagttgtattggtacaaggtggacactggtgtaagctccattggagcttgtangcctatgatcttcttcatcaatggattcctttgcttcttggaagatgaatggcagtggaatggagaaggaagagagagaggagactccacttcaatgagaagatgagtctagaagaagctcaccaccat

SEQ ID NO: 210476 - DNA, 406 bp, Glycine max
  unsure (1)..(406): unsure at all n locations
attccctagtggatgccgcctcctctcacctcttctcctatagcctctcgctacatctccatggtggaaaatcaccattataggacctcattgaagctcatagatccagcctccatagaagccccacaagcaagtttccatcacgaccccatgtgtcgctaagcgggattgtgtttttttatgaatgccagctaaccggaccatgtctcgcttaaccgccagtgcctctttcagttctatnttttatgttttgaatctgatcaacttgtgtcctatttaactatttggttcctttatatgcaaatgactcgtaggaaatgcaaaagtattggttcaagacccacaacacaatatgatacaaaaagggtttcctccttagatgcttggaaccgatacacagataatg

SEQ ID NO: 210477 - DNA, 501 bp, Glycine max
ttgccgatgactaatatctgttggcacactaggttgccatctttgttatgatttttccacccaactacattttctccatctattagactcgaacttaagaccttacttaaggaaactgaggtcactatcactcagactaacgactcattggcaatgtaattaacaaaatttattgtttattaaagtctaattttaattctttgttagtgtatatattcttacaccatcaatcaaatagaaagtattttaaatacgaatcttaaagtaatataaaatacaattatcctaccatatgtggttatccataattggattagaatgtattttctttttacataatgctactcaacaataataactattggtaaacttaccctcttgaataactcttaacatgttaaactttattaatctaaatattaactatatgtttatttactatgaatattaagtttatataaatcttgatgttcacactcattgacttacactataatatga

SEQ ID NO: 210478 - DNA, 473 bp, Glycine max
  unsure (1)..(473): unsure at all n locations
tataagaaccaaaatgccttaatcatttccaaatatgcatgtgtattatgacacatcaacaagaatcaagccaaggctattgtgcaagcaatcaatggggcaaaacacaccaaatgattataatgatggatggctcaaattctcacaaaggtaaaatcatcactttcaaattgagctctcaaaactatcatgacatgtagagaagaataaaggatttcaagtcacaaaatgtcaagaacttttattttcaaaacaattacccatttcttgaacatatcctataattcaaagaaaaacatgcaaagtcgtacgtgcacacaanattgacccaaaatattaaactgaaaatccgacgaaactaacaacattaacaaagtaacacaactaacagattaacaaaaccaacagaactagctaaaccaaagaacactctctccccgctccccatacttaaacaacacattgtccttaat

SEQ ID NO: 210479 - DNA, 390 bp, Glycine max
agagctctacttcactccctctataataagcgtagctcacctcccatgactaaaagacatgaaaatacaaataaaatcctactacaaagactactctaattgccctgaaataacagggctaaaccctatactactagaatggccaaaatacaaggcccacaatgagaaatcaaccttatttactatctacaaagaagaagggaccaaccttggccatgggctataaattaccctaaggttatgagaaccctaacgcctttttatcaactttagcccaatcctcttggagcctttgccatggcttggaactggcctttcttggagattgcatatcccttcccctgaagagatctgacctcaattgttgttcctctccttatatagctcccc

SEQ ID NO: 210480 - DNA, 485 bp, Glycine max
  unsure (1)..(485): unsure at all n locations
actcaagctnggcgcgtgtgattnatattctccagctgtgtggggaatgttatanatntatgttttatatccctattgtactaggctactgttcttctttctgactttctcgattggctctgttctgagttttctgtaaaagcttcctttgtaagctaagtttgatatatataagagaagctgagtgttgagaaaacacttaagcatttcattcaaaaatatctctcattatattcaagtaacatacaggacacaaagtttattttagccttccagttatatcaatnttcattatcatttaatatctctccctccctctctaacctataacacacaatttcaacaaccctgatatatactaaatacatataatccatgcagaattgtggatactcctggagaaacactcagcatatagtattcagttcagacagaacatatatggcataatgtntagctttaataactttaatacatgtataaaa

SEQ ID NO: 210481 - DNA, 388 bp, Glycine max
  unsure (1)..(388): unsure at all n locations
gctaaagcntanctacacacacccctttcataactaagctcacctccgtgagaangctccttgagaagattccaaaagaagctagagcttagctacacacacctttctaatagctaagctcacctccctgagatgagaagctagagcttagctacacacccgctataatagctaaggtcacccccatgacaaaatacatgaagaaacaaaaaaagtcnctactacaaagactactcataatgcctcgaaacacaacgctaaaaccctatactactagaatggccatacaaggtccaaacgaatgaaaaacctattcatatatttacaaagataagcgggctcatacttagcccatgggctctaaatcaccctaaggctcatgagaacc

SEQ ID NO: 210482 - DNA, 348 bp, Glycine max
  unsure (1)..(348): unsure at all n locations
aacgagccatcgtatgacttgcatggattgaaatgattatttatctgtcttggtcaagctgtaaccattataagagaatgagcatgagattataattactactcacaatgcggagtcgtctgttagaatgattgcgaaggaaagcatcaaccgaattccgatgagagtgtgatcctttcatcttgagagaaatgactatcattcatcactaatctttgggtgaatctctaaagttgagatcgaatgtctctgaattgacgatgatgaaggccatgtctgattgtgataacacttattccaaaagcttaccatgcgctcgantgagttatcctatcggctccctattga

SEQ ID NO: 210483 - DNA, 367 bp, Glycine max
tccctaagagaaggaaccaatgtgcggatatcctatataagagaggcctttatggcaatagttatctagttattgatgacgttccccctcatgatatggttgagcttcggctactacacccttcttaaggatagtaatcccacagacttggggttcctcttagcataccaaactcaaatcaattccatgatatggttgagctttggctactcgtatgcatcttacctgcaactacgagctacaagctaatggaaacattcttcttgctgattttatttctgacgctcgatttataacattgaattctttataattaagctgaatattattaattaccacctaccctgaactactcaaaatgaaatgt

SEQ ID NO: 210484 - DNA, 514 bp, Glycine max
  unsure (1)..(514): unsure at all n locations
ctctctcttgttgctctgctggggctccaagcgtgagagangaatagatttgattggagcctcaacttcattggctaggtacgagggatatttctctatccacagatattatattgcatatcccaacgatgttgatgtgcagaaatgatgttctaacttggtgttcaaaattcatgacaatccaacgattaacgagtcaaggattgtagttttactagaacaagtttgggtgtatgcgagacgaagagagttacgtgagagggatatttctctcaccatatacatngttaggcaaatcccgacagtggggttgtgtgaaaattatttccacacctgagtcattgaagtctcatataatctaatttagcctttatgctctatacaaatacttacttttagtccattctcatataattctcacaaataacgttaagttttgtctgatgtgacatacatagtgtattttcttaaattgataaaatgacgtgtaaactgtttattctctaaaaaagta

SEQ ID NO: 210485 - DNA, 417 bp, Glycine max
  unsure (1)..(417): unsure at all n locations
gcttttagctttccttggagattatgatttttttgttgctctacattgtgggaatgtgctcaaatatgtgtggcaactttggtttgctttcttgcttgattgggttgaattgtgggtttgtatgagatggccctaggcctataatgcattttgaagcaatgggacatgccacattgtccccgttctcttgctattgatgcctaaacgcgcgcccaccaagtgttcggtgaaatgcctcaatggcattatcgcgtgatttttgtaaggaaacaacccatggagcattntggtttgcacatattttctattttttgggacatgcattcagttccgaaagggctagagtaattgccccacatatatcctaggcctaggaaccaatagttttattgcaaagaacacaagagggggtgcata

SEQ ID NO: 210486 - DNA, 466 bp, Glycine max
  unsure (1)..(466): unsure at all n locations
cgtgcatntgtgtgcaatacacaatttcctgttttctcttcaaacaggngtatcagagaggtgtaatagaactctaatggatatggntaagagtatgttaatcaattagactttacctgtatctttgtggatgtatgccttgaaaactgccatgtanttgttgaacagggttcctagtacggcagttccaaagagaccttntgaactgtggacaaataggatacctagtataaggcacctgcatgtttatggttgccaggcagaaataaggacttataatccgcaagaaagaatattggatgcaagaacaatcagtgaatatttcattgggtatccagaaaagttaaaagggtatatgttttattgttctaatcatagtatgagaattgtcaaactggaaatgcaaggttcattgacaatgatgatatcagtgtgaccntacagtcacgagaaatggaattaaaga

SEQ ID NO: 210487 - DNA, 360 bp, Glycine max
  unsure (1)..(360): unsure at all n locations
cctancaagactacccatcatatctcccaaaaccccatacccacgaaatttaagagagaaagaagtccacccacacctgaattttcgaagacccactcgtatccacgcactttacgactccaaaaatgctctcctttcgcgatttggagcagaaatgatggccaaagggtgaagctttgcttggagcttcaatggagaatgagggagacaanatggcancgngagggagagagagagctatctgaaaaagtgtgcgggctgagtgaagagagaaaaaagctctctggttatacaaaaagggttctctctttttctattattctatttaagcaatgccacatgtcctcatttgagtggagc

SEQ ID NO: 210488 - DNA, 405 bp, Glycine max
  unsure (1)..(405): unsure at all n locations
ctacttatgtggcagggcgggctacctgtaccttcatggatcatcgcgaatnncgaccatgggtcttccttcccgcgatgcttcttttcatgtccgcctgagtgggcttatagcctaaaccatacttcccacgatttccttgggtatttatcaggctagctatgccgccgttgttttatcctaaacccatcccgggttcataaccgttccccaacataactcgagccatcattaccgctgcatcggacagacaaggctgcccaaagagggagtccacggaggaaatgctgaccacctcataagactggaaagcagtctctaacgattcttctgcgcgcttcacataaggcatggaggatgggcagcttaccaagatatcttcctcgcctgacacgatgaccaagt

SEQ ID NO: 210489 - DNA, 458 bp, Glycine max
  unsure (1)..(458): unsure at all n locations
agctntattcaagacaaagatattcaagatattcaatangtatgatcaagacagtctctagagtcttagaaagggtatattaaataggaagggaattccaattgaagtagcaaaaggtttggccaagaaatttaagttaanaagtctttttcaacaaatttactctctggtaatcgattaccagaggatgtaatcgattactagtggccaaaactgatttacaacagctattaaaatttgaattcaaaatttgcactgtgtaatcaatacacatatatggtaatcgattaccagaagtttctgaacgttntaattcaaantttanagcttgtaatcgattacacacatactgtaatcgattaccagaggagtttttcaaaatacattctcaacagtcacatctttntatctgattcttaagtggccatcaaaggcttatatatatgtgactagagaca

SEQ ID NO: 210490 - DNA, 424 bp, Glycine max
  unsure (1)..(424): unsure at all n locations
ctattataatctaaagataagtgctaacatttttatcccaaaaataattaaattatggcacttatcatgtacccattaatgtcccaaccactactagaaaaaacattttctatgacaacaaaacgacgacggttcctcaagaaccgtcttagtatgtaaggtagtgacaattntgtaaatatggggtcttagaaactacccttccatgacggtttcgcaaaaattgtcttaaaagactgtcattctaagacacttttgtaaaaatcgtcttagaagagagcatgtntntaatttttatatctccctctcgtgcgcttaaatgtttgctcttcctctcacactctctctcactcttcgtaagtgagagccacagagacctctcactctttctctctttccctttcagatccctcttactagttat

SEQ ID NO: 210491 - DNA, 294 bp, Glycine max
  unsure (1)..(294): unsure at all n locations
agctattggtctcctgcctactctcctctcctctttgaacttctcatttcagaaatactntcaatgatatcgctctgcctatgcttcttgacaagcttcccttgctgcaagaagccatttccaaagtctcctttgaataatttggtctagcatttgaaaatctgaacgctcgcagtttggaagcaaatgaatggtgtaatgggtggaatggcactatgaatgtataccatatgagggtatggttagaatgattttgaggagaagctattagccatgattggtcttggctacctt

SEQ ID NO: 210492 - DNA, 466 bp, Glycine max
  unsure (1)..(466): unsure at all n locations
agcttatactanaatgaagcatgcttatctctgttgtttgtatatngaacaacactctcataatatcatttttttttgtcattgctctctcaatactattcgttcgttcttcgacacagacacatataagccaaatgcattatctaaagtacattatcgttatcttaagctctgccgatcctatataataatattgcatactgcatttcttgaaanggaannnnacacacatataactaagtgacaagccatcatgtttaactctgcgattaagccttatgaactaatttattattctttagaaactaattttgaatactaactaatgaagatgattgcttagtggggaagcatacatgatgcattaactgatgaagtatgacccacaaattattatataacacaaatcacatagtcaaataatagagcagttgatcaattaaaacaaatttccttgaaataactg

SEQ ID NO: 210493 - DNA, 463 bp, Glycine max
  unsure (1)..(463): unsure at all n locations
ctaagaaagcacaggagactataccagaagtaccaattcttttttttcctattntattggcaaataatgcaactaatttcaggaatttcacaaagtagtggcataccaggtagaattttgtatgatttccatgcaggcttattggcatcatgctcagtccctttgtcatcattttccttgacaccagatggcgcattctgcagagcatngagtattattatattgaagaaagatgcacaggtttcatcaatttgagtgaaaantttaaaaattatgaatattattatattcaataaagatgcaaaggtttcttcactgtgaaaattcaaaaatttatgaagacaaacagttccttgttgcacttcttcttgcttcttttgataatgcatggctttntcagaatgaatgatgttgtatttgggttattggacctgttattaaatgtattggcactttgattctc

SEQ ID NO: 210494 - DNA, 406 bp, Glycine max
ttcgtaaggtttaaatgaactttggatagattcttgaaatcccttcatagcgttttattagctttcgagagaatagatgagttaaatagaagctcatataagtttttctacgagattcagggtcatcaaaatttacctcatcttcctagtctgagttagacccttcggaagttgtgttcaccatcaagcatatgcttgcttcttcattcgcttcattagatgaggtttcatccaagtcttcccacatgctcataagccctttcttttctatagtcttcaagaattgcttcttatcttgacttttctctagatttggacatttagacttgaaatgtctacgccttttgcactcatcacaagctatggagctcttgtctttatatgtcttgccttgaggcattcttct

SEQ ID NO: 210495 - DNA, 303 bp, Glycine max
  unsure (1)..(303): unsure at all n locations
tgtatcttttatatgaagcaactctgctgaggtaaagcttcagtggtaattttttggtantagatatatacaatgacccattgatttgatgtgttagtgtgtcagatcatactgacatggtagaagcttccttcgagtctttgaatgtgtgcttttgaatgttatgtgaatgttgatagctgaaaagaacggatagttgatggctaatgcctctcactttgtggattctcagccttcaagcagtgatatgtcacgtaaaagaaattaatttcttttggcggtagtgacatatttttcaaaaca

SEQ ID NO: 210496 - DNA, 412 bp, Glycine max
  unsure (1)..(412): unsure at all n locations
tatataccgctaattncgggtgatatgtgagaatgaagctactttaactcctatatataaccattgtataatagcaatatggcactttgagcaagaattactctctataagttctcatatcaagagtcaaatgctattgaaatggattaatgcacaatataattggtgtgtatcaaccctaacacaacaacactaccacataaacacacaccctatgatccacaattngaaacgaagggaaaaagtcatgaaaagtgaacaagaagagaacctagctgatgtaagctccattggagcttgtaggcctaagatcttcttcatcaatggattcctttgcttcttggaagatgaatggcagcggaatggagaatgaagatggagaggaaacgccacttcaacgagaagatgagtc

SEQ ID NO: 210497 - DNA, 389 bp, Glycine max
  unsure (1)..(389): unsure at all n locations
cttgaaagagcctgggtagtcaaagagaagttcaagtccatagccatcaaagtctgaaaagagtatgatgaactaagggatgtcaatatggccaccgatgaagccttggaatgagaaaccaagaaggcccgaaaggaagaacacgaccaaagcaaagttttgaggggctttatagggcagcaatagtgagctcaagctctgaagagggaaaggaatcattacgggtcanaggcatgatcttgnaggacgagctaaaggtttgccttatgtcaaaagaaatttgtccaacagttaagcgagactgaagggaatatgtgggccatcatcgataagtgcaaagagaagctaaatctagccgcgactcacgagcaaaggctagaggatgagta

SEQ ID NO: 210498 - DNA, 369 bp, Glycine max
  unsure (1)..(369): unsure at all n locations
atgatgcttgtgatgtttgtatgctgaaattgcttgtggaaaaactgttagagatgaaaggtagagtaaacctacggttggaaagtgagaatgtggtgttatgagtggaaaaagagtgaggctctgagggttggaaggttaagtctgaattctatggtaaatggaggttaaagtgagttaatactagcttgaaatgtcatttatgactcgtgagatagcttggactgtgctagagagaaaaacaaatgatcaaagtgaataaagagccatttctagggcaaagttgtgtgttgaggagtcaaattttgattcggtggaagtttaggtgtaaatccagnttgagcaagtttagaattgatgtatagactt

SEQ ID NO: 210499 - DNA, 334 bp, Glycine max
  unsure (1)..(334): unsure at all n locations
tcattataaggcaacgcatccgacatgatcccatgatntactaaagtgaaacaaaatctagtgcgaatcaaaactccgacatctatcatgggtggaatcggatgaatgcatgaagacatgcatatggcatatatgcaattcatgaataccggagcccgggaagatgtctccttcttatatacaacgctctcggggtagcacagcgctcgacgtatcgatttaagtaagtgacacgcaccctccgttggttactcaagagagngatcatgcacaatgcgtgtgtatgcatatgcgacaggtcaacacggaaatgacatttatgacaatttcacaa

SEQ ID NO: 210500 - DNA, 495 bp, Glycine max
  unsure (1)..(495): unsure at all n locations
agcttgtaaagaaaataaaagaggagccaagttttgccttagaggctatgcagagagcaatcaagaacatcttatgataccttgtggactttgtataattggtaataattcgacctatgctactatttacaatggtagctggagccatgaacatttggacaatttcaaaaactagctcactatctattatagtaccaatgcctccaattgctttcacaacagcttcactgtcccaagtacttaatctacagtatacatattgacctttcaccttctttggctctaaggagtcatcatagcataatctgtcaatgcattgaaatggtactttgttaatatggaaagcttaactaggtgttgtcaaataaacaaaaagatatatacttagcattttncttgcttcacaaagtataatcagtccttatcatgagtggtccataaccacagcgttcatttagttacatgatattttttaagctatcaattgtaactttt

SEQ ID NO: 210501 - DNA, 493 bp, Glycine max
  unsure (1)..(493): unsure at all n locations
gcttggagatggctntctagtcctttgaggtaatgggcaacgcttctgtgttatccctcccgatgctgcccctcatgtctaatgctgcaatgatggtagcccgcgcgatgttacggcacgaatatgagcccggaatgggcttatggaagaacaatgatggtgtggccggcttgctcgaattcaaggaaaaccgcgggaggtttgggctaggctataagcccacattgccaatgtaagaagaggctccctagagaggagaagcacgggcttaagccaacagcaaaggccataggtgaaagaaacccttccatgccacatcaacaagaagttcgtgagtgcgggctggaggtgtgaatggcaagtcgccatgatgcatgatgaatcccctcaagagcgtccaacttggacaactggccttctgatttcaatangaactggcagtggtgaaaacccgcgttttatgcggcatatgtaatcttactttatctatggt

SEQ ID NO: 210502 - DNA, 307 bp, Glycine max
  unsure (1)..(307): unsure at all n locations
gctgcgtctagacttacatgagggatctgtggacaaaacttcagttaagttagtctaaacctaagagggttgtctaaatcgggtgtagtcttaaatgagggatctgcggacaaagcttggatattcagcctggcgagggatcgagggtttatgtaattcagctctatatctacctcattaacccaatgatnanagaaatanaaacaataccaacaccggccgtcagaaagaccaacacaactcctcactgtggctatctcatcatctcgctttctcacctatatcattcaaatcttttaatttgcta

SEQ ID NO: 210503 - DNA, 488 bp, Glycine max
  unsure (1)..(488): unsure at all n locations
ctcaagctngtgtgtaatggggttggctccttcccacattgctttcattgatgatngtggaatcacagccattgatntcaatgttggtaagtctgatcgcaacacgataaaagtcactggaaagcagaagaaggtacgtatttttctcaagtttgaattttcacgctctccttctctctgtttctagatatgtatgaagaattagtaaagctgattcctattgttttttggtgcaaaattgagaaatactttcatattagtgatattactcttaagactagaagtctagaatgaatggctttgtcgttggtaatgatatcctttcattatttctccaagtgaattgagttgcaaactttagcaattaataattaaacttgtaagcattaggcacttatccagctcacgngtgtgatattggtgcatacattggcagccatttccttggttagagtctctattttgtctctggagctgtggtacgtcat

SEQ ID NO: 210504 - DNA, 367 bp, Glycine max
  unsure (1)..(367): unsure at all n locations
acacacaagcacttgcacttcgaaatttactattacccttgaaatttcagaagatattnttcatataaataccattaaatagaatcattgtatgataataaagttggtacatataattgggtcaagctgctggctacctgaaaccataccaaaatctagtgttgcataaagagtaggtcatcanaaaattgagttaaccatctcattaaagagaacgccatgacatntctcttcagttaacacctgcatgaggaaacccattttctttgntagtttccccttttcactgccccttctgcttccattgcatggctcgtttcaacactcctcaccctctcaatcaataacacctttactgcaacaacta

SEQ ID NO: 210505 - DNA, 433 bp, Glycine max
  unsure (1)..(433): unsure at all n locations
aaaccagctttctttagctaagatcttcacaaaatatgggtattgtcatattgggtgacaagggtcaaacaagtacaagttggacttttggcttaatggttattaataaacatggccttgatcacttctatgcacacaattacaagtatattgaacaagtgactcaatcaacatcaattgtgtgtgagttaagtatgacattcaattatcaaacaatgtaattcactcaacttaccaattaggctacaagtcacttaagatgctttcacattcaaataattggtttaaatggtcaaagcacatattggtagtacaaaaatctccaatgttggagaacaaattatgntagtcatcaaatggcacctgaccatcattttaacgctaaaccattaagcaagattttgaataagtcatatgaacatttatccattat

SEQ ID NO: 210506 - DNA, 487 bp, Glycine max
  unsure (1)..(487): unsure at all n locations
tctcaagcttgtcattgacacagagagcattttttctcttgagctcgccgtgttcgtgggtgggactcgcggcttccaacagaaccaggcaaccaccgcatcgcattgctgtgtcgtgtgtcgtctagtctcgcgtcatctggtctcggctcgcactctcgcatcgtctgagcagctccaactcgccatgaatgaagaacagggacaaacacaaaatgaacgaagcaaaattcctacactaaagtggagcagtggacacaaagcgacgccatattatggaaattttttttcaactgaactcgtgtgactcggccagactcacgagtnacacaagtctaccgtgagtcaccaagcttgaaaaaacgtgtttgctttgagttgactcacagaaccaagtaactctaaactcgaagagtcatgagttgactctaagttgataccatgctgcccttatctattcgcatgataggaacatcttcaaaattat

SEQ ID NO: 210507 - DNA, 444 bp, Glycine max
  unsure (1)..(444): unsure at all n locations
agagggagtaacatccctagttacttgagggactacgagcttcaagtctaagaagctctcgcatgatttgcagaagcaaggatggtgcttgggatactctagaagttgaggggtacttgtgtaatanagctgttaggccgttatgttgttaggttgttacgcaactaacggaatgtataaaagctgggaatgagcttatgaaagcatgatgaataatacgtatagtttctctccctcaatctctctctctcttcttcttcctcgcgtagctagggccgctcgtggaggtcaccactaacattggtgcttcattgaatcctctctgcatggctgaactacacgttcgaaaccagcatgcgctgggaagtgcattcgcaagctctcgtgccatgacttcaagtcatgacttctagttcatgaacagtagaactctcagccactcca

SEQ ID NO: 210508 - DNA, 331 bp, Glycine max
  unsure (1)..(331): unsure at all n locations
gactatagcatcatntctggcgctaaaatgctgtgagttggaagccatcttctcaattaaatttctggcttcagcacgagtcatgtctccaacggctccaccactggcagcatctatcatacttctctccatattactgagtccttcataaaaatattggagaagcagctgctctgaaatctgatggtgagggcaactggcacatagttctttaaatctctcccagtattcatacaggctctctccactgagttgtctaatacctgagatatccttcctgatggttgtggtcctggaagcacgngaaatttntactaagaatactctctta

SEQ ID NO: 210509 - DNA, 329 bp, Glycine max
cctgagtacattgctcaattgatgcactcattgagattcaaatattcttctagacgcactttgtgatgaaatcatattattaccaatgaataaagcttggcaggttcatatgcatgttgatcaatactatagatatgggatgtatcttacagtactgatttgaatgatctttaatgtcaagtgctcatgcacttgttaggctcgacacagggctttttggtcgaggtatgattcactcctcttaaaaactatgcaagagaactattttggtcaaaaagaaatatatgctttcaaaccaattgccctggtgattgggtataagaattaaa

SEQ ID NO: 210510 - DNA, 303 bp, Glycine max
tgaatggcaatcccaaaggaagaacaacttcaacaatggcgtattctttggcggcagtcatttacccagccaacaaatttatctggtcaaaagattttgcggtctctttcctaagcttcctgtattgatcaagaaatattctgcttcttctttgatctctgttctttatactttcatccgatcttcgatcgggaaggactcttttgcttttctttcgctttctgttcatttcctcctctctgatctctgattgcgcaattcaggctttagcattcgctatacactctcccttgaggagatact

SEQ ID NO: 210511 - DNA, 364 bp, Glycine max
cctaacccgaatcacaagagtggccctaattttggaatttatgagagagtgatgacacctggaggaactggcgcgcattctcggcggtctggcccttgacgactctcaagaaaaaagagaccatgctctgttgctcattcgcggacacgactctctccatagatgatccttattcgttccaattccggaaggattagggttcagacacacatgaagaaaaatgatgactcctcttatccaactaacacacgccatactccactctcttcgagtaatgtaaccgcattatgcaatatcatttttctcttaacgtttctacttataaaagattaataatggtcatattcaattattttatatcaat

SEQ ID NO: 210512 - DNA, 270 bp, Glycine max
acgcccaaaagacacctccaaagaaaaaagaacacccgaaagaagactaccaagccgaaccccaaccaacgagaacacgagacaacagaaacaccccgcgccacaaagagaaaaaccaaacggacaacgaaaacgcttaaagaacaaaaaacacgcacgtgcacaccaaaagagcgccccggacggacggggggcaaaccccccgcgaaacacccgaacccacaaaccgaacggcccgcgacccacgccccaaaaccggggaccccgcga

SEQ ID NO: 210513 - DNA, 366 bp, Glycine max
  unsure (1)..(366): unsure at all n locations
cttatattgaacctttcttcataggcttgaagagaacccatcaattggtctacggtcattgagtataaatccttatactcttcaatagcacaaaccacataatcaaatttagcaattaaggagcgaaagatcttttccaccacacgaacatcttccatatttnctccataacgcttcatttggttcacaatagccaacaccttgttgcaaaatctgaatagattcggattcctcatatgcactgatcaaactctctacgtagagtcttgacgcgcaccttntntaccttatcaacaccttcaagggaggtttcacaatctcccatgctctcttggatgcggttgcatttgacaccaactcgaacat

SEQ ID NO: 210514 - DNA, 419 bp, Glycine max
  unsure (1)..(419): unsure at all n locations
tctacttatgtggcanggcangcttactgtactttcttgtctcttacgcgagccttgaccaccgctcttacttcccgcgatgctattcttcatatccgcctgagtgggcttatagcctaaaccatacttcccacgatttcctttggcatttattatgctagttatgccgccgctgtctttgcttaaacccattccgggttcgtaaccgttccccaacataactcgggccatcattactgctgcatcggacaggcaaggctgcccagagaatgagttcacggaggaaatgctgaccaccccacaaaactggaaagcggttactaatgactcctctgcggcctccacataaggcatagaggatgggcagctcaccaagatgtcttnctcgtctgacacgatgaccaaatgcccctccacta

SEQ ID NO: 210515 - DNA, 351 bp, Glycine max
  unsure (1)..(351): unsure at all n locations
gagattgagtttgacggacaccaattttgaagagatgagcatcagcgccgcttcttaacaatcaaaggttggtcttttctcaaagagagacgggtcatagtccaactaagggagggggaatacataaaattccaggaggagggttcctggaggctttggactctactgacagagcctatggctaaatattacccacagatagtcatgtaattctatgcaaatgcctggcccaccgaagaaggagacatggataagcgctcctgtgtgtggngccaatggatcccctatgatgaagatgctatcaatcagttcctggggcataccatggttctagaggagggacaacgttat

SEQ ID NO: 210516 - DNA, 376 bp, Glycine max
  unsure (1)..(376): unsure at all n locations
acaaggtatggaagaatatggaatntgtgttttaatcccaaaggaatagagaagcaatgtggaataagtgcaaattaagaaaacatatgacaataaaaaagaagttaagacgaaacttatacataatgagtagaaccaagagactcatcattcttttcctattcactcaactttactgtcattctttttctttatcgattgttttattagctctgaagccttttgagagacagcatcatattcagcatgtccaacattataccaatatgcaatgtatatcaagtatggctcacaatatatcatgaagcatggccaacacaacatgttattcaatgagacaaaaacccccacacttattcctaaacaattccaagct

SEQ ID NO: 210517 - DNA, 438 bp, Glycine max
  unsure (1)..(438): unsure at all n locations
gcttgcgccgncagcaccacatacgctgaagtctgtgcgataataancgccgccggggaggcacagatggtatcagctgcgccacgactgataccaacgtttaccatcaccggaaatagggttgccatcagcaaaacacccagaccggttgcggaagagacggccagagacatcagacaggcgacaaaataggcggtaatcatcagcaggtaaggggagttaatatactgcaatggtttcgacgccagcttgaccaccatatcaattccgccgatttgggtcatgtaagcggcaaatccacacagcatcataatcatcatgccgaggtcgccgncgcggctcattagttatattttaacgtaatcaacgatatccgtggcgctgtactctgttgaacctgcttgacggtaacacttgtgcccataatggcctgataat

SEQ ID NO: 210518 - DNA, 322 bp, Glycine max
  unsure (1)..(322): unsure at all n locations
tattatttactgtgcggcctggagacaggatatattatgctgacattcattgagctccttattgtggttgtggttattgtgggtgtagctcgctacatcattaaagggtattccgccactggtgtgttatttgtctgcggcctgttattgctgattatcagtgccattatggggcacacagtgttaccgtccaaccaggcttcaacaggctacagcgccacggatatcgttgaatacgttaaaatattactaatgagccgcggcggngacctcggcatgatgattatgatgctgtgtggatatgccgcttacatgacccata

SEQ ID NO: 210519 - DNA, 465 bp, Glycine max
  unsure (1)..(465): unsure at all n locations
ttaagtcacctgcggcatgcaagcttgattaacacccaatatttattgtcctaccatttcattacttgctntaaacaaaccagaagagatntgtaggttgagtttgcaaagagactaaatctagaattgccttacagacaaatatatgatcaacacatagtctttctctctcaatatgatcaatgtgttttgagagctctntataactttacaagaatatacataaagctttgtgtagaaagaataatgaatgttttttcgcacaaaggtgattcttcaaatctttaaagcttctagtttacataggcctcgtcttcaagtgttcgttggctcataatagacaaatttcttcacttaatctttgtccgatgaatgtggttgttgggggcatttaatgcttgcattaagtgcatgtcccttcctcatgtagagagttcactctgtgaagcttacatgtntagtatt

SEQ ID NO: 210520 - DNA, 393 bp, Glycine max
  unsure (1)..(393): unsure at all n locations
actcagctatagtatgcccgagtcattcatgcgtatgagatgttgttgatttattggcgatcagaattgcattccttggattatatggttgaaccaagctcatgcttttacaaaaaggttcgtcaagtcaagttgaaatatggaagtaaccgtcctgctaaattggtgcaaaagatgaattaagtcacatcactgcttcgtctactgccaaacatatttaggattgttgatgtccttgttacttccagtttcaccttgacaaagatgtcatggaccatgttgaaaatctaaattgattcaaccccatatcctgcgtaaaaattcgcaatacttcgactgtacatcattcgcatgcatccatgctctncattgngtgcattgctcattgcattc

SEQ ID NO: 210521 - DNA, 387 bp, Glycine max
  unsure (1)..(387): unsure at all n locations
caatcaactcttagatgtccatggtgattacattcataccactttggaacagaaggagatgtttctccttttttctttggattgaaaattggtcttctttgattctctttgctccttagaaacttgttgaatatctttaccaagaaactaaaatcatcatcttcttatatttcattcaagtcttctttgtcactttcttcttgattagaagatgacgctttaaatgcaattcctttctttttcttggcattttcttcatgtngatataatctcataagttccattgtgtgttcctgaagctttacaaaaaaagttgcaagagacatgtcatcgtgatctcttgattctgcattgcacataccttggttgccttccctgctaaacatc

SEQ ID NO: 210522 - DNA, 464 bp, Glycine max
taaccataaaggttgtccttcttcttgtgggtagatttcttcagtagattcttcgtcttttcctccttcaattacgtgatcccccctctctctttatctatctctttcttttcctccattgaagcttcctgtctaagcttcttatccaaggcactctcttggtggtgatgctccttcttctatggcttattccctagtggatggcgcctcctctcacctcttctcctttatcttccgctgcatctccatggtggacaatcaccattgaaggacctcattgaagctaaaagattcagcctccatagaagcttcacaagcaagcttccatcacttttgacgactgttaagtgagaatccttagcattggcctgataccttgcacataagtaagcacttagcatgacatatggtctatttttagttaagtagaggagtgatccatcataccctatatctaactcatc

SEQ ID NO: 210523 - DNA, 506 bp, Glycine max
  unsure (1)..(506): unsure at all n locations
tactaagcttcttgagaatacttcttgagaatctagagcgtagctgcacactctttctctcataactaagctcacttccttgagaagcttccttaagaagattcctaaagaagctagagcttagctacacatacctctctaatagctaagctcacctccttgagatgagaagccagaacttagctacacaccccctataatagctaatctcaccctcatgacaaataaacatgaaaatacaaaaaaaaagttcttactacaaagactactcaaaatgccccgaaatacaaggctaaaaccctatactactagaatggccaaaatacaaggcccaaacgaaggagaaacctattctaatatttacaaagataagcgggcttatacttaacccatgggctcgaaatctaccctaaggctcatgagaaccctagggcctctccttggatctctagcncaatctacttggagtcttctacccaacgctcttgcgggagaggatcacatca

SEQ ID NO: 210524 - DNA, 440 bp, Glycine max
  unsure (1)..(440): unsure at all n locations
gctgcactacgannctaagatacaataattatttttttcttgagaaccaattagccaccaaaagactccactaatctcaaagcacatacctgtagtatacggctcttggacatattgacaaactgacaaagcatctaccgacttattattcctccaaacacatccttccatgtgctagttacacattctctcggacattctgtgagacaatttctgcctaccaatgctttgcctctttgaacagaaaacaaaaacaaaatatgcttagtcattccctactaggccattccagctacaaactgttaattgccatcacatcttttgatttgagctagtgccattctatttttttaatattagaatctatgaggattaagtgatattattcatagaaatctacatgcatacttataatagaccactaagatttatccttccac

SEQ ID NO: 210525 - DNA, 302 bp, Glycine max
  unsure (1)..(302): unsure at all n locations
acaattcaatacaaattgcactcacgtaacgaagttgggcatgtaataaagacannaactcttcatagcttgatcttcatgttgctccccttatctctaacaatctcctcatgttcaacttgaagacgccaacctctaatttccattgagtgcatttggagaggcttgagagtacacacttatcttatgatagacctgaatatgactaaacactatggtgaagagaagtgttaaatcatatcatcatcataatagagtggtccataaatgaatcaaactgtatgtatatatgcaatacttct

SEQ ID NO: 210526 - DNA, 385 bp, Glycine max
  unsure (1)..(385): unsure at all n locations
agctnnatgctgagagagtgtctgtgattttattatttactaccatgnctaaatntatgtctttctgatggccattctctccctatttgccacaccacttacagagggagaagatctcttctctacaactacctctttatgttaattaattgacaactctaacacagataggaataccattacgatcggcatatatataatacgggctttatatctaaatatggctctaatggtattttgcgcaccccctacattaaacttctaacatatattggtaaagagtgttaatacgacctaaagtctattacaaagagattttataanaaatataatatgcacaaacactcaatcatgcataactaatccattatatatgataaatttg

SEQ ID NO: 210527 - DNA, 335 bp, Glycine max
  unsure (1)..(335): unsure at all n locations
tcacgcagaacacataatgaggacaatagatctacatatatattttttcaagaataccactggagaaatgttctagcatccagcggacactttttgcaaaggcaatatttaacataggtcggttccatgtatatcagaaatattactaaatcaaaatatactactaggacatatatactattatttatgacggtacagtttttattctaaattttgaaacagtaataatatgaataagcaattgcacgaagaattaanaagagtgaaattgagcatgtaacacttgcaaacaagcatggggggaaatcaaagacacattcccttacatcaaccat

SEQ ID NO: 210528 - DNA, 358 bp, Glycine max
  unsure (1)..(358): unsure at all n locations
cacttcaccttacctcacctaacatttggctaacttcaggtgaggtgataatatcaccttctgctccaacaacatctcgattgatgtaataaccagctttaggatatgtcanaacctcggacatgtactcacctagcgaaatagggcctccacgatactgataataatgagaaacatccaataaaaacggtgagaccctagtggtaaaaacccatttttatgatgctataattgaatacaatagaatagcaccttgactatgccttngatgtgttagacgagttcggaatcagaagaggggtggagagaatgctctggctcataagaataaccttcatgtgagagcttgaataataaa

SEQ ID NO: 210529 - DNA, 441 bp, Glycine max
  unsure (1)..(441): unsure at all n locations
ctaagctctggcaantgacctatttgtgttgaaaactataaatatattattataaataacanaaataaaatcctatctaagacaaagtattaattgaatttaaaactaattagattcaaaacaagacataaaattaactgaaataccaaataaatgtcacaaagtgcatatgaaacttccataaatctgacatttatgaatcttcgaggtaaagatcatcataacacaaaaacatgtgtagataacctcaaccctcataaactttctctccatgatgctcgacaactccaaggacatcgtctatgtgctcccgacaatccaggagcactacaataacatgctcatatcaattgaagagtaccagaaccatgtggtgctgcataatgtggtggaagcatgcttcaattcaacatgtttagcttacaagtgcactgaacactt

SEQ ID NO: 210530 - DNA, 276 bp, Glycine max
aaacagaggaggggcatttttatactaccccccccctgagagtttttggaagattcctacgaactagagctaccacacacaccttctatacctagcgtcctccttggagggaagccaaacccggtcacactcctatcaagcaagcccctccatgaccggacttaaatacacaaaagcccttcacaagactaccaatatgcctaaaataaaggttatactcaagcttcttgacggccatatacaggcttaccatgataaccctgtctaaattacaga

SEQ ID NO: 210531 - DNA, 158 bp, Glycine max
tgaaattgtattcgttcacattccacaaacatacgagctcgaccattaagtgtaagctgtgtgcctatgagtgactactcacataatgcgtggctactgcccgttccagtaggaacctgcctgccactgattatgatcggcaccgaaccctgggcgcc

SEQ ID NO: 210532 - DNA, 331 bp, Glycine max
acctgtgctttttcttccatggtatatgtaaaaaaagcattgatcctgtcaagtttgatgagctggaaaatgaggccgcaattatactgcgctagttaaagaagtattttcccttgattctttgacattatgattcacttgattgtcatctggtacagacatcatgaatacttgatgtgctgtgcacctctataatttgaattatatgaggaacacggatgcatccaaagcctaagcaagagggtgggagcgtaatgtgatgagaaccttgttgacatggaacgtagattgttttacttctgaattgacactagactatatgaaagaataa

SEQ ID NO: 210533 - DNA, 296 bp, Glycine max
ttggagctatgcgtagggattgcttattgccattctccattctcaatcatttcggagcctcatgaattgcgtgatcgttcatgtgtcttccaccttcgagtttggagctatgcctagagattccttaatgaaaatctccattcttaacctttctcggagccccatgaattgcattttcagtcatgtatgctccaccttcgaggttggagctatgcgtagagattgcttagcgacattcttcattctcaacctttttcggagccccatgaatagcgtattcgatcatgagtcctcca

SEQ ID NO: 210534 - DNA, 524 bp, Glycine max
  unsure (1)..(524): unsure at all n locations
cacctgcngcatgcaagcttaagcattccactctaaccataagcttcttatgctctgcaaatagaanatttcttcagagtcctactccaattttttttcactgcaagtgtttcaaagagtttgattagacatttagtcttataaaactacgtaatatagagctctatgactattaagggtgtttataacctatacaatccaattaactcagcctgcaccaaactaatttgacatgtttggttttagaaattatactcataatgttcagagttggttaggttttatttcagttgtctccttcgcctatatcttctaaatcttaattttcttaataattctatattaaagataagacttcttgacttcatggataacatttcgcatatattgataatattctgttcataatattatagatatatatattatataaatacattcattattcttagcttctttaatatggctgaattaaaatatatatcaaagacagattccgcattatagtataaatctcttcttgg

SEQ ID NO: 210535 - DNA, 373 bp, Glycine max
  unsure (1)..(373): unsure at all n locations
cattcaatatcttgatgaggatgttccatatgttctctttactggactaatacatntgctacccaagtttcatggtcttgcaagtgaagatcctcataagcatcttaaggagttccatattgtctgttccaccatgaaaccccctgatgtccaggacgatcatatctttctaaaagcttttcctcattcactagagggagtggcaaaagattggatgtactaccttgctcccaggtccattaccagttgggatgaccttaaaagggtgttcttggagaaattcttccctgcatctatgaccactgccatcagaaaatacatttcatgcatcangtaacttattggagagagcttgtatgagtactgggaaaga

SEQ ID NO: 210536 - DNA, 402 bp, Glycine max
catctgtttttgctaaacccgtagtaagccattctgctattggctactatgaatgctggtaagaaattcacatattaattgcaatgatgcatataggtagagtgtgttgttgatgagtggctacctaggggttgagtctactattaaatataaaacacctactttataaatcgatactttccattgatttgcgctcttggatctcgtcttgattgcttctatgaagacctcacaattataggataattttggagggatggtatactttctctcatatgtgcgctaggagaaatgaatttgattcaaattgtattagatgttatgcacccatcttatcgtactatgtatctttatataggtaattactataaacatgcatctatgcgttaattgatgtgtatt

SEQ ID NO: 210537 - DNA, 185 bp, Glycine max
tatgaactacgctgcacaatttggacttctgactcggtattatatttctctcaagtcagtaggctggattaaacaacaacaacactgtcttttccataattatacgcaaaggagaaatgccactttcaggcgtgtgtcgagggctaaatcacattactaggaatgcgaaatgggatgccacatct

SEQ ID NO: 210538 - DNA, 456 bp, Glycine max
  unsure (1)..(456): unsure at all n locations
agctngccacccagctcgcgcaggttagctatgttgcttcctccagaaggcaccgtcttctggagaacttcctggaatgccgaagtggacctggtttctatctgcacctccgtgttcactaaatacacctcttgccttttttgctgattcttatttcgcaactttacggaaacttatgaattacgtaacgatacttngtttctttctgtaatgttacgaaaccttatggatcacgtaatcatccccttttttagcttccgggatgtacagaactataggatgggcactagcacttctcttgactccggatgtcacggacttcacggttgtgaacaatgcttctttgactctggatgtacggaacttacaatgcctacgatggggcactcctcaagggtcaacaggtgcatcacaacgatgccccgacaataaggtgaagtgcatcttctgcttatg

SEQ ID NO: 210539 - DNA, 441 bp, Glycine max
  unsure (1)..(441): unsure at all n locations
cggagctcggagggcttatgaagagtcacagctgactatgtttttaatgagacatattcttccaaccaagacttgatagcataccatatttctagcccatcagaagcataaagatagtactcaatcacaagacgaactccatggggagcagatggatccttaatagcaactcctctgaattaaaagcacccaaataacattgattagcacaagagttatatcaagcctgaagacctgtttcttcttatgtcactgctgacttttatatcatgcaatcatgtggncgcccattgtatgcacttagngatctctttcttttattaaatcactgcgaacacacaactaaagccgagtcgaaacaagacgctgtttccacacatacgactgagctgaatccaacaaacagaacaatcttgctagaataaacaaaataattatata

SEQ ID NO: 210540 - DNA, 370 bp, Glycine max
  unsure (1)..(370): unsure at all n locations
cgctcgagatnnatatatccaattaacactaatattcataagcatgcagaaatatacgcatcatataattttggagcaaattatctcatgaaaacaatccgcatcataacagccattaggattcactacttttaataacagcatattttgttgggggtggggcattattatctctagacaaataatgtgcttaatcatataattgtacagtgactaaatatgatcccaggatcttgcgtgatacttcagacaccatgaatatcttatcttcctcttctgtatatttaccatataataaatgttcgtctcttaccatatctaagaaatccaaatgcgaaagaagaattatttgtaatgagcacntacttta

SEQ ID NO: 210541 - DNA, 424 bp, Glycine max
atccttaagtcacctgcggcattgcaagcttgagccaatatcttgactcatcatagactttgacccagggtgagaatgtcaatccttaccctcagaagcgaaaaaagatgagatggaaaatttccaatctaaggaataaggagaaggaaaatttccaatcaaagaggaagctataaaaggaaagaaggaacatgtccaatcataggaataagagatgaaaggaaattcccaatctttgagtgggagaaagcaaaatgaaaagaaagaaaattcccaatcatagaatgggagatagataaatagagaaggagatgaatgattgatagctcatgatcaaggatcgaaagataacaaaagaaatgtgcagagaggtctttggaccagacaatatctgaacaatacggaatttgcaccaaatgaacaa

SEQ ID NO: 210542 - DNA, 419 bp, Glycine max
  unsure (1)..(419): unsure at all n locations
ggatccttaagtcaccgcngctgcagcttatacatggatgtaaaagtgcattcttatatggctntattcaagaggaagtatatgtcgatcaacccnctggatttggaaactcagacaagcctaatcatgtttttaaaataaaaaaggctttatatggcttatagcaagcccctatggcttggtatgagcatctgagtaagttccttttataaaaggatttctctagaggtaaaatagatactactctgtgcataaagagaaaagtcaatgatatattattgggccaaattgatgctgatgatattattctattttcttctgatgaacaacggctatgggactcttcttaactttcttctacgatcatattagactctaagtacctatacatatacttcttngatggtgagacatttgac

SEQ ID NO: 210543 - DNA, 429 bp, Glycine max
gaccttatctttctatgaacaatatatatatatatatatatatatatacatatatatatatgcgggagatttactcattctaattagccagggacaaatacatatttccatccatgatggtgcgctattaataaagcaaaacaattacaatttctttgttttgtggatgatcaatcttgtaggtttgatcattaaacaacacaaaattttacgtcttgaaattagaaacagataagaatgggaactattatatgactaacaacaagttgtggttttatattccaacctgactaggataacaattactttctctgtgaatagaaaagcggttgtctctctttctctttactcgacatgcctattatttctatcaacataataagcactgaacttcgctgagttacacatcaaacactcaattgtcttgct

SEQ ID NO: 210544 - DNA, 418 bp, Glycine max
  unsure (1)..(418): unsure at all n locations
atgatatatataataacgcattattctaactaaacagcatatgcaaataccacatatcaacatatacaaaaggaaccaaagtgacttacttcactgccctactgagttgtgatatgagaaaccaatggaaaatggaggttgaagcaccaaagatgccaacgagaaagtgcagcaatatcctaagcatagagcaagaacaatgagagaatgttatgtgaatgcaaaagataaggacttacaccaagaaagataagaatttgagaacgtgaatatgtagcaatcatctaaattcaagagaatattaacatagtgtatctacttgaaattgagaatgtcatnggtacatgatgaagctgacaatgatacgtgaataccagcgaaaggagatgaacgaagaattgtcatggagaacttatgt

SEQ ID NO: 210545 - DNA, 279 bp, Glycine max
  unsure (1)..(279): unsure at all n locations
tgctcataattatcatgctcatgatcaggatgttcaaaatcaccaataacagaatgcacagattcaccagttatggaatgctcataatgatcaanaggtataaaatgatgcctaactaatctatgaaatgtcctatctatctcacgatcaaagggttgtaagtcagatggattgcctccagtcatacactacattcagcatgcacacaactagttgccttgtcatgtaaatataggtgtaggttgaactacagctacccttcaataatatccaaatgac

SEQ ID NO: 210546 - DNA, 381 bp, Glycine max
  unsure (1)..(381): unsure at all n locations
ntgagtctgacggatagtaaatgagactttgtgcagtctcttccggaacccgcatacatctccggggaaggtgcagatgacgacgttagtcatcgcatgctattgggctttgaatctcacgaatagcaaatgagactttttcgcagtctcgaccggaagatgcctacatcacttgggaagatgcagatgacaatgttagtcactgcatgctatcgggcgctgagtcttacggataacaaaagagactgttttccagtctcaaccgaaagacgcatatatcaccggggaatgtgcagatgacaacattagtcactgcatgctattgggctttgagtcttacggatagtgattgcatggtatcaggccttgaatctgacgggt

SEQ ID NO: 210547 - DNA, 353 bp, Glycine max
  unsure (1)..(353): unsure at all n locations
gatgtgtatctacatataaaatcagcgagctaaggagtaaaacttcaatgaaatcaacaaacagaaccatcacaggcaaattatgtcaacctgtttagaactgatcacaagaattgcaaattattntttagaagataaagtatgtgctgggcagttaactaggtaaccctctttaacatatccctatgcctgtcctttcaatagcaagtggcagaatgatgtaatcacatgatatatttttacccaacaaatggtaactgaattcattactacatattcaactgatcaaaatataatatgttatgtattcacattcatagaccacaagagatgtgaatagataagtcataaag

SEQ ID NO: 210548 - DNA, 402 bp, Glycine max
tggagagactttatggacgcacaatctatgacccgcccatgttttgaaggatgacattgtaattccttgtgtggaaagaattcatcccattctctcacaaatacagatgagaaataagaagtaatgatggatagcactttgcttgcacgcctttcgtggaacttggaggtcttcttgaaaacaaaagtatactcatcactgaacccatatgcaaagactacatctgcatactcttcaagaacctcaacagcacaagagttcatcaatttcaaggtatttgaatcatgaggtttatggagcttactagccttgatccaaacaatgatgatattgggaaacatggcctcatcctcaacttcaaaaaacttgacatactcatatttgctgtttgcatactgatgc

SEQ ID NO: 210549 - DNA, 297 bp, Glycine max
agcttcagaataaagtgatgaggtagaagccctataggcaaagctggaaagagcccgggtagtcaaagagaagttcaagtccatagccatcaaagtctgaaaagagtatgatgaactaagggacgtcaatatggccacagctgaagccttggaacgagaaaccaagaaggcccgaaaggaagaacacaaccaaagcaaagttttgaggggctttatagggcagcaatactgagctcaagctccgaagaggtgaaaggaatcatcacgggtcataggcatgatcttgaaggacgagct

SEQ ID NO: 210550 - DNA, 221 bp, Glycine max
  unsure (1)..(221): unsure at all n locations
ngcttccgggtgttgctaggtgcacctatcattattgttgatgcacccagcacttaaggtaaaatgacaaaaatatccttgatccgtaagtcatttaagttgattcgtaaaagccttacggatcaacttgattcgtaaaagtcttacggatcaacttgatccgtaagccatttaagttcttacggatcaacttgatccgtaagacctttatggggttcggg

SEQ ID NO: 210551 - DNA, 241 bp, Glycine max
  unsure (1)..(241): unsure at all n locations
aaagacccaaatgacattgagatatagtttcacatacatatgtgaaaattttaaagactcaagtttattgtgtcaaagatggtgatatcaatcctaggatctttcactctttttgcactacaagaatgaaaatgaataccattgcttncctaactcgtgatgatggcatggtggtgaccgatcataaggacatttgttatgatgcaaattcttgtttaataatatgattatggggctacta

SEQ ID NO: 210552 - DNA, 303 bp, Glycine max
  unsure (1)..(303): unsure at all n locations
gctcgagatgangaagtgtagaagggagaaacttccttcttctattcgcagactacagagtggtaccaggagatatgtcgcgagggtcaagagaccttggggacgtcaggtggggtgctattgcccaaaaccaagcttgaccaatcccgacccaacccgggcatagtcagtcagtgagaacctatgatgtacctaaacaggcgagctcctggcagtcaacagataaaaggaacatagaccacaaatctaggaggcttgtgtggnggctggccagctgtgaactntggttgatatatgggatat

SEQ ID NO: 210553 - DNA, 330 bp, Glycine max
gcatcctgctgtgcttagccccaaatgctcactgtgacttacaacttcaagttgggcttaacgtgaggctagcctaaacgcttgggtttctaaactcaaacgtcatgtgggtacgctaatcgcaactgtgcgctaagcgtgccatacaaatttcaagttttaaaaaaaccaaaggctgatgcacttgtgtgttaccccaaataacctttagcttctgcctttgttaactatgagcaaagtgtgtatttctattgcatgtgtgtcctgctgcgtgtctacatcttctttgcttcatttcaatcacaatacaagtaagtgggtacattttca

SEQ ID NO: 210554 - DNA, 366 bp, Glycine max
  unsure (1)..(366): unsure at all n locations
agcttnctcaatttttgtggattgatgctcttaagacggttgtcgatatattaaactgagttccaaccaaagctgtctcatagacacctttcgagtcattcaagggttggaaaccaatgttgcgacatatacgccgttggggatgcccgtctgaagtaaaaatttataatccacaagagaagaaactacaccctaagactattattgggtattcattggatatgctgacaggtctaaagggtatacgttctattgtccatcccacaacactatgatngnggaatcaaggaatgcaaaatttcttgaaaatgacttgatcagtgggagtgatcaatttcggaacatatcttctaaaagggatcacta

SEQ ID NO: 210555 - DNA, 309 bp, Glycine max
agcttaccaccatgggaagccatggataatagctcgatagtatgagaggatgattacagggagaaagagcatgatattctttgcctcaaatgaggtctgaactttgaagtgtgattctcaaatgatcaaagttaaaaaaatgcacatacatgacctctatttatagcctaagtgtcacacatacatggagggaaatttgaatctctattcaaatttcacttgaatctgtggagccaaattttggagccacaatttcactaattatgattagtgaattttagctatgggtcagcccactaatccaagatc

SEQ ID NO: 210556 - DNA, 187 bp, Glycine max
  unsure (1)..(187): unsure at all n locations
tgcttctacagagactatgccntatatcagcctagctctatcctctgtcaagtcagaagtgtgtgatgtgggggccaaattggagtatgatatgacactccacaccttgactagtgtggtcagacccttcctgagaatcttcctaagatggccctctgagttcaagatgaacccttgggcaggtatg

SEQ ID NO: 210557 - DNA, 439 bp, Glycine max
  unsure (1)..(439): unsure at all n locations
agcttctagcacactccagatattgtctcagagatcccttctgntaaatcatggtaaagtgtcttgtgaagctgcaaaccaaatttcgagaagatccaacggttaacgaatgctgggcagcatttctactgaggcagcttcatgtagttttctctagaagcttcattaagaggcttcctccagaagcttcctcatggcttctttgagaagctctctcaacaagcttctttgagaagctagatccttatctatccacacccctctattaactaaattaacttccttaataataattacggatgaaaataatgcaacaaataatcaaacatcaaacattattactatatatatatatatcagggtggtacacatggtatacttgagaccgtatagtaagcatataattgagtataccaagaacaatgcctttttattgact

SEQ ID NO: 210558 - DNA, 303 bp, Glycine max
acctcacgcactcctctatagactattgcatcatttctggcgctaaactgctgagagttggaagccatcttctcaatttaaatatctggcttcagcaggagtcatgtctccaagggctccaccactgtgagcatctatcatacttctttccatattgctaagtccttcatataaatattggagaagaagctgctccgaaatctgatggtgagggcaactggcacatatgttcttatatcgctcccagtactcatacaggctctctccactgaattttctaatacctgagatatctttcctaat

SEQ ID NO: 210559 - DNA, 371 bp, Glycine max
  unsure (1)..(371): unsure at all n locations
ctactatttaggattgcatgttccttccactatagttaagttctctctcatgctctacactgcactatatctccaataattctcatgctattctgcattcaattttaatcttcatgatcataattcttgacaacgaacattagatctttgggacattcaacttgaggtgctcgcgctatgctagtaaccgattgacaaggaccaacccttccttatttcagtttgcggggtcggcaacattgatcaattgataccatcgngctcactgacaaactataatttcatttatactcatttgcaaattnttatcttcatagaagatgattttgctaaagtcggttatattttcatctatcctctatgggagtatc

SEQ ID NO: 210560 - DNA, 482 bp, Glycine max
  unsure (1)..(482): unsure at all n locations
cataaaatattcttcaatggctagttgtctactatgagggatnggatattccttcaactattgtaaagttctctcttatgttttaaaatgtataataacttcaataattgtcatgtaattctgcattcaattttaattttcatgatcataatttttgacaacgaacattaatttttgggatattaacttgaggtgctcgtgctatgttagtaacgaatgacaaggaccaaccaagccttatttcagttngtggggctggcaacattgatcaattgataccattgggctcaatgataaactaaatttttatatataactatttgcaattttttctttcataacagtggattttgctacgcttggttaaattttcatctatcctctatgggaagatacttccttgtccgngctactatcatcctctctatatacaacattctagatttatttcttgtggcatcctacacctacgtcccatccct

SEQ ID NO: 210561 - DNA, 82 bp, Glycine max
tgctcttattcgctgaccacagagtggtacctggagatatgtcgcgggggtcacgagaccttggggatgtcaggtggggtgc

SEQ ID NO: 210562 - DNA, 101 bp, Glycine max
tattttggtgcgaccattttacttgtagacatggagatatgacacttccaacacttaaactttatggaacaattttattggaggggttgaaaggaaaaaaa

SEQ ID NO: 210563 - DNA, 413 bp, Glycine max
  unsure (1)..(413): unsure at all n locations
ctttagcgtatacatgtttcacacactcatattatatttatactctcgttaactcctccatggaattaatgaattacaatccctataggacgctacatgtgtacttagtaatgataaaaacggagaactaacaacgtagcccttttgtataaaattctataatgagagactatattataaaagttgaaatattttgaggagcctntactctctctctaaacctgttcaatgccaaaaacagagaggaaatgtgcaaaggataaccaggaattggtgcaacaagacatgatttcaatatgataatgatgctattatttttcgaaacaatttatttaattcaccaaatatcaattagtgtctattctcttctaatatcatataagatatattatagtatatattatatcatatat

SEQ ID NO: 210564 - DNA, 198 bp, Glycine max
gagcactctggtgtgctctgccttcatgaacttggactattgctaggtggctccaccccttgcattatcttaacgacgataattgctctgctatcacaaataacacaggacgagggagatctttcttcgcattcctcttgaatttttctttgaatttcgtacggtgcagacccgaaatcattttctcatatcttattt

SEQ ID NO: 210565 - DNA, 406 bp, Glycine max
  unsure (1)..(406): unsure at all n locations
ggcaaatgctctttaatgtgattntttctggaatacattcaattattatgtcaacaattcgaatgaatttcacatgcttagaagaggggaaaacacaactaatctagctatcttgccatttttattttcttagaagaacttttaaagaaacttatccaaacagacccttagaacaattgagttggatatatccttcattcttcctaanagtaaaaggctctttatacttgttacttaattctctgtgatcctcactgaacctatgggaatgggaagggtgctctaatttattctttttcttggtttgatntaagnctgctgaatacaatttagttttggaaataagtgctacaaaatctcattcacgtttgctatttgtatgcangcatgtattgactattacaac

SEQ ID NO: 210566 - DNA, 57 bp, Glycine max
tctcacttgggttacacattgaacctgagtcataaactcttattgtttttaaaaaaa

SEQ ID NO: 210567 - DNA, 514 bp, Glycine max
  unsure (1)..(514): unsure at all n locations
agctcgaactcttgttgataggtgatgggcataacctatgtacactacaatacccacagggaggcgcgcacatgactacaaatggctcacccacatcctacctgtttgcgtttaagtcagaggatgatgtatatacacaacatatggcatccagagtaaccatttaagacatctgttcataactatacacagcaaaagaaatgagctgagcataccataagagtatntattggaacccattcttccttcggaagccaccgttgcagagcttgtctagtttcttccggtgtcaaagttttctggcaaagggtttcaatttgtgacagtataaacaaattagcagaaatatgaaatcagtcatcacagagcaaatttcttattgctgattgaaacggactcatgagtgcagcaacctttcagatatcacagtgaacaagtgatgtgatctgtaatgagtaatgacattcccaaacatatatatattatatnatatacatgccttgaaacattgtaa

SEQ ID NO: 210568 - DNA, 434 bp, Glycine max
  unsure (1)..(434): unsure at all n locations
accaaatgatgatgatggcagacccttattctattggcttgatagcgaacagcaggcccgctacaaatgcatatacccacgagatggtgaatgttgaaccttaatacttgtgtgctgagacatatatgccccctcaacagtgtgatcagttaacccaagagcgagtgataaaatcaccttgacacaatgattaaaagaggggtatgatatccccaatgcatgtgaatcaccagttgataatcatagattctttgcaatagcctacgtagaaatccaaagccgataatcaagatctgatgttggtgcagaactaacctaacttgcccctaacctgtgtttaagctaataatccttcgcatcgacggggactattcagaatcattanacatgacaaaatggtcttctttataatcaatctcgataaccagaatgat

SEQ ID NO: 210569 - DNA, 275 bp, Glycine max
  unsure (1)..(275): unsure at all n locations
cctatntttcatcatgcatcatcatggttagtatgaagaaaaatttatttagaggcacaaactctctgctttaattgattacagcctcgttgctatcaattacaacaagctgtctaaaacttgtaagttaagcccatattggttaattgattcccatatctcgaatccattacactgttgtcgagacacgagtggttantaggagccctgctaatcgatattttctctcattagcgtcagcatgaacaaaacatttaacgatacttacgctctaa

SEQ ID NO: 210570 - DNA, 205 bp, Glycine max
gcgttaatttatctatagtcaacacatatgcgccaactgactgtcttaatcactactaatagcatatggtgctcatattccattatagtagtgcccgctcctcttaaggacatattgaatagggcttacctaatgactatctaaaatacgagacataagttatgcctctaacaatttaattacctctccctagaccacctccatc

SEQ ID NO: 210571 - DNA, 363 bp, Glycine max
  unsure (1)..(363): unsure at all n locations
agcttggatcctatgcctaaagtatattcattgcantctttctaaccctcatggagctgcccacatgcttaaaaatggcacacatactcacacccacttgtttcatgggtcactcctctcaaaatcatgtgccaatgccattggggcatttcaccgaacacttggtgggcataggttcaggcgtaaatacctatggaatggtggcaatgtggcatgcccatatccttcagaatacaactgaggccaaaggccattgcctacaacccttcaactaanaaaaaatgagcaacaattcaaggataactttgctcgcattnnttttttaccaaaacatgtaactcanatcaccaaatgcatcaatgg

SEQ ID NO: 210572 - DNA, 405 bp, Glycine max
  unsure (1)..(405): unsure at all n locations
agcttattggattatggtgcacccgtcttatgttgttctaggnggcgatcgggtgatggcacaaatcaactatcccatttccaccagtcaggcataagcacaccatccctagttgcccaccttcaagttgagctcacacactcccacgtagcccttatcctcgttcctctcagcaccgggtccccatcaacccctccaagctttcacaatatccaaacaattcaatttcatttgtcatgaaactaaactaaaccaagaaaacagagtagaggcagataaatctgcccataactcattcaaattccacagttgttcctactcacatgccccaatacattctcttcgtccaattcgttaaccatctgatcgccttgaaaatttactggaggttctactacagcaatc

SEQ ID NO: 210573 - DNA, 236 bp, Glycine max
atacaagctcaagaatatcaagaagctcatgttcttctacaattgctcctcttggaaagaacaacctgtatggatgcttgcacaacctatatattgtccaatattattttttacctcaatggtctgaacaatataaggtttcctctctttgaggtgatttctccatttgtcaaaatcaaaatgttataacctgtactcttgatctgtgtccctaagaagatgaaccaaaaaaaaaa

SEQ ID NO: 210574 - DNA, 332 bp, Glycine max
  unsure (1)..(332): unsure at all n locations
acactgtggacattcatttgatagggcttaacgcacgtaacacaagaaaataatagaggaagtctaatagcttcaagtctagctacagggacatatgtntcattataatttataccttcttcttgattatatccattgcatactacacgagctctatttcttataatgatgtcaaattcatccattttgtttctaaagatccatttgctgccaattacttggtgagcattgcttattagcctaagttcccatacatcacttatcttgattgattcaattcatcttgcatcatcaacaatcaatgttcatctagtaatacaacatcaatggac

SEQ ID NO: 210575 - DNA, 284 bp, Glycine max
ttctgaaagagaatttcctccttgtatccaaaactagggttttaaacgggcccccccccattttctccaaatttgtgcaaaaccacgcgccccaaatttgaaaaaccctccatttcacggaaaccaacaaacccaattgggcaaaaatggagaaaacttctggaacagggcgaccaaaatgtgggggggcgggaaattggggggaatttaaaattaattttgggggaaaaatgcgaacggcccacccctgttaattatcctcccataaaaaaagggccgggggg

SEQ ID NO: 210576 - DNA, 433 bp, Glycine max
cttgcttctacactaagtgaatattggatgtgtgttggaacataacaccaattgaatcgctagaaccccgacccaattaaattttagagggggaggtgagcattatgttactacaccccattgccacatcatatagacacactctgtgcatgtccttcatgctttacatgcctcatgacacctaagcacacttagtggagaatcatggaattgatcttggattagggcgctgaaccataactaacattcactaatcataattagtgaaattttggctccaaaaattggctccacaaattcaatttcaaattcaagtgaaattcgaattgaaattcacatttgcctccatatttgtgtgacacttaggctactaatagatgtcatgcgtgtgaatattttttaactctgagcatttgaatattatacctcatat

SEQ ID NO: 210577 - DNA, 443 bp, Glycine max
  unsure (1)..(443): unsure at all n locations
ctaaactgtacgtaagctacttgtgctgagtccaagcctgacacgatggatctacagacgaatctcatgtaactcaacctttagctataatgtctgtctacatcgcgcctattcgtacatgatggatctgcggactaagcttggattaattcggcctgacgagggatcgaggcgctagcaatntagggtgcaacatagaacacaagagcacgattgattaaagaaacatctttctatgcatcagctagtctgttataaagacccaatatatctacctactactatgggtctatttaccttgccatttatagtcgttagcatataangttagattgaattctattcagattatcacctatacatgttctctaacaatgcttcattttgaactaatgaggctacattagatcctatgttcatactcggattctatgatgaattta

SEQ ID NO: 210578 - DNA, 183 bp, Glycine max
  unsure (1)..(183): unsure at all n locations
ttctcgtttatattcattttactttcaaagctcaaaccctatggtttatgatttattgctttncaacctgcatttctatttaactgtaatgctttcaattttagggtacaatgtaagagttacttaagacttatagctcaataagggcaatgccttgcatatgggtgaatacccctcatatct

SEQ ID NO: 210579 - DNA, 261 bp, Glycine max
taagctaagaacaatcattcatcttgaactattgtacatgcctttgtgtgacaaaggaatcttaaaagggttcaaaacccaaattcaaaccctcttcttatgggatgtgagtgattgcaagattcaatattgaaactaacagatgtgtaggattcaacccaaacccagaaggtactgaagccaatagaaccattataatggttgcaacatttgaaaaggctgctactaaatcaactctcacacaaaaaggacctcatccaa

SEQ ID NO: 210580 - DNA, 376 bp, Glycine max
  unsure (1)..(376): unsure at all n locations
agcttaataagtccatctatggatagaaacaagccttcctccagtggtatttaaaatntcatgaggtcatttcttcattcagctctgaagagaatgtcatggatcactgtatataccagaaggtcagtgggagtaagatttgtttccttgtattatacatagatgatgttctacttgcgactaatgataagggtatgctatatgaggtgaaataatttctctctaacaactctgatatgaaggatatgggagaggcatcttatgtcatangcataaagatccacagagaaagatctcgaggcattttacgcttgtctcaagaaacctatatcaacaaagttttagagagatttaacatgaaagaattgtcaccaag

SEQ ID NO: 210581 - DNA, 469 bp, Glycine max
  unsure (1)..(469): unsure at all n locations
agctngtgacaatttgcactaatctcacccttgctctctctcattggtgggagttgtttcagctggatatgaacaatgcctttctaaatgggattcttgaggagtcagtatttatgacacaacctcctggttgaggttggagataagacctttgtttgcaagcttaacaaggctttctatggcttaaaacaagccccaaggccgtggtttgataggttgaagtctactcttcttcagtttggtgttgcgggtagcaaatgtgattcttctctggtttatgtggatgatatcataatcacaggtatgtctactctctcattcaacaactaatctctaaactacacactgccttttctattaagcaacttggtcatttggattactctttgtgcctatagatcaagtacctgcctaataattctgttggatgactcagacaaatatattgtgattaatcacaaactacatg

SEQ ID NO: 210582 - DNA, 491 bp, Glycine max
ggatccttaagtcacctgcagcatgcaacttaactagaatcttgtgggtctctattattatctgccagcactgtaattcacaatgctaaggacaattattggctacaaccgccaggattgacttatgtcacagttggtgattttgctagcactgctaatcttcccttttgtttattcattgatagcaatcaatgggaatcttcactatgttattattttccaaaacttaatctccacaatttttgcgccattccttgattatgcatctttgtatgtcacagctttaacttgcaaagattggcaaaatcgtgcatcttgctcatccctgtgctgtttccttttacagattgcatacttcttggagcccagtcatgattgtctagtggagtgcttgcctacctgcaaatcagacagtaatccgcccaagtgagttaaactcgtcatctataattcgacagtatatcgtatggtataacagtcatataacattc

SEQ ID NO: 210583 - DNA, 428 bp, Glycine max
  unsure (1)..(428): unsure at all n locations
accgggaccaaatcaactacaacaagcatacattgtgacaccaactcttggatatactcagtaagcacatccaagacatatgtaggtgctcaaagttgaccttggtgtaatcctattgtcataggagaatctgttgtgaacccacacagtaaataatgtagcaaagcagatgacttaaccaactataatttaacccaccttttagaatattangattctcantttaggagacttacagtggtattagtcaaattgggctaagtatatagcagttggactacattaggaattggcttagattgaaataaattaaaacaaagtataatggtttgtttaactntcattatttttcacaatttgtatatttttttaaactttctttctcactgcatgaaaaattgaaagcaataagtacattgtaaatgaaa

SEQ ID NO: 210584 - DNA, 54 bp, Glycine max
tttaaccatcggatacacgcgcctacgcgggggagacatttttttcaaaaagga

SEQ ID NO: 210585 - DNA, 373 bp, Glycine max
  unsure (1)..(373): unsure at all n locations
agcttaccagaagcgccaattagtggactttgttgctggctattntgnctgagctatcatgagtaaagatcgtttacccactcattaatacaactagcttattgctagcaaaatcgagtcatattcatagttctgatgctttcaatgttaatttccttattatggtaacgcttcttctgatgatgagatggcttctgatctgaggatgaatcttctccaccccaaataggatcttgcagtgcaagattgagcacagttgaccaaaaatagtcatccgtgtccattnttttaacagaggagtacactttgtccaatggaaatgaccttctaaggagactgcagttcctactagcaatgtgttgattgattattt

SEQ ID NO: 210586 - DNA, 434 bp, Glycine max
  unsure (1)..(434): unsure at all n locations
agctnggcagcaatatgacaatctccacatactcttgtggttttggtaattctcataggagattcttgagtcttcanaatagcaaacacaatagctaacttctcgctgtgaacagctggatggcattctttatcctcctcttcctcatcatgaagggcagaatcagtctcgggcacataacctaactctttcatcttccccatcagcacacttagctcttcatatatctcctttgactgtggatggtacgtgtcacctgcaagaaaggtgtggacctgattattcaactcaacattgctgatgcaaggcattttctgaattcttcatctcttcattagtgatcgaataagctgtacttctgtccacctaccagccctttgataatattagataacaacacatagtaacccgattcctcatgagccaactgaagt

SEQ ID NO: 210587 - DNA, 206 bp, Glycine max
gatatcaacgatggttactgaggctgctcttcttctaatactgataataatcctaactagtctaccggatgacgaggaacaatatagcatcttcgcattcaccaacttttgacccgctggctatagcttcataccctatcctacacaccggaactgatgggttctcgacagccaacttgagagagtctggaatatataactctgtc

SEQ ID NO: 210588 - DNA, 143 bp, Glycine max
gggttttcctcctcatcttcttcttgagggaagcgaacgggtataagaaccgtcttcttcactttttcttcatccccaatccatgaagcatattcatcaacctcaacatctcgactgatgacgaagttcttaagttgcaagtt

SEQ ID NO: 210589 - DNA, 317 bp, Glycine max
  unsure (1)..(317): unsure at all n locations
gcttgctgacttagtgctcaccaacactagattatatatcctcangttgcttcatgtaaacctcttcttctagatcaccattcaggaacgccattntcacatccatttgatgcagctcaagatcaaaatgagctactaatgccaaaattactcaaagagagtctttcttatatacaggggaaaaggtctctgtaatcgattccatctctttgagtgaatcctttatcaacaagtcttgccttatgtctctcaatgttgccttctgagtctttctttgttttgatgacccatctacatccgatggcttttacaccaac

SEQ ID NO: 210590 - DNA, 75 bp, Glycine max
aaccaaaaacaacaaagaaacgacgggagggggagatttccgcagcgcaggaaacacaaaaccagggaccgggaa

SEQ ID NO: 210591 - DNA, 395 bp, Glycine max
  unsure (1)..(395): unsure at all n locations
ttatgcattcagctttgccaacacgattggcgatgtcaaaacctcccccactgtagcataatattctccaaagtctggctgaagacacctatataaacatatatgaattctgctcgcggtctacaaaaataaatacaaatggcgacacatatatagacgaaatgttgtgggggaatagaaataaagaccacaagttctcacgttacttgagttagctagtgaacgatctatgaagaagaaggtgtgaaggacgagaattcagatgacattggtcactacataaagctatatgagaagataggggcctatccgattctgctactgtctgttagtgctactactagctccaccattctaatcttagaagngatgagattaaaactataacataaaac

SEQ ID NO: 210592 - DNA, 283 bp, Glycine max
gactgacatatggcacctatgcttcgattttgaataccatgcatccaacttatataattatggctgctctaaagcaggtgggtgtctagcacttgatgcattataaacaatgttgtagaaacaaccaacataataatgagtgtaagttttatacaccttcagcatattaaattagcacgatgtctaaaataagtattataaagctaatatgatagcttgtgattatttgatactggaaacactgaagaccatctacactatcgtgtatacactatttattcta

SEQ ID NO: 210593 - DNA, 357 bp, Glycine max
  unsure (1)..(357): unsure at all n locations
agctntangaataagattctggagcacttatcttctctggatatcatactcacacaataattattgcacaacccaaaattctataatattaactatcttccaaacgttagctatttttactagtgattttccaaggtatgaaaattgaaatgttacattatttgatgttctaaaatgaaagtgattggactacaaaaatattttaaaatataaaaaatagattgcatttcataaaatataattcaaaacaaaattgtctaatttaaattttcataaaatggaaagctatttcattgaatacattcaatttgttgttggacttccattntatggtaaaaatttcaaagtcaagtatta

SEQ ID NO: 210594 - DNA, 293 bp, Glycine max
  unsure (1)..(293): unsure at all n locations
tactatgattcttggatagagatgtgccatcattttcttctattatctagaccctctttgcaccattttaattactgattggccttaattgtcaattaatcaggcagttttattatttgggctcatttagctaatttgatgtctttaatctaattttaggaattaatgaaacattgggccctattcggannnnggttatggaccttaagagggcaaattaaacagcgcttatcttagttatattctaattaagatatttgcaattttattttatgttgctcagtggttatttc

SEQ ID NO: 210595 - DNA, 457 bp, Glycine max
agcttatccaattatctaatacagaaccagaattagattttattatgcataaataatccttacaagcaatcacaaccaatctacattttctaccccaataacagatacttaggcaccctacactagggtcctttgtgaataagagcctaacagaaccgtactcttagcccaaactagaaatacctattctagcatgccctaagcaattcatgcacaaacaaaaagatgtggtaaaccatacatgagaacctagagttaagatagacacaacctgatcaatcatgtttgcataacctcgcttgactgaagaggtgttcttcttgaactcaagaaagtgaccaactcacttattagtaaagatcatcacaatcaatatattcgaaagtgtgagttacttcttctatgcacttttcttctcttctttctatactaataacataacttgatcgttactcat

SEQ ID NO: 210596 - DNA, 225 bp, Glycine max
aaatatggatttcatattcattctataaaggcacaagccaaacaaggctgttgtacgaaagtcacttttggtgtctcggaaaagggtcaaatataataatttattgggagcaacataggacaaattttcgtgtatcttctaccttgtgaaatatatgatgcttttaacttcacattgtataagttaagtcttttggatttgggaagatgtagatatgcacaaatc

SEQ ID NO: 210597 - DNA, 475 bp, Glycine max
  unsure (1)..(475): unsure at all n locations
acctgcggcatgcaagcttgtacaagtcttgctgaatagaacaatgaactncttcttatggctatataccaagaaggggggaccctcataacaatgtatggaagatgccgcgagacttcaatgggacacagtggtcttgatatttatgtttcacttatatcaaggagaccaaatattagaaaacatgttcgctaattgtcaccatangactattaattatggatcaatcgcattctatctcccacatattgatcatgcagctaaacataattgtggcctggaantaaatgagttgaaatattagcgaattctgcataagctctattttatatgcaatcaaagcacctttagggataccattaatggatgacagaaccctgttcaacactgaatcaagacgctgacaggtgtaaccaactggcgcaccagaacagatatatcacaacttgattagtatgaacctctcaccttactc

SEQ ID NO: 210598 - DNA, 339 bp, Glycine max
  unsure (1)..(339): unsure at all n locations
ttaagtcacctgcagctgcagcttgaggaatgggggtggcttgtgggattcttttggggagntattattccatttggataaaagattgcggacagaacacaaaacatagatagcgaaagcaaccatttatgggaggaagaaccatgatgaagagttttcaagagaggttaacattgggttctagatgtagagtgtaagtatcttttactttatgcggtgcttaaatatctatacagattaagatatttataagcgttggaagtcattgcctgcttctgtgtgtttgtgaagaatatgtttacgtttcatgattttacacaccaactacgcgtgcaacac

SEQ ID NO: 210599 - DNA, 511 bp, Glycine max
  unsure (1)..(511): unsure at all n locations
gtgtaagtgtcaaaaagataatatgagtttcattatagtttcatttcaatgatactctactttaataaatttaaatcatgataacttatattattctcttatatcgtatgaatcataagctcaaattatactcaatattataaattacacacaagttcgatatctaggcagaatgatgtcctatgtaacaccccgttttcgtaaaataaaaaaatatttaaaaattaataaagcatttagaaattaaataaatgagagataagagtttttgttaattaaaataagggattcatagtattagaaaataaatagagtaaaatgatatcttagaatataatagaatatcttaattgggtattcatgtaatgagaaagtanaatagatgtcatttttataaaacaataaaatanattaaattaagtanataataggctcagagcacctttactataaatagaaacatattatatcagctgtacaatgatgatacgctctacgctgttctttctcc

SEQ ID NO: 210600 - DNA, 398 bp, Glycine max
  unsure (1)..(398): unsure at all n locations
ggatccttaagtcacctgcggcatgcaagcctnctctctataagattctgtctctcactattattgatgatctcgctcagcgtgagtgttcaactgaacctcaacaccctttatatagagaaagtttacataacaagacaaaacccctttagtcaagaacaataacattactgttcctttactctgtcacagggctgtcctttacagatacttttattacagataagctcaatgtctaatcttatgtaatagtaaagattcctgccttggatcttaacttatctttaagcaggatacatttttcattaactcttacttgctgttggaatacgaacatcttcttcatcttggatatgtccataacagaatatatcagatgaatcttccattgaaagatc

SEQ ID NO: 210601 - DNA, 332 bp, Glycine max
  unsure (1)..(332): unsure at all n locations
tttacgatgacttgctccttctaattgatttggtgggcttgaatccatgccactgaatatatttttgtgttctcacctaggttctgttaaaatattggctcctgagttcctaacataaatctacatacacagattgtgctaatacggagttaatattctattntgcttgggcaaaaaagcgggtctgctattgaaacagtcttaaaatgccaaaagcctaaacaccaataactggatagtagtgaatcgcaccaactccacatttgttatattttgtgacccactgcaacatagtcatataccccataagaacatgtctgctaatatctgtt

SEQ ID NO: 210602 - DNA, 379 bp, Glycine max
tatatctatctttatgacatccatgaacgatagggcgaaacgacataaagtgcttatagagtttacttgcattggatcattctcaaaaagaaaaagacccacgttcaaaggaatatgccaccagattattatttctatagataagaatgctttgaaagacattctcagaaaatataactattttatctggcttattatgataatcatctttaatgctatattttttaatattatgctctcttttcatttctcttgaatactctatggtaaataactgaaaatcatatgagttgttatccatacttttggatgtgacattacttatccagatatataaggtctttcttatgtagactcctctttagtagcaataccaact

SEQ ID NO: 210603 - DNA, 293 bp, Glycine max
  unsure (1)..(293): unsure at all n locations
atattncattaactgcgcattatgtctacgcaaattggaaattgaatagctaaatggctaattattcttattttcctcctccacactaagggcgtgagatggctaaagttatatatggtttttctggaagaatgggggattgagcacaaaatattntcattaactctagatgatgcttcttccaatgatcaaatgcaagactatgtgcaggaaagactttcgcatactaatgagttatgcatgcggtggtgaatttcttcatatctgatgctgtgctacatctaaaccttaat

SEQ ID NO: 210604 - DNA, 326 bp, Glycine max
tcttaatctcacctgatgaagatgaatgcgcggctacttcatgcactgcccctatgacaataacatcatttctggcactgaattgctgggatgtggaagccatctctctcaactaaattgttagcttcaacaagggtcatgtttccaagggcttcaccactggcagaatgtaatcatacctctctccatggtgatgagtccttcataaatatattggatgagaaaccgctctgatatacggtggcgagggcaagtaacaataatttttaaatcctcccactatcatataatctctctcactaagtagctaatgccagaaattattt

SEQ ID NO: 210605 - DNA, 419 bp, Glycine max
  unsure (1)..(419): unsure at all n locations
tgcctcactnttctcctctcatacctggtaactactggagaactctcatgccaccctctggcgtgtggccctccagtatgtctccaacaacccatctagcagcttttcttgtaatcttgttctcattgtactcttattctcatcgatctatgttttctgtgttntagtctctctactgagtagattttttttctttntattctctttgntccatcagttcatgttctttgtttattgtctgtctaatctgagtcttggatcttctttntatttggncatctatctncctaagaccaaactcattccctctttttttctatctcttaagtagncatggcatctttgtactgaatactaatactggatagtgtcacttgctaaagctaaaatcaacttttttattatacaacataatctgt

SEQ ID NO: 210606 - DNA, 404 bp, Glycine max
  unsure (1)..(404): unsure at all n locations
agcttgccggtgtacctaaagatgctattatgctcaacctgttnnccttttcttttcnggagaggccaagagaaggctgcttttattcaagggcaacagtttaaagaccttggatgagggtgttgagaagtttctaaaaaaatatttcccagagtctaaaactgtagagggaaaagctgcaatttcttcattccatcagtttcccgatgaatctttgagtgaggcattagaaagatttcgtaactttctacggaaaactcccactcatggtttttcagagtctatacagctgaaaatcttcattgatgggttacggccgcaatcaaagccagtactcgatgcttctgtangaggaataattatgtngaagacacctgaagaagccatggacttaatttgaaata

SEQ ID NO: 210607 - DNA, 318 bp, Glycine max
tcgtaatatcagatgatgcagctgagtttgtagctacctcatgctcttcctcttatgactatagcatcatgtatggcgctcaactgctgggagttggatgccatcttctcaattatatatttggcttgagcaaaaatcatggctccaaaggctccaccactggcaacatctatcatacttcactcatattactgaagccgtcataaaaatattggagaagcagctgctctaacatctgatggtgatggcaactgacacatatgtttttaaatctctaccagtttaattacagctctttcactgagttgtgtaaacctg

SEQ ID NO: 210608 - DNA, 347 bp, Glycine max
catgcaagcttcgaccaaaaacaaacgacaacaactctttactcggatgtcttattgaaactgtattatatcgagacgctcggaactgacgagatatctgtgacgctcgcacttgataccagatgctcgaagcaaattccaacaacaataactttatactcggatgtgcgaatgaatcccataacatatcaagacgctcgaatttgaaaacataagctctaagcatattctaatgataataactctttactcggatcgcggagtgagacccgtaatatatcgagacgcccgtaattgaaaaccgatgctcgtaacaaattcaaatgcaagatctagatgctcgaaaa

SEQ ID NO: 210609 - DNA, 386 bp, Glycine max
  unsure (1)..(386): unsure at all n locations
gcatgcaactngtaaatggcataggatgatgacatacctttactctagagcacgagagtcctgtatatacacaatccttccccttcttcatcgaacttttataagctggctattaacaatcacggaataacttgccggggttgattataaactcctgcaaggcaacttgaagctatgaagatgaacgacctctttacctggcaatgagattccaaaacactggactgatccataatacaggtataaagctgattctaatggaggaagccttccttgcactgacatggcatgtaaatgatataccatgggctacttgaccaggtcctataacttactctgccactgcgcagggggtgacaatgaaagaactacctagaccctcctta

SEQ ID NO: 210610 - DNA, 214 bp, Glycine max
tcacacaaagaactaatcgacacctatctggacgatgattcgaccaacgctgttatgggaatgtttcgacaatccttcaaaaccttattgatacattctgaaaggttggttgtcatgtggccatatcgacgttcttctcttatcataagccatcggccatttgtcctttgaattcgataacccatgggctatggctggactcattcacgaaatc

SEQ ID NO: 210611 - DNA, 413 bp, Glycine max
  unsure (1)..(413): unsure at all n locations
caaatggacttacctcgacatatttcctttgattctcctttcgagccttgtttccctttccttgatttgaagctcactacaagccttaaatgaaaaaccatgatatcaccatatccttaaggaattttggagctctggaattgtgttgggaataagcgtggggggtttttgtctcattggataacttgtttcgtggctatgcttcatgatgtatcttgggccatacttgatgtacatngtatattggttaaatgttcgacatgctgaatgaaatgtcgtctctcacacgctatagagtaaaaaaatattatcggaaaaaaaactcgataaaagataaagacaagcacttaagtagagtgaataatatcttagatggcacaagaatgatgagactctccggtctactctttatg

SEQ ID NO: 210612 - DNA, 306 bp, Glycine max
ctatgatagttttgggattgtacatatgccaagataatgcattattgatgacaagctatttacaaccatggatgaaatcaaatttgttggggaagaaacaattcttataattagtaccccaacaatttcaatctatgacaggaccttatgcaaagtcaatgaatgtttatgcctcaacccatgcatagttagatgcctatacaagaagaagactacctattcttcaaaaaccatgcctcagtatatgacctacaatgatatgagactgaagtaggtatagtcccaattggctattatacaatctct

SEQ ID NO: 210613 - DNA, 333 bp, Glycine max
agctctgcggatttggtcttcgccatttaaatgatcgatgtgggtcccaaaagaggcaaatttgatcatcctactatgacgactgagataactggggcaaatgaagagggtgagaaagagggagaaacccatgctgtgactgtcattcctatacggccaagtttcccaccaaacccaacaatgtcattactcagtcaataacaaacctcttccttacccaccacctatttatccacataggccatccctaaatcaaccacaaagcctgtctatcgcacttccaatgacgaagaccacctttagcacaaaccataaaacaccaacaaataggaa

SEQ ID NO: 210614 - DNA, 371 bp, Glycine max
  unsure (1)..(371): unsure at all n locations
tgcttctgcatttttagagatttccagagagttatgtccaagttccacagagtttttggagcttttgttgtgcgaatactggcagagaattgagcttgtaaaggaagccatcctgagagcaagagatgagtttgtgagttgttgtgaggctctataggtggaggagacatccccactacttgtatttcttcaatccttcatttttctcttctctttggtgaaaggaaccttcccagatatggagagctaaatcctctgttggttcttccttgtangtacttgatgtaaatacctctatatctatntaatgatgctntatgcgctctctgtgctatcaatacatcattttaatattgctttgccttgatcac

SEQ ID NO: 210615 - DNA, 383 bp, Glycine max
tattatttattttgtttttataattagagtgtctcttcacctaaacactggctgtatcgggcaagaggggatttttattgcgatatatgcacactaaccaaagctgaaagaatctatgaatgcttgctgactgatgtgtggaaggggatatatagttttgaatccaaaacttaacacctgcatataagtataactaataatttcttgttgcttaagcaactaatcccctggcttacaatttgttgtgggtacaaccctgaagtctgaagacttttggcatgacttcatcaccttcaacacttcatccatgttcctcccatctagtgcaggtagagaaatctaactggatctacaacactcaccaatcaatatggtagcctcac

SEQ ID NO: 210616 - DNA, 417 bp, Glycine max
  unsure (1)..(417): unsure at all n locations
gtcaccgcggctgcaagctgagggattatggcgacccagtgntgataatatctaggatcggggctacgcgcgagcacgtgagctcagttgaatgagggcaactggggatggaggatttatgtgtgatctgtagatgtgaagagtctacttgtaccatcacccgatcgccaccgagtaccacatatgacgggtaccctataatcctacacgctagaagtgagatagtgtggaagagtcaatcttcctacttttattcgttgaccacagagatggtcctcgagatatgtcgcggtggtctggagacctcggggatgtcaggtggggtgctattgctcacaccaatcttgaccttccctacccatccagggcatagtcagtcaatgagaacctatgacggacctaaactggcgagctcct

SEQ ID NO: 210617 - DNA, 409 bp, Glycine max
  unsure (1)..(409): unsure at all n locations
gctgcatgcaagcttgctggtaggagatataaaccagacagtaagaccaaagattcttatatcaanggcgcgggatgggtgtgtctaacccatatgaagcacaagattaagtatcaaattaaatgcgagctctgctctgcatctgatacatgataagggcgtatatgacatcttcctagcgtgggcattatacgatcacatgaatattcgatgtgatctaagagcggtctaattgtggaaccaaacacacactaccaaatccgtcggtttccttttctggtgtgtctggtacttgtatgctgctgaccgcacggaacgcgtatccatctgagttactgaagatatcatagaagccaaaactctatgcctcgaacataggaaaactaccagattgggtcaagcacactat

SEQ ID NO: 210618 - DNA, 248 bp, Glycine max
aaatggggcgaaacgacttcaacattgtgtgaggtgcgcgcttctctgtgatgacgcggactcgcggtacatgatggtgaagttggactggcctcgacctgaacccgaccttgttggggttggcggcagtgaagacgcaaacggcgtcaccggacgaagaagagaaagggaggaaggaatctaaaaagtggtggtagggatgtggggcattcttatccaaagcgaatggctcaaccttcctaaggggg

SEQ ID NO: 210619 - DNA, 386 bp, Glycine max
  unsure (1)..(386): unsure at all n locations
tctcaaggaagttttcttaagaaagcttctcaatgaagttctcttaagaaagcttctcaaggaagttacctaatctataaatagaagcatgtgtaacacttgttgttactctgatgaatganagtcttatgagatacactttatagttccacttctttccctcttttattccttcaatttcgtgctcccccacttctctctttcttttccttcattaaagcatcctcttcaagcttccaatgcaattcttgagggtgaagctccttcttccttggcttattccctagtggatagaagtcatgtctagtcttgaaacttttcacctatcgtagttttgtatagtaagcatgtctagtcatgaaacctgtcacataagaattcttatg

SEQ ID NO: 210620 - DNA, 356 bp, Glycine max
  unsure (1)..(356): unsure at all n locations
agctntatgaaaatcatgtcttttccctaatttatggttcttnttgcacgttcgcacatatgtctaggtttagtttgatctttatgtacagatattcccttcaatgtgaattaatgagtttccaacttcagtttcaggtgaaaagataaagtaatagaaggttgctatagctggtgtctcgctaagcgaggcatatgcgcttagcgagtaacattcgttaagcgagacctcagctcgcttagcgagtcaagggaatctagaagagaatctgccatgcatgcatgcgcccagtgagtcgtttgtctcttctggcgcttatcgtgcctgactcgctctgctaaaaatcacttactcgt

SEQ ID NO: 210621 - DNA, 214 bp, Glycine max
  unsure (1)..(214): unsure at all n locations
tccatatgtggatctagagtcctaaagatatgttggtctccaaattgcctttatctttagactaagatccaacctatgaattaaccacaagtatggaaatgcnctctcaacataacttacccatagtacatgtaacaatctgaacggtaacttaacaacagtcatgtgagcatggagcccctcaataatagtcatcaagatgccttttaaccct

SEQ ID NO: 210622 - DNA, 403 bp, Glycine max
  unsure (1)..(403): unsure at all n locations
gcttgatattcacatcaaagccgcaattaacatgttaagttttaaattataactcatttactctattcttagcatgaatagattgaagagtgtagtttgcatggtatatccgatcaacttgcatctcactggattgaagtaaaggttattcatttaatcaatgttttaatccaactggtgatattttgtaagtttgtcattatgagatttaaatatatttcatattgaatttagattcatgttcaaagcggaggttatgagtgtggttattatgttatacattggatgtggaacatagtcatggnggttctgaaaaatgaatgaagcatgatatatntcacttaataagtntcaattattatgttactttgactntnntaataatttacatgtacgtaactga

SEQ ID NO: 210623 - DNA, 401 bp, Glycine max
  unsure (1)..(401): unsure at all n locations
agctngaagaggatgcttcaatggattgataaataaaaggagagaaagagagaaggggggagcaaaaaattgaaggaataaaagagggagagaagtggaactttgaagtgtgtctcataagactttcattcatcaaagttacaacaagtgttacacatgcttctatttatagactaggtagcttccttgaaaagctttattgagaaaactgcctcgagaaacttctttgaaaaaacttccttgggaagctagagcttagctacacacacccctttcataacttagctcacatccttgagaaattactaaagaagctagagcttactacacacacctttctaatagctaagctcaacctcttgagatgagaagctagagcttatctacacaccccctataat

SEQ ID NO: 210624 - DNA, 363 bp, Glycine max
  unsure (1)..(363): unsure at all n locations
agctttgaggatatacatacgacaataactnntgactcggatgtccgaatgtgtcccgtagtatttcgagacgctcgaaattcaaaacagaagctattagaaaaatcaaacgacgataactttctacacggatgtgccattgagtcccataatatatcgagacgctcgaaattgaaaacaatagcacttagcaaattcaaacgacaataagttttgactcggatgtccgattgtgtcccgtagtatatcgagacgctcgaattgaaaacagaaactgtgagcaattgtcaacgacaataactttatactccgatgtgcgattgagtcgcgtaatatatctagaccctcgaaatgaaaaagaac

SEQ ID NO: 210625 - DNA, 294 bp, Glycine max
  unsure (1)..(294): unsure at all n locations
atttgtttaacatgattgtacatgattgggacccgaggaattcgattggcaagattggatgagatgaagtgccattatcccaatctgcactcatgcagaatatttgctgtgaaattgtgcagcagaatcttgcanaagtgcacataaatgcttgtgtgtgtgtggctgtggaaagtctaatgcacaatgagggctggattgtttctaatagatccccacggccgaaatgaggcttatgcctattacttccagtaaatctggagtcatcccacggtaacgaattggatcaagaat

SEQ ID NO: 210626 - DNA, 498 bp, Glycine max
  unsure (1)..(498): unsure at all n locations
gctagctaacccatggaagctcctaatatctttcacttctttgtggggtgggccattcttggatggccttgattntctcaagatccacttggacaccatttctaccaactacaaaccctaagaaaactatatcatgtacacaaaaggtacatttctctatattttcatagagggtgtttttcctaaagactgaaagaacttgcatgagatgtcctaagtgatcatctangctcctactatacactaaaatatcatgaaaataaaaaactacaaatctacctatgaaatcctttaagacatgatgcataagcccgataaaggtgcttggtgccttagtgagcccaaaaggcatcactagccattcatacaaaccaaacttgatctttgaaagtgtntccactcatcacccnctttcatccttgattagtgataaccacttgtaagaatcaattttgaaanggtgtggtaccatcaactcatcaacaaatcatcagtcta

SEQ ID NO: 210627 - DNA, 425 bp, Glycine max
  unsure (1)..(425): unsure at all n locations
ctagctgtcgcgtgatataattttgtactcaggaaagatttntttgctgtccaataaatgaatgtctatgtgatgaatgtttctggagagaatgcagtccaggtangagatgatggcaaccaaagttaatagtatgggtgtgaagtgtaacaaaaaagtatacaataagggtattgtttaaagcatagttatgaaaatcggatcagaccaattcgattgcgaattagtggccttgatgatctggatcaatcatcggaccagaaacgcaatcgacctgatttgacctgaccaaatttagttaaaacttgcccatgccggattggttcggttcaacccaatcgatctttttttgttaaaactaacatataatatgttcctataaaaatatcttgatcatgataataanttataataactaacaatta

SEQ ID NO: 210628 - DNA, 364 bp, Glycine max
  unsure (1)..(364): unsure at all n locations
ttcactcctttagctaaggccatgtattctgcttcaatngttgatagacaacaactgattggtgatttgctttccaactgagtgttgtaccaaacanagtgaacacatatcctattaacgactttcttgtatctacatttcctgcaaaaattgcatctacataacctatgaatgctgcctcatgtgctgtcttcttgtaccttaaaccagctttcaaagatccatttagataccttagtgtccacttcacagcttcccagtgtgcgctgctaggatctcccatgaatctgcttataatacttacagcatgagctaactcaggtctggtgaaaccattccatacattatgcattcaacaccactg

SEQ ID NO: 210629 - DNA, 348 bp, Glycine max
aagcacatgtaatcgataccaatacgtgtaatagattaccaacgatttgaaagtgtgtaatctattactagagactctgaatgttgggaattcatattttaaatgaacagtctcagctgatcaagaacaataactatgtaatcgattacactaatgctgtaatcgattaatggagaggattttcaggaatatcgccaatagtcacatcttatcatttggatttgaatggccatacaggccttatatatgtgtgattggacaaattggacagagttctgtggccagaacgcttatcctctccaagaaatgagagagatcccagaaacttcattgcaaatgctctctaaa

SEQ ID NO: 210630 - DNA, 462 bp, Glycine max
  unsure (1)..(462): unsure at all n locations
gcttcacccctccctctnttatgttntctagtccatgggtgttcgcctgccagctctcctaggcgagctaacctgaccatnnttttctgcaaaaatttaaatgcccncttgtcatgcttgtgtattttcttaattcctaggatcacaaataaactaggcatgttcgaatataactttagaaaatagatgaataaataagaagaagaaattaaaaggtactaggctgcctcctagtagcgcttctttaacgtcttgagccagacgcgggatgatgatctattgatcacgagattagcacctactcgtacctgcccctaagcttttgaataaaggaaatgaccgcatgcggtaaatgcaaaacaacatcataaaataccgatattaactntcacataccttntatcttgattntggtgtggtattgaccattgcccaaaaatgacttttacttatccttcgatt

SEQ ID NO: 210631 - DNA, 499 bp, Glycine max
  unsure (1)..(499): unsure at all n locations
tcttagtttcagatgatgcagatgggtttgtagctacctcatgctctcctctaatgattatggcatcaannctggcgctaaactgctgggagttggaggccatcttctcaattaaatttctggcttcaccacgagtcatgtctccaagggctccaccactggcagcatctatcatacttctctccatattactgagtccttcataaaaatattggagaagaagctgttctgaaatctgatggtgggggatactggcacatagnttcttaaatctctcccagtactcatacacgctctctccactgagttgtctaatacctgagatatccttcctgatggctgaggtcctggaagcacggaaaattatttctaagaatactctctcacggtcataccagctcgtgatggatcttggatcaaagcaatacagccagtccttttgcacttcctctaatgaatgacgacaagcatcacaactatgtgatcctcttggacatct

SEQ ID NO: 210632 - DNA, 458 bp, Glycine max
  unsure (1)..(458): unsure at all n locations
atgcaagcttagtgccaccccaagtctctgagttattcttatatttattgctaagggtgccgtatagatactatcttcaggtactagcatgtatcatgcattaatcataagataattactaagtgattgtacgatcatgcatggcattcatactagctaggtgcctaaccgcttttgaatgattggacacacatgtggctagatgtattctgtagttggattntattattccatgtaattgctaaatgagatgacattgcttgtaggatggtattggtgcttgaagtgttatgtttggtagaaaattgattatgcttagagaactgtgaccatgaatgataatagtgacctatacttggatcctatattgtagtataatcatttaacgtgatggtagtctctctatgttgctatggtgactaatgtgaatgtatgaatacatacaatttgatgatgtc

SEQ ID NO: 210633 - DNA, 440 bp, Glycine max
  unsure (1)..(440): unsure at all n locations
aagcttaagtcatgattcatagtatgggaagttgtaaagtctttggaagcgtgtcaagtaagtaaagaggtatgtgtgtgacttaatgcatgcagaaggtgaaaagattatgaagttgtgtgtgacttaatgcatgcagaaggtgaaaagattatgaattaaagatttctaattaatttaactggaaaaaattaatataaaacagttaatgaatatatatacaataaatgcgaatagtttgttgatttacaccataaaaaaattacgtgacttactaataatgatttctaattggctgataataatgatattttgtggttctacacattanaataacctttttataagaaatagatgaatacttctaaataattagcgagttatataacgatgaggatcgctgtgaaatatttaaatttccttatgataataaatatata

SEQ ID NO: 210634 - DNA, 406 bp, Glycine max
  unsure (1)..(406): unsure at all n locations
gttcctggagcggagatgatcgtacagcgggtgaaccagaagcggaagtttcttttggtgaggtagccatggaaaagcagagcgtttggaatgatttcgtaaatctcagaaggctattgagaaatgctggtaaaaacacgaatgccaagcagatataaatttgaatgaacaatgtagaggggcgtgtgacgcaacggtcgaatntgctctgtggtgaacgtgctattaatgttaagtgattcgtttgggcacgttcagactgcaatagctgctataattcctctagcagacaaatgcccaacttgcccctcagtttttcaaactgatttgcatccaaagccgttgaaaaatatctgctattttgttctcagtgtcaacatgctttagtgtgatcactatatcatca

SEQ ID NO: 210635 - DNA, 375 bp, Glycine max
  unsure (1)..(375): unsure at all n locations
cagcttctgcctgaanactggtccagaaacaacgggaggattattgtgaaacttctaccttgcaacaagtcctaaggaagtagacacggagatggacaagaaaatccgcggtattgtgagtagcattctgaaagatgcttctgtgcctgatgctgagaaagatgttccaacatcttccaccccagatgtttctgtgcctgatgtcaataaagatgttccaacatcctccgctccaaatgctgaagccctcccttcacccagtgaagaggaatcaacagaagaagaggatcaagcctcagatgagactcctgcaccacgggcaccagaacctgctccaggtgacctcattgacttagaagaagtcgaatctgatga

SEQ ID NO: 210636 - DNA, 460 bp, Glycine max
  unsure (1)..(460): unsure at all n locations
agcttattanatgcatcagctgattgactcttttattcactgcattcacgggcccaaagcaggaatnttgtgctttcatttccctggttgatcatcacctcaagcctatacctgctaccatatgcaccaacagtgaaaaaatgatgaaggtatgaagaatacacaacattntaaaagatcacaatgacctaagcacagcttccttattgtatttgtcgcatgcacatgtaaagggcgccatctctgcatcactntttttatggcactgaatgcaagctgtataacaccatgaatgattgtctagaacaatcctagtaattgtgccaacagtcacacaaaatatttcttgtgtgaaacagcatacacatcaaataaaanaacttcagataatgcanggcanagaaataaaatctatataagatcattacttcagatatggtattaatggtagcaatagtct

SEQ ID NO: 210637 - DNA, 469 bp, Glycine max
  unsure (1)..(469): unsure at all n locations
gcttctattataagctgaaccatttatcaataaacacaagtttagttttattcagaacattagagtttatctcttttatcttagtgagagtgattctcctaaattcttgagtgattcaagaataccttggctgtatcaaaggactttcacaacctttgtgtgttgccctcgctggaaagagtgattctttccttcctttcatcttcacccttggtctttcaaaccacaattccagaaaatccacctctgcccagaaatatctcgtggccataaatcccantttacccactcaaattaagtgattcttgagcctaaattgaatttcaaaacgagacctttcacctcgttntggaatcacctcatttggagccctgtagcttcagttattgccatttctatanttctggtcagccaccacttaacctacgttttaccatcccattcatcccatttatgccaagaaccacct

SEQ ID NO: 210638 - DNA, 406 bp, Glycine max
agctggcaagggtaatcgaattacttgtcttctttacgtatcacaagaataggttgcactagaattagaaggtactctcaaagagtattctttatgaaatatatctcgatatgagtaatcgaactatagagtatccatattgcaaagaacaagaaatcatacacaaccatattatctatgtaattaaggtagaacatcatattacaagcatgcatagaattataaggttcctataacaagtatataacgtatatataagaagttagagttaaacagttaataaggttgtattaaggaattacaaacttcaacaactacattcacgactacacacaaaataaagggagttaagtagtcatgcgttacacatcaagaaagacatactcatccaaggtatatatatata

SEQ ID NO: 210639 - DNA, 466 bp, Glycine max
  unsure (1)..(466): unsure at all n locations
tgcaacttgaggctgnnctctttactgcaagggacaatttctttgctgagctcgttnctacctggaatgggctgaatactttgatacttgatggttgttcgttgcataaagatgcanaattcctctctatatcaaattctagcctctctagtttgaccataagtggtagttttgaaggaggagcttacaaaattgtgctttctactccaaaccttaattctctcacagtcacgggtcataataatcacacaatctcctccgcatgcaatctttctttccttgaagaagtaaccattgacacccttggttatacactttttccgaatacagacttactcatcataagctggctgcaagttctcaccaatgtanagatactgaggctctattcgggtcccttctgacaatactacngggtaaggactatgctttctcctcctacatctttattttntcataatgtcat

SEQ ID NO: 210640 - DNA, 478 bp, Glycine max
  unsure (1)..(478): unsure at all n locations
agcttgatattgaacaacgaaagttctctatatattcatatggtcataactnttcacacggatgtccgatttaagcttataatatatcgatacgctcgaaattaaacatcggaaactctcgcgaaattcaaatggtcataacttttcacacggatatccgattcgggcacataatatgtcaagaagctcgaaattgaacaacggaagttcttgagaaattcaaatggtcttaacttttcacacggatgttctattctggcgcataatatgtcgacaggctagaaattgaacaacggaagctcttgaaaaattcaaatgatcataacttttcacacgaatgtccgattcaagcttataatatatcgagatgttcgaaattgaataacggaagctcttgagaatttcaaatggtcataagttgtcacactcaggtccgattcaggcttataatatatcgagacgctcaaaantaaacatc

SEQ ID NO: 210641 - DNA, 446 bp, Glycine max
  unsure (1)..(446): unsure at all n locations
ggaatcggatatccgaagaaaacttatgagcatttgaatttctatagagcttccattggtcaatttcgagcatctcgatatattataagcctgaatcggacattcgtgtgaagagttatgaccatttgaatttctcaagagcttccgttgttcaatttcgagcctctcgacatcttatacgcccgaatcgaacatccgtgtgaaaagttattaccatttgaatntctcgagagcttccgatgtttaatttcgagcgtatcgatatattataagccttaatcggacctcaatgtaaaaacttatgaccattntaatttaccgggagcctccgttgtcattttcgagcgtctcatatatgatgcgccttaatctacatccgcgtgaaaagtatgaccatttgaattctcaagagcttccgtgttaatttcagcctctcacatttatgc

SEQ ID NO: 210642 - DNA, 395 bp, Glycine max
  unsure (1)..(395): unsure at all n locations
acagcacaccacagtgcctatctcatgaaaagagctctggaggcagcaagaggagcagctnttgaagatatacctacgttgtgtgatctcattattagtacggtatcttctataatgatggttggggatttctaatcaacagctgatgttattatgttagtatctaataattgtgtttctgtgtcaatggctctttcaagcttagattatgatgcacttggtcatatcaacatctgtggcctggtaggcgacttacattgaaaatgattgttgcattaacttaatgaacaaatgaacttatctacagaggactgagattagttttgcctacatgagtacaatatgtattggcttatctatcaaagaggatctgcgacaactagctaatacatact

SEQ ID NO: 210643 - DNA, 393 bp, Glycine max
  unsure (1)..(393): unsure at all n locations
acacataaaactcagctatatttacttcaatgatacctaaagctagcctttaatattgtgttcaggagaagntactctctgttgcaggaaatgtttcaagcttttatgatctgtataaaccacaaaaggtttgcccaaaagatagtgcctccaatgttggattgcaagcaccaaggccataagctccttttcatacacagactttgtcaaagtcccatcatataaagctttgctgaataaagctattggttgtctcttttgcatcagaactgcaccaatgccccttcctgcagcatcacactccacttcgaacggcacacaaaaatctggcaatcccagcactggaggtgtagtcataatctatttaagtaacttgaaagcaactaaagcttc

SEQ ID NO: 210644 - DNA, 491 bp, Glycine max
  unsure (1)..(491): unsure at all n locations
agcttcagactaaagcaacacagaatctatgtattcttaacccctcaatntaaaggaatttcaaggtttgagaagtgaaattgagaatggggtaaatttggagcaaactctcacctcacacaagtctataacatcaatttaaacttgttcaaactggatttacacctaaaattccaccgaaccaaaatttgactcctcaacacccaattntaccctagaaatggctctttgttcactttggtcatttgtttttctctctagcacagcccaaactttctcataagtcctgaatgacatttcaagctaagattaactcactttcacttccaaataccactaaatccagatttggtcttccaactctcaaaacctcactctntttcactcataacaccatattctcactgtctaaccctanngtaactctacccttcatctctaacanatttccataagcaacttcagcacataaacatcacaagcatcatcat

SEQ ID NO: 210645 - DNA, 287 bp, Glycine max
ccataaaactcagctgggatacggcgccatctgcaataggaagtttggtctatctatcaccacgagctgagagcgaaacatttgatgtttgatgatgccaaggacatgcgctttcagtttattcagacaagaatcagaattcaagaatatgtcaagatatctctaaacttagaaggaatccaagtgaacagaaagtttggcaagacttagctaaatgtttacaaaattactcttggtatcgataccagatgtggatcagggctcgataattaaagggggtaataata

SEQ ID NO: 210646 - DNA, 403 bp, Glycine max
  unsure (1)..(403): unsure at all n locations
agctggtagagtaattatgttttatttcanattatagagcagacaatccattctaataaatattggatcaaaaacaacagtaatgagaaggttgtaaaattacatctacaagtgggagatctatttttttccttagctggagtagtataatgttattctcactaaattggattttaaggagaatcagcaccagaactaagcatcatgatagtagtcaaacatttagttggcttgtcttggcttccctcatttcaaggaagtgaaggaacaagccaaatttagcccatagtctacaccatcagcaactgactcattgaanatcagatgtaatatggtggggctctgagcttttacttcatgtggtaaattcttcacaacaatatatttccttcacacacacatg

SEQ ID NO: 210647 - DNA, 247 bp, Glycine max
  unsure (1)..(247): unsure at all n locations
gctatcctaaggttgctacaaccatttacgccatttgcgccattgaaacagttacgaggaggttagaagactaaccttgatggcggagaacacgaacaacaacttcaatggaggatgtcaacttcaatggaggacacgaactacagcttcttcttcacattcanattgagaaggaaatgatggcgaggaggaagaagctcaatgatggcgaggaggaagaacaagcaccaatggagattgttgggtg

SEQ ID NO: 210648 - DNA, 409 bp, Glycine max
  unsure (1)..(409): unsure at all n locations
agcttgtgcacataggacttgtcaaataacagtttntatggngatattgnngttgaatttcctgccatttgtgccaatttagtcattgcgaatgtctcacgtaataaattgactggtaggattgaaagctgctttgatcaatgtgtaaagttgcagtacttggatttgagcaccaacaatctgagtggaagcatatggatgaagtttgcgaggctcaatgagtnttatgttgccgagaaccatctaaatgggactattcctttggaagcttttcctttgaattgtagccttcaagaactagacctttcacaaaatggatttgttggtgaggcacctaagggggttgctaactgcaagaatttaaccagtctgaatctttctagtaacaatcttactgggactattccca

SEQ ID NO: 210649 - DNA, 422 bp, Glycine max
  unsure (1)..(422): unsure at all n locations
tgtccctcaagtcatcaagttctttccgcactctacactaaaaacttcaaanatcagaaccattaaaatacaaaaaaaaaaaataaaaaaaccattaaactaaaactcaaaaatgcaatcaaataaatacatacttcaacaagacgggctttgctagccttgtctttctctttctccagagcatgaagttccacttctagctgcattctcttcctttcaaggttatcaatttcctcaggctgactatcaagttgaaccctaacatttgcacaagcctcgtcaaccaaatcaattgccttgtcaggaagatgacgccctgaacaatcacaaaaaatataagcacacatcacactaacaaaaccacaagctttcaaaacaaacgcacacacaccanaagagtacagattccataccagttatat

SEQ ID NO: 210650 - DNA, 311 bp, Glycine max
  unsure (1)..(311): unsure at all n locations
tgatgtttatatgctgagaatgcctatggaaactgttagagatgaagggtatagttaacctatggttagaaagtgagaatgtgatgttatgagtggaaaaagagtgagactttgagagttggaaggctaagtctgaattctgtggtacatggagggtagagtgagttaatactagcttgaaatttcatttacaacatgtgaganaggttaggctgagctagagagaanaacaaatgaccaaagtgaaccaagagccatttctagggcaaaattgtgtgttgaagagtcaaattttgatttggtgtgaattt

SEQ ID NO: 210651 - DNA, 360 bp, Glycine max
  unsure (1)..(360): unsure at all n locations
actccgagtatcgaccagattgaataacagttggtcatgagctgacctaagtacataacccctcaatctcgaaggcaaagcttggagagactaaaaggtgtaaatgactcagtatttatataatcgaaggatacacaatccctcagtctcaaaggcaaagcctatagagacgaanaggtgcaaatgacttggtatttagacaaccggagggtatatagcccctcagtcatgaaggcaaagtctgaagagattaaagtgtaaagaattggtatttagacaactggaaggtacacagcccatcagtcttgaagggggaagttgaagagaataaagtgtaaatgacttggtatttagacaact

SEQ ID NO: 210652 - DNA, 468 bp, Glycine max
  unsure (1)..(468): unsure at all n locations
gctagtataaccttagatagaagagagagtttnattttctgagtggactccctcttgtgaggagaaaacctatcatctatgcagctgcatcacaaacctttgttctgtgaagttcaacagtggctggcaatgacgaaatccagtggtataattggtctagcaaaggctatgttgaagtccaatggggaattggcaggttgttgaaatctagtgatgtgttggtccaattgtgaactagtataanaaaaatgcgtattctttctttttcctttttctttaacttgctttgcatagatatgaaaactatntttgaccaaatcactaaatcttctttntatcacacttaataatagaaccaaacattgatctaccaaaaggttttattaagacactatctgtgatacataagtcttaaactgcaaaagaagttattttccataactattgcattttcattctaagcaactt

SEQ ID NO: 210653 - DNA, 507 bp, Glycine max
  unsure (1)..(507): unsure at all n locations
gcttccaagagttgaagagggcggtgacaacaactccaatgttaattttattctatcctaagagaccatttgaagtgtattgcaatgcgagcgggcaaggcttgcggtatgtgttaatgcangagggaagagtagtggcttatgcttcacgccaattgcgtcctcatgaagttaactatccgacccatgaattggaactagcaactgtggtctttgccttanagaattggaggcacttattatacgatactcattntgaagttttcagtgatcacaagagcctcaaatacttgttcgattagaaggaactcaatatgaggcaacgaatatggatggagttcctcaaggattatgaatttggtctttcctaccatccaagaaaggctaatgtagtagtcgacgctctatgccggaagtccttacatgttgcgactatgatgaagttggagcagagattgatagaaggaatttgagatctgaatctatctatcgagatgcgcccaatag

SEQ ID NO: 210654 - DNA, 472 bp, Glycine max
  unsure (1)..(472): unsure at all n locations
agctnntcgattcattctatgtaccgcgggaggtccattttgtgtttgtgtatttttattctcgtttcattcactttttataccccctcttgacatgcttaagccattttatttaagtcatttctcgcttaacctaaaaataaaataaatctccaccgatcgtttgaattgtattatccgttaacttcagttaaaatgaattccgaccgttcggtcgtgccgtaaccacgttggaaataaaaaaaaaaaaagaggtaaaatgataatataataatgaaaaaatgtcttttagtaaaataaagcggaaaatcaatcggacgttctctctttgggatttctcattcttaattgaattgactaacaactaaggtgaaactaaggctaaaatcaactcgcctagtcaagctcgtccataaaaatatagttttgaagttatcattccaactccactaagtaaaatggatcatttcag

SEQ ID NO: 210655 - DNA, 511 bp, Glycine max
  unsure (1)..(511): unsure at all n locations
nntgcgaattggtcttcgctggcgaaatgatcanagtangtctattataatgcaaatctgatcatcatgctntgataaatgcaaaaacctgggcaaatgaagagggtgagaatgagggagaaacctatgctgtgactgctattcctatacaaccaagtttcccaccaacccaacaatgtcattacttagccaataacaacccttctccttacacaccacctagttatccacaaaggccatccctaaatcaaccacaaaacccacctaccacacaaccaatgctaaacaccacctttatcacgaaccaaaacaccaaccaaggaaggaattntgcagaaaaaagcctatagaattcaccccaattctagtgtcctatgctaacttgctcccttatctacttgatactacaatggtagccataacccttgctagagttcctcaacctncattattctgangatacaactcgaacgcaacatgtgcatatcatggatgagttcccggacattcc

SEQ ID NO: 210656 - DNA, 400 bp, Glycine max
  unsure (1)..(400): unsure at all n locations
agcttaacaatagggtcaaattaatctgcttcttccatttactgaaatgacaattgtcagaccctaatttcgtccagggactatcattcgctaacattntgattctcgctagccgaattgagctattcaacactagttgccgcacaagacgaaagattatttgacgtttcagtaaagaatgcagaagatacccaaaagggagggcaaaagggtcattttaagcctttttctaaaccttggcttgcccaggctagcctctggctcgcctgagccctcaaatagcttaggggtgaagtaaccagctcgcttgggcgagcatggttacttcaagttgaagcaacagctcgcttgggcgagctgtagatcctctaaaccctctcatttcctataaataggcatg

SEQ ID NO: 210657 - DNA, 468 bp, Glycine max
  unsure (1)..(468): unsure at all n locations
tactcagcttanactcgcccgagtgggtctcgggcttttacgggcttctttcatatgttgaacaaagggtgcatgccccaactgnngttgctggctttcaaggagaacaggaacaaagtggttggtgttctcactgagcacatgcaccgcattggatggtgtatagttaggtagcaagccatacggtgggaaagaattcttactttgtacaatatggggaccgcttatgtttcccaacacttctcctccctgacctaccacgtttgggattggacgacttgtttggtatatgctagattggtgagtcggatctgcctcaacggtagcattggtggcggcaactgcggccgcgttgtcctccatcatccttctcatactcaacatggcctccatcatggatgtcattcggtccttcatggccttcatgtcggccttcatatgctcacgcacttcctctatttcactcat

SEQ ID NO: 210658 - DNA, 472 bp, Glycine max
tcacagtcacctgcggcatgcagcttacattcgccgagaaatctctgtctaatgtttttttatctacggaggtcacccaaggcgccacattggtcaccgtgagtccgccgggaccaccgtttcccgcggaggcggagacaaatactcctgctgaagcggcggctaaagcgccaatagcaatgacatcgagatggtaaggtaccacaacaaccttcgacgctcaacgacgccacgtcgacgccgtcggacacggcggcgtctaatgcagcgagaatgtcggagtcaaagcaaccgccgttccagcagactttatacaccgcgagccgcgccttcagcgccatgccggcggcgacgctcttggcgtaccctaacgtggacgctggcgagacgtatctcctggcggcaatggacgccgtgtgcgtgccgtggccgttcgagtctctctgcgagcggaactcagtggtctcattca

SEQ ID NO: 210659 - DNA, 362 bp, Glycine max
aaaaacaagcaatgctatatagactataaacaccaactcctgttctcaatgttattttacggaccaagtttgaatcatttttaacatagttgactgggatggatttcatttcatataatcatcggataatgcattaaagtgatgctatcaatgtttattcttcaagattatctctccatctttgtattcctaactaacaaggatatttggttttctttgtcagagatgttgcttatctttctcgtgtgctggagtctgcatttactgctttagaacgccttaacaaacaagcattcctgactgagttggtatgatattgtattgctgatcattggatatattgatttaatgtcttattggat

SEQ ID NO: 210660 - DNA, 425 bp, Glycine max
  unsure (1)..(425): unsure at all n locations
agcttcgtactatgtgtattataaacaatgttatgtccagtagagccatcttgaggtgcgtgctgaagcgcgttgatgaaatacacatggagtacgtcttggatgaagtgcacaagggaatatgcataatgcacaccggatgtcggagcatggcaaccagagtcatctatgtctattactattggatgccctagaggacagattgtgcccagtgtgtcaaaanagcatagaatgtcaggaattcagcaatgcccaccacgcacgcacccgaggtgctccacaacatcacttctccttggccctttggcatgtacagaatatacatccttggaccattccccatagacaaagaccaaatcaagttcctgctcgtcaccatggactacttcactagatggatcgaaacaaacttctcacaacatcat

SEQ ID NO: 210661 - DNA, 449 bp, Glycine max
  unsure (1)..(449): unsure at all n locations
taaggctcacttgtgtagagagatatgaaagtgagactcttatttatacaatntcaatctctttggtatttagttactaaaaatggagagaggtcttaaatttgagtacatgttatatatttatagtgacaacaccatgattcacttcggccacatgtcatgttcctattttcatgtccacatgtaataccaactaagccatttatggattttcctattagactagttctaacaaaaattgacaaatntaagatgtccttaacaagtttagttaatatttatcccaaaacaattaccctcaaatcaaccatttttcttagaggatcatttgctttacaagcgtttaagggtggttaatatataccccgaaacaaaatatattgtataatagctctttttctacattnagtcgtgtgcatggatncaactatagcaaccgtaaaaacaat

SEQ ID NO: 210662 - DNA, 436 bp, Glycine max
  unsure (1)..(436): unsure at all n locations
atcaacgcagcatgcaagctcgcccggtagagaagacgaggatggttatctttcttccagagccngagagctcatagccttcttggcaacccatttcttctcttagcaaatgtgacttgcctggtaatcttgctctctatcctcttcagttcaactctcccccttcccatctttgttgtttcgctctctacctctcttacaaaatcacacacacactctctctctctctggaaactccctttccagtattggttaagagatgggagtgctttcttaaatggtctctttgcttagggtaccaaaagggataaaacaatagtgcaagagatgaaatataagaagacacctgacaaaggttgccttatgatgtgtggtttcatctctctgccgatagccactataatatgtttaatcagctatacaataaaataggaaa

SEQ ID NO: 210663 - DNA, 414 bp, Glycine max
  unsure (1)..(414): unsure at all n locations
tccaagcccattaattntgctacaacactaagaggcctgtacttgtatgcttatcgncgcngcgactagaaacgttgtcaactgaggtggaggcaccacctgtattgaaatctcttgagaagttactgcgttntgaatcaaagccacgtgcgtgccaagaaccttccccactgtccagtgaatgtctangaagctcttttagctttgatgggcatttgaaggtatcatgtgattcanaagttgtaccacttgtttctcttccatcataagaaaaccgaggagcatcctttgagatggaatgccaatgtccatcttttacttcatatgataatctcggaagttctttagcttcaacataatgccgaggtgcttctctaagttagcaaggactcgcanggactcccttagatcaac

SEQ ID NO: 210664 - DNA, 403 bp, Glycine max
  unsure (1)..(403): unsure at all n locations
agcttatagttgaacaaatgaccaggttatgcttattaaaatgaacagaattagcatcttcttcatctttaattagtacttctttgcccttatagcacttgatcttctaatacaagataagcttatcaacaacaatctaaaagtgagttnttggagtggccaggcaagagaattatgatcctagcatgaaaggcatgtgagtgtcgaacctttttattatgcgaaaagaagcgtatcttgatccgatctcctctctataagcaaatagcttcattaatagtttctagtttggaaaaatttagactcgctttaggttcctccaacagaatgtcttcaggttcctctaaattacttnttgaatgataaaaggtgcccatatcttttccaaatatgatattaaatt

SEQ ID NO: 210665 - DNA, 449 bp, Glycine max
  unsure (1)..(449): unsure at all n locations
ntgagaggagacatcttgctagaagtagctataagtaggtgttattctctgaatgctgcccatggaagacaagaagcccatatcttaagctttgttccacttaacctccataaatgaactgccaagcattagttgacatcttgtgtatgttcgtcatgtgagcggatgatatgctgaactgaacttaagctgtatacctgctgctttaagaagggctattccagaaggtgcttaaaaagcgagggacacgatctgaaacaatggaagatgcgaagttctgcaatcttacaatttcctgttaagaactgccgctacttcgtgagcggtgaacggatgtcataatggtatgaagtgagaatatatagtgagtctgctgccaccaccaacaatgatgcttgccttggattgggcagcctccaataaatccatagaatatcagtcatcttgat

SEQ ID NO: 210666 - DNA, 436 bp, Glycine max
  unsure (1)..(436): unsure at all n locations
cataaaaagtgaaggtattatgcaaaggtagctagagataaagaaagcaaaatgagacttgatgggtcaagacggtgggatcaactcgttctggtgcacagtaagtttcacttggtcaagcaattntttactccagcagttattcatagataactcaactagtttccctacccatggaatgtacgagagggggatcacgaacctaatgccacaagaaaagggaaaatggaagatagagtcaatgttggacaaaagggaagcaaacagttaaaagtctctgatcaaacaagtgcttaaattaatatcaacttaatagtggactgattattatatgcttcaacaagtgcttaagcatggtacttttttattgtatatgacanaatgaaacagtcatattcagtgggtgtctaaagcatctctcacttcaacacatgta

SEQ ID NO: 210667 - DNA, 447 bp, Glycine max
  unsure (1)..(447): unsure at all n locations
tatcaccatntgcagctgatactgtgggacaacctcattatggctcttcttcttgatgatctacctagattgaagctattgatggcctctctttttgtgacctacatagatgggagggtttagttgtatagttactgcttagacatatgctcttttctttntggatgtatatgtgagggcgggtagctaggacttgtgatatataatttgtatttaaaattactcttttgaaagattgtctacactaaggatgcatgaccaacgatgtacttatatggccaaagttaatatcaagttatgttaaattattgtaaatatgttatatggtttttatgaatgatagtgtgtagtatatgtatattataaaaataaaaaataacaccattggtataaataaataaaaataacggataactctaatagagtcantttagtttcacacaaagc

SEQ ID NO: 210668 - DNA, 371 bp, Glycine max
  unsure (1)..(371): unsure at all n locations
agccttgagaaccaacgagcttgacccattgngttanttgttttcgtctatagtcggaatcggaaagcggtcacggactgtaatggcatttaaagcgcgataatcgacgcagaagcgccacgagccatcattctttcgcaccaacagaaccggcgatgagaacggacttgtgctaggttgaatgacaccctgctgaagcataacctctacctaactcttaatctcacacttttggtaatgagggttgcggtaagggcgtacattgactggggtggcctgtggaatgaagtgaatatggtggtcagagtggcgttctgagggcaaggtggtccgtggttggaatagattctggaattgcgttatcaaatctt

SEQ ID NO: 210669 - DNA, 288 bp, Glycine max
  unsure (1)..(288): unsure at all n locations
tctccactcattcaagagtgactgtagtaattttaatttatgataaccaccatgcttctggttctctggcactntctaattcatcattttataatgcctataatcaataaaaaaaatcttattttctactgcataacacattgtatttatttttacgttgtataatatgtctagagttttttaacacaatatatttctcaattaaaaatcagaaactaatctctttgagcccatatgagatccagatattgtaagtgtggagacaatatttatctactaatcttataa

SEQ ID NO: 210670 - DNA, 375 bp, Glycine max
  unsure (1)..(375): unsure at all n locations
agctntgagatagtctctggtctgatgatcnattttgccaagagccagctgggagcaattggtcaatctgatcagtggatcagatctgctgctgatctcctaaattgtggtcccctgcagcttcctttctgctacctagggctgcctataggtgtcaatccgagaaggaagatggtgtgggaacctatcatcaacaaatttgaggctagactgaacaaatggaggcagagaagcatatccatggctggtagaatcaccctaattaatgctgtcctaacagctctgccattgttttacatgtctttnttcaagactccttcaacagtgatcaacaaactcatctccattcaaagaaagtttctttggggtgataat

SEQ ID NO: 210671 - DNA, 444 bp, Glycine max
  unsure (1)..(444): unsure at all n locations
ntatcaatctttgagcaaggacaacccccaatgcgttattggttgcatcgcacattagctcanatggggctgtccaatcaggtgcctgaatgataggggtggtagtcaccacacgcttgaggcaatcaaaagcctctttgcattggtcatcaaaatcaaactccacctccttttgcagcagaatggatagtggaagggctactttgctaaaatccttgataaagcgcctataaaaccctgcatgaccaatanaagaacgaacctctcgcacgcaagagaggtaaggcaattgtgaaataacatctatatttgcagggtctacctctatgcccctactggaaatgatatgacctaaaactataccttgtcctttgaatataaacttcagattcagagctctnttagagcacagaatttcgtgctcttctcttcccttcattcatc

SEQ ID NO: 210672 - DNA, 496 bp, Glycine max
  unsure (1)..(496): unsure at all n locations
gatctctaagcaccgcggctgcagctgcttagtataaaagaatcatcttatttattgttgatgcctactattgatatatagcattgaccatacatgatactagctagagagaatagaaactattgataatagtacactccataggtagtaaaccacaaaaaactgtagtggcttgcataactttagttaaatttagcggctcttaatgcttatcctatatatattataatgacataagtatttctaacttgttacctnctaagagattccctttggagtccttactggtttgttaatcttttagctgaaacattgcattttggccatgaggttgatacaaggttgacatatttttataagctaacattgttggaacattctaattgagcatttgagaattgagatcatacctcaatttacctatgactagaaatctggcctagacccctctagtgtcaggcatactttacatgtagctcactatatacaatctatg

SEQ ID NO: 210673 - DNA, 480 bp, Glycine max
  unsure (1)..(480): unsure at all n locations
tcaggctgctcaattgctccaggttgcggcatggaatggcaaatttctgtatggnggtcagcagaggagcacaaaccacaaacccttgcgacaggtacagatttctgattcaaggccagctgggttaccaagttgaccaacgcatccagtttgccttcaagcttcttagtttcagatgatgcagatgggtttgtagctacctcatgcactcctctaatgactatggcatcatttctggcgctaaactgctgggagttggaggccatcttctcaattaaatttctggcttcagcaggagtcatgtctccaagggctccaccactggcagcatctatcatacttctctccatattactgagtccttcataaaaatattggagaagaagttgttctgaaatttgatggtgagggcaactggcacatagtttcttgaatctcttccagtactcatacaggctctcttcactgagttgtctaata

SEQ ID NO: 210674 - DNA, 435 bp, Glycine max
  unsure (1)..(435): unsure at all n locations
agcttctagatatattacgcgtctttatcggacatcttagtgtttagttctgacccattgaatntctcgagagctttcatagntcaatttcgagcgtctcgatatattatgtccttgaatcagacattcgtgtgaaaagttatgaccacttgaattctcgagagtgtccatcgatcaattttgagcgtctagatatattatgcgcctgaataggacatccgagtgaaaagttatgaccatttgaatttcttgagaacttccgttgttcaattntgagcgtctcgatatattatgcgccgaaatcggacttccgagtgaaatgttatggccatttgaatttctcgatagcttccgttgttcaattttgagcgtctcgatatgtttcgcccctgaatctgacttgtgagtgaaaattatgaccatttgtatttctcg

SEQ ID NO: 210675 - DNA, 378 bp, Glycine max
  unsure (1)..(378): unsure at all n locations
tatctcttttatcttagagagagtgagtctcctaaactcttgagtgagtcaagaacaccctggctgtatcaaaggactttcacaaccttcgtgtgttgacctcgctggaaagagtgaatctatccttcccatcatctccacccttgttctttcaaaccacaactccagaaaatccacctctgcccaaaattatcttgtgaccataactcccattttaaacactcaaattaagcgattcttgagcctaaattgaatntcaaaacgagacctttcacctcggtgtggaatcacctcatttggagccctgtagcttccgttattgccatttctatatttatgtccagccaccacttaacctacgttgtaccatcccattca

SEQ ID NO: 210676 - DNA, 422 bp, Glycine max
  unsure (1)..(422): unsure at all n locations
agagtcgatgttctgaacgacttagatgaattaaaggatctgagtgatttaaaagaagttggtctatccaaaactcgctgagatagcagatgtagtggaggctctggccagctcaaacccaccctttcagacccactaagcattcgagttagtttagtggcctggtgggcaaatgatgtgtccatggtttctgaanaactcctttgcctatcaaacatctttggaaaagaaaactgcctctgtaagtcagttntaactggcaaagtggtggttgcaatatcagcagcatcggaagctaataaatntgtattcacagtntcacccatgaatgttccatcacaaatatcgttttcttcatccaaacgatgggactcctcaccaatgtcactatcactttccagtaaatattcttcctctatatc

SEQ ID NO: 210677 - DNA, 423 bp, Glycine max
  unsure (1)..(423): unsure at all n locations
ctgagctgcgcttctttttgcttattcactggcttgtgttctatttctactgtgtgagctgaagttntactgtggtttgtcataagtattacgtatttattnntttaatttaccaccagctagtgtgtacattacttgtaattaatttgtgttcaaagttttccaaattcaattgaggtttcttagtaaccacttataggaaaataaagcaagaggttgcttctgtatctttgattcattcacctttgagtttgtgcatgcataanaatttgtatgtgcttaggacttcaaaatgacaaaattctgggacccctaatttgagtgctcctctgcttaacctatcctgttttgttaatggaatggatatatgtgtttgcaagaatgtgggcataaaatatgttataataacatgttanaatacta

SEQ ID NO: 210678 - DNA, 380 bp, Glycine max
ccttctcttccatagatgtttctacatatttctccatgtatcgcctcacatttcttgtacttaatggatttaacatgattctctagagctagcacctgataaactagctatataagcttgatatgattctctatggatcagatttactgttcttgttcttgaaccatgaattatggttgagtctatgttccgttgagtttagccttgttagtttttgtggctgataccttaaccatataattcttacaagaacattaaagtgtaagataaccctaaacatcttaggtgactcgatcacctatagtaagtttgtcatagaagtcatgtctagttatgaaacatgccacataagatctcttatgtggtggtgactttatact

SEQ ID NO: 210679 - DNA, 461 bp, Glycine max
  unsure (1)..(461): unsure at all n locations
agctagaaggcatgtaacccaccatcttctcatattatatcatcggtaacatgtctactatcattgttatcatctccctctccatcattgggggcgctacttgagctgccagatccctccacctttgggcgtattctttgaaagatttgtgctccttcttacacatgttctatagttgtattctattcggagccatatcataattatattgatattgcctaatgaagganaacattatgtccttccaagaacggacttgggaaggttccagattagtataccaggtgacggctgccccagtaagactttcctagaagaaatgcatcnaacaattttcaattttcgagtatgcccccattttcctgtagtacatcttcaggtgattcttgaagcaagtagtccccttgtatttgtcaaagtctgacaccttgaaattgggaggaatgatgacatcgggcact

SEQ ID NO: 210680 - DNA, 456 bp, Glycine max
  unsure (1)..(456): unsure at all n locations
tcttagtctcagatgatgcagctgagtttgtagctacctcatgctctcctctaatgactatggcatcatttctggcgctaaactgctgggagttggaagccatcttctcagttaaattcctggcttcagcacgagtcatgtctccaagggctccaccactggcaacatctatcatacttctctccatattactgagtccttcataaaaatattggacaagaagctgctctgatatctaatggtgagggcaactgacacatagtatcttaaatcgctcccagtactcatacaggctctctccactgaagtgtctaatacctgagatatctntcctgatggcatgggttctggatacagggaaatagttttctaacaatactctcttaatgtcatcccagctcgtgatagaccttagagcaaagtaatacagccagacctttgccactccctctaatg

SEQ ID NO: 210681 - DNA, 464 bp, Glycine max
  unsure (1)..(464): unsure at all n locations
tgcaagctaggaggacggctggacatgatatatgtcatggttatggtttcgccagcggctcagggataaaggaatgtctcgcattatttccatgacacacatgcaacaatgatgatttggaaaatttatgcaaaactggtcatgcatgcacccatgtggacactcaaacatcaagtttttatggtcatgtgacactaaggctcangattcattttccctatttaagtcaacccagtgtttccaaaacatgttcttttatcaattcatgcattcatccgagaccattgtgggcgttcgggaaaattttcacagcattcacccttcaggtgcatacacattttttttanaaaccttgtgtttgaatggtagttcatttctttcaaagcatgtggctttagcaaccaaattattctctttactgtttgtctcttccatgaagatttgcacctaacatatgttatttg

SEQ ID NO: 210682 - DNA, 292 bp, Glycine max
  unsure (1)..(292): unsure at all n locations
acatcacacangccaccattaaagcggcactagatgagcactgttgcaccgagggagactcgacataagcattgcataccactttccaagcttggaaagatgtctcttaagattattctgtggcttccacatattgtgtaaaagaccgacaacttacaagaatgtcttcctcctcgaagactntgatntactaccctcccccacaaattcaacccttggggagtgctaaggactactccactgatgcatccaggtccgctaaaggtccatagtgcggtgaagccatccttga

SEQ ID NO: 210683 - DNA, 499 bp, Glycine max
  unsure (1)..(499): unsure at all n locations
agcttggagaggatgcttcaatggaggatattttatagggagagaaagagagagggggtagcacgaaattgaaggaagaaaaagggagagaagtttaactttgagttatgtctcacaagactctcattcatcaaagttacaacaagtgttacacatgcttctatttatagactaggtagcttccttaagaagctttcttaagaaaacttccttgagaagcttctttgagaaaacttccttgagaagctagagcttagctacacacacccatctaaaaactaagctcaccttcttgagaagcttccttgagaagctagagcttatctacacacactcatctaaaaactaagctcaccttcttgacaaaatacatganaatacaaaagaaaagtccctactgaaattctgatatcgatgacagatgtcataccggatgtcacgacatcacgcttcagaacatgcagattatatttgacagtatgaatagattaaacaagta

SEQ ID NO: 210684 - DNA, 95 bp, Glycine max
  unsure (1)..(95): unsure at all n locations
aaaaccagcnccccaagncaaaaaggggaggagttattggcacccagccagtccttcaaaagtaaaaatgctcggaaaaacaccggactcaacgt

SEQ ID NO: 210685 - DNA, 475 bp, Glycine max
  unsure (1)..(475): unsure at all n locations
atccttaagtcacctgcggcatgcagcttganatagattgttgcaagagtttggtttttttttttgagaagcctctgcatgcatgagagtctggccttggcttgaagcttttgcatgcttaagaagttctatagagagaaaggtccaagtttcagagagttcttagagattttgttgtgtgaagatctgtacagacaatagctcgaagcggaagccgttctgagagcttgagatgagtttgtgagtgatngtgagatcctagaggtgaacgagacatccttaccacttgtatttttgcaatctttcatcttgttcttctctgtattggaaaggaagttatcgaactatganaagctaaatcctctgttggatcttccctgtangtacctgatgcaaatatatttcgatctatgtaatgacgctttgagtattctctatgctatctgcttttcatctcaggatgtctttaccttga

SEQ ID NO: 210686 - DNA, 492 bp, Glycine max
  unsure (1)..(492): unsure at all n locations
tatcatttaagaatntcacagaatgtttgtgatgttcactctatatctaaagatcatgnncactatnnttaaaggtcatagtatctttgtgagcttgtgcacattctttctagagatcacacttctcttgagtaaggtgatcttgaagttcattgagttcttataactatatttgttgaacttcaattttaccttctaaaatgtgaaaatccttcattaaagtatctttctctatggaaacttttccattttccagaaaaaaactcctttttcaagctttcataagcgttattggtttgagtagattctgtcacagaattgatatctttagattgatggacttcttttagttctatatgatatttggacaatatcttaaactcttttcgcatgtctttataacggtttgaaagaataacaagcttgacagtagttcatgatacgcttggtttaaaagtttatggtcatcgaaatctaccttctcttattcta

SEQ ID NO: 210687 - DNA, 400 bp, Glycine max
  unsure (1)..(400): unsure at all n locations
agctntaatgaacttcaattntagcttgttggcttattctccccatccactagggtggaaattgctccatttaagggtcaccatttcctgaaatcccttgtcctgcagccaccaatccatgaccttgaaaggcttaagaccccaatcaacacttttggatcttagaaggatagggcgatgatctgaaaaatctctgtctagtacaaactgtgttgtgtcaggccactgaaatgatcctttgctaccctgcaatgagacacacacagatacacaaacacacacacatagagacaaacacacgcagacacaaacacaaacacaaacacacacacacacacacataaagatacacacacacacacacacacacaaagtcatgaattcccatgggtatggagta

SEQ ID NO: 210688 - DNA, 471 bp, Glycine max
  unsure (1)..(471): unsure at all n locations
ccataaaactaagcttcaagaattgcnaaagaatgatgaggtgcatttgtttcatatctttcanaanagggatagncagtctgtgttttccacanaaaaggaaaaatcaaatcaaaatcaaaatcacaaaaataggaaagaatgtcatgagcattacacaattttcatgattntcgaaaccttttgcatgaaggttgtatatatctgcatccccaaaaaatcatgcatagatttctctntaaagatgtgaggtcctctcaaagagtcaacatcttgctttctcataaggnntaaagcttttggtacttgtacctattggctcgtttcataggactcanagtcctcaccttcataggactcanagtcctcacttttattctttagagaactcanagttctcgccttaagaggactcaaactcctcgccttagagggctcagagcctcaccataaatgactcanagtctcatc

SEQ ID NO: 210689 - DNA, 476 bp, Glycine max
  unsure (1)..(476): unsure at all n locations
agcttcatgcttaactatgtatgtcataactttattactgnagnncaagacatacaagtgagcttgtaacaaatcttctacacttggagtgatcacatgcaatcctcttgaacccttaccacccactctgtcatcatgccgagactcaagaagcccaacaggtttagccttctctaagtattctgaacaaaattcaatggcttcttctgcaatgtacctctcaacaatagatgcttctggacgatatagattctttgtatacccttttaagatcttcatgtatcgctcaaccgagtacatccaccgtagataaacaggaccacaccatttgatttctctgaccagatgcacaatcaagtgaataatgatgttaaagaaagcagggggaaaatacatctnccactggcacagtataattgccggctcattttccaactcatcaaacttgactggatcaatgacttttctacatatag

SEQ ID NO: 210690 - DNA, 478 bp, Glycine max
  unsure (1)..(478): unsure at all n locations
ngcaacanaganattggtggaagaccaagcttcctttatgactgttattgaaaatgcatattcaaagcggaaatgaacatccattggcatggaacgacaaagcttctcgtctttgatgaggctcatatggcagttccgaatcttcgtctcaattttgagtagtttaactccctactccaaacaaagttttgctatgaacatgagcccatatattgataatattatagacaatgaattatcacttgtttgtggtatacgtgtgcttatataatcattagaattgaatcattgttgacctgccttaaatcaatatgatttttgaattaaatctcgtctgattaatacaactaaattgcttatcaaataaattgttcaaattgactggttgcaaactgttgggtgacttaattttcataacattatctttaaacatttatataaccctcacttacttaataacaatgactattgaacaaca

SEQ ID NO: 210691 - DNA, 497 bp, Glycine max
  unsure (1)..(497): unsure at all n locations
agcttagaaaggtctactcaaatggatgtatgttatagttgataagtaaaaaanaatgcaaaaagtagaaaatgcaggatcatcacgtgcccattgattcttggtttctaatatcaaataattaataacaagaagaaattcaattaaataattttttgaaatcaccaaatttaatttcctaatttgataaatcaaaggcattaattatataactaaaccttaccatgaaaaattggcatcattatgtatccttctactcctattttaaatnttattatattgaacttatatttttttagtcaacattgccaagatgtggatcaggtttggccttccaaagacaatatcaatgatttataataatttatcaaatcatttgatgatttgatttataataatntaagacaatatcaatgaattatattaatttatacactctgatgaactaaatcccttgacaaatagttaatggtagaaatttttggtataaaacaatt

SEQ ID NO: 210692 - DNA, 493 bp, Glycine max
  unsure (1)..(493): unsure at all n locations
tgnanantntagcctcagtctanaatngatatggacaacctgttagtgctttaagtaaaatggattgggctaacaaaccagacccaacttcatttatgaacttctcgggttaggatgcanaaggtagatacttctgcacccaataaattttcacatgcaccgcatatgaatgggcaaaaatgcccttagctgtccctgtgacccacttgttgttgcaatgcctaccaccacacttttcagaagatgttgttccaattacattttaaacagaaggaacaatggtcaaagggagtgagagacaccaagcaaaaggaaaaaagacaggtgggattgtgagggacttatcaatgtttgtcttgtatgccaatngataaaagcttcaagtgttgatgtgtaaatccagaacacaaagcccactaggttngcanattatgtagaaattacataaatgtaatccanaacgttgtgtttgcaaatatggattaagtaatct

SEQ ID NO: 210693 - DNA, 360 bp, Glycine max
  unsure (1)..(360): unsure at all n locations
aatagcatataagtaatacaaatatatctntgctattcatatgaatttccctttatttttatgtggattaaccgctatccatttggattgcataagagtattaataccaggctatccatgttacatttaagatagttacggtaaaagttaatgaacttatcatgtgataggatgagagtgtaaaactactttacattntaagtgcattaactattntctcaaatataaatgcataaagtaaggttcaccattcacatcacatgcttgtgaaccttactgtccttactntagtgactagtgtgtgtctntaatcaataatggcaaatttgaatccctgctaagcatttaatatnttttagt

SEQ ID NO: 210694 - DNA, 502 bp, Glycine max
  unsure (1)..(502): unsure at all n locations
tccatgacaatgagagggctatacccctttgtgggaacttggtatcttactactcttgatgtaatttctcttcttatctatntatgaatattacatttacattattntttttatgcttaatattattgcttgtggctaaatcacccatttgcatggtaagttttaggggaagcgttgggagacattattttctaatagaactagaaaagagtatctaaataaagtcatcactagggataggttgacanttgtttagcctgttatacatctttattcttaatgcaacttactattttagctctgtaaagggatttgagagagaaaatagataaattatggtctntcatgtgagggccaaagttagagtatattagtagatgcacgtgtaaattggaataattattaataaacanaaattattaacattatatccagaagtagctctagtaggctaagttctcaacattctcatcttctgaatttcttctacataatatggatt

SEQ ID NO: 210695 - DNA, 496 bp, Glycine max
  unsure (1)..(496): unsure at all n locations
gtcacctgcngcatgcaagcttgtgcattcaatatcctaatgaggatgttccatatgttctcaagactggactaatacatttgctgcccaagtttcatggtcttacaggtgaagatcctcataagcatcttaaggagttccatattgtctgttccaccatgaaacctcctgatgttcaagaaaatcatatctttctaaaggcttttccttattctctggaggcagtggcgaaagaatggctgtactaccttgctcccaggtccattaccagctgggatgaccttaagagggagttcttggagaaattcttccctacatctaggaccactgccatcaaaaaagacatttcangcatcangcaacatagtggagagagcttgtataagtattgggaaagattcaagaaattatgtgcaagctgtcctcaccaccagaattctgacaactccttttgcatattctatanggacttatacatggaaggagttgatgatct

SEQ ID NO: 210696 - DNA, 431 bp, Glycine max
  unsure (1)..(431): unsure at all n locations
ctaagcttctaaggaggtgagcttagttattagagggagtgtgtgtagttatatctctagcttctcaaggaagcttctcaaagaagcttctcgaggaagtttttcaagaaagcttctcaaggaagcttctcaaggaagtttctcaaggaagctacctaagctataaatagaagcatgtataacacttgttgaaactttgatgaataagactcttgtgagacaaacttcanagttaacttctcttcctcttttcttccttcaatatcgtgctctcccctctctctttctctctctctttcttttcctccattgaagaaccctctccaagcttcttatccaaggcactctcttggtggaaagctctttcttcatggcttattcttagtggatggagctcctctacctctttcctttgttttcctgatctcatg

SEQ ID NO: 210697 - DNA, 480 bp, Glycine max
  unsure (1)..(480): unsure at all n locations
agctngatataacctagtattctttttcctacctagctattgttggctctatancaaatcaacaaattgttgtttgtttgcacaatgactaacttttaatcatcttataggcagatatacaatcttaacacttagtcttttctctcanagtgttttgtgagcttttatgaactatacaagaatttacaaagagctttttacaaaatgaatttgaatgatagcgtataggttcgtgtcccatgtcttcaaagcttttgctatttacaggccttcatcttcaaatatttcttgtccctaaacaaatagtttccatcacttgagcttgcgtctgatgattgtggttagtggagcatttaatgctttcatataatatacttacttctttatgctggacaaccacttttgtattctttcatgtagaacacttcaacaagaaaccacttctttagtgtcagagcatgtctgtcacaataaagcaca

SEQ ID NO: 210698 - DNA, 458 bp, Glycine max
  unsure (1)..(458): unsure at all n locations
tgcctcctttgagaagcttcttaagaagattcctaaagaagctagtgcttatctacacacacctctctaatagctaagctcacctccttgagatgagatgctagagtttagttacacatcccctataatagctaagctcacccncattccaaaaatacatgaaaatacaaaaaaagtccctactacaaagactactcaaaatgccctaaaatacaaggctaanaccctatactactaaaatggccaaaatacaaggcccaaaagaagggaaaacctattctaatatttacaatgaagagtggatccaaccttgacccatgggctcaaaaatctaccctaaggttcatgagaaccctanggccttctttagtagctctagcccaagcctcttggagtcttctatccaatacccttggggggtaggatngcatcatccnctccaccttggaaaggattaa

SEQ ID NO: 210699 - DNA, 442 bp, Glycine max
  unsure (1)..(442): unsure at all n locations
tctagctcttgcatggntntatagtttagaatgtngagttgagtatggtcttccctacttctaatcatgtcctggtttgttntgaataaaattaagctacaacatggccagtaagaaaagaatagcattgatacatacctggattntgtgaggatttaataaaatgtttgtgtaaacattatttccgttattgataacgtggcctcatcacgttaagaatagcatgtcttttgcacttgtgctgtatatgggaaactaaactggatacaaatganaaacaaagcanagctatgaaagaattaaaatatataagcacacaatagagtgctagatacaaatataaggagatgtgacagaagttgcttcgcaggttactttccactttcgtctgatattcccttgaagtcaaaatgatctcagannaacaaacagaacccccata

SEQ ID NO: 210700 - DNA, 400 bp, Glycine max
  unsure (1)..(400): unsure at all n locations
agctngagatgaggaagtgtagaaaggtgaatctttctgctnttattcgttgaccacagagtggtacctggagatatgtcgcggnggtcaggagaccttggggacgtcaggtggggtgctattgcccaaaaccaagcttgaccaatcccgacccaacccgggcatagtcagtcagtgagaacctgtgatgtacctaaacaggtgagctcctggcagtcaacagataaaaggaacaaagaccacaaagcaaggaggcttgtggtggttggccagctatgaacttgattgatgtgtgagatatggcctctggtaatcgattaccaagggtgggtaatcgattacaaagcttaaagatgaagacaggaggctaagatggtctctagtaatcgattaccacggg

SEQ ID NO: 210701 - DNA, 91 bp, Glycine max
  unsure (1)..(91): unsure at all n locations
ntgataagagactcttaatcttcattctcttctggttccttaccatnttcgtgcataactctcagtcttggntccaaatttctttttgtca

SEQ ID NO: 210702 - DNA, 348 bp, Glycine max
aaccgtcactaggggatatgttattggttcaaaattacacatgatctgccctatgcaattgtgtctacaaaacaatctgtcgaagtagcgccgctcacattcaaaacaatacaaaagctgttctcattgttcactactacaacttctgataaaaagaaataaagtgcgaaacgaagatgtgttctcatatgaaaccaccctttaatttacatctaatgatgtaaacaaaaatacccgtaggtggatctcgtaattcctcttatagaacagtatcgctactagttaaagtacactgacattggtgtgattgctgcatacattactcctgctatttacgtgttacctctc

SEQ ID NO: 210703 - DNA, 422 bp, Glycine max
  unsure (1)..(422): unsure at all n locations
agctngtagaatggctagacatgatacatgttttgtgtttgtgttggttcaaggataaaagggatgccccacattatttccatgacacaaatgcaaaaatgatgatttggaaactttatgcaaaactggtcatgcatgcacctatgcggacactcaagtgtcaaaattttatggtcatgtgatgctagggctcaagattcatttcctctattttaatcaacccaatgtttccaaaatatgttcttttatcaatttgtgcattcatccgagtccatttcgggcgtccggagaaatttcacagcattcacccttcaggtgtagacacattntcccgaaattggttatgatcaatgaactttttcaaagaanagttggaaatcgtctcttttcaaaagcatgctgttttttagctagacaaccta

SEQ ID NO: 210704 - DNA, 427 bp, Glycine max
  unsure (1)..(427): unsure at all n locations
ttcttcgatacatggcttgcttattaacatgagnngactcttcttttctatttctaagaaacaganaataaatggtacagaattgcactgaaagttgactcctcaaaggaagaatacactgatagttctagcaatgaggaacatgtacaggatttcaatttgatggacagaaaatttggaaaatttcttaagaagtctaaagacagaatattctccaaattctccatgaagattgagaataacaacaacaacaacttcacatgcttcgaatgtattaagcaaggtcatatcaaatctgaatgtcctatctaccttagaaaacatgacggtgaaaacaactgaaaaaaaggatagattacatatgagtgcctacatagcttgtgaagacattacatcaacaacctccaactctttcagtgatgatgaa

SEQ ID NO: 210705 - DNA, 439 bp, Glycine max
  unsure (1)..(439): unsure at all n locations
agcttcacaccatgtgcattgctgttctttagtttgtctcagcatagntgcgggtgagacacaatgcaactntgtatcacaaacaaaccttcctttgcagttatatttaactgcgcagattctgctgctgtccatatattattaattttgtacttgatttttaagcttaaactgaaacgaggccctagagaacaaaagacatcttctctgtacaatggcagagaataaatataattatatataattgttgggggaatttcggtacctccctatgcggtagacacgcgacactattcagcgatctctcgcanacaacgaaatntccaaagacctatactgacattccaatatccaagtcaataaatatgtgagatgagtaataaagctgtataaatgtatccataagcataaaatgtcttatataatgacaaaataacat

SEQ ID NO: 210706 - DNA, 475 bp, Glycine max
  unsure (1)..(475): unsure at all n locations
cttatctgctagctnttgcatcattaacaatgaagtgtctatctttctctgccatgaacgcatganaatattgatggacactcttcctcgatcttaagtagacgtgcttttcagcattttggctggatcttattaaggctgacataaagtgtcaagaattttccaacagcgtatcagttgtcaatattcaacgaaagttatactntgtcatattctttcgatttcagcaaaatcttattcacgcgtaaaattgtctctcacaaacgtgtgtacgtttaatcttcaccatcactgtctatttttcctttgctttcttctatttttctttctcgcatcgnactatcaagtatcaacagatttccttgagattgaaaggctanatatttgctccttttgggtaagaataaaatgcggttattctttcatgagcatctattcttataagntacctcaacaaaagtatacttntattatt

SEQ ID NO: 210707 - DNA, 471 bp, Glycine max
  unsure (1)..(471): unsure at all n locations
agctnttctcttgtgacactggatcgatttcttataatttgtaaggacggtcaccacgggtagtgttgatctgcaccaagatgcttaatttgcgctgaaaaattcattcacttgcgagactctgcatcggaaatgaaccagatagttgaaagttcaacgactactctaagggtatctagagatcaagctcctctggtaacaagtcctttccctccaatttctttatttgcatattatctttcttcttttgaatagtataatattttctcatctttcaactgcagctcttttttctatttattcttttgtgcgtggataaaaggttcgacttggcatcgctgtgcttgaggctttggataacttgagctcctatcatactctggttgtgcttggaagagacgcagataactaagtagtacttcacgcaatgggagtctatgaccttactctctttattctagggctcttatt

SEQ ID NO: 210708 - DNA, 320 bp, Glycine max
tacaatactgtcatattagcatacacaacatcatcttctttacacgtgagaaattatatattaggtacacacaaattaattgaatctctaacgtccggattatttataatcgcattatcaaatcttatttcttccggctctttttttgggtacaggacgaaaggaccaacaaagtagatgtttgtttcttccatatgaataggtgatcactaaaatgttgtccttgaattatacctctcgcgagattctcttaacaatagcttctacgactctttagtaatttatttttctactaagctatgaaaaatacttacacaagt

SEQ ID NO: 210709 - DNA, 445 bp, Glycine max
  unsure (1)..(445): unsure at all n locations
agctnggagaggatgcttcaatggaggataagatatatgtagagaaagagagaggggggagcacgatattgaaggaagaaaaagggagagaagttgaactttgagttgtgtctcacaagactctcattcatcaaagttacaacaagtgttactcatgcttgtatttataaactaggtagcttccttgagaagttttctagagaaaactttcttgagaagcttctttgagaaaacttccttgagatgctagagcttagctacacacacccctctcataactaagctcacctccttgagaagcttccttaagaagattcctaaagaagctagagcttagctacacatacctctctaatagctaagctcacctncttgagatgagacgctagagcttagctacacaccctctataatagttaggctcactcccatgacanaatacatg

SEQ ID NO: 210710 - DNA, 490 bp, Glycine max
  unsure (1)..(490): unsure at all n locations
ctcagcttttggaccttcctgcaggacacattngaaagttagtttgtctgtaaaaccaatcatcacttcatttttcttaaacacaacaaaagccaaacaaacttgaatggtgcacacttcttttcaccaaatgcaagtgtcaacgtgcaattagaaaacaatcacacattggtgtatgtgctattttatgatatatatatatatatatatatatatatatatatatattgaaaggccttttaactacctagatgcaaggtgcccatcatggtgcagcaaggtcaaatgctagtctaaaatccacacaaacatgctctcatattcatgtaattcatgcattttttttttgcatccagaccacaattagattcatatgcctaaggcatgcttttggcattttattttaacaacttaaaactgccacacncttcanatgacatccatgtatgcacaaattcattccataattcatacttcacaatatcacatg

SEQ ID NO: 210711 - DNA, 432 bp, Glycine max
  unsure (1)..(432): unsure at all n locations
agctgcggaatatgatttgcagtctcgatgctcaccatntntgcactntgcttccattttggtattcttgctcactccatacaagtacaccatccttcggttctctagctntccattgatgcattntagagctctaaattgtatgtatttgctcaaatccatgaagtaatttgtccttgaattcatgtttgttttgttgaattgaggggtcgtggaggccttaagcctatgttgtgttcttaaacaatggggcatgtcacattgttctcattcccttgttattcgtgccaaaacatgcgcccaccaagtgctaggttaaatgcctcaatggaacttgtgcatgattttgtgaaatataacctatgagaacgaatggtatacatgtgaatgcctttnttgagtgcgtangcagtntcataggaactagaatag

SEQ ID NO: 210712 - DNA, 371 bp, Glycine max
  unsure (1)..(371): unsure at all n locations
actaagctgcacccactcgccagcagcaggtgcttctcagattaacaccttttggagaattttggaggccaaggggctggtgctattgaacccattttactaatcacccccggcttttttgggattctttttcgtaaagtacggaacttacaatttgaacgaacttgttttttcgtatatacggaacttgggatacataatatcncttttgatacggaagtacgacctactaatggcacatgtttattgattcgggtgacggaactacgatggctatattttttgttcggagtccgaattaaatgctatgatgggccacactaaagacaacaagtgatgataacaagtctgacaataggatacgtgccttt

SEQ ID NO: 210713 - DNA, 479 bp, Glycine max
  unsure (1)..(479): unsure at all n locations
agctagtatccatgtaaagaagtcctctctctttatatcataaacgaaggttattcanaatctttctcatcccatatagatgtatctatcatctcatccacaatgaatttagaggaaggcatctcatgcatattcaactctcaacataaggcatacactgttgtcacttcccaaaagatgataatcattttacgcataattacaaaacatcattttaaataactaccacatagatactctaattgcatgcacattaatagctcataaaatcacacctggaattatagcatcatatgaatcaattaataattaattatgaaatacaacacacatgtgtatcataatatattgtagctgatatataagataactaaacacaaaactcatgcgaactaagttatgaaatttaaataaatttcaagattaatatgtaccattgaagaacatcattgaatactcttgtgaaaataaataaatcc

SEQ ID NO: 210714 - DNA, 443 bp, Glycine max
  unsure (1)..(443): unsure at all n locations
ctagctgagagcgaaaaccgagagtcttgtgctttagcggttggaganacctgcggccgagctgagagccagctgcgcgtgagttaagaacgatgctcacgctcttcgtgtggtagaatggctgcactaggtgacaatatgagtgatacgtgatacatgatcagaatttcgaaaaaactttttcattaaatagttctctgggtgtttaagttacagaatgataaaataagaacttttcaattatttgaatgaataaaaatataatacacaaaatattttatcaccaaagtaatggctatgttactcgatcaatcaatccataatatcacttatcaacattatgtaagaagctgataaataatcttacttcttacgcatgatagtgtgagtttgatgttaattccttaataaatttgatactcaaatatagtcttgactttgat

SEQ ID NO: 210715 - DNA, 363 bp, Glycine max
caagccttaaagtgtaactcttgaacacataaatacctataatgcaattgcatctcaagtaattcttagaagaaatattccttacataaataatctctaacgttaaaataaattgaagttaagtgaccaacaaaaaagataattataacattttccacacattataacataataaaatgtataatgaaaaaacaaaatgaatttcttttaaggaattgtattatcacccctattgatggatatatctactaactaatatgatttattatatcttaaatatgaaaaatgaggcgctaccaaaaaaatcatagaatatatttaagataaataacttggaagaaaatattcataaaacggatcaat

SEQ ID NO: 210716 - DNA, 487 bp, Glycine max
  unsure (1)..(487): unsure at all n locations
gcttcttatccaagacactctctgggagntgatacttcttcttccatggagttcgcatcctgatactacttgttgttgtggatgtgaaatctaactggcaagtgcactgngtcgtcaagtaaataattaaaacagtgtgaatcgagtatcgaactcagggaactcgttttacatggaaaagcatcattcagtaaatatgaatttacgtaaagaattgattatcatgaagtaaaaatagaagttattctattctaagtagaagcagtaatcgtgagcaagtgagtgtgaaaacagatatgtaaaagcattgtgtcattctactgagatacttgatgcaattanggtctctctctacttgaaattatttatgtgttctatgatgaagggacaaataccacacaccgatgtctcgcgagtttggcctaattcaaattaaacttcgttctcaaatgtctcttgttgaacttatcctaacagaacaacatta

SEQ ID NO: 210717 - DNA, 488 bp, Glycine max
  unsure (1)..(488): unsure at all n locations
cttgagacgcatgtganaactntggcatcatcaagacattcagcttgtttcttngtctacagctctatcgtaagaactttcttagaatgcatgctttctaagatggttcttagaaaaaatcgtcttataaaacatgcattctaagacggcttttacgaacaaattgtcttagaaagattgacttttctatgacgacttttgtgggaaccatcatgaaaggtcttgactttcaacgacgtacgatataaagaaagttcttaatcgtcgttgaaaacctttaataaccgtcgttaaatgccttctttgtagtagtgcattcttgcatgtaaggaacctcactcaaagtttaatgtaacgttttcttttgtattattctattgtgcgaataactctcaaataatatcttaatgatcaaaattcatctaatctatgatttggactntcttcatccatatataaatatattaatgaaatggtgcgtgtatata

SEQ ID NO: 210718 - DNA, 402 bp, Glycine max
  unsure (1)..(402): unsure at all n locations
acgcaagntgaaagccttggaggaaagaggcatgcccatgttggtgaggatgatttcttcagaattacctgcgtcaaccttatcagagagaaaccagacaccttcgaagtattcaaagagccgagtctaagacttcaaagagacaaagactgagtcatcaagagaatgaagagtgaccatggcagagagtttgaaaacagcaagattactgaattctacacatctgaaggcatcactcatgagtgctcggcagccatcacaccacaacaaaatggcatagttgaaaggaacaacatgactctgcaagaagctgctangggcatgctccatgccaaagaacttccctataatctctgggctgaagccatgaacacagcaagctatatccacaacagaagcaca

SEQ ID NO: 210719 - DNA, 424 bp, Glycine max
  unsure (1)..(424): unsure at all n locations
actcaacttacacttaacaaatctataagccattatggaagagtgttatttataagatgtatgactgcaactcttacaatagcaatggtgggacataatttcaattcagttattccactcttgttttaattatgtgcttttatatagttccaaaattgcaatcaacatcaaattttcctaacatttgaaaatacaatgaactctctctccctctatctttgcattatatgtcatttgtcgaaaattataagcagtagtatataaacacaaattntcaacttcataacaaccaatgcanataaactagcgatataattactctttattgcataaactatataaataccatattttaacttcatattatgactcttagtcgatctcgcatattntttcctttttaatatataaagatagagatctg

SEQ ID NO: 210720 - DNA, 347 bp, Glycine max
agagaacaaatgtgactaacctctgaaagctgatgtgtatctacttgatgaccaaccttgcaaagttgatgtgtatctacttcttctgcttctgattctttcaagcaagcatttggtttggtaaatacatgcaagctggccaacgatgctagatcaatatttagaaaagcggaactttcaatgaatgttgttgacatgtatgtcacactaagatctagaacagaagttgcattattattgatacttgtggtggctatacaaaccatgcttgtgttcttctaaacctggaagtctttctctgaaatctggaattctatgcgtgcaaaactgataagggacatactgag

SEQ ID NO: 210721 - DNA, 405 bp, Glycine max
  unsure (1)..(405): unsure at all n locations
ataggaatntctacccttacccttggaagagagattataattatctccacaaaaganaaggaaagaatagagaataagaaaatcaaacaatcaaagattggaggaaagcgaacgataaatagaacaagaaataaagaaaaatatgaaaagattctttggatcagacactgtctgaacaatgtgcagaattgtcaaaaagaaaaagaaaaaaggggcaaacaataaattgtttgatacctgagggatgcctgaagtagtcacctccatgcttgttccatgctgaaccaaagagaatagagaaataaaccgacaagggaaaggccagaacacccaagagcccatatttcccaccaaagttcaacttcctaaaaagtcccattgatccatgttttcacatgttatctt

SEQ ID NO: 210722 - DNA, 412 bp, Glycine max
  unsure (1)..(412): unsure at all n locations
agcttatatagccctaatcttacactatatctatcataacataaaaaccctanaaatctaaagctacagttgaagtcttctaccctaaagttaagacaagaaaaagagaaaaagaatcatggaacttacttggatggtgtatggttgatgcttcaaagttgaaaatgcacaaagaaagcacagatgcaaaatgtgcaatnttttggagagagagaatgcagagacgaggtttccgtaatctcgcaaatctaagtgtaactgctgttacactcacttaagcaattttttgatactttcgcttagcggaccgctgcgctaagcgagcaagagagacgtttggtttctcaacaaggattgcttagtggacccgtgcgcttagccgacgtttcaaattcaaaatcagttttttttt

SEQ ID NO: 210723 - DNA, 410 bp, Glycine max
  unsure (1)..(410): unsure at all n locations
ctggttcgaggtacttacncgttgaagatcgaagaacgatgatgtactaatgaagaacgtcgaagaacggttcatacctttgcgagattcctcacggaaaacgttacggaaacgtttcggaagcgcctcggcttagattttcttcacggaaaccaattttccaagcaaattccaaagagaaagaaatgcctaaagggctgggatccctttcttcttgctttcctcccctatntatagcanaataggggaggtggttgccgcccagctcgcccaggcgagctcagctcgcccaggcgagcagggttgcttcctccagaagcaaccgccttctggaggaatcttctggagggcccaaatgggcctgagtgctatttgcacccccatttttactaagtacacccactctgctg

SEQ ID NO: 210724 - DNA, 487 bp, Glycine max
  unsure (1)..(487): unsure at all n locations
agctntntcattaatctgtggccagctacaactattgtattattgtgttcaactttaaaggtgagggttgtttggttaggatcattgacttcaaaatgtggataaattggacataaatgagtaatgtggttaagaaggttagatgtaacctctttttcgatcacgtctaaattctttaccataatggttacatactgcaatcagatcaacaaaattatgtttctttgcgaaatggtcctaaaaaataaaggttgtttatttaccactagcatttggtttcttttctttctatttttaggaactacaacttcaagagtagcaactggttgattggttattggtgcagtgtttccagcctcacccgctacattaggcaatagttgaccagactactccatcactgaataatgaanatttcttaatcaataattaccatctattcatgatgcaacttggtttagtttaactaattatattacttatactg

SEQ ID NO: 210725 - DNA, 474 bp, Glycine max
  unsure (1)..(474): unsure at all n locations
agcttgtggggcttctatggaggctggatctgtgagctttaatgatgtcctttaacggngattntccaccatggagatgcagcggaagacaaaggataagaggtgagaggaggcgccatccactggggaataagccatggaagaagaagcttcaccaccaagatgagccttggataagaagcttatagaggatgctncaatggaggaaaagaaagagggagagaaagagagaggggagagcacgaaattgaaagaagaataagggagagaagttgaactttgagttgtgtctcacaagactctcattcatcaaagttacaacaagtgttacacatgcttctatttatagactangtagcttccttgggaagctttcttgagaaactttcttgagaagttctttgagaaagcttcttgagagcttgacttactaccataccctctataactaactcacctctgagagcttcttga

SEQ ID NO: 210726 - DNA, 260 bp, Glycine max
cttataaaatctaaacgacaataactgtttactcggatgcccgacagagtgtcgcaatttatcgagagatgctccaatatgaatacgaaaactcgtatcaaatacaaacgacattaacctttttctcggatgtctgatagactcccgtaatatatcgagacgctcaatatttatatgcgaagcactgagaaaatcgaattgacaataactttatacacggatgtgcggttgagtcctgtaatatatctagacgctccaaa

SEQ ID NO: 210727 - DNA, 359 bp, Glycine max
  unsure (1)..(359): unsure at all n locations
cccatatgcacttctctctctttngaatgtgcttggtaaaattgttnccgtgaagaanatccaagccgatgcgcttccgaaacgtttccgtgaggaatttcgcgaaggtttgaccgttcttcgacgttcttcattcgttcttcatcgttcttcgatcttcaacgggtaagtacctcgaaccaagcttttcgattcattctatgtacccgtggtggtccacattgtatttcgtgtatttttattctcgtttcatttactatgtataccctcttctgacgtgcttatgccatattatctaagtcatttctcgcttaaactaaaaataaaatatatttcaccgatctgttgaatcgtttatc

SEQ ID NO: 210728 - DNA, 355 bp, Glycine max
ctatcaaagaccacctgccacatccaatgtggagacaacaatataataaaccctagttagaaaaaaaagtgtaagaaccctaatttttgtgggaataattgatcagttaaacctaaacccttaaacggaagatggtatgtgtaccgattgcccaggaggcggtgtatgcggaagatgatatcttcctcgtcggaggcgatgtggccgcgcttgacggaggggcggaggtagttcatccagctgaagcggcagctcttgccgcagcggagaaggccggcgcgcttcgagactgtcttcaccgtccttcttcctcttaatgatgtaattcgtaacatcttgttctctgtggcgtcat

SEQ ID NO: 210729 - DNA, 441 bp, Glycine max
ttagattctaagagagcacaagatctatactaatcccaatgatcttttcttgttttgtacaaatagccttctcactattcccttttcttaagttgctttcgacctttttgttacagcacaagtctatttttttttctttttttttttgacatacaacttatttgttgtgtgtgctgatgcttaacctttttcttttcattctaattgactctcctccccccaaatttatgagaaattttccttgaaccatatgctcttctagaatctaaacaaggtattaagagataatcatgtaaagtttagggttcaattcatgacatatcaataagctgtatacaatggagcaaaagatacaagtatcattcaagggaagctatttggcaaaagagcttgtgctatacaatcatggcctcatcatgttctgagtatacaaacattcta

SEQ ID NO: 210730 - DNA, 243 bp, Glycine max
  unsure (1)..(243): unsure at all n locations
atgacacgtacatgttcgcttagcgcacccactcatctcactaagcgcaacgctntatgtgcatccactaagctgagacagggcgcgttaaccaaaaatcacctatgtgcgcgcagcgatacagacgtgcgctaaccacaccagcactagcgacgccctcgatgtaatcctgagctttaatattataaagagagtctggactaggattcacagctccctctgctacggtttctagagagagaa

SEQ ID NO: 210731 - DNA, 437 bp, Glycine max
  unsure (1)..(437): unsure at all n locations
agcttgtctacccacaagtgaaatgctatcaatatactccctaacactntntttaatacactatcattagttgaaatttattacaaatcatataatttgtaggtttggcttcttatttgacaagtcttactcgtgaatttgtagtttctaataatttttaaccagtagaataaagtgtattagagaatgagttattaacactcctgccgacaaacttgtttttaggtaccgaagaaaaaatatcccttctgcattcttagctaagaagccagtatactgttatatttcttctggcttcttagactcaaattccagtttttaaaaccattatgcaaccaatatatgctctctgtgaaacatgaagaactaattggtggtacaatcatgagttcatcccatatttatctggttaaacctagactttctaacaacaccct

SEQ ID NO: 210732 - DNA, 426 bp, Glycine max
tgtaattaaaatatctggtcaggcgaaatattaatggtctttctaactaatagacgccagattcaatattctattatttaatccaagtgaacacttccataaggtttggttcagtttctatcaagaacatacatcaaataaaggatgcacagcttttagataaaaagtttatgaactccaacatacctgcaaaagacaactacattcgactcgtttttttgatacactgccacaggtctttataacattcctgtagaacagcttctcaacaacaatgacattcagatggttgaaaatatcaaaaccagactgcttgagtttatcatatttatcaatatgaaatttatgaatgtagcgctgggcatatggcagagtccagtttaccaatgactttttcagactacaatcagcaagaccataatatat

SEQ ID NO: 210733 - DNA, 263 bp, Glycine max
atacgtgaatacgatgttccaagcacttctgattccggccgaccatgcgctcctgactaccagctgggaaatcggcgagtggaagaacgcccccgcatttacgcaacatgcatgatgtaaacctttacggtgaaaaagcgctatagtggggcctgggcttaacagggttcaggacgtgaggcggcgaagcatgcgctctgatctataacacaaggatctatcgtcatctgctcctggactctacccagtctcatgcatttgca

SEQ ID NO: 210734 - DNA, 342 bp, Glycine max
agagtggtacctggagatatgtcacgggaggtcacgagacctccgggacgtcaagtggagtgctattgcccaaaaccaagctagaccaatcccgacccaacccgggcatagtcggtcagtgagaacctgtgatgtacctaagcaggcgagctcctgtcagtcaacagataaaaggaacatagaccacaaagcaaggaggcttgtgatggctggccagctgtgaatcttgtgtgatatgtggattatggcctctggtaatcgattaccaagggtgggtaatcgattacaatgcttaaaagtgaagacagaacgctaagatggtctctggtaatcgattaccac

SEQ ID NO: 210735 - DNA, 393 bp, Glycine max
  unsure (1)..(393): unsure at all n locations
aactaagctgtgccataaaagaatgactgtgatggaagatactgtaattgttgtcacgttgncaaattgattgtgaaggaatgcattaatcatatcccggtgagagtgtgatcctttaattatgagagaaacaactatcatttagtactgatttttgcttgaatctctgaagtatggactgaatgcatgantatgaggatgatgaaagccatgtttgattgtgatagccacttatccaaaaagctgaccatgtgcttgaatgaattattgattgattgaaccttgagcctatagtgctatctcttgctaccttgacttaggttgtaggagagcatcatccataggaaacgtggttcaaagcanattcgtccctatntgggggagtaattatca

SEQ ID NO: 210736 - DNA, 390 bp, Glycine max
  unsure (1)..(390): unsure at all n locations
tgcagctaacnaagaataagaatgtcaatctgttcttggtgtttaatactatgacaaatatggtggttcaggtgaacaacgtctaggtccatctgccaaattccaagagatattangaatcgtccctcaatacacaatgctagggtcacatagcatgaatgatgtagccgagagacaaaattgtggaagcaatgccttccaagaatattttgatgatgccaaagaatcaagagtcaagcaagttccaaagaatcaagagtcaagcacgtttcaagaatcaagatcaagattcaagattcaagaataatcaagatcaagattcaagtatagagtcaagaatcaagagaagactcaatcaagataagtattagaagagtttttcaaaaagta

SEQ ID NO: 210737 - DNA, 487 bp, Glycine max
  unsure (1)..(487): unsure at all n locations
ctaagctactcagagaaggacnagnttttcgagtaataagctatttctattgcatattatntaatgcctcgctctcttctgccacctttttataagctcattgaataaaattgatgaaccttcaaaagccttggaatagatatggggaaccataaaaataaccttgtaataggagaaatactatcaatgatatgcaacatgcaaaaaaccaatcttagttctaaaagagttcagaatcacttttatggcttgtcatgcccaacatgcatattgtgtgtcatttagtcatcatgcattggcctcactttgagagtcaagcacaatggaaataaaatatagatttatgaatncatcaagttttataaatggtgttagtgacaattaaagatgggatacatgaaggtgcttggtcaataggtattggcatgcatgccactcttatgtcagtaacattcattttatcactntacaatgagtttcaatccta

SEQ ID NO: 210738 - DNA, 463 bp, Glycine max
  unsure (1)..(463): unsure at all n locations
agcttctaaactatatacaagagtgaagctctgatactattcgntagacaagtgacctcagatatcttaagaatggggggtagaattaagatattccaaactacttgcgcaattatttagatctatttcactttttattcaagttataaattccattaataaagaacttcttaaatattgattcaaataaaacaatttgaatatgaatgttaagcaataatcaacagaggagattaacggaagagaaagtgcaaactcagaattatactgggtcggccacacccttgtgcttacgtccagtccccaagcaacccgcttgagagttccactatcttgtatattccttntacaagttctaaacacacaaagacaatcctttctttgtgtttagaagtcctttacaacaagagactcacagactctaatcccttagagatgatgagaagaagataatgatctctct

SEQ ID NO: 210739 - DNA, 441 bp, Glycine max
  unsure (1)..(441): unsure at all n locations
tgtagataacaagacatctatctaaagctaccattgccattaccataggacacatgaataaaactgcagagttgaagacttagggaacatacctaacccaattgtaatactagccacactctacacagtaactgaaaggagctaatagtgaaataatgagtcagtgatctatatagcctgaacacataacagccttgtctaaataacatanagctgcttatgttttcttgtttggctcacagacatatntgatgagtgattccttgatggaaagcaattctgggaaattccgtcttcaattggatgcatccatctcgttgttgcttcgaggagcaacgatcaccttcgcttgctcttcaagggtgaagttagcccacttgaagttgnggtcaatgtaatccctgtacatctcaaggatctcattgtggctcacaacccctg

SEQ ID NO: 210740 - DNA, 411 bp, Glycine max
  unsure (1)..(411): unsure at all n locations
tgttcttctcttaagctcgcatatgaagaatgtgacaactggagcattaaatatatgtacttcttcatgcgagaaaaccactcttctttgctagtgcattgaacactttagcaagaaaccacttttttttgcattagagcaggtctatgcagcaaagcactctctttgatggcaattgtggaatttcagagcttagcttcatttatttatcataggattcaatagatcctaagaaaatggttctacaaanataaatccgagacacacagtattaaatgacatcttaaatggtcattttaatatcatatcagatcattagtttatcgtgctatcgtctaaagtattagacgcatactccaaaacatgtctaataaagataagaactacttttaacctgttggattgttacat

SEQ ID NO: 210741 - DNA, 474 bp, Glycine max
  unsure (1)..(474): unsure at all n locations
ctcaagctggggtatctcaattccactcagcagctgaacattcatatttatatagtgtctttagagtacataagaagaaagaaaagacaggttcagactatgggaacctgcccggctgctcctatataggatnttcagagtaaaataaaaaacagcttttctaaagcctgtacaagacctttacagaggataaatctactgagtgggtgaaacacttaagtttttcccccttatattcaaaatcttcaaccgtacaggtgggcaaaacaaaccagaaacaaaaccaaaacccgaaaaagactgtatccagcacacagatttcatatcaatccaactcttcttttacaatgaaattcaattatccagtgaatgataaagcctgacatttggagggggtgttcatgtaaataacatgacaagggtgtgtgtgcatggagagggaggaatctcatgtattcatgtcagtcattcact

SEQ ID NO: 210742 - DNA, 497 bp, Glycine max
  unsure (1)..(497): unsure at all n locations
ggatccttaagcacctgcggctgcagcttgagccattagacgacaatacttttactcggatgtctgattgagtcccgtaatatatcgagaccttcgaaattgaaagtttaagctctgagccaattcaaacgacaataactntttactcggatgtctgattcagtcccgtaatatatcgagacgctcgaaattgaatgttgaacctctgagcaaatgcaaacgacaataattttttcttggatgtctctttgagtcccgtaatatatcgagacgctcgaaattgaatggtgaagctctaagcaaattcaaacgataataactttttactcggatgtctgattgagtgctgtaatatatcgagacgctcanaattgaattgtgaacctctgagcatatgcaaacgacaataatctttttctcggatgtgttatgagtcccgtatataacgagacgctcaaattgaatgttgacctttgagcaattcaaccgaatacttt

SEQ ID NO: 210743 - DNA, 445 bp, Glycine max
  unsure (1)..(445): unsure at all n locations
acacatagaaactcagctgtatanattcaacgacaataacgtttactcggtgttngtttgctgttcgaatatatcgagacgctcgacaatgaaaacggatgctcgtagcaaatgcaaaccgcaataacttttaactcggatgtatgattgagtaccataatagatcgagacgctcgaaattgaaaaaagaagttctgagcaaattcaaacgactataactttttactcggatgtctgattgagtcccgtaatatatcgaggagcacgatattgagaacagaagctctgaccataatcaaaccacaataactttatattcggatgtgcgattgagtcccgtaatatatgaagacgctccaaattgaaaacagaagctctgaacanattcaaacgacaataactttttactcggatgtccgattgagtcccgtaatatatcgagacg

SEQ ID NO: 210744 - DNA, 495 bp, Glycine max
  unsure (1)..(495): unsure at all n locations
agcttaataaatctatatatggtttanaacatgtcttttttcagtggtaccttaagtttcatgggataatttcttcatttggttntgatgaaaaccccatggatcaatgcatataccacaaggttagtgggagtaaaatatgctttcttgttttatatgtagatgatattttacttgcagccaatgatcggngtttgctacatgaggtgaaacaatttctctctaagaattttgacatgaaggatatgggtgatgcatcttatgtcatcggcattaagattcatagagatagatctcgaggtattttatgtctatcacagganacctatattaacaaaattctagagagatttctgatgaaagatagttcaccaagtgttgctcccattgtgaagggtgatatgtttaattcgaaccaatgtccaaagaatgacnttgagagggaacanaatgaaaacattccttatgcttcnnagtgtggaacctcatgtatgc

SEQ ID NO: 210745 - DNA, 378 bp, Glycine max
  unsure (1)..(378): unsure at all n locations
tgccacccagctccccaggcagcaagttgcttgcttcaaattacagcctcttggacgaatcttctggagggcccaagtgggcctaattgctatttgcactcccctttttactaaatgcacccccttctattttgttggtaattctttttccgtaatgttacgaaactttacgaatttcgtaacgatacttatttttcttccgcatggctacgaatccttacggattatgtatttactctcttttagctttcgaagaaattacggaaacttacggattgcgcanaacacctcttttcgatttccgtcacattagggaatttcacggattgcgcaagcctgcttccttttgatttccgacacgtctcgggacttcattca

SEQ ID NO: 210746 - DNA, 470 bp, Glycine max
  unsure (1)..(470): unsure at all n locations
atccttaagtcacctgcggcatgcaagcttaactgaatgtgcaacattcatattgtttaccagtgtatctgaatgttgaaattcaaattaaattgtgaagagtcgtatcttttcataaaatgatgtgttatcgattacatggttttggtaattgattaccagtgacaagttttgaatagaaagtcaagagatataactcttccaatggttttcaggtttttctcaaggttataactcttccaatggttttcttgaccagacatgaagagtctataaaagcaagaccttgacttgcatttcaataactttntcatatattcttttacaacctttgaatctctttgaacatcnttttttntaacttcttcttcttcttcttcttcctttgccaaaagctntcttgattttctggtttccaaactttgntctttcacagaanacaaaagngngctatatnctttcattctctt

SEQ ID NO: 210747 - DNA, 462 bp, Glycine max
  unsure (1)..(462): unsure at all n locations
ctcagcttagagaagacacaagatncattaaatcaagcataaccatttttatcactgcttcttcacccggatacctcttataggtacatctatttctcttactccaattcanaggagtttatntgtttaagtcttaacttctttttcacctcaatttctctcatatgnttttggttatgttntggaagcacgttttgactgcatttactgttntgggtaagttgaagtgcctatggtagtataatgttccaaaacattaagaattgtaaacatctttatgtatctatgtggtactttgggttatctgagtgtagaaataacagttgaggataatatcttttcatgttatatcagttcagaaataactcacgagtgtaatgtaataggaaacttgtggtgtgtctaagctnctactctctattattttagtatatactacatgtctntcattntttagtatat

SEQ ID NO: 210748 - DNA, 474 bp, Glycine max
  unsure (1)..(474): unsure at all n locations
ctatgggatcaacgagnctatcatgtggtcaacaatatggatgtgtactctctaccataccttaatagttgaacgttcactagatgctatacaacacaagtttaacgaaactaacctgaaggctatcaaggaggacttgagacaaacctgtatagaggctctataagtgggcgtggaagccatgctaaactccaaacaaaacagataggccacgtccatcgttgaatttgataagatagaaatgataattccatcatgtacgatgcattagataaagagcttgcatgcgacatataggataagtgtgtattaaatattatcgctggcaatgaagaaacatattctagtcttacaatgaatatatgtttgatgtacattctcagcctacatcttatcatcagcggatgtctagcccatatgaattggtctcaaagtttatagttacaggctacatcatctcagttatatatatat

SEQ ID NO: 210749 - DNA, 492 bp, Glycine max
  unsure (1)..(492): unsure at all n locations
atccttaagtcacctgcggcatgcaagcttccctaccaagctntcttctcacttgtattatttaccattggtgntattcaataaaggtgagttgttgattttgatcatttatcattttcattgctcgtttatttcctctcatggtcgcgcataccttcaacatggtatcagagctcttcctgtgaagatctctgttgtgcactcgctttccttttcgtttttcttgcaacttcattcattcgtcataagtgacacaacacttagcaacacagaaagctttttgtatctgcatccgagcgagaatctagccattgctctcgtctctccaattntggattcaaccaactatcattcatggagcagatccatgatcacggcgtttagtgccaagaacaaggtagaatttgaagatggaagcacatcgaagccattgaagactgatagaacgtatggagcatggcgtcgatgaacaacatggtcatatcttggatc

SEQ ID NO: 210750 - DNA, 417 bp, Glycine max
  unsure (1)..(417): unsure at all n locations
ntanaatttaaattgaaatttctaaaggctggtacaaattattttattcttctggtaatcgattacaagccttgtgtaatcgattacaggcttaaaatttaaattcaaattttttaagagcatttcagaaattattttggccactggtaattgattacagcctctggtaatcgattaccagagagtaagtttcatatttatgaaatctcaatacttttggaaaatatcccttggccaaacctgtgcatcatcaattaagaaacttttccttagattctangaactaagttcatcaattatcttgaatntttggattcttgacttggatcaaacgtgcgaagcgcttatctttggcatcatcaaaacttcatanaacttcatatcatatttgcttctacagatcgaacttcaatccaa

SEQ ID NO: 210751 - DNA, 445 bp, Glycine max
  unsure (1)..(445): unsure at all n locations
agctagcggaaatcatgattntgcagcccgcattctcaccattttgcactntgcttccattntggtattcttgctcactccatacaagtacaccatccttcggttctctagctntccattgatgcattttagagctctaaattgtatgtatttgctcaaatccatgaagtaatttgtccttgaattcatgtttgttntgttgaattgaggggtcgtgggggccttaagcctaagttgtgttcttaaacaatggggcatgtcacattgttctcattcccttgttattcgtgccaaaacatgcgcccaccaagtgcttggttaaatgcctcaatggaacttgtgcatgattttgtgaaatataacctatnggaacgaatggtatacatgtgaatggcctttttgagtgcgtaggcagtttcataggaactagaatagttgcccaaat

SEQ ID NO: 210752 - DNA, 458 bp, Glycine max
  unsure (1)..(458): unsure at all n locations
tgccacccagctcgcccaggcgagcagggttgcttcctccagaatcaacagcctttctggaggaatcttctggagggcccaagtgggcctggttgctatttgaacccccatttttactaagtacacnccccggccttttttggtgattctttnttcgtaaagttacggaaacttacgaatttcgtaacgatacttggtttctttccgtaatattacggaaccttgtggattacataatcatcccctttttgacttacggaatgttacggaacctcactaattgtgcaacgatgcttctatttgatttccggtgtgtcacggaaccttacggattgtgcatcaatattttcttttgctttccggcatgtcccggaatttcacaaatgggctaatgatgggtgccaagcacctcacaaggaccaaacanaagttgcatgtcatcaagcaaaagtccctgg

SEQ ID NO: 210753 - DNA, 382 bp, Glycine max
  unsure (1)..(382): unsure at all n locations
gcgcggcagcangacaagaccaggacgccaccccaccaaaaacgaagaacaacccgagaaaaaaagagaacaccagcgaacaccgaaaaggacncagncatcaacaaaaacaaaagcgcagcacgccgcacagctaagtaacagtcgtcgctgaaagcacaccctcctcacaccgctcctttgtcggcaccacaaataccgaaaaataaaaagcacacgcaaacacaaaggtcagatatcacaaaaggcgcgggatcatcataagaccaaaacgccaaggcacaacagacgacaagccacataggaagaacaacaacaaccaccaagaagaaagcaacacaccatcgaacggcgaaaagaaggacgtatcaacaaaaacaaa

SEQ ID NO: 210754 - DNA, 438 bp, Glycine max
  unsure (1)..(438): unsure at all n locations
tatggcgcggannaaaaaagggaggaatatctttgttgtttgttataagctnggaacctgcaagntacgtttaaatgaaatttatatatacacatttgttatccaaactgtctccagtgatgatttagtagattacttaatttatttgatattaaactaaacccatgaatgtgataaatcatcgtaaaattgtatgtgggtaacttttgatcctaaaatatgattgtttccattntaatagaacagataaagggcaatcgacgcaagtgggctaaaacttttgtccgagagatgcttccttttaattttggattatgactctctttntcatctcatacacttttttctatttatatttctcctttccacaaaatcagataacacataacacatttattaatgtggttctcttaatcttggattcttatttccactact

SEQ ID NO: 210755 - DNA, 411 bp, Glycine max
  unsure (1)..(411): unsure at all n locations
actaggcgggtgattatagccttagtttcactttatttattagncaattcaattaagaatgagaaatcccaaagagaaaacgttcgattgattctcttgcttcattttactaaaaggtattttttattattatattattattttacctctttttttatttccaacgtggttacggcacgaccaaacagtcggaattcattntaacagaaattaacggatattacaaatcaaatgatcggtggaaatttattttattttttgattaggcgagagattacttaaataaatgactgaagcacgtcaaaaggtggtacggaaagtaaacgaatacgagaataaaagtacatgaaacaaatggngaccaccacgggtacatagaatgaatngaaaagcttgatttgtgttacttac

SEQ ID NO: 210756 - DNA, 375 bp, Glycine max
  unsure (1)..(375): unsure at all n locations
cacaaaccattcccatatgccattgaggcatatcaccgagcacttggtgggcgcatgatttggcatgaatagcaagaatggnggcaatgtggcatgccccattactccagaatgcaacataggcctaaagccatcccttacaaccccctaactcaaaccaatcaagcatgataacaaaccaaaattgccccacaaatttgagcacattcccacaatttagagcaccaaaagaagaccaatatagatcaatggacagcttgagagctcaaggatgagatacttacttgttggagtgagtacgagtataaaaaatgatagcaaaatgcaaccaaaggtggcttgtgggagcaaacaccatgagtcccgtaagctttc

SEQ ID NO: 210757 - DNA, 501 bp, Glycine max
  unsure (1)..(501): unsure at all n locations
agctaggactngaaataaacgatagctatcttgattattagatttanaaattgaatacaaatgcatacaaaccacaaggcatccaagtatggcgacagagacctancaagtagaactaatacacagtattcaacaatgtatacatctaaagaaattgcaaaaccattcttagacaatattcagcataattagaaaaccatcaccccaagagagtatgagtgattcgttgttagccacaatcttttgagtgtggaacatactttgtacttaagatattaactacagagatccagataaaagaacttttgtttgggcacacacaaacagctcacatnggtataatttataaatttctgcatatctgcattccagagcaaccaccatactcgaatgcaagtcacaagcattattctttagttagaaggtgcatagtcaatcattttctaatgctaaagaagatagangacgcagtcactgattcatatattagaaaaccatata

SEQ ID NO: 210758 - DNA, 410 bp, Glycine max
  unsure (1)..(410): unsure at all n locations
tcagcaagagcaccagcaatggcaaccctctgcttgtgaccacttctcttattttggacagatctctgaatattgtaacagaaggaaagttcatttattgtataattcacacatttgtttgagtgctcaaggttgtcatccttaataccttcatgtagtcagacaggcctacagcatgcaaagctcttgacaccctagatctgacttcatcgtgagccaaattgatcttaccaagaccaaatgcaacatcagaatctaccgtaggcattaccacctgcaacaaatataaggctacacagntgacagtccgattgtatacaatacatcatatggggtcaggctgtaaattntcagtacatactttctggtgactatagattgataacaaactcacggtttttacttccata

SEQ ID NO: 210759 - DNA, 434 bp, Glycine max
  unsure (1)..(434): unsure at all n locations
agctntacagcagattttagtaatgacccactttcctatnaataanataacttaatgccattaacctagggaattaaaacaaacttaatggctgagtgtaactgaaattgtggcaaccaaaagtcacccncaacagccaacaagtcagccaccatttggtctcccaaaaggctgatgcctaagttgccaattgggcccttattacaacttgaactaaacctaactaaagcccttntaattgattaacccanaacatatttttggtcagccaactttacaaggattgggccattatttagacaaactaaacactctaaaaattgagacaaagtggtgtcatttagtcctcctcctattgggccatgatacaactcacaaccttggacttttctccttgaaacttgggcttgtattcaaatagtatggacagcact

SEQ ID NO: 210760 - DNA, 405 bp, Glycine max
  unsure (1)..(405): unsure at all n locations
tctgcgcctagaaccacttgaaggtgtttaccttctcgctaaccaactgtttctatgnatcgttgctaagcacaacactcatgggctaagtgcgaggaagactctggaagaagatgagctgtacaggtttgctaagcgtaccgcttcatctcactaagcgcactgcttcagttcatccactaagtgagaaaggcacgcgctaagccaaaattcactaatgtgcgctaagcggtccataattgcgctaagcgcacaagcacaaacaaggccacctatttaagcctaaaatcagaatttagagagggagtttggacggngattcagagctttgcatgtctagggtttctagagagagaaaggtccaagttctaaatatgtttgagagatctttgtgtgtgaagatct

SEQ ID NO: 210761 - DNA, 449 bp, Glycine max
  unsure (1)..(449): unsure at all n locations
agtctttggagtatanacatgagaccaactcattttattatananagaaagacgcatctagtcaaggtctgagagaccatacaagtttcctaactgattctaattatgtgggccattaagtctatcatatgctgacaatagccgagaagcccatgaatctcttcgggggcggagtaggtgtctgccatcgccttggccttggctaacaagcggagaagttcttgactcccgttcaaggtaagagcanaccgatccatccacatggttgcctcttggtgtaaagagtcgatcacccttcctctagcctctatntccgcgtatacttgagcatactcgtccgcgaatctatgttcatgggccgtggctagacctaactcttcttggtacttggcgatgataactatcatgttggtctctgnctcgcaataacgctgagacaagcttctttt

SEQ ID NO: 210762 - DNA, 146 bp, Glycine max
atcatcgacacgaatgaggcatcgcggaatgataaccagatactgatcatgatatggcgcttttggatagggaggatcactctggatgtggctcgtgtgccgattgcttgcatacggatgatacagatgcggtgaaccactatcat

SEQ ID NO: 210763 - DNA, 289 bp, Glycine max
tcttatatgatatgactgattttttcctgacgacacgtaatgtattggagatgtcaggtatacactggtcattggcctattggagagcatgtaaacatgataaggatgaggaccaatgacatacatgaaactttgttaactgatgttagccattcatgtgcccatttatccactatggtcattgggcacctctatgttcacatcggacaactagtgttatgaatagggaagaagagaacactgaccacgttacacaattcaatccgaactactttctgctctttcctgc

SEQ ID NO: 210764 - DNA, 473 bp, Glycine max
  unsure (1)..(473): unsure at all n locations
gcatgagaagcaagctntgttatgagagactcttttagctgaagataaataatncagccatgggttgtgttatcaggaattccaacaccagagatcgaaagtaataatacaagtcctcactggagaactctagtttttgtggccaatgagtaagggtgtccccaggagcaatatcctttacagctcttgcaattgacaaacaaaacacgtgggtggagtacttgaccataaaaaataaatatattctaatatagacttgcatgtaaaaataaaagggtgaatgttgaactaaacatgattcttaattcaaaaatttctattaatttcatttcataacatatgtactngaatcatntgtatttctaataaacaatgacttataaacaatcattcttaaaatcttctttattctacaaaaaatctaaactctaatgtcagaataaatcaactatcaattagcaaggaaaaatatg

SEQ ID NO: 210765 - DNA, 503 bp, Glycine max
tcttaagtcaccgcggctgcagctttgataagatattgacatttgttttattagtttagaaaggtcataagctagcccatataagctcttccaaacacccatctagtctatttctcttagtttctgcatccaatcagtttattttgataagcttttcgatgaacatcattgaaataaggttaaaaaaaagttgagaaaggtcataagccacttccataagcccaaataaactcttccaaacacccatctagtctatgtctcttagttgctcaaccttcatcaacttctatatgttttatatctgaaataacaaacaattgttatggtatcctagttagtgttaacctagtaagtctgcctggaatgattacaaaaaacataacagcctgacaatggaatgttgatgaactcttctaaagaaacagattgtgctactacatctacctctatcttctgaatgatgtgccttggaaatgttcttgcagatttctcatggagatata

SEQ ID NO: 210766 - DNA, 471 bp, Glycine max
actcagcttcttaatatgctaactcttactggaagaatttttgtttgtacaagaaaaatcgagtactccaaagcacaattaatgcatagtccggcatggagggagtcaatatgtttagtacatgtagatcaatgcccaaatatacagttcctaaattgaagctaaaaagatggtaacattctgatgaagagaactttatcacagtaatatgttctaaagcttcatatatttataggcatttgtgtttcaattctatgtatattcagtatttataaattataatgtctagattcaattctctaccaaataaagttcatagaaaggattacaagcagaggtatccctctgtgacaatggaaccacaaagaaaatgcatgataataaagataataatgagggaatatcccaccctttcaacctcactgcctacttaatttttcctataacctcactacttttccgttctatctc

SEQ ID NO: 210767 - DNA, 475 bp, Glycine max
  unsure (1)..(475): unsure at all n locations
caagcttgganatcagaagtagagagccctacttatacattgtggtccgaaacaatgaaagtgtctttcgaaattggcctttaatgccatatatcattgtttattgcctttttttcacttcatgacaatgcttattaagaggtattattcctacttaaagatgttgctatatatntaaaggtcgtttattttgagaaaatattttgcttttatttttatttttcttgttaattatgaatctctcactgttttaatttatttttatttgcaaagatctntacaaaaaatagagaatataaaaaaatcttatagtgtctacaggataaattaatctttaaaacagggaatagatttaatgtgaaaatcacaatagaaaatacaaacaaaaaaatatttctcacagtacatatttcataactttctctcttgtcttttgctacacgtccaaatatgccttcatattatctttatctac

SEQ ID NO: 210768 - DNA, 498 bp, Glycine max
  unsure (1)..(498): unsure at all n locations
tgacagacatgctactctngcacctgtcaaggttactacccttgttactagacaacacttgtctaggttggggggcttggcaaactaacaaccctcatacttgtccaagctattgttagagatagggggagcaatatgagaaacataagcaacatggaacaacttatggctaaagcttgaaactcagggaaaagcttgaagaagctntagaagaagttttggcttttacatgcccaactcctttgagtggcattagtattggttgttaacttgattggtgtatcttagtacatctgatatctatgttgcattttgcatcaccatagagtgactgaagaaaanttttataagttaaaaaaatttcttagacgcaaaaactcactgtnttaataagttacaatgttgtcgtaatcgattacaacaagttgtctaaagcttannaagttaactctcgtatcagtntaatcgcatatgggagtactttaaatcgatacacta

SEQ ID NO: 210769 - DNA, 438 bp, Glycine max
  unsure (1)..(438): unsure at all n locations
agcttgtagggttcaccccanattccgttgtttatgctaaacttgatcccatatctacttgataattcaatggtagccataaccctagccaaggttcatcaacctccatttctccgagaatacgactcgaacgcaacgtgtgcttgtcacggagaagccccggngcgttccattgagcattgtagggctctgaagtgtaaggtgcgaggtctaattgatgctggctgaaatttgaggagaatttcgtgtaaatcctgacattgacaagagatgccacacatggggcaattttgaaagctgttgttaggtgtccctaatgactcatcagggtttccaagtttatgccattattgtaaaccacagctacaatgttaaatgaaatgggataaagtgatatctttgtccctcatcctctcacaaacgcatggttgcttattc

SEQ ID NO: 210770 - DNA, 468 bp, Glycine max
  unsure (1)..(468): unsure at all n locations
tatgctgtanacatctataatagacctcctaacctcacagctttatcaccatagcanaacaattatgacctctccagcaacagatacaatctcggatgaaggaatcaccctaatctcagatggtctagccctcaacaacaacaacaatagcctgctccttccttccaaaatgctactagtgcaagtaaaccatacgttcctcctccagtgcaacaacaacaacaacaacatcaacaaagacaacaatccactactgaggcccttcctcaaccttcattagaagaattagtgaggcaaatgacaatacagaacatgcagtttcagcaggagactagaacctcaattcagagtttaacaaatcagatggngcagatggccatctagctgaaccaagctcaatcacaaaactatgacaagctgccttctcaatctgtccaaaatcctaaaaatgtgagtgccattacattg

SEQ ID NO: 210771 - DNA, 496 bp, Glycine max
  unsure (1)..(496): unsure at all n locations
agcttgcttctacagaagaagatgaatgaatgtttatgaatanaanaacacanaatttagtgcctctaaagaagtttgaactttgaagtttaattctcaaatgatcgaagttgaaaaaaatgcacacacatgacctctatttatagcctatgtgtcacacaaaattgaagggaaatttgaatttcaattcaaatttcacttgaatttgaaattgaatttgtggagccaaaatttcactaattatgattagtgaatttcagttatggttcagcccactaatccaagatcaattccaagattctccactaagtgtgcttaggtgtcatgaggcatgtaaagcatgatggacatgcacaaagtgtgactatatgatgtggcaatatggtgtagtaagcaaatgctcacctctccctctaannnattaatggatggggcttctactgantcaantannaattatttcccaacacacacatcanatattcacttagtgtat

SEQ ID NO: 210772 - DNA, 416 bp, Glycine max
  unsure (1)..(416): unsure at all n locations
agctgagcaagtatttgttcattatctattaagacacccctttagtttctccactctgcttgaatcccatggtttacagttctatttattgatgttgccatgaaagcatatcttaacaaaacagagttacatgaacactacctgatcagagagagagagagagagttgcacgaacacttccagatctacgagaaaaaaagtgttacgtcaacgattccatatctacaacaaagagaatatgaacattttggacacataactatatctgagtttgtaaattgcattgagaatagaaaagaatgctatgcagaatcctatatcgaaaatgagagttggagtttgggtgctggtattttgccataacagagggttacactnatggagtgtaattttctaaaanataataataatatatt

SEQ ID NO: 210773 - DNA, 387 bp, Glycine max
atctttatgcaagagatgaggtatagttttgttttaaagatatacacatatcaaacagagaatttgtaaaaatatctcaacctccaatctgaaaaagtttaactaaacatgcaatctctctctatatataatgatattaaattaataattatttactattagtaaagttaatattccataacatgtcaattatatatattaataattaaataattacatataactcttcaagtgtttttcttattcacccttaatgagaaatttgaaatggtggtgaaacttttaatgacaattgacatgaagatgtgagcgggtatttcattcttttaataataatatctaacattattaacctttaatatgttatcaatttaaaattgataatat

SEQ ID NO: 210774 - DNA, 443 bp, Glycine max
  unsure (1)..(443): unsure at all n locations
gatctctgagtcacctgcggcatgcaagcttcttatccaagacactctctaggagctgatgcttcttcttccatggagttcgcatcctgatactactntgttttgtggatgtgaaatctaactggcaagtgcactgggtcgtcaagtaaataattaaaacagtgtgaatcgagtatcgaactcaaggaacttgttttacatggaaaagcatcattcagtaaatatgaatttacgtaaagaattgactatcatgaagtaaaaatagaagtaattctattctaagtagaagcagtaattgtgagcaagtgagtgtgaaaacagatatgtaaaagcattgggtcattctactgagatacttgatgcaattagggtttttctctacttgaaattatctatgtgttctatgatgaagggacaaataccaaacaccgatgtctcgcgag

SEQ ID NO: 210775 - DNA, 453 bp, Glycine max
  unsure (1)..(453): unsure at all n locations
ctacagntctttncgaagaactttcttagaatgcatgctttctaagatggttcttagaanaaatcgtcttataaaacatgcattctaagacggtttttacgacaaaattgtcttagaaagatcgacttttctatgacgatttttgtgggaaccatcatgaaaggtcttgactttcaacgacgtaggatataaagaaagttnttaatcgtcgttgaagacctttaataaccgtcgttaaatgccttgtttgtagtagtgcattcttgcatgtaaggaacttcactcacagnttaatgtaacgttttcttttgtattattctattgtgcgaataactcttcaataatatcttaatgattaanaacttatctaatctatgatttggaatctttgtatccatatatacatatattaatgaaatggtgggcggtatataatatctaatcaattaatta

SEQ ID NO: 210776 - DNA, 427 bp, Glycine max
  unsure (1)..(427): unsure at all n locations
tatacggaagaaggtgtattatattcagaaattcaatgacttcccccacgtactgtctcngtggggttatgaacttcttgagaacaaacttatggatgagaagaggaagcgtcgagatcagcaagatgagtttactgaaaacccaacactcaacctcgaccctctatccccagtgtcgagacaccttaagtggaagatggtccgcacaaagtggtttggccaaatgacctctaaagcggcacaacaaattgcagacaaaattgtgagttcattctgcattgcttacaatgattgtcaaataatcgttagctaacactcaacttgattttattgaaattcaacaaatatatatgcatgcaggattcattagaggaacaggctacgtaaggaagctttgttccgcatgggcgtcaagacatactgaaca

SEQ ID NO: 210777 - DNA, 419 bp, Glycine max
  unsure (1)..(419): unsure at all n locations
actcttgatgtaatgttctagctatntatttaatgttattntctggtgttctttgctcctatctatatttantttacatgtttatggcttgatcacccatttgtatgtttagttaggctttttagtgttggaaaatgctttaaaaccttagaacttgataaagcaagctagaaatttgtatgtctaggaatagagtgcagtgatctagtatattntacactgcatgcttagtgcaactcttttagaacaagtttgttgagaatcaagaacaaatgctaagagagttaggctcattcatgtgaggaatagagaaaaatgttaaatagagaaaatacccttttatatggcaagagaaatttcagtaggaaactatccaatggctttatcttgatttttgtcacattntacaactttgcata

SEQ ID NO: 210778 - DNA, 459 bp, Glycine max
  unsure (1)..(459): unsure at all n locations
agctntagccttaagttgttccatgtagcttatttgttcccgttatctctaatagtattttattattatgattattgaatgatacaatttgcgaagtgtgaactccaacaattatatctatgacatgtgaatttattttctatatgtgtgtgtgtgtgtatgcatattgtcattttttatctgcacgcattgtggtttgggtctggggtgtttgaccctcgacaannatattttatgtttgtttagatagctataattacaattgttatgttgtccaacttatttgtgtgacaagtggttntaccatttaaggagccatgactggttccctgagagtagtatgtagacctgagcctcgtctctctttcttggttgtttgtttctttggatggtgttggtgatgcacgtggcacaagggctatgcacgcgatgcaatgacaataatcaagaggattggat

SEQ ID NO: 210779 - DNA, 481 bp, Glycine max
  unsure (1)..(481): unsure at all n locations
taacactaagctcaacctcatcgtctctcacagtctntagatttgggagccaatctaatccttgtgttttgactctcagccacttatgatagccgccgatgatcccattactggcttccctaagctctctggcctttcttcacgccgcatctcatgccttgcgaactccttggagtatccccgcgttgtggtcactgaaaccccgtgtgatggaaggcgtgatgctttcgcctgatggcactcctctcatggggtagccaagctgtcttatggcgaggacgggattataattaatacaaccccttgttccatcaagggaacatttggacatccttcgcatgaagatagaatcctgattcttccttccttctagcgagggaacgaattaacagatgcccctccatgctagccaagaagtggacccaattcgcctttctttttccgcgcacgagcggtgaccctgtagctgatagacaggcct

SEQ ID NO: 210780 - DNA, 455 bp, Glycine max
  unsure (1)..(455): unsure at all n locations
tcacctgccgcatgcaagctaggttgacaatggatatgcaacatattgctaacttgtatagagacattgagtttctcatattagctntgcctaatgctagtgtttcaaacatctggttttgacatctgcaaatgaattcacttttcaaatagaaacatttaaaatatgtgtctgcacaaaagaatgataaaatgtttgttgatctccataatggttgaagtaattagttatcaagccactggtaaagacaaagacatcttgggataaaatgaanaacaagtggatgtcattttgtctagcccaaactaattaataggtattgaattagagggaaaatactagtttgctagatacaaaagctaggtaacaactgttctagcaaaccaactaggtgcacaatgcattgcagagctaataaatttaatggaatcctgaaatgaactagttccacacat

SEQ ID NO: 210781 - DNA, 467 bp, Glycine max
  unsure (1)..(467): unsure at all n locations
tcctttcggagaagaagggttattggctacatattggtgatgattcttcgtgtttttctgcagcctccgaagaagaaggttccttgcaccatcaagaacacaagggaactcaacgagaccgtttgcaagcccgatgatgatgaggttttgaacttttattattagggttttattttgatttgtgtcttgtgattgcaaattttttgccttgtgtattattgtccttagttntaacgtggtgaggttgcaaggtttgcaataacacccttgtattccatttaattggaactcangtccaggttcacgaattggacttctccaacacgagatctgctcattgtgtgcaaaatttgtanaatactatatttgtagagtcataatgtgaaggtgttgtataaaatttgattctcttctttgaggactatagattnaaagtggattttgtgtgttatataatcagacacaca

SEQ ID NO: 210782 - DNA, 376 bp, Glycine max
  unsure (1)..(376): unsure at all n locations
cacctgcggcatgcagctngcccccanctcgcctattgatgtatgttgcttcgaccagaagcaaccgccttgtggangaacntcctggaaagcccaagtgggcctggttgctatttgcaccccctttntttactaaatacacccccatttgctttttggtgattcgttttcagtaacgttacaaaactttacgaatctcgtaaggatacttgctgtctttcaataggttaaccgaaccttacaggtcatgtaatgactccttttttagctntcggaatgttacggaaactcacagattgcgtaacaatactttcttttgatttccagcatattacagaatttcacggatggcgtaacaatgcttccttttgatttc

SEQ ID NO: 210783 - DNA, 353 bp, Glycine max
  unsure (1)..(353): unsure at all n locations
ngcaaccattagaagagaatggagcattgattggattgttaactgtaaatgttagncaattgtcagattgattgtgaaggaatgcattaaccgtatcctggtgagagtgtgatccttaaattntgagagaaacgactatcatttagtactgattnttgtgtgaatctctaaagtgtggactgaatgcatgaaattgaggatgatgaagaccatgtttgattgtgatagccacttatccaaaaagctgaccacgtgcttgaatgatttatcccttgcacccagtttgagctgaatgaattattgatngattgaacactgagcccatacagtggtatctcttgctaccttgtctt

SEQ ID NO: 210784 - DNA, 493 bp, Glycine max
  unsure (1)..(493): unsure at all n locations
agcttacaaagtgttcctatatataactctatttatacacaagtttttacaaaccaagcgatgtgagactaagagcacaaaactctaacacctcaccgtatgacgctaacggattaatttatataataaatctcaggttattagcacaactctctaaccaactgaactaatagaccaattatgttataaaataaataatgtngctatacataacactaaactttttaatgtatatttaatgcgcatgtaaatttaaataataaatgttgtgataattaattttgatataactcatacgaattatttaattcgtatatctttttataaataaaaaatatttattattgaaaaatctaatatattaataaattacaaaaacattcttgaaaaaaaaattaaacaccacacttacgaattacatgatttgtatgaatcatacgaaataactcatatggattacgtgatccgtatgagtcataacttatatggatca

SEQ ID NO: 210785 - DNA, 417 bp, Glycine max
  unsure (1)..(417): unsure at all n locations
ntntgagttgcttgatgctattgtggaggaagtaggagttgatattattgttctagttgntactgataatgggagcaacaatgttttaccaggtaagttgntagagaacaaaacgaaacatatttattggactccttgtgcagctcattgtattgatttgatgcttgaagacattgggaagcttcccttgataaggaagacaattataagggcaattaatcatagtacgtttaactatgcccatattagtaccttatgcttgttaagacaatgtagatacaagagggaattggtgagacatgctattactatattntccacttcttatctaaccttggaaaggctccacacagagacagccaatattagaaatattgttatttctgatgaatggatcctanacaagttatcctatga

SEQ ID NO: 210786 - DNA, 489 bp, Glycine max
  unsure (1)..(489): unsure at all n locations
agcttctctaggaagctacctagnctataaatatatgtatgtgtcacactngccgcaactntgatgaatgagagtcttgtgagacacaactcanagttcaacttctctccctttatcttccttaaatttcgtgctcctccctctctctatctctccctctntcttttcctccattgaagcattctctccaagcttcttatccaaggctcatcttggtggtgaagctccttcttccatggcttattccctagtggatggtgcctcctctcacctcttctcctttgtctttcgctgcatctccatggtggaaaaccaccattaaaggacctcattgaagctcacagatctaacctccacagaagccccacaagccaagcttcatcaatatgtgtgcattttgtgaactttgatcttttgaagataaacttcagaattagagctctttagagcgacaaattcgcgctcttctcttcctctccttcattatct

SEQ ID NO: 210787 - DNA, 450 bp, Glycine max
  unsure (1)..(450): unsure at all n locations
actcaagctggggtctaccaccgtttgcactggataactgannctataattatttnnnnnatttataagcgncnaaccggaactagaatatttgatgtataatgtctggattctctttacataagtattgagaactctgtttggttatgattatcacgcaagcaaaggatgttgttaaaggtataaagaagcggattggaagtaaaaattcaaaagttcaacttcttgcactaactgtaagcaagagtgttgtcatacaaccttntttctcttacactctgcctgtggcattgttctanattctttttgtatataagcatgtttgcttcaattgcacccatttgaccttctatactttacattcttgactggattttgaatgatgatggtgttcatttttttttttggtgaaagatgatggtggtcactgcagtcagttttatgaatatt

SEQ ID NO: 210788 - DNA, 423 bp, Glycine max
  unsure (1)..(423): unsure at all n locations
gctaaaggaaggaaagaatagcattgcttatttgtctctgcattgattggtaaatctgttccccaaatccctgaaaaatgtaaagatccaggtacattcagcataccttgtattatagggaacaataagtttgacaatgccatgctagatttagcagcttctgttagtgttatgcctttgtctatttttaattctctatctcttggtcctttgcagtcaactaatgtggtaattcatttanctaatagaagtgttgcctatcctgctggtttcatagaggatgtcttagttagagttggtgaactaattttccctgttgattnttatattttgaatatcgaggagggatcttctcaaagatcagttcccatcattctangtagaccttttatgcacactgctagaactaagataaatgtatat

SEQ ID NO: 210789 - DNA, 475 bp, Glycine max
  unsure (1)..(475): unsure at all n locations
nntttaaaccttaagatgtgaatgtatgtatacatgattttgatgatgccaaagaagaatcaaacaaggttgcttcaaatgataagcatttgcttcaagaataattcaagattgcttcaacatacaaagctttgtttcaagattcactanagaccaagccttgccttataacaaagtgctttcaagacatgcaaggctctggtaatcgattaccaggaagtgtaatcaattaccagaagacagggttgagaaatagctgttgaaaaaggttttgaatnntgaatttcaacatgtaatcgattaccatatgtctctatatcgataccagcaacaaaactttggaaattaaaattcanaagtcataacccttcaaattataactgtgtatatcgatacacaaacattgtaatcgataccagtggaaagtttcagaaatacgccacagcacatctttcattagattatgaatggcatc

SEQ ID NO: 210790 - DNA, 495 bp, Glycine max
  unsure (1)..(495): unsure at all n locations
agcttagcgcaacanaacaacatgtgcttggattcgattacatgcacattgagcgcatagcataatcagacaacaaacaacaacaaacatttgcacttaaatcaactaacacaaatattcatagagtcatgagcataaccaaaatcaacctaacatcaacacacaaaccaactaacacaattattaaacaagttacagaagagaggagaaagacacacaccaactaacacaattattaaacaagttacaaaaaagaggagaaaaagggtagaaatcctgtgttgtctcccactaagcgtttctntaatgtcattagcttaacgggtcanatgacttcaagacggcatgaaggtcacatagaacacatattccttacattttcacttcttagctagagactccatganaatcatgtatccctgaaatggtcttcatatcattgcaaggggaagtggtggtgatcaaggagaaaatgacacttaaagattatcacat

SEQ ID NO: 210791 - DNA, 401 bp, Glycine max
  unsure (1)..(401): unsure at all n locations
tgagcttcttggtgatccatatcaaatccttgaaggttatttattattgttctntaacacaanatactgattcattttacatgtganacttgtagatcatatttcagtcctacattcatacatcatttgatacgagattcatctttctaattcttatcgtcataaatacagtatactgcatgtgtagaattgattcaattattgtatttccaccttaatggtactgcttacaactacaaatgcactgagttatgaatcttgatatatgccaatagtatgttttattgaacttaccaagaatggttattcgtgtcataacatgccattattatattctggaagttcgacaatgtgatttccttcccacacaacatggcatcttactctttctagaccatcaa

SEQ ID NO: 210792 - DNA, 440 bp, Glycine max
  unsure (1)..(440): unsure at all n locations
tcctcggggccatttcctgcgaagggcaaacattggtaagtatttttaccagngggacactactcttaaaacaaaaatgacatacaacctcctcccataaatacaaacatcaatgtaaatntagagcaagcttatgcgcatatttccctacgaacgttcacttgcacaagacatcctattaactaagaaaaatgcacccatatacaatcaaggtagcttcattacctagaatatttacatgtacttccaaggtgtatttgttatttacatcacacacgcctccttgngctaaattacatacatgcatactcaaagcatttcggggtaccaaaaattgcacatgcgctcatcttggtatttctaatacctatacatatacaaacttcatgatgaatctngactacctatgcaataaggtgctacatttcatgcnntttttt

SEQ ID NO: 210793 - DNA, 415 bp, Glycine max
  unsure (1)..(415): unsure at all n locations
agctntatgcaaggaatgcaagatagctaaatttaccaatctaaaacttcacaattattcaggcagctttggaattagatgcagcaaaaatgaagcatttgaggtcacaaaatgaagcaatgacatcaaagtacctgctatgacattgaacactgcacattcagtcggcctctctgggatcacaatatgtatagggatccaaaatggtggattagcagttgaactatggagaaaagaaaaacactaataagcattagaaattggcaataaaaccaaacacgctagtgccagcaaaccagtgaaatgagcaatagatacatgaatgagcaagacaagacagcattcgttcctggttagaaaaataaagttgtgtttgaacttcaaacaaatgtaaaggaatatttaataaatgatg

SEQ ID NO: 210794 - DNA, 423 bp, Glycine max
  unsure (1)..(423): unsure at all n locations
tcanacattgaacataanaggaacttgacttggtcatcgaacaatttttggcaacattgaaagattgtatcaaagagaagatacccctctaattacataaaacttctatgtaaaccaacctcataattaggctgatcttgttgatgaacaccaaaaacatctccataaagtggacggccatactgtttaggtgcagacaagaaaagtggtcaatgaggtgaaaaggggtgggagagccctttaataaaaatgaaaattcagaaacccataataattcanaaatcaaatgatgaaaagaagagtgaatataaaaaatgtacttcatcaacaggaggctngccccagccaccgggatggtaaccaaaactagctccagggggaatgggagcattcaagcctgggatcttcagatgaagataagat

SEQ ID NO: 210795 - DNA, 454 bp, Glycine max
  unsure (1)..(454): unsure at all n locations
agcttcaagaaaaagaaggcctcagcttatcatttattccggaagggaattctatcaatagacctccaatctttaatggagagggttaccactactggaaaacccgaatgcaaatttttatcgaggcaatagatctaaatatctgggaagccatagaaatagggccttatatacccaccacagtagaaagagtttcaatagatggtagttcatcaagtgaaagcataaccatagaaaaacctagagatagatggtctgaagaggatagaaaacgagtacaatacaacttaaaagccaaaaacataataacatctgccctaagaatggatgaatatntcanggtttcaaaatagaagagtgctaacgaaatgtgggacactcttcgattaacacatgaaagaactacaggtgttaaaagatctacgatanatgcactaactcatgagtatgaatt

SEQ ID NO: 210796 - DNA, 501 bp, Glycine max
  unsure (1)..(501): unsure at all n locations
tcttctataagttcaattagactccaaaactcaccattcatgcttattcttcctccattttcacgaactggtcaagagggaagaagacatcatttccactcttctcccaagcgttcccaagtgttcttgagccctcccatcaagcttaggtaaatgacctccattttcaactctaagcttgattntcatttcactttcttgctctattctcacttgtagtttcaaatcttattttttcactcttgaaggttgaaaaatagaacctaaactccttcattattccctctaaatttcttggagtatcatcaaggtaaagggggtctcttcaactcttgaaccctattgagtatgttgttgtcttgaaaattttcgtgcttgctgctctattctggatcccatgtgctgagctatttttcttaagttttgattccaaaaatgatttccttgagtccctaaatgtagggtagccttaagttcaattaaatggagtttctagaaatg

SEQ ID NO: 210797 - DNA, 439 bp, Glycine max
ttcatgctcgccctatacaaataaaacagtcccacaacccaaagctcacataaccatgctcatatgtcgctgacagcattcaccgagcacttggtgtgcgcatgtttatgcacgaatatcaagatgatggggacaatgtggcatgcgccattacttcaaaaataccctaagccaaggccattccttactacccctcaattcaacaaaaacaagccacaatttgaagataatccctcacgtttttatcacacacatgctacttagagcacccacaatatatcctcggaaagcttgagagaccaacaatgaggttcttacttgttgcgacgaatatatatgcaaacggattcaaaacgccaaaatgggacctaaggctgcaaattcgtgagcccggagcttccttttgattaagggtgaaatttgaatgaaaacacccccc

SEQ ID NO: 210798 - DNA, 471 bp, Glycine max
atgatcttctgaccagaagtggaatttccccatttaaattgatatggaccaaactttatatacgctctatgaatctaatctttttgattagcatgataattacaaatggcggatgttttccatgatcacatatcaatattaattatcccttgatcaatcctcaatttataagtaagtggttggacaagtagttctatggttgacactctatgttattcttcttcatcaatactttgaacattagtatctaacttggaagcaaatgcattatacaccgcatgtggctcttcgctatatctctttattttctcttatacaatgaatacatatctgtgttcttaaacatctctcatcctacaaatacatatacattaaccaccctatattgttattaaacttagtacaatttgatgagaaattctttgttgaaacattacaaaaaatctgcaatatataatgataaatattgtt

SEQ ID NO: 210799 - DNA, 366 bp, Glycine max
  unsure (1)..(366): unsure at all n locations
actatacactactcaagctngcttgtagagcttctatggaggctgaatctctgagctatatatgaagaccttctatggngatatattaccacagagatgcagcttatggctcacgataacacgagatgtgaggcaccatcctctacggaataagccctggttgaatgatctttaccaccataattgtgccttgtataacgaactagtagacgatgcttttttggaggaacacaatcataaagaccgggatcactacattgaacgaatactaagacggaacgaaatgtaacttccaagtgtacctgatatgagattcattcatccacagttacaactagcgtgacacatgcttctatttatagacta

SEQ ID NO: 210800 - DNA, 485 bp, Glycine max
  unsure (1)..(485): unsure at all n locations
tgtggtggataagtctgggattaggagaatcccgttgtgggaacacagttttaacattggcgatgttaaacactccgngtcacttcaagctgcagcacttgggattatcaagtcctgaaaattntatgctaaagaggagaatatctatggcacgtgcataatatatattagtatgtgaaaaggtttagctgtcaacaacaaaggttgcttctaatggatattcaaaggcaaactgttgatatacttggatacttgtattgaagacaaaacgtgctacattaattcatctatcacagtcaaattacacaataggattgatttgattttggagaggagattaaggaaatgtattgtnttctcttctcctatatctttctacttttaggactatactttatcgttagtgtcttatccataggattggtaatagatagttttctcattgaattgtaattgaaactccgccttatcttcttacgatattg

SEQ ID NO: 210801 - DNA, 406 bp, Glycine max
taacaagaatgggacccaatctagcatcattgttatggcgtgctccaagagcacaacacataactggtaaatttctttatgtaaaaccaatattgaactattgtgtcaaccactctaacagaattatttttttttttttgcataaagcgcagaacttgctatgttgaaataagaatttgtaggtctattcttctccaattatcaatcccagataaacaaaccattcataaatgtaacccccccaaaaaaaaagaagagaaaaacatccgatcttttgaccaaggcgtaaggctgtttctaatgagtgacaacaaaaggaaaacaacccttcttattgcacaaggattcaaaagatcagtggtaggggcggctaattgttaaaaacaattgattactcgaaccgaac

SEQ ID NO: 210802 - DNA, 332 bp, Glycine max
tctcaattacgagcgtctcgatatattacggtactcaatcttacatcctagtaaaaagttattgtcgtttgattcttctcagaacttcatgtttcaatttcgagcgtctcgatatactacgggacacaatcggacatccgagtctaaagttattgacctttgaattggctcagagctgttgttttcaattacgagcatctcgatataatacggtactcaatcggacatccgaatcaaaagttattgttgtttgaatctgctcaaagcttcttaattacaagcgattcgacatactacgggacccaatctgatatcacattaaaagtgtattg

SEQ ID NO: 210803 - DNA, 455 bp, Glycine max
  unsure (1)..(455): unsure at all n locations
tcgtcctagagacactgccttgagaagctatgtcttagctacactcactcncttaataactaagcttaccggcttgagaagcttccttgagaagattcctagagaagctagagcttagctacacacacccctctaatagctaagctcacctccttgagatgaaaagctagagcttagctacacacacccctataatatgtaatctcacccccatgtcagaatacatgaaaatacaaacgagtccctactacaaagactactcaaaatgtcctaaatacatggctacaccctatactactagaatggccaaaaacattgcccaaagaatgaaaacctattataatttacaagaatatggcccaacttggccatggcaagaatctacctgaagtatgaaacccttggcttcttagcactctacacatctctggagctttatcacaccctggaggtag

SEQ ID NO: 210804 - DNA, 484 bp, Glycine max
gacacttaaatactcagcttcttgagaaacttgttgagaagtagagcttagctactctctatcctctcataactaagctcacctccttgagaagcttctctaagaagattcctaaagaagctagagcttagctacacacacctctctaatagctaagctcacctccttgagataagaagctagagcttagctacacaccccctataatagctaagctcacccccatgacaaaatacatgaaaatacaaaaaattccctactagaaagactactcaaaatgcctcgaaatacaatgccaaaaccttatactactagaatggccaaaatacaaggcccaaacgaaggaaatacccattctaatatttacaaagataagcgggctcatacttagcccatgggctctaaatctaccctaatgctcatgagaaacctaggaccttcccttgtatctctggcacaatctacctggagtcttctatccaat

SEQ ID NO: 210805 - DNA, 475 bp, Glycine max
  unsure (1)..(475): unsure at all n locations
tccatcanaatggcaggggaanatggtcctttttggtacctgtttcagcctgctatagtcaatgcagactctccaactgttctgcacccaagtaggaatcagctcctccttctcattttttatcacggtgaggccggttttcttcaggattacctggacagaactcacccattggctgtcggagataggataaatgattccagtttgcaaaagcttggttacctccttcttcactacatcaagaatcaccgggttgtgtcttctctgtgtctgccttactggtttagcaccatcctcaaaatttatctgatgcatacatgtggatgggctaataccaggaatgtccgtcagggtctagcctatagccttcttatgcttcttgagaactgataacagcttctcctcttgctcatcagcaagggaggtagatataattactggaaaanctttgctatcatccaagtaagcatatttt

SEQ ID NO: 210806 - DNA, 491 bp, Glycine max
  unsure (1)..(491): unsure at all n locations
tcaagttagcgaatgaaaggaaacatgaataaaccatacttgctcaaataacatatgaagataaacaggtacacctatatggtcacccaatataaataaataagtgtcatgtgccataaagagtagcaaaatataatgtgtcctaatgaaactagggagtaacatatatagtcccaactacagtaaagtagtaatgactaattaagtacaaaaggtctgagcctaagtctacccatcccacaatacttgtaagggcaaaaacctaagacttagagtagtcacctctacctaagtccaaagtcaggtgactgcaactcagaaaggataacaacctctggcataggcacaacatagcggtaatacgacagtgtaggctaggtctaccanatgtaaaagtcaactatgtgaggtctatatcctgctatgtttactgacacatggcgacaatggatgaactcatagatacagtccacatggaacatatcatcatg

SEQ ID NO: 210807 - DNA, 383 bp, Glycine max
  unsure (1)..(383): unsure at all n locations
tgcgcctactgtgttactgagcaacatgccatggctattcactcacaagtaattaaaaaagggtctcaggaagatactgttctntgtaatgccttgatgcatgcttatgcgaggtgtggctccttatctttgtcggaacaagtattcaatgaaatgggctgccatgatttggtttcttggaattcaatgctcaagtcttatgccatacatggtcaagctaaagatgcactggagctcttccagcaaatgaatgtctgtcctgattctgcaacctttgtcgcgcttctctcagcttgcagtcatgttggacttgttgacgaaggagtgaaattgtttaactctatgtctgatgatcatggtgttgttcctcaactaaatcacta

SEQ ID NO: 210808 - DNA, 444 bp, Glycine max
  unsure (1)..(444): unsure at all n locations
tagttaagttagtctanacctaggagggctgtctaatatgagcctagtcaaataagagggatctgaggacgaagctaggattgattcagtctaactatggatcgaggtttagtaatttaggctatagcatagaacacaaaagcatgattgattagagaaacatccttatatgcatcagctggtctgttagaaagaccccacacttctacctactgctgttaattttacttacttgcatttttattgcttttatcctagacttagtttaattctattttaaaccatcaattatcaatgtgtttttcaacaatgccttatttatgaatntaacccggtcttagactacgtccctgagttcaatacttggattcatccgtcttaattttaaatacttgatgattcggtgcgctctccggcaaaccggatgttcctctgtcatatttg

SEQ ID NO: 210809 - DNA, 450 bp, Glycine max
  unsure (1)..(450): unsure at all n locations
atactcagcttccagagttaagaggcggttgcaacaactccatgtttatttatcctaccctaagagaccatttgaagtgtattgcaatgcgagcgggcaaggcttgtggtatgtgttaatgcaggagggaagagtattggcttatgcttcacgccaattgcgtcctcatgaagttaactatccgacccatgatttggaactagcaactgtggtctttgccttaaagatttggaggcactatttatacgatactcatttttgaagtttcagtgatcacaagagcctcaaatacttgttctattagaaggaactcaatatgaggcaacgaatatggatggagttcctcaaggattatgattctggtctttcctaccatccaagaaaggctaatgtantagtcgacgctctatgcccggngtccttacatgttgcgactattatgaagttgga

SEQ ID NO: 210810 - DNA, 423 bp, Glycine max
  unsure (1)..(423): unsure at all n locations
tctcccccaattntctatanataggaggagaagtgaagtgtttattggttcatccccttatgcacttctctctctttcgaatttgctctggaaaattgcttccgtgaagaacatccaatccgaggcgcttccaaaacgtttccatgatgaatttcgctaatgtttctaccgctcttccaccgtcttcattcgttcttcatcgttcttcgatcttcaacgggaaagcacctcgaaccatgcttatcgattcattctatgtacccgtggtggtccacattgtcgtacacgtatatttattctcgttacattgactctatatacccacctttggcgagcttatgccattgtatctacatcatttctcgcttaacctagaaaataaatacattctcaccgaccgcttgaactgtattatccgttaac

SEQ ID NO: 210811 - DNA, 494 bp, Glycine max
  unsure (1)..(494): unsure at all n locations
tagagaggaagcttcatggaggaagagaatgaaagagatatagagagaatttgtgacatgggaatgaaggaaagatagggagagaagttgaactntgtagtgtgtctcagaagattctcattcatcaaagttaccataagtgttacacatgcttttatttatagcctatttagcttccttgagaagctagtgttacacccctccaatagctaagctcacccccatgccaaaatacatgaaggaagaaagcttccttgagaaatttccttggggaacaagtgttacactccttggggctcaaacttagcctatgagaccaaaatctaccctaaggctcatgagaaccctagggccttctcctacatctctacccaatcttcttggagtcttctatccaatgccctggggggtaggattgcgttatcccctcccccttgaaaggatttgacctcaaatccagtggttctcgaaactctgggcttcttncctcgaca

SEQ ID NO: 210812 - DNA, 497 bp, Glycine max
  unsure (1)..(497): unsure at all n locations
tatcttacctatctatctcccanatgtctgtgcaaagattctttgtataaaaaacatgaagttctaattcaagatgttttctttgttgcatgggcataatgcaatcactctatgtctagcaatgattntattaagatgtccctacctttgagttctactaaaaattatcctctctcgagcgactaatccctaaaactgatgcatataaaaccttcaatgtatttctactaaggattaccctctttcaagcgccaaacccctaaagatgatgcaaggatgaagcatataatacatttgttggcattttatgcctgccaagccctaactaaacgggtttagcctttcattgtcatgagagacttttacactntacggggttgatatgaatggaagaagatggatggatagaggaagaanagaggataatggacatatatagaaagagggtttcccatgttggagatagttaggcttaggatgtattcattaaagaactc

SEQ ID NO: 210813 - DNA, 381 bp, Glycine max
ctcagctttaacctgcacaaaggagtagagcaggtaataaagattcttcttcaaactcttagaggtgactttgagcgttcgtttatggaggacgtcgagtcaatttctgattattcttctcgaatattggccgtagtcaatcaacttaaaagaaatggtgaagatgttgatgacgtgaggtcatggaaaaaatacttcgaactttaaatccaagtttcgacttccttgttaccaacattgaagaaaacaatgatttacagaccatgactattgagcaactcatgggttccttacaagcatatgaagaagatctaacgagaaaactaaactaatggaggctacggatcaactactacaactcaacgtataggaagcaaacta

SEQ ID NO: 210814 - DNA, 385 bp, Glycine max
aagggacgaacgattgtgttattgctgacacttgattttgtgcaaatcaaatgcaccctatactcgtatgaatgactacgttatattgtcctgtcttcttcacacttccaaactactaactaatagaacttgcactttcttatcgaaacgaggatgaatcatctaagagtgctgctaggcacacccagcatgtttgctggtgcacccaccaatttatgggaatagacttaaaagcccgctaagaattttttttataagataactcatcgctctctctattcgcgcctgctacttcttctgtcttacttagacggatctgcttctgcatcctcatacactatatattcgtctgctacatactgcacatcgtcggtcatctatttct

SEQ ID NO: 210815 - DNA, 306 bp, Glycine max
  unsure (1)..(306): unsure at all n locations
ctatanatactcaagcgttgaanntccatcagtagaatgagagcatgggcatgtcttgtgantctaaaacgcagagcccacgattctctccagacttattagcagtcgcagaatatgcactagatctgtaatgattgaaaatattcattatacatgctaaaatcatttaaaaggagtgagtaggcatttaatacgaatataatcactatactagtactagcgaaacgtattcctacgtaacatgttgaacgcgaaaaggtactcaaaagacagttatgagtgtggctatgctttgtggcaagaaag

SEQ ID NO: 210816 - DNA, 448 bp, Glycine max
  unsure (1)..(448): unsure at all n locations
ctgagatccatagatctaatccaaggtagatgtttcataattgggatnntcgtgcttgtgttgtttgattccagtgccacctattcctttatatcctgtttgtaagtagaaaaacttaagcttttctgtgtcttctttaaataaagatctagtggtggagacccctactagtggttctgtgttaacttcttatgtgtgtttgaattgtcctgcggagatttctagtagaacattcttgattgatttgatttgtttgcctttgagccagattgatgttattcttggtatggactgggtatcttccaaccatgtcttgttaaactgttntgataaaagtgtggtgttcgatgattctgtagtgagtaaagatatgatgtttatctctgccaacataggtatgacatctttaaaggaagatgctcgagtgacatgaatttgtctaacctga

SEQ ID NO: 210817 - DNA, 431 bp, Glycine max
  unsure (1)..(431): unsure at all n locations
tctcgatatattatgctccagaatccgacttccgtgtgatatgttatgaccattggaatttctcgagagcttccgttgttcaatttcaagcgtctcgatatattatgaacctgaatcggacttccgtgtgacaagttatgacaattgtagtttctcgcgagcttccggtgttgaatttctagcttctcgatatattatgcggctgaatcggactttcgtgtgaaaagttatgaccatttgaatttctcgagagctttggttgttcaatttcgagcgtctcgatatattatgcacctgaatcggacttccttgtgacaagttatgaccattagaatttcacgagagcattcgttgttcaatttcgagcatctcgatatattatgcgccttaatcggacttccgtgngacaagttatgaacatatgaattctc

SEQ ID NO: 210818 - DNA, 413 bp, Glycine max
tgagatgagcaagtgtagaagggtgaaacttcctgcttttattcgttgaccacaaagtggtacctggagatatgtcgcgggggtcaggagaccttggggacgtcaggtggggtgctattgcccaaaaccaagcttgaccaatcccgacccaacccgggcatagtcagtcaatgagaacctgtgatgtacctaagcaggcgagctcctggcagtcaacagataaaaggaacaaagaccacaaagcaaggaggcttgtggtggctggccagctgtgaatcttgtgtgatatatgggttatggcctctggtaatcgattaccaagggtgggtaatcgattacaaggcttataaatgaagacaggaggctaagatggtctctggtaatcgattaccaaaggggtgtaatcgattacc

SEQ ID NO: 210819 - DNA, 446 bp, Glycine max
tcttatccaaagctcatcttggtggtgaagctccttcttccatggcttattccctagtggatggcgcctcctctcaccttttctactttgtctttcgctgcatctccatggtggaaaatcaccattaaaggacctcattaaagctcaaagatccatcctccatagaagccccacaattaagcttccatcatcatcactccctccttctgaaaaggatttgtcctcaaatctaaagcccctccatctgcattataaagagatagatcagacacatgtaaagtggacatatcttatactcactatgccagtcaatcttgtatgcattgttcttgatcttctccaacatcttgaatggtactgctcctctagttgaaacctggacttactgtgttctgggaactcttcctttttatgtgtacccaacccaataccttggtcaacacgac

SEQ ID NO: 210820 - DNA, 483 bp, Glycine max
ataacaatatgcacgcaaagtgggtggaattgctagagcagttcccttatgttatcaaacatagacagggaaaaggtaatatttgagctgatgctctatcttggcgtcatgcattacttcctatgctagaaacaaaattgattggtcttgaatgtttgaaaagcatgtatgataatgatgaaacttttggagaaatctctaaagatgtgaaaaattttcagataatggtttctttagacatgaaggctctcttttctaagaaaacaaattgtgtgtgcctaaatgttctactagaaatatgcttgtttgtgaagcacatgaatgaggtttaatggtgcattctgtggtccaaaagactctagaacattacaagaacatctttattggcctcatctgataaaagatgtgcaccaaattagtgaacatcgcattgctgtgaaaaagctaagctatgtaaagcctctggatcgatactccattgca

SEQ ID NO: 210821 - DNA, 501 bp, Glycine max
  unsure (1)..(501): unsure at all n locations
nntcgattcattctatgtgcccgtagtggtccacattgtgtttcgtgcacttttattctcgntttgtttactttttataccccctgttgacgtgcttaagccattttacttaagtcatttctcgcttaacttaaaaacaaaataaatttccaccgaacgtttgaattgtattatccattaacttcggttaaaataaattccgacctgtcggtcgtgccgtaaccacgttggaaatcaaaaagaggtaaaatataatataataatcaaaaagacatcttttagtaaaataaagcggataatcaagaggacgctttctctttgggatttctcattcttaatcgaattgattaataactaaagtgaaactaaaggctataatcaattcgcctagtcaagctctgtcatataaaatacgcttgtgaagcttgtcatttcattgtctcactaagtaaaatggatcatctttaaggtccaacgccttatactgatcacctcttaatg

SEQ ID NO: 210822 - DNA, 447 bp, Glycine max
  unsure (1)..(447): unsure at all n locations
tatcttacctatctatctcccaaatgtctntgcaaagattcattggatatattacatgaagttctaattcaagatgttgtctttgttgcatgggcataatgcaatcactctatgtctagcaatgatnttattaagatgtccctacctttgagttctactaaaaattatcctctctcgagcgactaatccctaaaactgatgcatataaaaccttcaatgtatttctactaaggattaccctctttcaagcgccaaacccctaaagatgatgcaaggatgaagcatataatacatttgttggcattttatgcctgccaagccctaactaaacagtgttagcctttcattgtcatgagagactcttacactctagggggttgatatgaatggaagaagatggatggatagaggaagataagatgataatggacatatattgaaagaggg

SEQ ID NO: 210823 - DNA, 390 bp, Glycine max
  unsure (1)..(390): unsure at all n locations
cttatcttacctatctatcacccatatgtgtgtgcagagattcaatggatcaataacatgtagctctaatgcaagatgttttctttggtgcatgggcataatgcaatcactctatgtctagcaatgattntattaagaagtccctacctttgagttctactaaaaattatcctctctcgagcgactaatcccgataactgatgcatataaaaccttcaatgtatttctactaaggagtaccctctttcaagcgccaaacccctaaagatgatgcaaggatgaagcatataatacattcgttggcatattaagcctgccaagccctaactaaactggtgtagcctttcattgtcatgagagacttttacactttacggggtcgatatgaat

SEQ ID NO: 210824 - DNA, 425 bp, Glycine max
cggctacctccttcttcactacatcaagaattatcgggtttagtcttctctgtggctggcttactggtttagccccatcctctaaatttattcgatgcatacatgtggatgggctaataccatgaatgttcgctagggtccatcctatagccttcttatgcttcttgagaacagataacaacatcgtctcttgctcattagcaagggaggtagacataattactggaaaacttgtgctatcatccaagtaagcatattttaaatttgatggcaaaagcttcaattcttgtgtgggtggctggatagtggtagaaagagatggtttctcagcctgtaccttattaagaaagtcagaggtatgtgtacttcctaaaacattgggagttctatcagactctagaacatcaatctcacgacggaataca

SEQ ID NO: 210825 - DNA, 449 bp, Glycine max
  unsure (1)..(449): unsure at all n locations
tcatgttgaagtatgtatgagaaaacttcattattgttgttcaatacttacaagtgagcttgtaacgaatcttctacacttggagtgataacatgcagtcctcttgaacccttattgcccactctgtcgtcatgccgagactcatgaaggccaacaggtttagccttctcaatgtagtctgaacaaaatttaatggcttcttctgcaatgtaactttcaacaatagatgcttccgaacgatgtagattctttgcataccctcttaagatcttcatgtatctctcaaccgggtacattcacctcanataaacaggaccacaacatatgatttctctgaccaaatgaacaattaagtgaatcatgatgtcaaagaaaacaggaggaagatacatctcccactagcatagtataattgcagccttattttgcaggtcatcaaacttgacaag

SEQ ID NO: 210826 - DNA, 435 bp, Glycine max
  unsure (1)..(435): unsure at all n locations
gcgacagatgtgccattgaagaactgaggctctatgatttggttcgcctngactcaactcctgatgcactgagggtagagatcaaggagtgtctcgcgttcatgatggtctctgagatcaatgcacacatcgtcatgatgattcatcttctgtaagcgttgtttcatcctgccagctctttggattactaagatgaatgatgagtgctcatctacatcgcaatagtcagctgctactgcactttaagagtatgttatgtagcttagttttcatcttgccctttgcttccaggtgcgcatacttaccccttcatacaaccttgtgtattcttactgaaaccgcctctatctggggtgctggtatattgacttgttatcattatgctggaacgaagatactgccatgctataataaaaagaaagttctgccattgtc

SEQ ID NO: 210827 - DNA, 463 bp, Glycine max
  unsure (1)..(463): unsure at all n locations
ccctgagatactctcttgagaagctatgtcttagctacttatgctcctctgatcactaagctcaacggcttgagaagcttgcttgagaagattcctacagaagctagagcttaactgcacacacccctctaatagctaagctcacctgcttgaaatgaagagctagagcttagctacacacacccctataatagctaatgtgacccgcatgtcataatacatgacaatacaaacgagtccctactacaaagactactcaaaatgtcctaaaatacatggctaacaccctatactactagaatggccaaaatacaaggcccacaagaatgaaaaacctattataatatttacaaagaataatggacccaaccttggcccatgggcaaagaaatctaccctgaagttgatgagaaccctagggccttctntagcagctctagcacaatcctcttggagtcttgta

SEQ ID NO: 210828 - DNA, 477 bp, Glycine max
  unsure (1)..(477): unsure at all n locations
ngtntgttagaaagacccaacatttctacctactgctgtcacttttacgtaccttgcattttataagttttagcataaaggtttagtttaaattctgtttgaaataatcaatcatgcatgttctctcaacaatgcttcatttctaaacttaactcaggctaacattagttccctgtgttcgatactcagaatcattcgttttaatttttatatacatgacgatccggtgcactttccgataaacccccattgaaatcctcttgaaacataattgagcaaaaagtaactgcaatggggagtcaacaaagtatttatggtgccgttgctggggaactaagttgttagtagagtttagttcaattatgcagcattgctctattattgctttctttgatttattgagtcttttgactaacatagtagttatagcacattcattgttcttttgaactagaatactagttgctctatattctt

SEQ ID NO: 210829 - DNA, 384 bp, Glycine max
ggaccttaaaactaagctgtccctcctagattgctacttcacttgccattttatattattgtgacatgtaataataatctgaaattcaataaactaaaataaacacttaatcatttaacacctgccatctaacgggaatatgggtgcaagtcatcatacacctgcatctaattacgttattgggaaaattcttctataccatgctctatatttcacaggtcagtgtcaacttcagctgttagaattaattaccacaagacataatatcaaataattatcgttttacattaccctctatctattaattaaactttgtgacctagagttattcgacatagtctgtttatcttcgctaaaacactaataagaagtcatgataattgt

SEQ ID NO: 210830 - DNA, 466 bp, Glycine max
  unsure (1)..(466): unsure at all n locations
tcgtgtagaaggaaatggcagtatgttttaagttttgtttcttttctttctatttgcaatnnttcattctgttatggttgggttgtgtttcatgtgtctgtgattgctgtgaaaattgtggagaagggtaagagaatctaaccttagtttcaatctcctacattattatgttttgtgctttgctgtgttaggtggaggttctattttccgtcctttacatgttatctcttttgttcatcttctgaagctttgatatggttgaccaaaattagaggctttctgtttttggtcaacgctttgtctctaatcaaccattagcagcttcatctatctgcatcttggaaacatggagcaatccaattaggatcttattatgaagagtcttctcttgatattttgcagctagtttcattatcatgctgcgtgttacagttggcttatcgtttgacactgataaggcttgttt

SEQ ID NO: 210831 - DNA, 467 bp, Glycine max
  unsure (1)..(467): unsure at all n locations
ttatcaactgtggtaattgattatcttgagcaacatatccttcttctaaaaatggctgtataatcgtttagtaaaactggtaaatgattaatttgacgactttagccaaatttcaaatagaagtgagttttgttgcttgttcttacactntgtaattgattacataaccttgtaatcgatcacattgtgttgaacttatggcttctaagaaactttgatatcaatccatgcatctatcatgtttgattcacactaagcatggataaagaanaactaagacttaatctaccacccatgcctagactaaaacattcaatacatatgccacatcttttanaatgntgttaacattgtaaaatcttataaccaaaatcctaagactcatcttaagtcttcaatctttgatngaaaaacagtaagtaacacgtctttttcaagatgaatgtataatatcatttgacacctga

SEQ ID NO: 210832 - DNA, 232 bp, Glycine max
gcattattatacctcacatcgccagtatacgttggatacctaccctctcgcttgctatactgcgacgtatgtataaacacaaatgtgagaaatcgagcaaccttgtttgctgtccattttgtgcgccggtcgcatagcaccgggtactacaacgacttatcaatgattgttactatatgagaaaagtacatgaataacatgattcacttctaacgagagtagaacgcccatt

SEQ ID NO: 210833 - DNA, 491 bp, Glycine max
  unsure (1)..(491): unsure at all n locations
tncagccaagaggtccaaganagatgccactggagagggttcctgtgcggccccaatatgaagatgtggactctgatagacatatgtttcggagtgaggaacaccaccggcgatttgaggccattaaaggccggtcattcctcaaggagagatgagtccagctgagggacggggagtatgttgagtttcaagaagatattgcccagaggcaatgggctcaacttgtatcacccatggctaagttcgatcctgagatagtctggagttctatgccaatgccaacttgtcattcttagcctatcttttgaatttcgagtctaattcatgcatgttatttagttcataacatgttctaaattaattcctagaggtagtattgttggtgaactntgttttggtntctaagtttcctatatgatgcgtatgaagaaattgagttgtggtgctgagtngtggttgaatctgtgaatcanaataagtcttaagctctc

SEQ ID NO: 210834 - DNA, 479 bp, Glycine max
ctatacatctcagcttgctctggtgcctgcattgaatgatcttacaagttgtcatttctattataagaatgggcaccaagatggtgccatatatgatgagaatgaaaacccttccacaattactaatactattaccaccaccatctactactacccctacagaatggtcaaagccaagttttgtggggtgaatttcatagaacatgatcttaatggggtcaatgctgtggagcaatgcacgcatattggaggagaacattgcttggcacatatagaggggatcccctctgcttggcttacaaaggcagggtcttgatagtgggtggaaagccataactcggaatcaccgtagtggcaaagaccaatactgaggtgggagacgtgttagttgcctatgtttaatagcctcattctatatgataagaaggaagacttctctctaatcacatgatgaacatcattttatggaaacatcacca

SEQ ID NO: 210835 - DNA, 446 bp, Glycine max
  unsure (1)..(446): unsure at all n locations
ngtgatattaatgtgcataagagactctcacaatgatagattttcttatgcttgtaacatntagataataacttcttataatccgtgattntgaacagaaccatttcctggtgttgaagagttgtattttctctatagtgcacaataaactgtatgaataccttgcaacaatgctagccatctacaatgcattttttatgagtaaggttgtgtcatcaacaacgcaacaatacttcttattgattcacattgcatctgttactcatctgtgtattgcaatcttgagggtaaggttgtgccatttgcatacaagcagagcatcccacattaatgctataaaactgatttctttcattattattattatcggctatgagtcttgcttccaagcaaatatacatgttatacttcttattgagtgaatcttgaagtggaattatgtgggt

SEQ ID NO: 210836 - DNA, 394 bp, Glycine max
cggcccgtttcaatagacagggaccacaggtgtgtatgattcttatctgtcacatcaacgagagctttgtcagtgtggggtggatgcatgaggatcaagttgctatgctggacgaagaaaccattcacgatcagccaaattgggtacagtcgtgttcgcccggctttgaattgaataattgcaaatcaagcagcgactcaagagttctatgtcaaatccaatgtaatcaagtattttaaatcctattgttgggcctaggctttaatgtccacttctcttgttgtgcatacacttttctttaatgttccaacaactataaatatacaaccttttattgatatcttccctcttgcactctcgtacaattcattgttagcatatttctaggagaatg

SEQ ID NO: 210837 - DNA, 453 bp, Glycine max
  unsure (1)..(453): unsure at all n locations
ccttcacaaataactaccatatggcataatctctagttaactacccatcatatctcccaaaacccaatacccacgaaaatttatgtgagaagaagtctacccaaacctcatatttgaagtcccacaacgtagaggtgcacttcacgactccgaaaatggcttccttttgcgatttggagcagaaatggtgagcaaagtttggagctttgatggaggcttcaatggtgaggaagaagaagggaataacaacgtgagagagagagggagaaaagcttctcgaacttttggctgagtgaggagagagaacgtggcttttttagttaaaaaggcttcctctctatctatattttttaanaaaggtatgccacatgtcttcttttgagtggagcaaaatagggcccactttntctcttgatgtgactcatactcagccacaggaagagaaaaatctga

SEQ ID NO: 210838 - DNA, 495 bp, Glycine max
  unsure (1)..(495): unsure at all n locations
tgctaacccatggaagctcctaatatctcccacactttntgtggtgagccattcttggatggccttgattntctcagggtccacttggaccccatttctaccaactacaaaacctaagaaaactatattatctacacaaaaggtacacttctctatatttgcatagagggtgtttttcctaaggactgaaagaacttgtctgagatgtcctaagtgatcatctaggctcctactatacactaaaatatcatcaaaataaacaactacaaatctacctatgaaatcccttaagacatgatgcataagcctcataaaggtgcttggtgcattagtgagcccaaaaggcatcactagccattcatacaaaccaaacttggtcttgataagcagttttcacttcatcacccttttcatcctgaattggtgataaccacttttaagatcaatttttgaaaagatattggcaccatgcaactcatcaagcaaatcatcaag

SEQ ID NO: 210839 - DNA, 427 bp, Glycine max
tgaggagtccagaccttcgcgtccaatacagtctcaaatgtctcgtctatagaccactctagtaagaaaaagtgaaagatagatcactgagcaggctacaaaggatccgaagcttatggatttaagtgaaatagaggatgataaccctttgataatcccaaggaagtgaaaagcagaacaagaaaaaccaaagaagtagaggcctgatcaaccaattatcacatcctcttttccaaagaagagaaagataagacctagatgcaagtccttaaccctaaaggaacccattaagatcccatccttcattgtctcttgttcgtctgatagtgaggcaactccaactcccactccacatccatccagtccaccaccagtgtagaccaagaagcctacatatccaagtttccatcgcttggatccacatgga

SEQ ID NO: 210840 - DNA, 487 bp, Glycine max
  unsure (1)..(487): unsure at all n locations
cttgaaagaggganattctgtttctaaggagctgctccaagttgcatatgcgtcaagtgaagttgctgaaagacaagttgcagtcattgaaaaacaagttgaaattgctgaaaaacaagttactgtgatacaacaaactcgtcctcgccattattcagaatctgatgtatgggatcttttagaggaattaagagtcacagatccatttcgcatgaaggtttataaccatttatgtgataatgagcacaaaaaacgtaagcttcttggcgtaccacctcatatgagaggagaagctctcattcaaatgatgactgatgcaggtatattttgttaagagcattggtagtgctcctcttttggtcctatatatntacgacatcatgtgatgcctttactaatgacagcctataacggattgctnttttggagtggatgtggatatgctctcttgttggattgttatattaaagcatatatgagacttatt

SEQ ID NO: 210841 - DNA, 357 bp, Glycine max
  unsure (1)..(357): unsure at all n locations
cattattttagtttcttctcttgatggttaagccttggtacttctgccaagtggttaaactttgaggtataatttctgcttggtggttaagctttgatagtttcctgaattgatgatttgagcttctgccaaatggctttgttgttgatttcgcttgatggttaagctctgattgttgctttggactcttataagaagatagagaaagccgatgttggtcaaaaaattctagaagctactgttttgactgatgtatttccaacatgtgtagctatttntcagacttttatttcacttcctttgatgtagatgtattatcttcttcaagcgaaaagtgtagagatatgtaaatgtatt

SEQ ID NO: 210842 - DNA, 449 bp, Glycine max
  unsure (1)..(449): unsure at all n locations
ntaattaagacaaagaaatcaaagatattcaagatggatgatcaagacagcctctagagtcttaggaagagtatattaaataggaagggaattccaattgaagtagcaaaaggtttggccaagaaatttaagttaaaaagtctttttcaagagatttactctctggtaatcgattaccagaggatgtaatcgattaccagtggccaaaaatgatttacaacagctattaaaatttgaattcaaaatttgcactatgtaatcgattacacatatatggtaatcgattatcagcagttattgaacgttttaattcaaattttaaaagcttgtaatcgattacacacatactgtaatcgattaccagaggagattttcagataatattctcagcagtcacatctttnntattggttcttgaatagccatcanaggcttatatatatgtgact

SEQ ID NO: 210843 - DNA, 504 bp, Glycine max
  unsure (1)..(504): unsure at all n locations
tggcactgcagatctgatctgcgtgatcctcatccacgtacattgtgtatgctccggttgagtcngtgtaccccttcttcgtgtacacaacctcgttgctaaccctgctcttgcattgcaacataatctcagcacctgcaaacaatcattaatcaaacaatacgtgttacaaactagcaacaactactaaggtaatgtttccattcacattaaatcattcaaaattaccttctaatatgtaattttaaatatatgttcacatgtttagtctcatgccaaagaaatgatgttagatctaaaattaattttgactctaattctatttctaaattgcttccagaataaaaagatccagatataaataactttacttcaaatcaattttaactaacaccaacgacggagaagacaatttgcaataccaatgaataaattaacaagtagctactatcatcgagtgcagaaatttagcatgacaacagtaaccaaccactaactgacata

SEQ ID NO: 210844 - DNA, 398 bp, Glycine max
caagaatgagctctgtaccacctgttttactaatggcctcatatatcttaagaaaggtggttgaattatgatataccaaactacttgccctaattaaatatctatttcactttgtattcaagttatgaattcccttattgacattattcttaaatattaattctgatatcacaattcgaatatgaatataacgcattaataaataaacgagattaacggaagagaaaatgcaaactcagctttatactgggtcggccacacccttgtgcctacatccatgtccccatgcaacctgcttgagagttccactatcttgtacattccttttacaaggtctaaacacacatggacgacactttctttgtgtttagaatcctttacacagaaacccacatctc

SEQ ID NO: 210845 - DNA, 459 bp, Glycine max
  unsure (1)..(459): unsure at all n locations
tatgcaaaaattggacgcatagtggttgtcaaaagccgaatcataagcatatatgaaaatacctagcaagatggtttccaaaccaattgctacaactacagaggcatccaaaatggctgagtccacttcaaacatagttgctaagaaaccaagagctaagacggatgaggctctaactaaatcaacctcacatgaaaccacatctaaagacacaactgctatcattgtccatactaccagctctagacacactacaatcaactntgcccctctagaggtagtgaccaaagccaaagtgaaagagatgattggactggctatgcacaactntgctgagaaatagaaggcttagaaggataatttgagatgcaccatgcaattagctatcactacttagttcaataaacttggtgaatctcttgattctaaatgcaacaagcccaaatgcgtctattcagt

SEQ ID NO: 210846 - DNA, 494 bp, Glycine max
  unsure (1)..(494): unsure at all n locations
ctcaagctttcatntccttgcgnttaacctattaatgnttttatatttttctactatcttgtatgggtattttgtcaagtacatccaaatgattaattacctaattttatgatttaaatggtaatactccgaaaaccttaattcactgttattcatcggtacatagttctttatcatagaagaaggtagaggtgacaatgaatcaaattaacttaaaaataatttaaaactcgattcgataatcaacttgttgaatttggttcatgaattaaatgagtagaacttgagttaaaaattaaacttgttaaataaatgagtcaaacttgagctataatagttagactttgattgtaattatatttntttgtcataccttgtaaccccacaaagcgtaataaaataaattaagtttatatttttttagaaattaaataattattttatctaaaatctactaataatanattganaatctgaaatgtatagaataaaaa

SEQ ID NO: 210847 - DNA, 315 bp, Glycine max
tacttaacgccgataacctatggaattcatcaaaaacttaacggctgaatgttactgaaattgaggcatccaaaagatacccccaacaaacaacatgtcagccaccatatggactcccaataagctgttgcctaagatgccaattggacccctattaaaccttgaactaaacctaactaaagtccttttaattgattaacccaaatcatacttttggtcagtcaactctacaaagattggtccattatttatactaactaagcactctataaattgagaagaagtggtgtatttagtcctacctctttgggccat

SEQ ID NO: 210848 - DNA, 453 bp, Glycine max
  unsure (1)..(453): unsure at all n locations
tcttanagctagaatgatatatgccatttcctacagttcatgggtaatctccatgcaagtagtccccaaaaagggtggaataacagtgataaagaactataagaatgagctgattcccacaaggatcatgactagttggagaatatgtatcaattactgccttctcaataaggcaacaaggaaagaacactttcctcttcccttcatggatcaaatgcttaagaggttagccagtcaagctttctattgctttatggatggatactgggtataaccaaattcttgttaatccggatgatgaagagaaaacaaccttcacttgtccatttggagtctctgcctattggagaatttcctttggactttgaatgcaccaaccacattcaaaggtgatgaatgccattttnttacatggtaaaaaaacataagatattactgatgactctctgatta

SEQ ID NO: 210849 - DNA, 389 bp, Glycine max
  unsure (1)..(389): unsure at all n locations
gatccanantctgttgtagatatgcgggaattactatctgtcttcgatgcaactctaattcagtgaccaaatctccctcccagtgataatacgtggaaatctgtggctcaatcacatgagtggttttcgacatatcacctagatgacaaagagagttctttaagcgagggtattgataagcataagccacacattaacaaagtgtacacccgctaacaactagcaagagaagcaataaccatggaccaccaccagcaacatggcgctcaacacccaaagggtgcaaccacccatctttacgactacccaaagatgcatgtctgaatagtgaatatgggacatgaccttgggacagtacaccaccggatgtacctccatgggacaaggta

SEQ ID NO: 210850 - DNA, 403 bp, Glycine max
tcacgcggatcaacttgatccgcatgcataatatgttgatccgcatgcttcttacggatcaacttgatccgtaacttcaactatcctattgcggatcaacctaaatccctaagctttacattcctaccaactacacctgagaaacgaacaatggaagcaaaacgacattcgcaaggaacaacagaagggacaataagcttacctcgatgaagaacggaacaacgaaagctcgcggaagaacgggaatgcgcagaagaaggagagccacttgcagggaacgaagacgcatctcgcggaagaagaagcaacacctcgcggaagagagacgaaccagaagcttgcggaagaagaagaaacgcctcgcggattgatgctcaactcgcggaagaagggaagggaatgc

SEQ ID NO: 210851 - DNA, 446 bp, Glycine max
tgctcaggaagcctaagtgcagttacaactctgtgtgtgtgtcattttacacagcatgtagaactaagatgacgcatgggatttaaggaaaggaatgtccaaacatgccgggtgctgatgatctgtaacaataaatagaagaggtttgcaacagctgagcaacgcggagaatatgaccggatgtattggtaaggcaactataataaaccccaataaaaaatgtgcaaacatccatcccctacccccaaattgagcatggaggggggaatgaaggtgagtagtggaatatgatggaatgaatattattgggtttcaatgtatgccatcttttttctacaatcctaaccaaacaatggaatatgatatgatctccttcctccaatccaaacataaccttactaaatctactcttgttgaaaactagaaataactattacacaaatgat

SEQ ID NO: 210852 - DNA, 411 bp, Glycine max
actcggcacattacctgaacgatgatgtgatttcattgcttgcttattacatatcaaatctatgacctggaaccatttcgttacgcgatgccctatggatgacatatccgcatctgtagacttcagtcgctgctttgcttcatctttgaatattctctttacgtaaccgaaataatataatatctgagagcgtctccaaggtgcatatgctaagagacaaatgagctgaccatgttgataattctaacacaatatcggctcttaacattataaaaaaaaaaactcttgttgcttggaaagtctcaagacatattataactcatcaagctgaatgattcttgtaagcgtaatatcatcattataactatcttaccctggtgaaaactgcaggctataaggccacgactctaa

SEQ ID NO: 210853 - DNA, 432 bp, Glycine max
cttgagccaattcatacgacaataacgtgttacgctgatgtctgattaagtcccgtaatatatcgagaccctcgaaattgaatggtgaagccctgagccaattcaaacgacaataactttttactcggatgtctgattgagtcccgtaatatatcgagacactcgaaattgaatgttgaatctctgaccaaattcaaacgacaatatctttttactcggatgtctgattgagtctcgtaatatatcgagacgctcgaaattgaatgttgaacctctgagccaattcaaacgacaataacgttttactcggatttctgattgagtcccgtaatatatcgagaccctcgaaattgaatgttgaagccctgagccaattcaaacgacaataactctttactcggatgtctgattgagtccccgcatatatcgaga

SEQ ID NO: 210854 - DNA, 393 bp, Glycine max
gcttgccgaaagcaaagggtggtcttggtatcaaggatctcagaaccttcaacacagcactgttaggcaaatggcgatgggatctgttctacagccaacaggaaccatgggctaaagttctgcaatctaagtaccgagggtggagagcattggaggaagggagtattggaagcaaagattctgcatggtggaaggatctaatcaaatctcatcaactgcagcgaaatttacctctcataagggaaacaatctggaaagtgggaggtggtgataggatcaaggtttgggaggatctttggacaaacactgacctatcattaagggataaatttcctaggctataccagatctcatgccatcaacagctgaccattcagcagctgtggacaatca

SEQ ID NO: 210855 - DNA, 426 bp, Glycine max
  unsure (1)..(426): unsure at all n locations
ctcagcttgactgagtcatcagagatataaatatgtgaccatggcatgagtttcaataattatcaatcatctntgaatcatcaatctttcaatctgttttcaacatcatctctcaaacatctntcaatcaatctttcaatatctttctacaaaattgtctgattcatttctcttcatctttctaaaagttgtntatcaacacattctcttccaagaaaagttctntgttcaaaaacttgtgctattcatctttttcattctcttctccctttgccaaaagaacgaaggactaaccgcctgaattcttttgtgtccctcgtctcccttacaaaagattcaaaggactaaccgcctgagatatcttntgttttcccctctaccaagaatcagaggactaactgcctgagaattctgtgtcccaaaaca

SEQ ID NO: 210856 - DNA, 378 bp, Glycine max
  unsure (1)..(378): unsure at all n locations
acgatctactntgtgcagatcccaagagagatcaatagcaattccatgtcctcacccgatcgaagggtctaatgagcctttacagatagtgacaacaatgtgactcggaccatattaacgcgttgtaggtatctatgttacacttattattcgattgagcgattggacaacatatctgtaaaaataattatgatattccctagctcacataggaagaaatttaacactctatatactcattagttacaagaagacgagaaattcattagttgtgctatatctattttacactcaacgactgatacattattgctttggttaaataaaatatacaatatcaaattaagggctaagacgagcttcgagctagcgatatca

SEQ ID NO: 210857 - DNA, 500 bp, Glycine max
  unsure (1)..(500): unsure at all n locations
ngcccagagaaggaatccacggaggagatgcttccacctcgttagactgtttatcgggttctaatgactcctccgcggcctccacataaggcatagaggatgggcagctcaccaagatgtcttcctcgcctgatacaatgaccagatgcccttccactacgnaattcaacttttggtggagtgtagagggaacaacttccactgagtggatccacggacgccccaacagacagctgtagggggggttaatatccattatttggaaggtaacttgacaggtgtgagggcctatctgtactgggaggtcaatctctcccctaacctctcggcgggtgccgtcgaatgcacgaaccaccattgaactcggctttaggtgggaagcattgaatggtaatttctccaaagtgctcttatgcatcacgtttaaactggaaccattatcgatgagcaccttggctacgatatgtttcatacacttgactgatacgtgcacagcttat

SEQ ID NO: 210858 - DNA, 496 bp, Glycine max
  unsure (1)..(496): unsure at all n locations
ctcagctagtacaagaataattattcccagcaaagacataaaactgttgctccactatatatgacaataggctgaacgacaactcacggatgttggtgaagtcagggaatattgctagaaagagagagctggaatcagcctaagaaaaacaagttccaactctcttaagaccatcatttgaagcttcaagccaatactagtgaagacctaatagagacgacatcgacataaataaccagcaaagaggcaactaataaacgtgaatgtatgtgtatgaaggttttgatgatgcccaaacaaaagcaacacaagttttatttctagacctagagaacaaagatcaagagataagttaagtcttagtctatctttgttaaaagaatactctagtgactgcaaaggtttggcctccaacatagtnttaaattaatataacaacgtttaaactgtaacttctctgaaaaggcattttcactgtaatcgatactaggcattg

SEQ ID NO: 210859 - DNA, 418 bp, Glycine max
  unsure (1)..(418): unsure at all n locations
tgccacacaactcgcccaggagagctaggttgtcttctctataaagcaccaccttctggaggaacttcctggaaggcccaagtatgcctggttgctatttgcacccccctgtttactaaatacaccccctgctttttgttgctgattcatnttccgtaacgttacgaaactttacgaatttcacaacgatactcgttttctttccgtaatgttacggaaccttacgaattacgtaatcatccatctttttggcttccagaatgttatggaacttcacaaattgtgcattaacacttccttttgactttcagcatgtcacaaaactttacaaattgtgcaacaatgctttcttttgacttccggcatgtcacgaaacttcacagatggcctaatgatgggagccaagtatctctaagtg

SEQ ID NO: 210860 - DNA, 453 bp, Glycine max
  unsure (1)..(453): unsure at all n locations
ntaacaacaatgaaggtcagaactagataatgataacactatctctcttataatcgcctctcctacggcctctaatcatcatatgtgccattgattagataattttctcatggtatacactactttgtcaccactatgtctcgtatttaactattccctttcatgatttatatgtaggaatgtaggactaattaattggtgggtcttaacagctatttcatttgttgtgtaatagaaagtagtgctcaatgtggacttccatggcgatagaatcaagcaaaacgctatgaagaccatattcgggcttttagcacaactacgaaagtagtttactacgacgcgtaaataacatcaantggtagaacccgtctttgaagataatggaatgacaatatcctaattaaattgtaagtttacggacggttttataaaaccgtcgtatgtgaactttgt

SEQ ID NO: 210861 - DNA, 97 bp, Glycine max
  unsure (1)..(97): unsure at all n locations
attacggacacttaganactaagctttttgaatttatcactggaatcgatatagtttctggtatcgatacacaatatatttgaatggcatgactctg

SEQ ID NO: 210862 - DNA, 486 bp, Glycine max
  unsure (1)..(486): unsure at all n locations
gtgatgatatggtcttcaccaacaaaaggatcaaagtgggtctaaaatgaggcaaatatgatcatcatgctttgataaatgccaaataaatagggcaaatgaagagggtgagaatgagggagaagcccatgctgtgactgccattcctatacagccaagtttcccaccaacccaacaatgtcattactcagccaataacaaaccttctccttacccaccgctcagttatccacaaaaggcaatccctaaatcaaccacaaagtctatctaccacactttcaatgacgaacaccacctttagcacaaaccaagaacaccaaccaagaaatgaattntgcagcgagaaagcctgtagaattcaccccaattccagtgtcctatgctgacttgctcccatatctacttgataattcaatggtagccataaccctagccaaggttcatcaacctccatttctccgagaatatgactcgaacgcaacgtgt

SEQ ID NO: 210863 - DNA, 446 bp, Glycine max
tcacatctcgtattcgcgtcattctgatcttatgtataaaggtaaccgatctacaatgtataaatgaggattcatgtcatgagtaatgtctgtaagagttcagtgtaatgatgaaaaccagaaaggtaaagtgaacaaatcttgtgcaactatgatcaaataatggtccatccgttatacaagcatatctagacctatttgtgttgggatatacagtttactgaccatgagattctagttttggacctatggttttcaagttgaagtaagcatgtagctgtgtcaatatatgctgaaaagacttccactggatctttcccgatttcccttattattattagttgtggaaattcttgaatgcattaatgtcaagtatcctgtcccagataatgaattcataatttctgttcattatgctcggcaggcgaggtgaattccctattcaa

SEQ ID NO: 210864 - DNA, 468 bp, Glycine max
  unsure (1)..(468): unsure at all n locations
ggcttgtggagcttctatggaggctggatctttgagcttctatgaggtccttcaatggtgattttccaccatggagatgcagtggaagacaaaggagaataggtgagaggaggcgccatccactatggaataagccatggaagaaggagcttcaccaccaagatgagcctnggataagaagcttggagaggatgcttcagtggaggaaaagaaagagggagagaaagatagagtggggagcacgaaattgaaggaagaaaaagggagagaagttgaactttgagttgtgtctcacaagactctcattcatcaaagttacaacaagtgttacacatgcttctatttatagactaggtagcttccttgaaaagctttcttgagaaaacttccttgagaagcttctttgagaaaacttccttgagaagctagagcttagctacacacaccccaatcataactaagctcacc

SEQ ID NO: 210865 - DNA, 487 bp, Glycine max
  unsure (1)..(487): unsure at all n locations
tcacaagatgatactgatcgaacatttcctaaccgacatcatgcanatatcgttcacggattgaattgaaaactcaatagccgacatcggtcgtgaagtagccccgactgatattnttcagcagacgttaagcaattnttttttaataatgctcgctggccgataaaggtttttttttaccggagaagaaatattcttgttttggtgttgcataaaaaatatacaatgtaagtcggctaggtttctttgtgcgagctcaaccgaccttttgtttgggccgaaactggcatgttcccatttattcggccaggaaaacattagcccatctcggcaacaaaatattattcaccgatattgattgataaaaatgacagttgacatcggccaggaaacacgaccgatcgaggtctaataaagaagcttcacaagatgatgctgatcgaactttttctaaccgacatcatgcatatttcgttcacggattgag

SEQ ID NO: 210866 - DNA, 446 bp, Glycine max
  unsure (1)..(446): unsure at all n locations
ntaagcaatagtcagagaagtgttgtctcatccaaaggatttgtccacaaaaacttccagcaaanatatattccacttctgcagttgatatgacaacactattntgctttttactatgccatgatactagagtagaaccaataaaatgacaagtgccactagtgctttntctatccggttttcatctagcaaaatcagaatcagagtatcctactaagttataagaggaatccttatgataccataaccctagatttatagtgcctaataaatatcttattattcttttaacaacactaaggtgagattctttgggattttcttgatatcttacacacatacaaacgctaaacattatatcaggtctacttgctgataaataaagaagagatctgatcatacctctatatttctttatgactattgattgaccggnttcatcttta

SEQ ID NO: 210867 - DNA, 429 bp, Glycine max
  unsure (1)..(429): unsure at all n locations
tcgtgatctnggacaagaagggtttaggcaagcacatgcactttattatttattatagaaacagagttcaagaagccattgtatctctgatgcgcatacttcacacgattatcgaaggtgttagctttggtgaatttgaaagcgagatttgggtggagtgacaaaagcttcaatgaattactattgttattgaagaatatgcttcctatggataacacgttacccataaattcatattaggccaagaagattttatgttcagtgggtatggaataccaaaaaatacatgcttgcccttatgattgtattttgtatagaaatcaatttacacaaatgcgcaactgccctacatgtggtgtgtcatgctacatagtgaagtgatgatgcaaccacatactaggatctgttcagcgaatgtgtgttgttatc

SEQ ID NO: 210868 - DNA, 425 bp, Glycine max
  unsure (1)..(425): unsure at all n locations
tggaaatcttagtancatgcacgcatangttcctcttatttttggtttccatcgttgaaagcatacgcatactttgaatantagttgtattcgccgcttttgttgctagtgctgctggaattcttgttgtacttcatgaatagaagcgtttaatgctctttcatttctagctctgtttattataaggctctggtagttgtacattcgtgcgtgatgtgtgtccttcatttaattaattgacttggttttgtgttctaagtgtgatatgattatatcagtgtngcagtagaacaaataatcgtgaattactttctggagctaacggatgatcatatctggtagagggctatgatcttttttaatttctatggcagccatgaatacttaactgaatgttgttttccttactttctcttgacgagata

SEQ ID NO: 210869 - DNA, 479 bp, Glycine max
  unsure (1)..(479): unsure at all n locations
tgctcaccactattagaggagaaaccttcatgttgtttcatataaacctcctcctctaaatcaccattaaggaaagctgttttcacatccatttgttgcaactcaaggtcaaaatgagcaactaatgccaagattatacgaagagaatctttcttagatactggagaanaagtctctttgtaatctattccttccttttgagtaaatcccttagcaacaagtcttgccttgtatctctcaatgttgcctaatgaatcctttttggtcttaaagacctatttacatccaatggccttcgccccattaggcaactctacaaggttccaaacattgttactttgcatggaactcatctcatccttcatggcatcataccataaatttgactctttacaactcatggcttgatcaaaagtttcaggatcattttcagctccaatattatagtcagattcttgcanatatacaatataatcact

SEQ ID NO: 210870 - DNA, 488 bp, Glycine max
  unsure (1)..(488): unsure at all n locations
ntaatcctaaccgcgagcgacaaagtatagcaggctaagcatgatacgttttcttcaagctaaattccttacagccataactgaggttcatgaagctaagcgtcagtcatggcagctaagctgaattccttgcagcaatgtgagcactaagcaagtccgtatcagctaagcgcatgctcctctgngcttaagaagcatcatgttagctaagccggaccagaacccgacttagcgagaggtatagctttcctgatctgtagacctcgctaagcggacctatcggcacgctaagccaagcctatgtgctaaaaaaaaacaaacaaacttgaatttcaaagatatgctaagcgcacggtgccactaagcgagcatcttcgattaaccagacatcacttcgagaaagcaaaacagcttatgtaagtgatatggcaantactctcacaatttgtggaaactgctgtactatctgcatcttctctctcgcactc

SEQ ID NO: 210871 - DNA, 439 bp, Glycine max
  unsure (1)..(439): unsure at all n locations
ntatcactnttcattcttgagctngattaactatttggcatgattgggttgcttggatgattttcatgaatgtcttgactntntggatctccttatgttagatgttacccattcctttcattccttgatgttcattgagaaatatgtgaatgtttttgtttgtctccctttgatatccttggattttgttctttgtttcattttgcccaggagtgcaaaaggctaagtatggggggttttgatgtgccatcattttcttctattttctaaaccctttttgcaccattttaatttttgattggtcttaattgtcaattaattaggcagttntattatttgggctcatttagctaatttgatgtttttaatctaatttcaggaattaatgaaacattgtgcttaatccggatcttggttgcggacttgaagagggcacata

SEQ ID NO: 210872 - DNA, 330 bp, Glycine max
aagattttgttctactctcaaggtactatgagcgctggtatggaagagaccaccaactttgattattttcatgaattgggccgcaactatcaacgtaaaagaaatggtgaagagtgtcattaagtgaaggtccttgtagaaatactatcataacttgacatccaaccatctgacttcattgttacctactatcgaacaaaacatggatttatagaccattactgttgagcaacttatgggttccttacaagtatacgaagagaatcaaaagagaataactaaacaaaaggatgctacggagcatctactacaacctaacgtttagggagc

SEQ ID NO: 210873 - DNA, 478 bp, Glycine max
  unsure (1)..(478): unsure at all n locations
gtacgcgacactactgaatactcaatcggcgcccgcagatacctctgatgagactaggcttaacttaaacagcactctcaccacatcatattgagaaaaactaagccccacaaaccatcctcggtaatgtagataattactcctgcatctatcaacttctaaaggaacagtacattttccaatgctaaaatcacctaacaagacacacaaatgggtgatcaggccatgagcatgcactaattaaacatgtaaacaagcattgaacacacacattacaatctattagatattgaagatatatacatcaattgttccttagatatccccaacttgggtgtctagtcagccatacacataaaccctatcacgaatgagattnagagtacacaataataagtgcttacacaagaatggggatccctcttcctcttcttatcaccccacaatcactctaacagtcactaatctctatataaat

SEQ ID NO: 210874 - DNA, 415 bp, Glycine max
  unsure (1)..(415): unsure at all n locations
ntaacaacaatgagtgtcataactagataatgaagacacatctctcttatatattcctctccttcgtcccctaatcagtatattcgcgattgatagttcaattttctcatagatttacactattttgtttccactatgtcttgtatttaactatttcctttcatgttttatatgtaagaatgtaggagtaattaattgttgggtcttaacagctatttcatttgttgtgtaatagaaagtagtgctaaaggtggactctcatggcgatagaatcaagcaaaaagctatgaagacaatatttgggcttttagcacaactacaaaagttgtttactacgacgcgtaaataacatcaattggtagaacccgtctttgaagataatggaatgacaatatcctaattaaattgtaagttt

SEQ ID NO: 210875 - DNA, 434 bp, Glycine max
  unsure (1)..(434): unsure at all n locations
gcttgtattctagagttcaactatctacttgagtccaatgagttggagagggtagtggtgaggtcaacagtggtgtcgaagaaagaagtgtgtattatggattgagaaatttgtgataggcatgaatgtattgcatattggttaatctgtaatacatttgtatcatggattacccaatccaaaatacatttctaacataagacaagattaagaggaagaatttataagacaagagaatcccctagttgagtcagttttattgctatatgctaagtatcaataactctatgtgttagcattattttatactactgcaggagcttttgaattccattctctatatcttcggtttatctctagctatctacattgntgagagtggtacaacatcattgcttataatcatcaatgcacctttccatcacaagctctac

SEQ ID NO: 210876 - DNA, 481 bp, Glycine max
  unsure (1)..(481): unsure at all n locations
tggtcgcaagtctcgtcccataagaagggctcagttctcttgagctatntgtaacatggcttctcctttgtggcgagcttcaagaagaacctggacagggatgctggcctaccatttaacttctggacttcttggacattggttgggctgcgcatctccatttggtgagtgatcatgaagccgatgaacttgcttccacctaccccacaagtacatttttcaaggttgaggcacatgtcatatttgcggagttccccaaacacttcttttagggttgccacatattgggctatgctttgagacttgacgaccatgtcgtccacatatacatcgatgtttcatccgatctggtggttaaagactcagtccatcagtcactggtatgttgtacatgtgttttcgatgctaacaggcatgaccctgtagcatatgttggcttcttaagtgatacatgttatcttctcctcatctagagcatgca

SEQ ID NO: 210877 - DNA, 477 bp, Glycine max
  unsure (1)..(477): unsure at all n locations
ggttagggaatctttaacaacatatatagttttatacacataatccataatttntttcttcacaataattcttttcagacaataaagcactctntatctgaaggcatattcggctattgttaaaagttatagggtgaattgagaaaatgattgtttgacaaaatatgtagctattatctgctctgggcatggtgggaacatactgggatacaatgcctttccaaaaggaaaaatcctagtacactctcaaaaataatcttgtaggtagttttatgactcttcagatacagttggataatattttatttttgacctgatggcatgtatgctttatggctccatgtattacattcatagtggagtgttgtaatcctcttagggtacacctaaaaatctcttctcttacaggaccctggtnagtgtgcattatatattaacagtattttatgacgctctgtattgtgatctcataactct

SEQ ID NO: 210878 - DNA, 441 bp, Glycine max
  unsure (1)..(441): unsure at all n locations
tccaccgagtngaccgtgttaaggctatgaatgtagcatntatgcattgagtttgaacttcctcctcctgcaaatcctctggatatcatgttaatcagacctcataactgagttctggatgtggtattcttgtcgcgttgtgccttagtggtttattgagtccgactacgttcttgactcctttcttgctctcaatcttgatcatgtgaggggtccttgtcttcaaaaaatatctaaagatgccctttttggatcaacttctctattttttccttcagggtaatgcattcttcaatgttatgacccgccactcaatggtaacgataatatttagatttgtctgatcctgtgagaagtcgattttgagctagaaattagataagctctacactacatcgtttatctagtacttggctttgaatttttgtcactggagtatat

SEQ ID NO: 210879 - DNA, 464 bp, Glycine max
  unsure (1)..(464): unsure at all n locations
tccacatactngatagccattctacattgtcgacaacagaatgacctccaatgccaagatacaccaaattggagagattcccaatctgagatggaattgttccattggcggcatacgtcaggtcaagatacaccaaattggagagattccaaatctgagatggaatcttccccatgaatccagtaccagataggtcgaggtgagtcaaggaagtgattgtccagaggaaagaaggaattgccataccttcaaaatcattgccgctcaagtcaagatatcgaagcttagagagattcccgatctgagagggtactgttccgttggcaacatctgaactcaggtcaagatacaccaaatttgagagattcccaatctgaggaggaatcttcccatagaatccagtagcagagaggtaaggtgagtcaggaagtattgcccaatgaaaaaagaattgcataccttct

SEQ ID NO: 210880 - DNA, 471 bp, Glycine max
agagaagaattaataaagataagtatgatatattctttcataaactgagtagcacatggatgtttctcataacttggttaccaaagagtttttactctctggtaatcaattaccagattgttgtaatcgattaccagtagcaaaatggatttgaaaaagtcttcaactgaatgtacaacgttccaattgatttcacaaatctgtaatcgattacaatgttgtggtaatcgattaccagtgtgcttgaatgttgaaattcaaattcatatgtgaagagtcacattctttcacaaaaaaagatttgtgtaatcgattacactgatttggtaattgattaccagtgatagtttctgaacaaatcataagatgtaactcttcaaatagttgttgactttctcagattggttttaagtgtttctaatagtcattactcttctaatgtgtcttttgaccagacatgaagagtctata

SEQ ID NO: 210881 - DNA, 291 bp, Glycine max
cactgaacaagtggtatatggtggaaaggtgatttatctacctttatttatacataacagcaagtactctatgtgggctatcgcatgagttccaaagatcacgtctggatataactctgctacgtggatgctggaagctactccttcatttgaacaaaacagattgtgatcggactttgccgaaatctacacagaatcaagtttatatcaccatgtacattctttggcggtaaattttgtacatgatattttgatttactacaatcataccatgttgtttctcatatataa

SEQ ID NO: 210882 - DNA, 432 bp, Glycine max
  unsure (1)..(432): unsure at all n locations
ctggacacaatggataagaaggatatgagttcatgatatgttgattgaagagtatcaagggtgtttatatctacctcttcattcgattctgagtctgatccttccgatgtagtgtttgccattagacaaaagttgccttcttttttttttgtttcctcattggacgatgtgtcgnctagttcttcccaagaactcatcagtactttcttgttctttggcttaaaagaccttttcttggtgtctgtcttatcaaggttctgacattctaactcgaagagtcctaatttcttacactcatagcgtatgagagagctgnttgccttgtctttctttctcttatggcttcttggacccttctatctgattcgttcctctcttcacatgttcttatcttcttgaataaagctaatgataatctcgttgacttcatat

SEQ ID NO: 210883 - DNA, 483 bp, Glycine max
tcagataacccaacacaatggtgttcagctatatgctcatcctccacactcatattaacttttgtttaaatattatttgctaattaaaaataaactaacatataattgttatccctatttcttatttcaattaactattagtgtgttttaatggaattgattcttattaaaattaattttgaaataacgtgattcatcttttgtactataaaattaagttatagataataattaatacaaaagatctaacataaaaatattattcaaaattactttaatttagaattatttttacacttagaatcaatttatattattttttaatacaaataaatatataagaatgattataaattaattgatacttagaatcaattatcacatagtataaactaaacatacacttatatttgacaaataattctacactcagtgtcatagctttattaaatctggatacttgatcccactatatattatatg

SEQ ID NO: 210884 - DNA, 493 bp, Glycine max
  unsure (1)..(493): unsure at all n locations
ttaagtttcagagaatactttgtatacgcttagttagttatatctccaccacttgtcactgtacantttattttatttttgtaagcactacttgtcattgtctaccccgtcaaaaaagcatgactagtacccgtacttgtttgagttggttacttacacatggagtcaagagcattctaagttacactcaaccaagtcttacagaatcttaattatattaatataactaataattaatgttgaagcttcatttgaaaattntgtgtgtatagctggctagggaaagcaattaaagagaatagacctagtccatgcttttaggtacaagatctccactgtgtcttagtcccctaaacgacgtgtcgaggagatcataagtaattgagcagtctatatgaagaaaatgaagagcatgatttttgtttttgagtcattnttataaataaaatattaatatgagtgtctntcaaataatttactactataattcatt

SEQ ID NO: 210885 - DNA, 465 bp, Glycine max
  unsure (1)..(465): unsure at all n locations
ngtacgtattcgagaagaatgtagtatgactcttcccaattaccgcatacctggtcgagggcccattgtttagctagccatgctttacaatatgtgatggtgtattcgaactcctgtcttacgaatgcgatgaatgtaagaatggttagttactcattttcttcaaccattgcagcgatatttgtgcctacaagttttgaatccatcttattgtgatcttgtgaaatgtgtggcatgacacatgtgtgaggcccttctatcattataatttcgcaaacttttagatgttttcttttggacgctctaagtttccactggcacccttcatctgggttacataagacccatgtatccttcacacacctcttggctatgaacgttacatggctcttaatgtgccatattgttaccgcgtgtttanggtctccattgacagaatcctgaccaaatcaactcgttatcggg

SEQ ID NO: 210886 - DNA, 491 bp, Glycine max
  unsure (1)..(491): unsure at all n locations
tatgaaccttgtcacttgagagccaaagataaaccatacattatcagcatgaattaagaatttaaaaggctctattcgataaaatattatggtattcaatcaaattttttaaataatataaataaatcttgtgatattcaatcatcactatcataattttgtaggaatgtaacaaaatttggtggtattctaaaaaaatcttcgatagataaatgtcacttagaatgaatttcgatagatttctcatgacattttagtataatatataatgtcacatctatctagcaatttcacccaaactgttgagactcttctaaactctcattctttctttnttagtggatagttaaacttttctttatcccatcacatataattcattctctcttattgaagggtgtctagacattggtatacttagtcatcttttctttcaattctacatagcttctctatgatangctaaaagatctttctactgtttctctttt

SEQ ID NO: 210887 - DNA, 434 bp, Glycine max
  unsure (1)..(434): unsure at all n locations
tccatattaatnttcatacaatagaagggactgattccttttaaatcagagatgtgccaaccaatagcggctttgcgacttgtcagaatctgtaccagttgatcttattttatcttctgcaaggagatgctaattataacaggtttggtctcagtgtcctccaaaaatactggaagggtctttaattctactttgggatnttcttttggtctattgttttccaattcttcaaacatcatatgaccaatagattcatcgtctagatcccccagatcatcaatacaagctagcattnttcctccatcttcattgactaggcattctgtcacatattcaaattctttctccccaggcgtctataataccatggctgaggctgttaattccatctcctactccgatatttctacttcaaaccaatcctcacagtcatc

SEQ ID NO: 210888 - DNA, 470 bp, Glycine max
  unsure (1)..(470): unsure at all n locations
tcttacaatanaagattagataatgctttaattttataaagatagaaagatatgacactattttataaagttatagataataacatatatctaatataaagtacctcagacacaaactagataagttgaagtctagatttaaacctaaggagtacaaaaatgatttngtctatagagttttactngtattgaagagttgataataataattaatcttagtcgatatagatacacatagaatcttcgtaatattgagaaaaaatattattacttcaaaaacacatatcggattatacaaatctatttctctctatccattattgtgatataatttaaatacagaataagttctattttagaaatgtgaatcaaacagatggcctccttacactttactatgataacactaacctcagcgtgcaagagacattngagctatgggcatcaataacttgtctgcagtcaagttc

SEQ ID NO: 210889 - DNA, 464 bp, Glycine max
  unsure (1)..(464): unsure at all n locations
ntagtcaaacagaataatccgaanatgtcaaagaattgttcgttgaanaagcataacaaaactttttgtgattggtttaaagatacaatctttgcatatgagaatgcttcagaaacattaagaaaactagcagatgggcctaaaagaaatgttataacctgtcaaggatacgacataaacaggtattcattttacacaaaagcacaagatgacaaaagtacaatgcagaacagcggggtcaccctaagggctgaatctcaacactttgcaagtgtcaatgatgccaatccctgtgtagcttccatcccttactttgggttcattgatgaaatttgngagcttaattatgtgaaatttacagtatgtgttttcaaatgtaaatgggatgacagcaacaccggtgtgcgcaccgatgatataggatttaccctcgtagatctaaagaaacttggttaccacaatga

SEQ ID NO: 210890 - DNA, 448 bp, Glycine max
  unsure (1)..(448): unsure at all n locations
cacctgcggcatgcaagcttttatgaaattttctcactagtaatcgattacaattatgtgataatcgattacaagatttaaatttcaaattttaaaacccttttgaaaaactcatttgaaatcttgtctctggtaatcgattacaatgtctgataatcaattaccactgccatgattggtttgaaaataattgtttgaggccaaaactaaacaaccattgagattcttttaacaaataaactaagggtttatcttcttttttttatcttgnttgcttgaccttgaattactcttgaagcaatctctgtttgcttaactttgcatgtttcttgaaacaatcttgtttgattatactttgacatcatcaaaaacctgtattcatacatttacattctcccctttnttatgataacaattattatcaagtaaattctttttggcatcatca

SEQ ID NO: 210891 - DNA, 504 bp, Glycine max
  unsure (1)..(504): unsure at all n locations
tgtctcagcgtttatgcgagacagagaccaacatgttagctatcatcgtcaagtacgaagaagagttgggtctagccacggcccacgagcatagaatcgcggatgagtatgcccaagtatatgcggaaaaagaggctagaggaagggtgatcgactctttacaccaagaggcaaccatgtggatggatcggntcgctcttaccttgaacgggagtcaagaacttccccgattgttagccaaggccaaggcgatggcagacacctactccacccccgaagagattcatgggcttctcggctattgtcagcatatgatagacttaatggcccacataattagaaatcgttaggaaacttgtatggtctcttagaccttgactagatatgacttcctttctgaaataaaatgagttggtcccatgttcctactccanannaaaaaaaaaaaaangaaaaaaaaaaaacttgtgcaatcaatactcctacattatcttacatgatttt

SEQ ID NO: 210892 - DNA, 419 bp, Glycine max
  unsure (1)..(419): unsure at all n locations
agcttangatcaaactctnttctctctatngttctcaactatgctgcattcttcttcctcctggcactatgggtcctttttcttggacagattgtcttgctctctcactggtgatgatcatggtacgctaacgagtcaatcaatccatggatacactccaagcaagactggatttgagttatgaagtactattgcaataaagcgcgcttcttcttcttgttcttcaatcctatctctaagtgtcatgatcttgaatgtgattaatagtcacaataaattaggttatacattcattccctaattgcaaatttaatcatatattgtctggatgatattcccaccaaaatcgcgatgcaatgaatgagggagtaattgggttgaactcactctaaagacgttgattgaactttcacaacatg

SEQ ID NO: 210893 - DNA, 257 bp, Glycine max
aatcccagtgctctaatgtgtcatctctcaatcgatcattcggtgactcgctgcggatatgagcgttccaagacgttctatggggttgagtagcgcctatactgcggttcttatcttgacgcggtaagagccaggcaatttcacctgctaaactcttcatagagtccacaacatcctggacgggtaatgcgccaaacttttccaccatatttcacaggtggcgtatattggaggaccatacattcttaggagaggac

SEQ ID NO: 210894 - DNA, 425 bp, Glycine max
agcttcgggctgctcaattgctccaggttgctgcatttattggcaaaggtctgtatggtggtcagcaaaggagcacaaaccacagacccttgcaacatgtacagatttctggttcaagggccagttgggttaccaaggtaaccaatgcatccagtttgccttcaagcttcttagttttaaatgatgcaactgagtttgagctacctcatgcactcctctaatgactatagcatcatttctggcgctaaactgctaggagttggaagccatcttctcaattaaatttctggcttcagtaggagtcatgtcttcaagggctccaccactggcagcatctatcatacttctctccatattactgagtccttcataaaaattttggagaagcagctgctctgaaatctgatggtgagggcaattggcac

SEQ ID NO: 210895 - DNA, 380 bp, Glycine max
  unsure (1)..(380): unsure at all n locations
actaagcttataaataacattanataataaacattgtttagtcatattgcatacataattgatataaaacctaaaatatcctaaaagtcttcatgtgtcttccatacgttactttcgtctcgatcgaacatatacattntcttgcacagtcacacctcttgcgatccttatgcagtcttcagtgacaatgtatgtttttgttcctttagtgactatccttaggttgatcaaccgttccaacttttcagctattgtttggcaagcctcctaggacattgacaacaaggaaaaaagtttacacttaatgcatgttcagataaaatgagtaacagacacaattgaaaatatattttaccactgcatgtcgaggctgatctaca

SEQ ID NO: 210896 - DNA, 432 bp, Glycine max
  unsure (1)..(432): unsure at all n locations
agctntataagcgcgggttcgggagacaaaggtttatcgttcgcgatatgcgaagatgatattccgagtactttggatttggtacgaccatgccctcctgatttccagctgggaaattggcgagtggaggaacgccccggcatttacgcaacaagcataatgtaaacctttacggttttaaaagctctatagttgggcctaggctttagagtttttccttttgttaaggctttgtgtcttttgtttttgaatttataatacaaggatctttcttcatctgttcctggtctctacccattctcattcacttgcatgtttacttctttntctgaaacggcagatccgatgacgagtcccccgaaggtactaatacctgggacccgtctatcgacttcgagcaagaaatgaatcaaacggaagatgaaggaaatg

SEQ ID NO: 210897 - DNA, 252 bp, Glycine max
gagtagaaacatgggaccaactcattgtatttcagaataaaggttgtatctagtcaaggtctgagagaccatacaagtttcctagcgatttctaattatgtgggccattaagtctatcatatgttgacaatagccgagaagcccatgaatctctttcggggcggagtaagtgtccgccatcgccttggccttggctaacaagcggggaagttttgactcccgtcaagtaagaccaaccgaccatcacatggt

SEQ ID NO: 210898 - DNA, 389 bp, Glycine max
  unsure (1)..(389): unsure at all n locations
gcaagcttctagagaaagctacatgaagctgccttgttttaaacgctgcccagccttcgttaaccgttggatcttctctaaatttggtctgcaacttcacaagacaatngtgcatgatcggaccgttgggatctttgagaagatgtctggagtttgctataagcttccgttcccgagagcatctcttatttaagcacttcagccttagctttcctgtagcttaggaaaaacgtcatttcttcttctttctttcttccaaagccatttctaaagttccaagcactttctccatcacccacagccaccattagcaaccacaaaccatcattgttctccattgaaaacccacaccgagaggaacccttcaaccgaagcggaatcttccaact

SEQ ID NO: 210899 - DNA, 482 bp, Glycine max
  unsure (1)..(482): unsure at all n locations
tcacacaagttatntntctcagacttgagtgtgagaatatgttggcctccccacacagatcctttttctgaaatttacaaacacttatatcaaaggggaacgccaagtatttaaaattaaaatggaatgatccgagtatctaacacaaggaacttgtttatttggcaaagctctggtcaataatcatgcattttgttgacagaaaataataattgtgaattgaagtaaaagtatgatatatcctaatgtgaaaaacaataaatgcaagcaattaaaagtgacatcagtggtttaaaagagttgggtctatctaataaacaagttgatgcatataaagatattcctctaattatagatgttcttatgttctatgttgaagactacagtactaaacctcgatcccttgtaagttagactaattaaaccaacttcgtctcaatccctcttgtggatacgcttattaacaacatttatcacacata

SEQ ID NO: 210900 - DNA, 341 bp, Glycine max
atccttaagtcaccgcagcatcaagctgctagcgagactgcaatttaatctttttcaggtcaaaaccaatttttatccccttttaaaactcacaaaccacctaaaactcctctccacaccaggacatcggtgcacccatcccatgtgttgccgcaaccacatcggagagaataaaatgccacggaataaatagcggagaagaacaacccagagtttatctgttggaacaaccggctactcagcccagcacctgggcctgaatttttaacttgaaatcttacacaaacccaggatgcctcctgctttgactaggagacctctaaacgaccagaagacctttg

SEQ ID NO: 210901 - DNA, 377 bp, Glycine max
acactatgaatactaagctttatctagccaagatcatacaaaagtgtataacagaacctaacgatctctaattatatgggccattaaatctatcatgtgttgacagtaattgattagcccgtgaatttcctctggggctgaacacacttcagcgatggcctttgctttggctagtagtcgcaggaggtcttgacttccatttaagttcaaggcgaacctatccatccacgtggtcgcttcttgatgcaatgcatcaatcaccttccctcttgcttccttctcggcgtacgcttgtgcgaagtcctccactagcttttattcatgggtcaaagactggtttaactcttctttgtactgccctattatagctagcatgc

SEQ ID NO: 210902 - DNA, 415 bp, Glycine max
  unsure (1)..(415): unsure at all n locations
agcttccgnctacgattttcagctgactgtccattttccacatgatttttcccaaacatagccaatatgttttcaaaaaaatgtattagaaagtatattctcgacacttttttaaaataataacattaaaaaatcatctttaaattttatcaaacaaaaatatactaatattagtttggcaagacattttaaaaaatttctaactttttctactagctaaaagtcttatatgattattttggaaacaagtttttttaattacattctaatattttttaagacatttcttaaaataattttttttaaaatattaacttttatcttttaactttttttatttccgtgttgtctctgaacatttactacattcccttttaattgtttattaaaataaattttattattgttactctta

SEQ ID NO: 210903 - DNA, 490 bp, Glycine max
  unsure (1)..(490): unsure at all n locations
actcagcttctanaagacttgggagtcatacgctaatttcgttcggtgtctattgcttganggcatgcaacctttaattgaccgcttcaaagtacttggcaccctttgttgcacaatatgtgaagtcctgagacgtgccgtatatcaaaaggaagcattgttacgcaatccgtgaaattccataatgtgacggaaatcataaggaagtattgttacgcaatccgtgagtttccgtaactttttcgaaagctaaaaaagagtaattacatgatcaataaggttccgtaaccttacgaatagaagataagtatcgttacgaaattcgtaaagtttcgtaacattacgaataaagaatcacatataaaaaagcataggggtgtatcttgtacaatggcgggtgcaaatagtaatctttgaattgggccctttagaggttctagtcaattcttgttgttgcaccacccccccgttagttaaaagggcttcggac

SEQ ID NO: 210904 - DNA, 265 bp, Glycine max
tcaattagcccctatagggtgtaaacttatcccttttagtccctatagctaatagagttattttttatttcatgaagtttttatttaattttccaaaggtgcttgccattaaaattctttaaccatacagagctacaataattaacgggaacaatcttgtgagcattaaaacgtaaatttcaaagactaaatccttcacttattaactatcggaattagaggagattcttctagaaactcttcggattgaatggataactaaacc

SEQ ID NO: 210905 - DNA, 378 bp, Glycine max
  unsure (1)..(378): unsure at all n locations
ctntataagggtntaaaaggtgaatgttgaaagtgtaatctattaccagcaaaggaactcttgaaattcaatatgacaagtcatgaccttccaaaatataactttgtaatcgattatcataaacctgtaatcgattatcagtgaaaattttcagaaaaaaagctctttgaaaagacacatctcttaaaccatttgaaatgcccgaaaggcctatatatatgtgtgtctgactgtaaaaagcaagagagagatattctaagagaacttcattgtcatatgctctctcataaactcttgggcaaacacttgcaaatctattgagagtttatgctagaacatcaaactgttttatacactctaaatgagagaatattttat

SEQ ID NO: 210906 - DNA, 357 bp, Glycine max
ctataattcttcatcgaaacgttcttgacttgaatggtatataatacagactgacatacttccttaatttacaggttcgtcttaagaaaggtataataagaacgaatgatgtagggtttggaaagccctctacttactagacattgacattatgcatccatctgtgaatataacacaagtgatataaaatcaagcggctgggtattcttttctttataataaaacagcgaatgacactaagtaattatactactttacagaggcttatgagaatatactacttggctgacttggggtgcatggagctataatatgcaatatataagatacatttaatgatattgtggtaatagatat

SEQ ID NO: 210907 - DNA, 233 bp, Glycine max
  unsure (1)..(233): unsure at all n locations
aaggactatttccgctcctgagtatgacagtcaccgctttatgagcgcggtacaccagcagcgcttcgaggccatcaagggatggtcgtttctccgggagtgacgcgtccagctcanggacgacgagtatactgatttccacgaggaaataagccacctgcnggtggacatcactggttactcccatggccaagttcaatccagaaatagtccttgagttttatgccaatgct

SEQ ID NO: 210908 - DNA, 405 bp, Glycine max
  unsure (1)..(405): unsure at all n locations
gcaagctttaagntacaaactggcaacttttttgttttttcttacaaccttaaatcatgcaagagagaaagttttcccttgccctcaaaaatgggggagtagtaatgactcactttgtacaccttttgggtttctcttcatttatggaatctatggaaagggaatgaaccttggacagctcatggaatccatgtggagattcacatgtgactttactgtaagggccttctttctttattttctttaacaaaaaaatattaaaatcttgctacaaatcaaatacacctagaaatgttgcgtttcttaaatatatattatgtattgtgaacagaaatattacaagggtgtgtgtgtgtgtgtgtgtgcgtgtgcgcgtgtgtgcagaaaaaaacctaggtggatttc

SEQ ID NO: 210909 - DNA, 477 bp, Glycine max
  unsure (1)..(477): unsure at all n locations
taggatgtattcattagagagctntgagtctcggtgtgtctgtgtgtatttctcctttgcttactactccttttataggcttaaggcagcttaattntcatgcgacctcgcgcttagcacggactttcatgctaagcgcatctttgagcttcttcgtgggccttcttcacgctaagtatgagctagccgctaagcgaggagacgcgttgagcctatcttgtgcactatagcgtgtggaccaatcattaacttttcttcaaggcttattcttccaatatttgcatcaattntcttccaaagcacttgaaatcttattcttttaacttctactaataaaaaattgcaagatattaatgtcttcattaattcattataaacactagtaaatgaagagattgtatcattctagccaaattgctatcaaataactaaatttgcagtataccagctataaacaagatgcttatggtgtctcct

SEQ ID NO: 210910 - DNA, 353 bp, Glycine max
gtttcccttgaagcaccaaatcttcattagttactcaattatccaatgaaagctttcaaaatcaaaggttttcccttgaagcatcgaatcttcatttgagagtgtgttgcaaataatagctttcttggttccaataaatttcacatttccaaaaaaagggttttggaggatgttgtattgggtaatgagaattttgcgcttggtgcattttcttttaacttggtatgtgtcaaaatctctgcttgtgggttctgagtcgtaggaacaaactatactactcaccatcatgcgagagcttagagtttatgggtgaaatgtcaacaattatgccattgatttaatgaagaattctc

SEQ ID NO: 210911 - DNA, 469 bp, Glycine max
tttatttttcttcttccgcgtacgtgatttattgtgaaatgcataggtgcagtggttattagatacttcaattgactaaagctttattcacattatgtaattaagcatttactagattcccatggctttggtaaaatatgtttaggatataggtaatatgttttccatataaacaaatatatttatataaatttctgatttttatatgcttataatatatataagtttattattcatattaatatatatatatatatatatatatatatatatatatatatatttaatacattaatagttattattaataattacatatgtttatctaatgatactcttggtatctggtggtattatatatatgcatatatatttaacactacatgtatgtggatagcgacatattatctacatgtagatatatttaacaactttgaagctagatatatcttattattataagatatat

SEQ ID NO: 210912 - DNA, 503 bp, Glycine max
  unsure (1)..(503): unsure at all n locations
tgaagatgttcgtgttaagttggtgaataacaagagaataatttgagacataacaatcaaagttttgcaatggtatcagtcttactggatgaaagaaacttgagtgaattaagtgaatcttagttgtacttagttagcaagtttcattgattaaggatagtaccaggagtggcatagagagtactcattgtagccaaaagtggtatagagaatacttggttatgatcaaagaattgataagtggaagccttcaaggtttgaagaagaactggacgtagctcaagagttgggatgaaccagtataaaacctttgttctctttactacttctatataactagttcttttctataagttacttctacattattgtatccaagctttgtgaactgatgtcttaagcacaacgttgatttgaacctttttgacgaaacccattgtccatttgatattgntngagaaagatttcatanagttttagagactaacctttatcatacacca

SEQ ID NO: 210913 - DNA, 363 bp, Glycine max
  unsure (1)..(363): unsure at all n locations
agcgaatatttattattaatttgcattgtttcttaatttaacactaattatcggntaattacttgattatgattgatgggcaggaactcaaggaggaaaatggacaagggttggtgtttggaggtaaaatagaggtctcatcaatggggtgggataggaggcttctaggtgggcctgggtcatcgccacctcggtgcacctccaagtgtggcagatgtacaccctgcagaccggttcatgtgccggtgccgccggggatgcgggttacggctgagtactacccggaggcatggagatgcaagtgtggcaacacagtgtacatgccataatgaacatanatttctctaagtatgatgatgtatt

SEQ ID NO: 210914 - DNA, 491 bp, Glycine max
  unsure (1)..(491): unsure at all n locations
tctagaacctttggctctgcgtccattgccatgtaccctgtttcattcattcagttctaacttcactntgtaaagttaagaagccccaactacttaccctgcaaatttgacaatgaaatattaagtgaatgttgttttaacattntcttttgacttaaatatcactttgatccctgaaatttgggttaagtttacctttggtagctcaaatctagaagtgattctttttagtttctgtaatttggaaataactcacatttgatcctccttatcatatgtaactatgaaactaactctattcatatttatctagtggtgttacaattattcttgggtatagaataaaacatctttcatctgtgagtgaatggctntttgaaaactagagataatctcaatccggaacaagtatgtgtgtgttctcatgagtaatttgcatgtagagctgtggccaacagttggttatgagtgagaaaaggatccctcttgat

SEQ ID NO: 210915 - DNA, 420 bp, Glycine max
agcttcaagaaaaggcccaaactccgcttcaaaatctgatttcaggcttaaataggtggctttgttcgtgcttgcatgcttagcgcaattttgaaccgcttagcgctcattagtggatttcggcttagcgcgtgcttttctcactcaggggatggactgaagcagtgcgctttgctggatgacctttcacttagcgcaaatgcataactcatccttcttccagattcttccttgtgcttagtcgaggagtgttgcgctcagcggatggctcgctaagccagcatattggcttagcgagagggtgaaaatcaacacttcacaaacttgcctaattaacctgaaattgagagaaaatgattattaaacacacaaaatggacatactaagtatttattacctatctttaacaaaaattaatta

SEQ ID NO: 210916 - DNA, 412 bp, Glycine max
  unsure (1)..(412): unsure at all n locations
tgttacgaggaggacataataatattgtgatttcatcagtttctcaaccaatgtctagaggctagtgggaaagaaggattcaaacagatattcacatggccaaaaaaccacttagtgaagcactctcaccaaacaaggcatcatcataatcatcatcaaccttgttagttgaaacaaattcaaacctctagtaagtaaagttattatttacatctatattcatatggtcttgattactttctctttattttatttctttctttctatgtctctcttttatctactccgcacactctaaaatggaatgtagctaggtacccatgatccttgtaaataatgtaatcttatgaagacatatacaaaaatagaaattcaagtcgtgcatggtattntatntctttctttttatgcc

SEQ ID NO: 210917 - DNA, 355 bp, Glycine max
cctgaggcatgcaagcttggagctagaagggcttagagaagaggcattttatttctaccttcctcactttccttcaacttttatacttttcacagatgctttaaataattgctggtggaaaattacaaccatatatttgatgaggggtctacccacacttgtacactttcatgttatcctaacgaccaatgtaaactttattaatcgaaatattatatgaaccattatgattatcaacctgtaagttttttattttcaacctttaaagataaagatttgtggtttaagtccctattatcaagtaacacctttgatgaacaggtaatagcgacatcgacagtccaattaactttcc

SEQ ID NO: 210918 - DNA, 372 bp, Glycine max
  unsure (1)..(372): unsure at all n locations
ttggatatggactactataactaattgctccatgagggttatttcatgttgcagatctcacaattttagagtagatggtgtcttgatgccagcctattttggttcttcgaagcttccaagattatggattttagtttaacattcagattatataggaagcattctgaaggccctcatgtgatcctactgatgcaacatgggatatttccttcccatctgtttgaactgcaatgctaatggtggccttgttgcatttcttgacacgaattctnngataatatttggtagaacttgatgatagttatgtagcttgattttcgtaccatgtgtacattgctaactgctgctgcgcattgagttccaatgaccaac

SEQ ID NO: 210919 - DNA, 428 bp, Glycine max
  unsure (1)..(428): unsure at all n locations
agcttattaaatagtgatgaagggaactaatcttttgttgtttattctcagcaaactctttggccttaccccaaagcacaacatataaaccatcaataactacaacaacacctaccaaactgaaaaagaatcagtgaaatcccacccataaggctacttctcatatcctaaaaactcttatatatgttgcagcccccaaactcctacgtgcctcaggaatttggtcataaaacaactccttttggtcttcccaaggttgcacacaccacaagccacagntcaagtccatgccaaacacacacacacacacacactaacacggagagagagagagagagagagagagagagatactttctctctcacacacacacacacacagacacagacacacacacacctactataataaagcataagcacccccg

SEQ ID NO: 210920 - DNA, 446 bp, Glycine max
  unsure (1)..(446): unsure at all n locations
nggtgaaatntatataaagacatcatacattagattatattatttttatattatttaatttgtcttttactatatttaattntaatagaaagaagattcaaaatctggtgaatgactagatgctgtggaagtttggaaggccacgcacatgagatctaatggaacttggtgcattccaaaaggagaagaaatcatggtatagaaaaaattcattttaaagtcttgatgtcaatattagaattaaagacattaattgtattatgatatcatatctagttgtatttttatgaaatgtntttctttccattngtcaactaataatgtgaagatttaatgtatttatgaaaattatacatatttttttcacattgtacataaagctttggagaatgtgggtgatatatatcanaagggaaattcaaaagctcttgaccactagttgaaca

SEQ ID NO: 210921 - DNA, 414 bp, Glycine max
gcttgtacagaagcatgattgtcgagcttattatttttttatcatgctagcagcacccgaccatcaccctatgcgagtagtgtgtttggtggcaagataatcaagccatatcccaagaataagtcatcttgtaatcaacgtaaaagagaatctctgaatatattgtaaaatggcacctaggtgactactgggaattatgtacgtggcatttgttcacattacaatgcttggctgggtatttgtgatgcatgattgggcctgggagtgcaaatgacagaaaaagcacttctggcggatgcttctatttggggaacaaccttgtttcatgtgtcatcaagaagcagaactgtgtgtccctatctacagcagaagccgagtatatcgcagcatgaagcagctgttcacagctagttt

SEQ ID NO: 210922 - DNA, 454 bp, Glycine max
  unsure (1)..(454): unsure at all n locations
gtattcaagacanagcaattaaagatattcaagatggatgatcaatacaatctatagagtcttagagagggtatattaaataggaaaggaattccaattgaagtagcaaaagggttggccaagaaaactaagtaaaaattcttttacaagatatttactctctggtaatcgattaccataggatgtaatcgattaccagtgaccaaaactgatttacaacagctattaaaatttgaattcaaaatttgccctgtgtaatcgattacacatatatggcaatcgattaccaacagattctgaacgttntaactcaaattgtaaagcttgtaatcgattacacatatactgtaatcgattaccagagcagattgtcatataatattctcaacagtcacatctttntatgtggttctcgaatggctataaaaggcctatatatatgtgacttgagaca

SEQ ID NO: 210923 - DNA, 418 bp, Glycine max
  unsure (1)..(418): unsure at all n locations
agcttccatcagtaatccaatagaaaaactatatatccacaacatccaaaatcccacttgggtccatgatttttttttttatgcttccacttggttccatgaaaataagtctacacacactacaaagttacttacaaaaaacctcgacagagtccctatcaaaagtgcatatatgttgccttattaattgcatttctacattagaaaatccaatggaatcaatggcttagtattatagttgggcaaaaattagttgggatctaccactactaattcataggtcccagaacacactactagaaaaaacacttttaacatcggttattttggatattcaacatcgngtcaaaatcgatgttgaaagtactaacattaaaaatatgaacactaacattgattgtaaaaaccgatgtaaaat

SEQ ID NO: 210924 - DNA, 423 bp, Glycine max
  unsure (1)..(423): unsure at all n locations
gctcagggactcattgttatgatgtcaactttcctgagtggagttttcatatatgtatacatgtactcatgattcagaattttacagcagagccattatgaagtatggtttaaacttgggcagttactctgttgtagcatattatgataacaaaataaactataacagaatagaattagcataatagagagcattggacctaactcacacccaaaaaatgataagtaagaaactgaattttgagttaaaaaattagcatgttaaaaaattagtatagctagaaatgacaagagatnggacctaactcacaccccaaacctagctcaagggagaagtttgtctctgtttgggtaagctaagaagaatccaaaatataacatattgtgcttgtgcatgtatactagttaagtactcaaatatata

SEQ ID NO: 210925 - DNA, 420 bp, Glycine max
  unsure (1)..(420): unsure at all n locations
agctggaggggactatagctgcactaaattgtttttgtgtgtaccaaatgcagatgccttgcactataagggggctaacacaatttattactccctttatctcatattgagtaggtaatactaagaacacaattttcttaccatgaccgaaaataaatactcggctgtgtaaataacataccaatgtgttcacatacagaaaaaaaaaatactccaaccccatcattagccgttttgacttattgctgcctataaaaaaaatgttgcccattcttttcgaattgtggtgatgacgccgaggtccaacggtgtgtcattaacaaaccactgcaagtattattaatttggagatagccctgcaacattaaaaaancggcgtcaattgctctgaagtttatgcataccatggaccaatctctc

SEQ ID NO: 210926 - DNA, 470 bp, Glycine max
  unsure (1)..(470): unsure at all n locations
tcttagactatnagcanacattatagaatagagattaagtgttaatctaacacgtacaaagaaatatgtatcacaattataatgctcataccaagcgaatggtgcgatcttgcaagctaataaaaccacttgtgtgcatacatacaccctttttagatgcacagatctctctttttaagcttatgcacacttggaactatacccacgtgcatttcaacgtgataacagatcattctaggcaccatctccaactaatatggcctttatttacattttagacagtcctaaactatctagagagtctatgagacgctcttgagttaatagcgttcgtaaatttactcttttacttcggtctccagaccgaatttctctatagtattacaaagtctttgaatgttacacaatttgcaatacaccacttttataatattagatcgtatcaaacaatatcacatttctatcctttc

SEQ ID NO: 210927 - DNA, 396 bp, Glycine max
  unsure (1)..(396): unsure at all n locations
agctttngncgtactacctaacacctctcttcttttatttttctcttcctctacacaatggactttgcatctttgtgtatagctaacttatggcaatgaatgtctgggtcaatttcgggcatgtttgtcgcggaccatgcggataagtcaacgtgttccccgatagttttttttatacgactttggttgtcattgaaaagttggctccccaactaagtgacctgcctttccttaagaccaagttggaaggttgatgtttcttccactactacaaaataatgaatcaacatcgtttaatctacatcagttatttaaaaaccgatgtagattaccatgcggtggcatttttgaaattttgaccaatttttttaaggcgttaacaacggtttataataa

SEQ ID NO: 210928 - DNA, 430 bp, Glycine max
  unsure (1)..(430): unsure at all n locations
tacatttnctcaatgattcacttcatagagaatgtattcatactacgggagtttaatttctattattgtaaaattcttattaataaataatatttaagtaatgttttttttagtattgcagtctactatcatattaatgaattcctagaattcaactcacttaaaatttttattttcttctggagtatagaagtaatanataatattaataattaaataatgcattacatgataataaataaatataatattactactttatagcacttaaaataaaaataaaacattatttattaaattctaaaccatttgaaggacacataaatcaaatatatcataatacttaagtctaaatttaataaaatcccacaatggttattgacattaccaagtttacttttgaataaataatattangaagttatttatt

SEQ ID NO: 210929 - DNA, 386 bp, Glycine max
  unsure (1)..(386): unsure at all n locations
gaccttacagcacgcggctgcagctatatactatatggagcttgttttttatgtgggncatcaacattttcaaatttattattaaaagttttagggccaatgatgataaaaaagacaactattagttaagtcatataaattgagtggaacaggatatagattattgtcccaatgtacctaactaagcaataaggattgacctacatatatgttgatttgcttcgcatttgtctcttcgatgattgctgatactnttagatgcactcgtgaatgttctttcaagaagaggacaaggcaaggttggtgcaagaaacagggctgcaattaaagcagataaataactggttcataaatcaaagacaaaggaattggcatactaatccgtc

SEQ ID NO: 210930 - DNA, 462 bp, Glycine max
  unsure (1)..(462): unsure at all n locations
ngaaggtgtgtaacccaccattntccatattagaacactagtaatatgtctactatcattgctattatgtctttcttcgtcattgagggaaacacttgggttgccagatccttccaccttttgggtgtattctttgaaagatccgtgcccccttnttgcacatgtnttgtatttgcatcctatccgaagacattatactgacactgcctaacgaaggaaaccattatgtccttccaagaatggactcgggaaggttccaagttagtgtaccaggtaacagctaccctagtaagactttcttggaaggaatgtatcagcaattcctcatcttttgcgtatgcccctatctctcgacaatacgtctatagatggatcttggtgcgagaagtccccttgtacttgcaaaggccaacaccttgaacttgggaatgatcatgttcaggtactaggaacaactcttct

SEQ ID NO: 210931 - DNA, 427 bp, Glycine max
  unsure (1)..(427): unsure at all n locations
cgccgcatgcaagcttctccctcaattatctataaatagggggagaagtgaagtgaaaaagggttcaaccccttaggcacttctctctctttagaatttgcttggaaaaattgtttccgggaagaaaatctaagccgaggcgcttccgaaacatttccgtaacgtttccgtgaggaatttcgcgaaggtttcgaccgttcttcgacgttcttcattcgttcttcatcgntcttcgatcttcaacgggtaagtacctcgaaccaagcttttcgattcattctatgtatccgnggtggtccacattgtgtttcgggtatttttattctcgtttcatttactttttatacccccttttgacgtgcttaagccattntatttaagtcatttctcgcttaacctaaaaataaaataaatgtccaccgatcgt

SEQ ID NO: 210932 - DNA, 410 bp, Glycine max
  unsure (1)..(410): unsure at all n locations
tcagcctgatcgctaagcgacaacctatccttggctaagcgtgacctattgtcgccaagcgcaattcctgatgcaatcctactccgtaagggcattgggtagaagactccaagtagattgggctagagatccaagggaaggccctatggttctcatgagccttagggtagatttcgagcccatgggctaagtatgagcccgcttatctttgtaaatattagaataggtttttccttcgtctgggccttgtattttggtcattctagtagtatagggttttaaccttgtatttcggggcattttgagtagtctttgtagtaaggactttnttttgtattttcatatctcttgtcatgggggtgagcttagctattatagggggtgtgtagctaagttctagcttctcatct

SEQ ID NO: 210933 - DNA, 317 bp, Glycine max
aagtgagaaagtgtggaagagtcaattttctcttttttatctgttgaccacagagtggtacctggagatatgtcgcgggggtcacgagaccttggggacgtcaggtggggtgctattgcccaaaaccaagcttgatcaatcccgacccaacccgggcatagttagtcagtgagaacctgtgacgtacctaaacaggcgagctcctggcagtgaaccaataaaagaacaaagaccaccatagcaggaggcttgtgtggtggctggccagctatggatcttgagtgatatctggaatatggcctctggtaatcgattac

SEQ ID NO: 210934 - DNA, 487 bp, Glycine max
  unsure (1)..(487): unsure at all n locations
tcatggtgaatcaagaatgattcnagatgttgtgatgataacaatgatgataacaaaaggtgatgacaaaaagctcanagatcaatcaaagaacaactcaagtgaatcaagaacaattcaagagttcaagataagaatcaagaagaattcaagactcaagaagaaagtttagagtcaagaatcaagattcaaggttcaagatctcaagaatcaagattaagattcaagactcaagattcaagaatcaagagaaggcttttgtcaaatacttcaatgtctttcgatcgagactattacagtctcctttgccatccaaagacaagcgagtccgttggcagccagagacaaattatggtcatctgcccccttttcgaagacttcgatgtctttcgatcaagactattacagtctcctntttcttccaaagacaagcaagtatgttggcaggcagagacatattatggtcatctacccccttttcacagac

SEQ ID NO: 210935 - DNA, 441 bp, Glycine max
agcttgagatgaggaagtgttgaagggtgaaactttcttcttttattgttgaccacagagtggtacctggagatatatcgcgggggtcaagagaccttggggacgtcaggtggggtgctattgcccaaaaccaagcttgaccaatcccgacccaacccgggcatagtcggtcagtgagaacctgtgatgtacctaagcaggcgagctcctggcagtctacagataaaaggaaaacaagaccacaaagcaaggaggcttgtggtggctggccagctgagaatcttgtgtaatgtgtggattggggctctggcaatcgattaccaagggtgagtaatcgattacaaggcttaaaattgaagacaggaggctaagatggtctctggtaatcgattaccaaggggtgtaatcgattaccaggcttgaaaacgaagtcaggaaact

SEQ ID NO: 210936 - DNA, 499 bp, Glycine max
  unsure (1)..(499): unsure at all n locations
ggctagtattagaagatatttatattatgtttaagaatggtgctgatgccatggtagaatcccttcctacatacttttagttacttacagtttaggatactaacacccccaccacttccatggacaatgctgcaagtcagatactgcattctcctctctgtttgcctagccttattgataacctatgatgccatcaaagcatgtgtaaacattatcctatattttgttgaaaatagtattctaactatgatgctgatcttgctgactgtangaagctgcagccagaggtatccttcccagattagttttgatctcttcaccattatttntatgagttaaatttcgatataatgtcaggatgtttnttcttatgttgtcattgagtattaactgttgtcttatgaatggtgcctgttattnttcatgctttntgttctcttgataacanatcagntgtttcatctgatgatgaaatntaagagaatgtaactttgatata

SEQ ID NO: 210937 - DNA, 435 bp, Glycine max
acctggaggcatgcaacgctttatgggaaaggatgtgactcttcacatttgaatttgaaattcaacgttcaaaggcactggtaatcaattaccaaaacattgttatcaattacagctctttgaaattaatgggaacggtgtaaattcaatgggaaaactttatcaaaacaattctgctactcgtaagcgattacaacaatttggtaatcgattaccagagagtaaaaactctttggtaaacatgttttgagaaaaatcatgtgctactcaatttttgagaaaaacttttcatacttatcttgagtaagccttcatttgattctcgaatcttgagtcttgaatcttgattcttgactttaaactttcttcttgaggcatgaattttttttattcttatcctgaactcttgaaaagtcttgaatgtctttgagcttt

SEQ ID NO: 210938 - DNA, 411 bp, Glycine max
  unsure (1)..(411): unsure at all n locations
ttttattcgtagttaatagacataattttggaagttaactcacattgaaatgaaagaagatttcctgctttctatgtcacgcgtttattactaaaagacaaataaagaatttcaaagaccgtaataaccttttatatgaatcttttaaatattatactactataaaatgcatactctcgttaagaatatcatatttgaaagcattttttttattggccataagtattttttttataggagatatttttgctcaagttaagtataaccagtatggagagctctttctcgaagtattgttagaacanatgagacaatgactgatagtttaataaagaaaagaaaaaaaaatttcaagtctcacatcgctcaaagtaaacatttgaatagtgtttcactctctatatatagaga

SEQ ID NO: 210939 - DNA, 428 bp, Glycine max
agcttgcaagttactagaagaagagaagaatattgttgtcgtaaagggggagattgccaaaattgaagcatagaaggcagtgaagtatatttttcagattggtcaattagagaaacaggttaatgaagcaaaaacaaagttggtgtctgagatttctacgtttagagaggcaaccaaaaagtttgaagctgaaaaccacaaactattagcagagaaaagaaatgctgagtcggggatggcaaaagcgaatgaaaggttagaggttgaaaaacaaaaggtcaatgaggaaaaaaggcgtgcagatgcagagatggttaaattatagaagcagaaggcgcttgctaaggataactggaacaagttcatgaaagagaaatgtcttgctgatcagatgtctcagcagttagaagaggataagaagacgattg

SEQ ID NO: 210940 - DNA, 453 bp, Glycine max
  unsure (1)..(453): unsure at all n locations
ntaagaaacttagcctgtagaaagagtttatatattgagatcatcanaattcaattgataataacaaaatgaatacaacccataaaaagtgcgagaagaaaaaataataaacaaattctaagagtaacttgaaagtatttgaaatttgatatgtaccatggtgcatgtataatcctctaggcattggatacaaaacaggataaacgtgaggacacagcagatcatagaaagagtgatagatgactgattnttcacaagcctaaattgaaaaaagctaactaatggtcctaattgtggtcattattcaattgattccaattccagtatcgtttacagaaaagggttatgaaatcactccgttgcgttccacattntttctttatactacattcatgaaggttcgtanaattacagttacaactgtcaagataactaagaaactaaacaagtcag

SEQ ID NO: 210941 - DNA, 337 bp, Glycine max
  unsure (1)..(337): unsure at all n locations
agcttgtgtgaagagatagacagaagaggaaattctttgttattttttcgcagnggcttatccgctaatcgcagaccttgcactacgctccctgtcttcacgagctaaggccgagcttgctcgcgctaagcgcaaagacccctgtatggttgggtgaatagttcacctaagcatatatcactgcgcctagcccaaaatcttcactgtaaataaccttaatctttgggcttagcgtggatgatgcgccaagcgccacttctcctctagaaaatttcattgttggagcactaagcgcgctgtcctgagctaagccctagatccattctgtaattgaaca

SEQ ID NO: 210942 - DNA, 422 bp, Glycine max
aaaactaagcttaagaatatggcctctcaattctgatttggcgaaggaattcattaataggccccctatttttaatggagtgtgttaccattattggaaaacccgcatgcaaattcttatagatgctatagatttaaatatctatgaaagcattgaaatagggccttacattcccactatggtggcaggaaatacaaccagtaaaaaagcccaggggatgaatgaagtgaagaagaaaagagattagtgcaatacaacttattagccaaagatataactacatcggccttaggaatggatagtactctaggtataaattgtaaagtgcaaagaatgtggataccctacagtacacatgaggcgcacatatgtaaaaaactagataatttttactcacaattgaatatttaatgattcaatga

SEQ ID NO: 210943 - DNA, 421 bp, Glycine max
  unsure (1)..(421): unsure at all n locations
agcttgcaaaccaacttcaactccaatggttcctattctcaaactcttggcacaagagatccttcctcatctaatctcaaactcactacttttggtgactcaaattaagtctcttgcctagattctcgaaaatcggtcattgaattctcaatattctttggtccttctctcatttcattgaaatcaaagaaaaaatctactatatcctggtcctcctctgaggcagaatatagggttcctgcatcaacaacatatgaaacataatggatattgtacctctttgaagatctacataacctcaggccaatccagtgtctttatagtgttgattatatggatcagntagaacattcatagtaagcctttacattcatcattggttcactttttcatatcagagttggacatgtatgatatatat

SEQ ID NO: 210944 - DNA, 485 bp, Glycine max
  unsure (1)..(485): unsure at all n locations
ggcanaattatgtctcatattgggttaatcgagtacactntcatagttggttttgagtcaatgactaatttattcaagagtctctgttttaatcaattaccatgtgatataattgattatttctctttttataagtagttcagaagttaaaaagaatactttaatcgattattttgagtatctaaccaattacattggtcttgagttgtttccaggtgtttggaagaaaactttaatcgattaaaaagataatctaatagaatacttcattgaattaattgattatctcttgtagatntaatcaattgcaggcggttataactattttctctataaatgattagcttgtgttctcttataaacaatctcaaaatcttgaaaataacacaataagcctataaatgagctaaagatcacatgttggtattagttaaagaaagaagagaagaaaagtgcttagaagaaataactcacacctttaaatc

SEQ ID NO: 210945 - DNA, 429 bp, Glycine max
  unsure (1)..(429): unsure at all n locations
agcttattgaaaaaatggatattgtaatgcatattatgtcttttgaaacaaaagtggaatatggtttaataatccaattccaagcaggcatcactaactaggtgcccttttttatctactaattgatcaattcaaatgtaatgcatgaagttgtgatcacggacataattgtaggtcaagaaaactccagcctccagcagcagtatattatgttttctttttttcaaaaagaaaaggctcaagtgacctcatttacaaaactaaaatgtatgcatgaccatggctttctttgtttataatattaatgtgctaaaacattgaaaataaaaatttaggcatcaacctaatatcaatacgagcccacttgttcccattcttgtcatgatncaagtcattgggtaatccatgtacatttaaggattatgtttc

SEQ ID NO: 210946 - DNA, 512 bp, Glycine max
  unsure (1)..(512): unsure at all n locations
tacggacactatgatactaagctttacctttcatttaacctttagaacttcctggccaacaatgtcatagataaaacaatgttgatgttcataggacactttaaatccctttntaatcaactgacctacacttagcaagttttggtcaatgttaggtacataaagaacatctaatattaatttgatacctgaacacgttgaaattgcaacagttccttttccttttactggaatatagccaccattcccaattctgacctttgagacattagttgacttcaaatccttgaataaagtcttatcatatgtcatgtggttcgtacaaccactatcaatcaaccaactttcacttgattcactactcaagaagcatgtggccacaaacagttggtcctcttcttcttgattagcaatctgagctccctcatcatggtgattnttgttggcgcatatcaccgcttcatgccctatctggttgacttatacatttgcatctggtctctncacatctg

SEQ ID NO: 210947 - DNA, 415 bp, Glycine max
  unsure (1)..(415): unsure at all n locations
agctngattctatgagactaatattaaatttgttttacattnacatcaaaaatattaatctataatttacttctatatataaatttataaaattattaataaattcttatacaaatgacttttaattgcaaattgatatatttgtatcgttcggctgattgacttttaattgtaaattgatatatttgcattgtctggttctttaaattattagtatacatttggatatatttaatgacttatttttgtaattttagatgattatatttataatattatttatttatttctcaaattcggataaaataattctatgcttatttgtttctaatatcattatgtttgaattacttacaagcaactatttaattcacttgtaatattttataaaattaaaatatttcttaatatatta

SEQ ID NO: 210948 - DNA, 376 bp, Glycine max
ttctgcagactcagatgccaatgtacaaagagctgtccatctcttagatcgacttgttaaggtataatattataataattttcttctgaactccaacaatcctttgagcagatttgcatgtgagcataactgtacatattagatgatttccaaataggtattgatctaataatgatatgaattactgttccattatcattgacaaataatgattaactgttactttattcaaacaggatattgagactgaaagtgatcatttcatgtgccccttcttactcctatgctatacgtttctctgtatcctcgtgtgacgacagagatctctgactgacttgtaatgcttcatgcacctccattctatctcttgattgtc

SEQ ID NO: 210949 - DNA, 419 bp, Glycine max
agcttgacagacctacaattctcacaccggtcgtggctactacccctgacatgagacaatctccctcgacatgagacaatctccttcgacactagacaacctctttcgcccacaagccgactcaaagcttgaggggcttatgtactatctagggtccacaagatacacgtgtcatgctacgtggcactccaagacacacgtcaaccctccatgtcagccctagcacaagagcacgaacgtctagcccttagtagctgagctctcaatcgacagggtatctctaatatcctattattagaatatattgccatccctttatctcttggcaggtattcaattatctaaaagttacacattatcagtaaggcacactcatctacgaacaattatctctaagctgttacatgttatctgtaaca

SEQ ID NO: 210950 - DNA, 463 bp, Glycine max
tgtaccaacattcattagtccagtacacactcaacatatagtcatcatccatccacaattccaatcattcatgctcaatatgatgcatgcacctgacctcaactatcatatgcaatgtggtaccatccccaaggaaatagcctaaacgtgtccacacgacactctcacttgggaaaactaggcagtaagtgtcgaggtcaccctatcgtgcacaggcaacttcaccccccccccttcacagtgatcagcctgagtctcaagggagttccaaaccgagtgacatgcccccaagtacaagtattcctcctcatgagaaactacaagtacttactaataaagtttatactatttccatgtcatatgaagtatgaaacatgggcactatcaaatgcattaaccgtggataattaaagaatctaagctatccttttccagagatgcttataactctttaatcactcta

SEQ ID NO: 210951 - DNA, 273 bp, Glycine max
  unsure (1)..(273): unsure at all n locations
agcttngaggccttggatcttcttcatcatatggattccttttcttctngaaaatgaatggtagcggaatggagaaggaacacagatataattggagatgctacttcaaggagaagatgagtcaagaagaagctcaccaccataggaagccatggataagaagttgaaggtagaaaaatatgagtggagggggagggagagaaggagcatgtaatttgtgcctcaaatacgcctgaacttgaagtgttttctcaaatgatcaagttaaaaaat

SEQ ID NO: 210952 - DNA, 520 bp, Glycine max
  unsure (1)..(520): unsure at all n locations
cggacactatgatactaagcttancagatgttgcattcagtattagctcctcttatngaataatgatatgcacttcttgcattgtataattgcttgattgtggtgcaactattgacattgtgacaccaaaacagatcacgcaccacaacttcatccttcaatctatgtcaatgaatgtattgatcacgtttgagaagcttcacaattcttgaagaacgatatgcacttcttgcattgtaaatttgcttgattgtggtgcaactattgacattgtgacaccaaaacagatcacgcaccacaacttgatccttcaatctatgccaatgaatgtattgatcacgtttgagaagcttcacagatgttgcatttcggtattagctcctcttattgaagaacgatatgcacttcttgcattgtaaatttgcttgatagtgggcaactattgacattgtgttccttcaaccgtagcaagatggtnttttggttcaccatcgactatgtcatatcacgagataatttc

SEQ ID NO: 210953 - DNA, 353 bp, Glycine max
tatattttaaaattattaccactttggatttcagccttgattttggctatattactaaggtatttgaacaaattattaattccctatttgcatgggttgggtgaacaatatgttatttgactatggggattttataagttaaacctgttatgattgctgcttcatgggttttacttcatgaagagagtaatatttttttatgaatgttgtatgaatgtttaagatatatttgcatactttaagtttgatacacactttggcttattgttgatgccaaagggggagagaaatagggataaatcaagactcacatgagtaataatttaattttaagaaaacataaattcaaaaca

SEQ ID NO: 210954 - DNA, 463 bp, Glycine max
  unsure (1)..(463): unsure at all n locations
aagcgtacattgcatccaaatgagactntatttatacagattccatgtgggtgctcagaaagtgagtctcaagtagttgtcacctatacggtccaactgaacgatacaccaatgatgattgctaatctcctaaattctacattgctgacatgcagaacatgaacaaggttctggctccaaacatgaaattcatagattttgattaggtgctatttgttcctaaggaatccaatgggctactactactacctagtgctactaacaaagaaggtggtttctctgccctaagccctcaacgaanaatgattcccttatgtatggtatctacttatttacttatgtaaatattgtgtcaaaaattatcattcagctatatgctgctatctgtaacaatattaggaattaccacatcatgattcataacttcaaagcttaaacttacattgacactttgataatgttg

SEQ ID NO: 210955 - DNA, 412 bp, Glycine max
  unsure (1)..(412): unsure at all n locations
agcttcccacatccggacttggaaggatctgattactgccttccttaggcaatatcagtacaattccgacatggctcccgatcgcactcagctgcagaacatggttaagaaagaaagggagacctttaaagagtacgcacagcggtggagagacctggcagcacaagtggcccctcccatggtcgaaagggagatgattaccatgatggtagacactttaccagtgttttactatgagaagttggtaggctatatgccctccagcttcgcggacttggtatttgtcggggagagaatcaaagtaggtttgaagagagggaagttcgattacgtctcctccacangtaccaatgctaggaggatcggagcaactgaggcaaaaggaaggaaagagatacccatgccgtcactt

SEQ ID NO: 210956 - DNA, 392 bp, Glycine max
  unsure (1)..(392): unsure at all n locations
tcattaagaatttacaattgtgttgtcattatcacatttctaatccagtagatcatggtntacttcgcgctcgcaagtntatcatatactcatcgagtgatgctcactgataccactcgtctatcgtgagatcactggtctcgtgtgtcaatatagtgtggatcatgatagancacttgacttgcgttctgctcaacctgatagtctatcaatggggtttcttgcttctgaacactcttctttaagatcttcaaaggcatctcactcttgagtggaaaatgctaaacaactgcctaccgtctgttcatgattcctttgatgttgtctatgatcttttgagagggtcttgtaatcatcttttaatatttgatagtgctctgacaacatggatg

SEQ ID NO: 210957 - DNA, 438 bp, Glycine max
  unsure (1)..(438): unsure at all n locations
agcttccaatcaaatgacatgcttgtccatgaattttataaattactggacctttcctctgagcacacttgtatctatcttggctctaggagagctaaaagcaaacatcatattataagccctaatattatgttggtaatttctactttcgggtgattcttgatcacatagtagttgctgcaaaagcattggaggattcttgagaaaaggaagttgtatccttcccatgctgcaacaaagactatatttggcattagcttgatttctattttttcttggcctttcttgatacctcatagcaacttggcaatacgcatatgtttcagaagcatctcctagatcaatatatcctacaaaatacatgttacttagtttgacattaataacattgntgaaggtaaaaccactacattgtgagactaanacatgtgctaatgt

SEQ ID NO: 210958 - DNA, 444 bp, Glycine max
  unsure (1)..(444): unsure at all n locations
tgaaaagaagaagagattcaagaagatgttcanagagattcanaggttgtaaaagattgtnaataattttcanaagttataaaaatgcaagtcaaggtcttgattttatagactttntaagtctggtcaagaaaaccattagaaaagttataacctttagaaaaacttgaaaaccattggaagagttacatcttttgatttttattcaaaacttatcactggtaatctattaccaaatcattgtaatcgattaaacaaagcatttttgtgaaaaggatgtgactcttcacaattgaatttgaatttcaacattcaaacacacaggtaatcaattaccaaaatcttgtaatcgattacanccatttgaaattaatnggaacgttgtaaatcagtttgaagcttttgaaactaactttgtactgtaatcgatacaaagagtaaaac

SEQ ID NO: 210959 - DNA, 337 bp, Glycine max
ggttgaaagacttaggactttcacccgaaagttagatggccaatttatagctggggatctgagggttgagatgttggataacaatggttgctcaggaagggattgtgaacaagagaagagctgtttcaatgcacaagaggttgcattgttttgaggaagattggttttgaaaaggattcttcaatctatgcgacacaatcaaggtgggatgaaagccttgactcccttaaagaattcgttcctaacacgtatacaaaggtgagatattagctctaatttctctctcccacccacattttattttgcagtaagctaagacttctcatttgctccgaaa

SEQ ID NO: 210960 - DNA, 477 bp, Glycine max
  unsure (1)..(477): unsure at all n locations
tgcacacttgccacctattcttggattatgttagttccctttgtttgtgcacggnattgagtagntgtgatcaattatgtgaagtaacgtttctaagtggtgtgaatattgagcagattccagttttgtgcccccgttgatatattccctgcttggaagttctagacatcttggtgttggtccagtttcaattgcatctttggacatgggatcaatgctaagcgagaccgtttcttatagtcaagatccaattctctatcttaaaatggccttcactgccactttctttgccggtttgttccaatcttctctgggtatattaaggtattaaatcatacacccctggtcttattttttattacggattttcttcaactaagtttagatacttcaacttgaagactgcacactacattgattggtgtctacgaacgaatatgtgataaatgataatagccttgatgatccatacacggt

SEQ ID NO: 210961 - DNA, 425 bp, Glycine max
agcttcagacaaacttgatgtaatcgattacgacatctctgtaatcaattaaaatagagagtttttgcctcttgaagaaacttttctaacttagaaatgtttcttcagactaaccatgatgatgcatgacgcaatatatatatatatatatatatatatatatatatatatatatatatatatatatatcatatggactaagattcaacaattaagataacaactaatacaaatgccactcaaagaatttaggcatgtaaaagtcaaaacatctttaaaacttcttcaagctcttccttgagcattaatctttagcctttaggttggtaaccatgctgctccctctatctctaacactaatcgatgacctaagtgaattaatcgattaccttttagatatatcgattatagacggttataactat

SEQ ID NO: 210962 - DNA, 451 bp, Glycine max
  unsure (1)..(451): unsure at all n locations
cactcaagcttnntttggaccttgaacaagcaatcaactcctctntcagaaccatgctatgtgctcgcgactggtccctttcttcccttcgcaacttgagttcactatcgctaccccatagagctctgncgaaattgttccggccatactcttccttgcgagccctcttggtctcttgttcaagggctcttgcggtaattgcattctcttcccgtaacccggcacactccttccgaacgtgtgtagcagccaacttgaacttctccttggcgagttttgcctttcctaactcgctcttgagagcttggacttcttcgtcctcttccggtgcttcaaaattctcttcgctgacgacttttaacttggcgagccaatctaaacctcgtatgcgaactntcagccattcgtggtacccaccaatgatgccattacgaatgcctctaagctcttg

SEQ ID NO: 210963 - DNA, 428 bp, Glycine max
agcttgttaaagaactgaggaaaaatcaagaactttcttgtatgcacatcgttcgcgtgtatgatatccactccacaaggtttgaagtagaggagagcttcaaccctataacgcaacgtggtggacaaaagtgggcagtaaacttgaatggtcgtcattgtcaatgcggaaggtattctgcgcttcactatccatgttcacacattattgcagcttgtggttacgtgagcatgaactactaccaatatatagatgttgtttatacaaacgagcacatcttataagcttactccgcacaatggtggcctcttgggaatgaagcggctattcctccttctaatgacgcatggacacttatccctgacccaactacaattcgtgcgaaaggttggccaaaatcaacaaggataagacatgagatggattgg

SEQ ID NO: 210964 - DNA, 185 bp, Glycine max
atgtcgctgagggtatacctaacatactcacgatcctgggattatcagtgtatgcgcgtgcttgctaaccatccggtctaccgtcccacatactgggcctatactgtgatcgataacaagtgccaaaggatcacgagaatgcgacactaaaactgaagcgtctacattttgggttccaagataag

SEQ ID NO: 210965 - DNA, 309 bp, Glycine max
  unsure (1)..(309): unsure at all n locations
agcttggaactaanatatgaacgaagaagtgatttctaactacattagcataatggtcaataatcggtacaagaactaaaatattctgaagatttgagtgggtattacttgtggctatagcacgaggtcatcatgatataaagaatcattacttaaaattttgttcctttccttgcccctgttaaactgttaatgcttttgaagaatatttatgttcccttctgtcttcaagattcttgttattctaaattgtaatttttaagagatgggctttgtatactaattatttattttgggggttgcatcagt

SEQ ID NO: 210966 - DNA, 389 bp, Glycine max
  unsure (1)..(389): unsure at all n locations
ngaataacagntccttatctgcaatcgagtacttgagtatgtttacttntttgccttgattcggttgtgtgcctcaacagtattcaattgcaacagccatttaatgtttgtctttcatcaaaaaattgcttcagttgagaaagagggatacagtttacactaggtcaatccacgggttttcacttcagaatatcagagtnttatgtgttggcgggtgtagtttaaaatggtccaaatccattgagaagaagtaaagctagctaatgaggttacgttagagttatatattaatgtgctcttccatgaagttaatctcttaatctaggcataatttattttaagtcataaaatagatcttaactatgattcgtaccatttctcatgatcat

SEQ ID NO: 210967 - DNA, 430 bp, Glycine max
  unsure (1)..(430): unsure at all n locations
agcttctcccctattttgctataaatagggggattaatgaagaagaaaggggttcagccccttaggcactnttctctctctcaaaattgctgaggaaaattatttccgtgaagaaaatccaagccgtggtgcttccgtaaagtttccgtgagtaattatgtgaagattctcgaccgttcttcaagattcatcgttcgttcttcgttttcttcagtcttcaacgggtaactacctcaaaccaagcttttcaattcattctatgtacccgtggtggtccacattttgtttcgcgtatttttattctcgttttcatttgaattttatacccccttttgacgtgcttaagccatttatttaagtcatttctcgcttaatctaanaataaaantaaatctcatcgatcatttaaattgtatcatcccgtaatttc

SEQ ID NO: 210968 - DNA, 498 bp, Glycine max
  unsure (1)..(498): unsure at all n locations
tgagaaagtccttctggttctgttatacatttctgacttgatggcatgagatgaaatgcanagattggacctcctgttagttgttatcaatgaatagcttaaacacttgtgcttgagtgaaacaatagtcgtgagactgtggtttgagctactttccttgatatttgtcttatgattaacttcatccaactgtatagttcacattttgttctcctctttgtctgactgcatattctgtgaaaacaagtgataggtacacattgcttcatctttctcatcatgcaatcaataaattntgatgcatacacctttatacataaacactgcatgtattaccacttgaggacaagtgagttgttctcttttgcttgaggacaagcanaactatatatntgggggagntgttagtcgatgaatatgactaacttttgtgtataaagcatatgtattttgtatcacactttcccaattatggttggttttaactatatacgactt

SEQ ID NO: 210969 - DNA, 426 bp, Glycine max
  unsure (1)..(426): unsure at all n locations
agcttggaaggatgcttcaatggaggaaaagaaagagggagagaaagagagaggggggagcacgaaattgaaggaagaaaaagagagagaagttgaactttgagttatgtctcacaagactctcattcatcaaagttacaacaagtgttacacatgcttctatttatagactaggtagcttccttgagaagctttcttgagaaaacttccttgagaaacttctttgagaaaacttccttgagaagctagagcttagctacacacacccctctaataactaagctcacctccttgagaagattcctaaagaaactagagcttagctacacacaccccctataatagctaagctcaccccatgccaaanaacaggaaaatataaaaaaagtccatactacaaagactactcaaaatgccctgaaatac

SEQ ID NO: 210970 - DNA, 439 bp, Glycine max
  unsure (1)..(439): unsure at all n locations
ntgtgatgatgaatcaagttgattcaagtagttntgatgatgacaaanagcccaagagaatgatttcaagattgagtcaacaagttcaaaatcaagattaatttcaagtttcatgagaagaaatcaagaagattcaagaatcaagagaagtttgatttcaagattcaagagaagatgaattcaagattcaagagaagaaatcaagaagacttcccaagggaagtattgaaaagatttttcaaaaaacaaacatagcataattttgtttttcaaaagagtttttctcanaattttctaagttaccagagtttttactctctggtaattgattaccggtttactgtaatcgattaccagtggcaaagttttatttcanaaacttttaactgaatntgcaacgttcccaatggattttaaatggtgtaatcgattacaatat

SEQ ID NO: 210971 - DNA, 417 bp, Glycine max
  unsure (1)..(417): unsure at all n locations
agcttgttgggatgctttaagttgaaggtatcctttattgtccctatgctcgngaatatttatttgcatcattttaatttttttatttcatagaatcgttcatcaaacctcttgtgtccacatgccttggcattgtcgagaaaaaaattaacacttggttgaaacaactaataccctactacttcattgcaatgttctttgattttggagcaatattattatagcgtgttaattgtccaatcacatgccttcctccatgctttagaacaaagtcctcattctttattgttccctcacaaagaactatactttgttcctctctaatcttcagttgtacatattntgtttgtgatattacatgagtattgacaaatattgtgctaaatctctcaaatgcatntttcttgcctattgatg

SEQ ID NO: 210972 - DNA, 403 bp, Glycine max
  unsure (1)..(403): unsure at all n locations
tatcttcagntntatagntattatatctattagatttatctttagccatatctttagcttatatatctttaacttgtaatcttgtatataagtgaatggtgcttaatgaattatctaaggaaacaatatctttcatggtatcagattgcgtagggaaagatttttgaaccttccccagccttccgcacacagaccctagcgtcgttcaacccctttcttcttcttctccgcttcttctccatcatcatgtctgactcaaaatctacctttcaccctcctcttggtgtatccaacatcaagaatcatgtcccaatcattcttgagatggaaaacgtccaatatgtgacatgggctgatactttaaaattcacgcacgatcccatagggtaattgatcatataat

SEQ ID NO: 210973 - DNA, 403 bp, Glycine max
agctttaggatatttaaaaaatctttttatgtctttatggctggccacttaaacttaaatttattacataaaattaaatctattagctagtcattacttgttcgactttttttttttcatttatgtcattgaccatctttgagaaaattatcccatgaggtgccctatgaactcaaggcacttgctcacgtgatcgattgcataatttagagaacaatgtcacataaaagcaaaggagatggaggggtgggggaccccaaacctaaattattataagacaacaccccataaatgccattgcatacgtgtctttttctaaatgattctttggcaaaatgtatgatggtaggggccttattagcaatttaatcagtgacctcttgtacaatggacatgggtgcac

SEQ ID NO: 210974 - DNA, 420 bp, Glycine max
ttacggacctatgatactaagctggtctcgatttcctagttctgtacaagctttgacaatatacttggccttcatttaactgtctcttggcatggcggccacgctcaacaaagtactttcgacacctactgtacgttgatttcaccaatgctgttatgggaatgttgcgacaatcctttaaaaccttattgatacattctgagaggtttggtgtcatgtggtcatatcgacgctcttctctatcgtaagccatcgtccatttttcctttgagatgcgatcaatccatgttgctatggctggactcagttcacgaaatttttctaaattttgatcacaaatgtgcttgcaaggagtgtatgctgcataaaatatgtatgaataacaatttaagtataaatgaagttaatatatgtgaccat

SEQ ID NO: 210975 - DNA, 439 bp, Glycine max
agcttgccttttaccaattagtttttaccttatctttcacacctcttttagggtttattttggctagtttcaaccatagtttcttttaccttttgttttcaaacccctaacaagaaagaaccacaacttaggaatcaacatgagtcttccttcatctagtgttaatggtgagggttctactcctaaggaccccttgtataagatattagatgagttgagatcccttaagttgtggaaagaaaaacacgagagaaaagaaaaaggaaaaaaaagagtggaagaaataagtcaagatgaaagagataaaataagaggaagaaagaagacaaataatgaaagaaatgaaaagagaaaagcatgcctcctatagtcgtcataactcttgcaagagcctaagtgaagaacttcgtgactattatgaaggaagacataggtcaca

SEQ ID NO: 210976 - DNA, 392 bp, Glycine max
  unsure (1)..(392): unsure at all n locations
nngatacttgaatctgattcttgaattcaactgtcctcttgaatcttgaagtgttcttcatcttttcctcttgagtcttattttgttcttgattccatcttgaacattttgaactcattctttgattgacctttgagctttttgtcatcacctttgtcatcatcttttgttatcatcatttttatcatcaaaacatctttgaatcattcttgattcacatgaagcttgcttctacaatctcccatttttatgatgacaaccctgaaatcaagaacacatcccattcttttctagtagattctactaatctcctatctcccttttttttagtaatgctcacttaaataaaataagtgatactcatggagcctggattaaccttattcttcccc

SEQ ID NO: 210977 - DNA, 442 bp, Glycine max
  unsure (1)..(442): unsure at all n locations
tataaatactcagctgatgggnaagtgtgcgaaatatggcgtattacattttgaccactccactgagctcgcctgtgaactcgatatctgtacatccaagagaaactgtgtctccattatcttggatgatacacactgagatatatatagatcaccgcgcaagtgatgcggtatcatatggataagatatttatgagcgatcatttcacttgctaaacaagtcatgcatggtgaatttaaaccgcatgccatatctattaaggggtggaatcatgtataaacacagaattaacacttgcaaactaaggttatttagaatggaaccctttaactaaagataaactggtaataaaaataccttataagaattaagacattattttctttaacacattatgtcttaaatcaaggataaattccttaagtcaacacagaaaatttt

SEQ ID NO: 210978 - DNA, 416 bp, Glycine max
  unsure (1)..(416): unsure at all n locations
agctngttgaatgttctgtaaatggatggtgccatagttggagaaatatgttgtaatggaattctacatagagaggcagaattgcttattttcttgtcgctgtctttttgtaattggctccattgcttggccgatcatatcttgaacttggtaatgaataatggtagtgagttgtgcatagttgagaagagtagggctacaacttgtagaatatacaataatgacatcatgttcacccttgtctcaagaagtggcttcatttgaagttgtagactgcttggacacagaatctggaatgagtggttcaacttcatcagccatagctacattagaccctttgctagtttcacccatgacaccaatatttgtaaggtcaataaagaccccatgcacaacagtgttgccacaactttgac

SEQ ID NO: 210979 - DNA, 450 bp, Glycine max
  unsure (1)..(450): unsure at all n locations
gtgtcttcatggcaatgtggaagtcaagtgaccatgcccaatcctaattaaaggtagtctagtggtgccctggcattcggcttcctcttgtttcagtgcttctcattttattttaggttcccattctcaacaactcaacctcaaatttcaagcaccaattcaatgagcaattcaacattgaatttccaccgagatttgaaatgacctctatcattntctaagttgtggcaatggaaccaatttctctatgataaaatgcatagagagttcacatcaccaagtacaccttcttccccgtctttgactccaacaacagtggtacccacatcaacatcatgtgcctccatagtctacttccacccttcaacaccccanaactagaactactagaaagaatggattaacatcgctacataaacattattnttttcaaaaccgatggtaaccaaa

SEQ ID NO: 210980 - DNA, 298 bp, Glycine max
ccaagctagcagccgcactgacattggcacaggagacgacggttgtctcttcttgcattcaggcagagcgtcctacgtatagcatagaacaatggtatactgataaccacttatgtgtattcgcccgtcaacgtgactcaaatgtgagtttgacaaagactgtgagcgtggaatatgacgcaaatctatttgtgttaacggtcatgtcagcctctcatgacaaatggctcaccagacgacgttattctcagcttgctatcatgcttttcgacctacttacaacaaataagaactgtta

SEQ ID NO: 210981 - DNA, 404 bp, Glycine max
  unsure (1)..(404): unsure at all n locations
agctttaggatggatactctaaaaagggcacatgaagtttctaaaaactttcatcttatatgactaagtaagtacttttcaatataaaaagcctaaaataacatcttttactatttaatgttggtttaatcaaccgcacatgacaattttcaataactagtttcttttttgcaggaaagaccaatttttcaatgtttcataaatcaatagctcagggcagaaaatgtctattatagtggaagatgaagaaggatgtaagaagaattntgacaaacgggtctataatcttaaatggttttgaattctgacattaaatcatgtgttcaccttattccttcttggcgccactggttgaaaggacaaactcctagatggggcgggttagaatgaaattgcatgtaata

SEQ ID NO: 210982 - DNA, 359 bp, Glycine max
  unsure (1)..(359): unsure at all n locations
taagagacgagttaatgaattatatntcttagattattcataaaaaaggaaattacccatatataaaaggtatctaaactgtgtctctagttaagtcttgttcaatttatttaaagaataaaaaacaataatattttttttgtatgaaaacaaacaaatattctcaattgatcagtcatatgcgttgacctacaattaagtgggtgtttggatggatgatgaatttaactcatcgtgatgtagcaacaaccaaataattacttcagcggtaaactctccataatttgcactcatcataattttctgccaccaaattaaacacactatgagtctcaagggaagaagatcatgtgagtcaa

SEQ ID NO: 210983 - DNA, 424 bp, Glycine max
agcttccattgctcaatttcgagcatgtcgatatattatgcgccttaataggacctccaagtgaaaatatatgaccatttgaattgctcaagagcttccattgttcaatttcgagcgtctcgatatattatgcacctgaatcgtacctccgagttaaaggttaagaccatttgaaaatcttaagagcttccattgttcaatttcgagcgtcttgatatataatacgcctcaatcagacctccgagttaaaagttatgaccatttgaatttctagagagcttctgttgttcaatttcaagcgtctcgatatattatgtgcctgaatcggaaatccgagtgaaaaagtatgaccatttgaattgctcacgagcttccgttgttcaatatcgagccgctcgatatattatgcgcctcaatcggacct

SEQ ID NO: 210984 - DNA, 453 bp, Glycine max
  unsure (1)..(453): unsure at all n locations
ctcggaggtccgattcaggcgcataatatatcgagacgctcganattgaacaacggaagctctngagcaattcaaatggtcataacttttcactcggatttccgattcaggcacataatatatcgagacggtcgaaattgaacaacagaagctctctagaaattcaaatggtcataacttttaactcggaggtctgattgaggcgtattatatatcaagacgctcgaaattgaacaatggaagctcttaagattttcaaatggtcataacctttaactcggaggtacgattcatgtgcataatatatcgagatgctcgaaattgaacaatggaagctcttgagcaattcanatggtcataaattttcacttggaggtcctgataacgcgcataatatatcgagatgctcgatattgacaatggaagctcttgagcaattcaattgtcataact

SEQ ID NO: 210985 - DNA, 426 bp, Glycine max
  unsure (1)..(426): unsure at all n locations
agcttttgtgtgggatacccaatgtgagcatagttttcaaaaccttaacaaaaaatggacaaccgctccagtgctggttttgcctaacccgagagaaccctttgaggtgtattgtgatgcatcaaagatgggtttaagaggagtgtagatgcaaaatggccaagaagtggcctatgcttctagaaacctcaagactcatgagaggaattatcccacccatgatctanagttggttgttgtaggttttgcccttaagatgtggaggcattacctgttcggctccaagtttgaggtgtttagtgatcataagagccttaagtacttgtttagtcagaaaaagttgaacattcgtcaaaggagatggttaaagtattttaaagattatgattttgagcttagctaccatcccgacaaagccaatgtagt

SEQ ID NO: 210986 - DNA, 476 bp, Glycine max
  unsure (1)..(476): unsure at all n locations
gggttcgagggtacttacccgtgaagatcgaagagcgatgattaacgaatgaagaacgtcgaagaacggttgaaacctttgcgagattcctcacggaaaacgttacggaaacgtttcggaagcgcctcggcttagattttcttcacggaaacgaattttccaagcaaattcgaaagagagagaagtgcctaaggggctggaccccttccttcttcatttcctcccctatttatagcaaaataggggaggtggttgccgcccagctcgcccaggcgagctcagctcgcccaggcgagcagggttgcttccttcagaagcaaccgccttctggaggaatcttctggagggcccaaatgggcctaggtgctatttgcacccccatatttactaagtacaccctccctctgctatttttttggtgattctnntttcgaaagtacggaacttacgaatttcgaacgatacttgtttctttc

SEQ ID NO: 210987 - DNA, 347 bp, Glycine max
agcttataattcctattcgtagagggaggggcatttattatcatctaggccattaataaggtgaccattatttgactagaaaattctctttgaatcattcttattctgtttagactttagcttaaaatcttaagagtttaaccatgcctctgattctatgggacattcatttttttttaccatttaatagtctaaaaatactactcaatcgcataacatagccttaacttagtctaccacacgcacacatggaaaattgggatgttatattcaatttttcccaaaacttgcgagtcgcccgtgccgatgcacgggctcatactaatatttgagatgtcatgaatata

SEQ ID NO: 210988 - DNA, 379 bp, Glycine max
  unsure (1)..(379): unsure at all n locations
ntctaagagggcttcttgagaagttagatccttatgtatccacacctctccattaactaaattaacctccttaaaaataattacggatgaaaataatgcaacaaataatcaaacatcaaacataattactaataatatatagatatatatatcagggtgttacagaagtagcatctccaatcacctttcctcttctacattctactgccattgatcttcaagaaacaagagaactctcattgatgaaagaaaatccaaggcctaacagctccacatagagctacatcaaacctttataatttgtctaatatacatgtgtaaaaaggacttttctctctagcttaaggaactataaaaacatgttctagatgaacaccac

SEQ ID NO: 210989 - DNA, 375 bp, Glycine max
agcttctgtttcaattgtgagaatctcgattattacgggattcattaggacatccgggtaaaaagttattgtcgtttgaatttgctcagagcttttaatttcaattttgagcgtctcgatatattacgggacttaattggacatccgaatgaaaagttattgtggtttgcatctgctacgaactttcgttttcaatttcgagcatctcgatatattgcgggactcaatcggacatccgattataaagttattgacgtttgatattcgcaccagcttttgttttcaattttgagtgtctcgatatattacaggacttaatcggaaatccgagttaaaagttattgttgcttggatattgtacgagattttgtttca

SEQ ID NO: 210990 - DNA, 479 bp, Glycine max
tacggaacataaaactagctgtacaatcaacaccatactttaactcggatgtctgattgacgcccgtaatatatcgagacactctaaattgaaaacagaagctctgaggaaattcaaacgactataactttttactcggatgtctgattatgtcccgtagtatatcgtgacgctcgaaattgaaaacataaggtctgagcaaattctaacgacaataactttttactcagatgtccgattgagtcccgtaatatatcgagatgcttcatattgaaaatagtagctcctagcagattcataacataataacttcttactctgatgtccgattgaatcccgtgtgtatctagactctcgacattgataacagaatctctgagcaatattaaacgacattaactctattctcggatgacgaatgtgtacctaatatattagacgcttgcactgaaaacggagcttttctaaattcaacaaca

SEQ ID NO: 210991 - DNA, 199 bp, Glycine max
gctcgctgggttgagggagattttcgaagtaatgggtcattttgttttatctgggccatagattttttggcagtcaatacaaaagcaaagttttaactttcaaagtgttaccaaacctcgtgagttatcgaagttataaaggcctcaaatttcaaagctgaaatctcgatccgtctcgaaaatcacattttatttgatg

SEQ ID NO: 210992 - DNA, 389 bp, Glycine max
  unsure (1)..(389): unsure at all n locations
ctggantagaaccatgaccatgaaatatgtgcagcttggatatgaatatgacactcgcatgtcacttattccttcacactatctttgtgttactccattaatcttgcgaactattaattctattttcatataaatgagacacggtgtataaaaaataataattatcttttttttttctttacagtccttactattaacagaagaatttacttctaggagggaaaaaaaaaacatcgaaacatcacccagaagaaaatgtaaaagtaataccgcgaatgatatataacatgttgatttccggcctgcgcatgatcctgtggtcttatataattcgtaaacttcagttactcaagaacaatcatgcagtttaataaacaatatctgcacaa

SEQ ID NO: 210993 - DNA, 238 bp, Glycine max
agcttcttgaggaagcaagaggaaggcatattatgtttgctgacaacaaaggtgcagaccacaaagctcaaagtcaaaaacacactcagatcaccaagatgatgatcctaagaatcaaacaacgatttctagattgaaacaagatcacttcaaggctcaagaagaaaattgtataaaagaaacaagaatccaagtttaagattcaagtgtcacgaatcaagatcaagattcatgactc

SEQ ID NO: 210994 - DNA, 379 bp, Glycine max
  unsure (1)..(379): unsure at all n locations
ttggatatntcgcgtcgaacgcagttaagagagaacagtattgatatgctagaaattatggtgcatatatgagctatccgacgtctttggtaattgatacatacacgacattgtgtgggcctatttcatacacgcttcatggaatggttaacaagattttatatcattcatagacaattactccagatatgcatacatcgttcttatacatgaanaagtcacaattctctggactgtgctcaaaacatttataagtggaagtttataatcaactcaacagaacaataaagtgtggtaaccgtggcggtgaatactatgacaaatatgacggtctaggtgaacaacggcctggggcctttcgctaagtacctacaggaat

SEQ ID NO: 210995 - DNA, 417 bp, Glycine max
agctttcaaccgattatttaagccgatatctcgtttaataaatgataaaatgaatttcagccgatcattaatgttggaaccctgctcaatcattgttaaaataaaaaccacccgatcattcatgctggaacctcagttaaatcaaaactagcagagaaatatcacaatcatcaaaatatctttgaaaattataataataaaataatcaacaaactaatgcggacgtttttctttgaaagttctttgaatgaattgataataaccaaagtgaaactaaggctaaaatcaactcacaaaccaagctttgtccgcaaaaaggcacttaaaattgtttaagggccaatgccctacacagtcctcttggcttttatcggataacatggaccattcaaaagcataaaatcaacacatcaactt

SEQ ID NO: 210996 - DNA, 322 bp, Glycine max
ggaccttgatctcagctctattaccgaccatgtacaaaagccagttgttttatccgacacagagttactctctgtttatgagacgattccctatatcttgatgaatcagacactgtggtgaccaaggacttcacacctttggggtagccccctggaagaagggattctttcttccttctatcttaacccttggtctttcaaccacaattccataaaatcctcctctgtcccgaattatctaatggcccataactccattttacgcgctctaaataagcgagtcttgatgcctaaatggatttcaaaccagaccttcaccttg

SEQ ID NO: 210997 - DNA, 377 bp, Glycine max
  unsure (1)..(377): unsure at all n locations
agcttctcaaggaagctacctagtctataaatttaatcatgtgtaacactggttgtaactntgatgaatgagagtcttgtgagacatacttcaaagttccacttctctccttcttttattccttcaatttcgtgctcccccctctccctttctctccctctttcttttcctccattgaagcttccttccaagcttcttatccaaggttcatcttgggggtgaagctccttcttccatggcttattccctagtggatggcgcctcctctcacctcttctcctttgtcttccgctgcatctccatggtggaaaatcaccattaaaggaccttattgaagctcaaagatccagccttcatagaagccccataagcaagct

SEQ ID NO: 210998 - DNA, 466 bp, Glycine max
  unsure (1)..(466): unsure at all n locations
ttacgtgacctatgaaactcagcttacatttgaccgttgggatctgctagcagacatccagatctcattctgcactactctntccacaacctgcaaaacatagcattnttctgcacttatgcaaaattctgctgcacaatttcacagcaaaattctgcataaagtgcagatttcgaaaaccacacttcctctcatccaatcttgcccaaatcaaatcctacaaatctcaaaacatgtatcaatcatgtctaaaccaaagtcaagcttcaaaacacagcaacacaaaatctaggtgtccaaaacccctcaatttaatggattttctaggtttgagaagtgaaattgagaatgggataattttgaagcaaactctcacctcacacaagtctataacatcaatttaaacttggtcaaactggattacgcctaannattaccgaatcataaatgactcttcacacccaaa

SEQ ID NO: 210999 - DNA, 425 bp, Glycine max
agcttgcaaaccaaatgctcacaactactataatagaagccttcgggttgctttataaaaacctcctccgctaaatcaccattaagaaaggttattttcacatccatttgttgcaactcaaggtcaaaatgagaaactactgccaagatattacgaagagaatatttcttagatataggagaaaaagtctttgtgtagttgattacttctttgtgagtaaatccctaaccaatggcctttgtcccattaggcaactctacaaggttccaaactttgttactctgcctagaattcatctcatccttcatggcatcataccataaattcgactctttacaactcatggcttgatcaaaagttttgggattatttcaactccaatattatagtcaaattcttgcaaatatacaatataatcactagga

SEQ ID NO: 211000 - DNA, 485 bp, Glycine max
  unsure (1)..(485): unsure at all n locations
ntaatctaatagagactgtngaagcatatattgtagatttgtcacacagagattaggctcaagtttctctcattggaatgcttcaacttgtctttaagatgctcttccaacgtgtcttatagctccaaagaataccgttgaagtgagctccactcaactaacagacttttggagtaagtagacaaacttgacagctgccatgaaacgacagcttgcagaaccattctaaggtagacattctgaggaacctttatgatgagcattttgaagcattatcagaatagttatttctgaagttcanatgatatgcctttatgaagtaacacaacttcatcaatcttaaaacatcttcatagcataaatcattttgaagaagatggcttcatagatactgagtgaagggacaattgttgtgtgttagtgttctgtccagggtagcatgtgaggatctcattctttatttatgctcttatcagtgttctcat

SEQ ID NO: 211001 - DNA, 420 bp, Glycine max
  unsure (1)..(420): unsure at all n locations
agcttgcctaattaacctgaaagtgagagaaaatgattattaaacacacaaaatggaagtactaagtatttattacctatacttaacagataatacttatgacaactttttaaattttgcatcaaagtccaatctacgtgtcacaatctgggacaatttgccacgttggatagtctatgtggcactaaaattgccaacaatgcacctcactaacggtgatactttcaaatttaacggcaaggactattttgcaaaacttatgcaaagataggactatttttaacatttcaaaaagatagggactaatttgcaaaaggggtcaaaagtcagggaccaaaatgcctatttactcttataatacaataaaataagattcaaattatatngtaagcatgaactaacaattctattagatatttc

SEQ ID NO: 211002 - DNA, 482 bp, Glycine max
  unsure (1)..(482): unsure at all n locations
tcaagctntagtcttcatgttgcttcccttatctctaacagttctcgggtaggtttaccccaatataagggagttcattagaaacactctgagatagatagatagatatatatagagagagagagagtttccttgtattatgtntttcgctagtaataacatacacaacgtgtgctactctcttcttcttctttgacaatcttcttccttattctgaacttattttctcagtcttaatcacaacaaatatcatgaatgacaaatttgaacctatttaaaaatataaaggaccaatatgaacttaattaaattcataagagatcaatgtgaattaatttttaaacataaacttcatttatacccattatcactttcattccaccctctagcaacataatgactatatgatggatagaactaaatgattcatttaaaaattaaaaaataaatgaagtttaaaatatgatgactgactgaaaaag

SEQ ID NO: 211003 - DNA, 432 bp, Glycine max
  unsure (1)..(432): unsure at all n locations
agcttgccacccanctcgcccaggcgagcaaggttgcttcctccagaagcaacaaccttctggaggaatcttctggagggcccaagtgggcctggttgttatttgcacccccatttttactaagtacacccctgccttttttttggtgattcttttttcgtaaagttacggaaacttacgaatttcgtaacgatacttgttttctttccgtaatgatacggaaccttgtggattgcataatcatcccctttttgacttacagaatgttacggaacctcactaattgtgcaacgatgcttccatatgatttccggtgtgtcacggaaccttacggattgcgcatcaatattttcttttgctttctggcatgtcccggaatttacaaattgcctaatgatgggtgccaagcacctcacaaggaccaaacaaaag

SEQ ID NO: 211004 - DNA, 511 bp, Glycine max
  unsure (1)..(511): unsure at all n locations
actcagcttgaggattatggggtatccatcacatgtgagactaggtggcggtcgggcgatggtgcacaacaagttttccacatccacaaatcgcgcataaacccaccatcccctgttgcccacctccaactgagctcacgtactcccacgtagcccatatccttgtttctctcaacaccgggtccgcatcaatcctcccaagcttccccaacatccaagtaatacaaaattcaaacagcacaagctatcacagccaagcaaaacagggcaaaggcagaaaactctgcccaaaataccaaccaaaatcacagcttttctcacttatagaccccagtaacaattcctccgttccagttcgttaaccggtggatcgactcgaacaatttactggaagtctctagcacataaacctacattttgaccgttgggatctactagcaaacatncagaactcattctgcactactcttntcacaaccagcataacataagcattttctgcacttatgca

SEQ ID NO: 211005 - DNA, 360 bp, Glycine max
  unsure (1)..(360): unsure at all n locations
agtcttgctntaaggggaaaatagtcggctactgacttttgtctctttngcatattgacgccacatgtgaatctgtgatacttgccggtatcctttcactaacaaacaaacaattcctccaatggactgggaagagtatatttctgaaattgcatctgacataatgaaggaacagagcccaaaaaggtttgctttgttacaaatgaccgggataaattgaatggtcaactgaaccttgaaaattgtctggttcatggattgccttttgactggtgtagaaatctaatttcatgggtttattagctatctgagcgacttatgtggtgtacaatgccctcttcatctcttgtctgcctcatc

SEQ ID NO: 211006 - DNA, 426 bp, Glycine max
  unsure (1)..(426): unsure at all n locations
cacttacactctcagctaactgattngtanaatgaatgtctatactaaatcatctttgngatatcgagagatgntctaaaccagcttaattatatgcatcacagtatgaaatctttcataaaaacataataatgattttgtacatgattacatatcaagatctattctatacaatgtctttccgagtacaacattcataacattaactatctgagtgctgaataatcattacataatttgctttcataataactaaaagtcatattcatttatgtaatgatcttttgaacatgaacaaacacacattgacattagtttctcctaaacatatcaaatatctagtaatgaatgttgtgactaaccactcacaaagcttagctgcctaagtgtgtggcctttattctagacatttgaacattagatctc

SEQ ID NO: 211007 - DNA, 324 bp, Glycine max
ccacactccacataagactcctgacttttgaagacaaacctcttgataacgcaataaacaaaacctatcacgcgaaaaaaccgagataaggagaagctataaccaatcgtcccgcacctacggtaccaagacatcttgtgatactacaggaaaaacgtgtgccacgaaaagtgcgaaaacaaaaaatcactccgatccatcaagccgctgttactttactacacaaaattgatagaacgtgatgtgaatgcttgcacaaaaccggatgctatatatgctatgacactatgaatggagcacatgggggtttgccacccccaaaca

SEQ ID NO: 211008 - DNA, 333 bp, Glycine max
  unsure (1)..(333): unsure at all n locations
gctgacgcacatcgtcgcggtagaattcatccacaatgttgatcanatgacacctcaaccctataacgcaacgtggctgacataagtgggcagtatacttgaatggtcgtcattgacaatgcggaaggattctgccctcattattcaatttcacacaattattgcaagcttgtggttacctgaagcatgaactacttaccaatatatacatggttgcttatacaaacgagcacatcttaaaagctgactccgcacaatggtggcctcttatgaatgaagcggctattcctccttccgacgacacatggtcacttatccctaacctactacaat

SEQ ID NO: 211009 - DNA, 425 bp, Glycine max
agcttgctaacccatggaagctcttagaatctcccacattttttggggtgggccattcttggatagccttgattttctcagggtccacttggaccccatttctaccaactacaaaccctaaggaaactatattatctacacaaaaggtacacttctctatatttgcaagagggtgtttttcctaaagactgaaagaacttgtctgagatgtcctaagtgatcatctaggctcctactgtacactaaaatatcatcaaaataaacaactacaaatctacctatgaaatcccttaagacatgatgcataagcctcataaaggtgcttggtgcattagtgagcccaaaaggcatcactagccattcatataaaccaaacttggtcttgaaagcggttttccactcatcacccttttccatcctgattt

SEQ ID NO: 211010 - DNA, 306 bp, Glycine max
  unsure (1)..(306): unsure at all n locations
tgatatgcagtggacttatttgcatganataagtgtttgagaatgacttgaatgagcaattgtatgattngaatggattggaatgattagatacattttttgatcaagcttgtagccattataagagaatgagcatgtgattagaagtatgacttgaaatgttagtcagtttcgtaagattgattgtgaacgaatgcattaattgtatcccagagagagtgtgatcattaatatttgagagaaatgactatcatttagtacttaattttgcgtgaatctctgaagtatagactgaatgtatgaaat

SEQ ID NO: 211011 - DNA, 402 bp, Glycine max
  unsure (1)..(402): unsure at all n locations
agcttgtagaagggctagacatgagacatgtcatggtttgtttnggctcaaggataaaagggatgccccacattatttccatgacacaaatgcaaaaatgacgaattggaaattttatgcaaaactggttatgcatgcacctatgcggacactcaagtgtcaaatttttatggtcatgtgatgctagggctcaggaatcatttcctctattttagtcaacccaacgtttccaaaatatgttcttttatcaatntgtgcattcatccgagtccattttgggcagttgggaaaaacttcacagcattcacccttcaggtgtatacacattgtttcaaaaactagtggtgatcagtgaatttttccacagaaaagttggaagtcatctctattcaaagcatgttg

SEQ ID NO: 211012 - DNA, 178 bp, Glycine max
  unsure (1)..(178): unsure at all n locations
ctaagctgcctanagaggtccaggaaggataatgcggctgaagggactagtttctctcctgagtatgacagtcaccgctttaggagtgctgtacactatcagcgcttcgaggccatcaagggatggtcatttctccgggagcgacgcgtccagctcagggacgacgagtataccgatt

SEQ ID NO: 211013 - DNA, 343 bp, Glycine max
gatcattaatccacgcagctgcaactcttaccagactaagtggggtgtcttctctccaggcttatgcttatggatggcgcctcttcacccttctctttgcttcgcgcatctctggggaaatcccatgaagacccattgaactcaaatccccctcataaacccacaacaacttcatattttcattggcattaagagaataattggaatattccatggagagggatttttttagaagctggaattatagaaatattcatgcctataatgagatacctccccattggactaaatggtgatctcacacttacagtggcagacactacttgcgataagaatagataac

SEQ ID NO: 211014 - DNA, 459 bp, Glycine max
  unsure (1)..(459): unsure at all n locations
nttgatatttataggctatcttcttcaagtgtttgttgtctctaaaagaatagatttcttcacttgagttcacgtatgaagatatggacattgggacattaaacgcaagtccttttcatgttgaaaaaccactctctatagcttccttgaagaacatttaaggagaacaccacttgcttttcatcaaagcaagtctatcatagcaggagaggtcttttgatattgtttagaatttcaaagtgttgaatttcatttatttttcttaggattaaaaaaatcctagggtaatgtcttataagatagttcttgcaaaatgaatctcaaacacataatattaaatgaagtcttacatatnttcttaaatgatgtattagataccataacatatatnttgctccatttgaaacttcaaatgcagattcaagatttatcatatgatcttgcataagacacaacttc

SEQ ID NO: 211015 - DNA, 417 bp, Glycine max
  unsure (1)..(417): unsure at all n locations
agctttataaaacaaatatctgtgtaagataaatttacaacaattgctgagtatgtcataatatttttttttttgtattatttagatcatggttatgtatgaaattctcaatgacattgtttcagtacatgaatttagttaaggactagntaaaagtataaaaaaaatgaattatttaaattaatgataaaatattttaacaatgacattgctccggcgtggcatattgcatctaatgtcaattctatcaagaggttccgcacagttaaacttgatggttctagacctgtggttaacttctttaattaaccttctagctgtggttcttacggaaatctttcccattttttttcccgaattgaatttttgcattaattccattctttccatatgcactgaaaaatattgaagtagttt

SEQ ID NO: 211016 - DNA, 474 bp, Glycine max
  unsure (1)..(474): unsure at all n locations
tatcatgtgcacaacanagaactaaataagagatctcggtcttatgaccactacanatcaagtcccaataatatcctcctttctctntgcctaacacatgatcaagccttgagcataacaggcacggtatttgcaatttgcagtaaccagcaaactntgttataacataagaaaaaacagcatcaataaacaggaaaagaatcagcaaccattcaagaaaagccgacgccaaggccgtggtaacactcggagagagcttacgccactcagaagatgaaattttagtgttagccatcatccaccaaactcaatcagcttcaaaaggagaaaccgattgctgaaagttgaaacagataataactttgaccttcttcccaggatgatatgaacaattcaaggcaaacgggtgatgaaactgaacacacttagccaggaagaaaaagtaaatcaaaatcagaaatattggttatctat

SEQ ID NO: 211017 - DNA, 422 bp, Glycine max
agcttagccctagaggggatggaccttttatgttttggagaggatcaataacaatgcctataggttggacctcccagaagagtatggagtcagcaccacttttaacatttttgatttaactccttttgcaggtggagctgatattgaggaggaggaactaacagatttgaggtcaaatcctcttcaaggggaaggggatgatgcaatcctccctaggaagggaccaatcactagaaccatgtgcaagaggctccaagaagattgggctagagctgctgaagaaggccctagggttctcatgaaccttagggtaaatttctgagcccatgggccaaggttgggtccaattatctttgtacatattagactaggatgtcattatatttggtcctcgtatttagggttccatattgtaggtaggg

SEQ ID NO: 211018 - DNA, 333 bp, Glycine max
  unsure (1)..(333): unsure at all n locations
tctcttactaagttctttctctctgactatagtgtatggtcttgtccagcgcgtgttcaactaaaccttaacaccctctatatagagaaagnttacataacaagacaaaaccccttcagtgaagaacagtaacattaccggtcctttactctgtcacagggttgtcctttacagatanctttattacagataagctcaatgtctaatcttatgcgatagtaaagattcctgccccttatcttcttttctttaaaaaaaaaacttttttctttgggcaggatacatttgtcatcaactcttgcttgctcttggtatcgtaacatcgtcttcatc

SEQ ID NO: 211019 - DNA, 415 bp, Glycine max
agcttgcatcatttcttgcttgaactcctcaactagccttgcatcatctccagtaactaaaagatcatcaacatagagagaaattatgaaaaagttatttcccttatttttcacataaagagtggactcagataaactttttgcaaagcctaagctcaataggtgatcatttatcttgctatagcagacccttggcgcttgtgttaggccatagaggacctttttgagaagataaactttatcttcaccttgcttcacaaatccttctagttgctctacatatatttcttcttgtagatctccgtttaaaaaaaaattgatttgacatctaagtggaattggaacatcccatttttcgaaaataaattaattgttttagctaaccatatagtttagaaaatgggagagttataat

SEQ ID NO: 211020 - DNA, 496 bp, Glycine max
  unsure (1)..(496): unsure at all n locations
tcttcanatctaccanagtagaatcatcggtgcatacactgatattgctatttatccacttacactngaaaacatagacattgaattgtacataattaacttcccagattaattcaatgactccaaagtaaggcataaaagctacacgggatttgtcatcatgtacattagcaaagcgttgagatttagcccttagacttacaccatttttttgcattgtactctngtcatctagtgattttgtgtaaacaaatacttgatgatgtcgtatccttgccaagttataacatttcttttaggcccatatgctaacttccttaacgtttcagatgcattatggtcatcgaagattatatctttaaaccaatatagagaagtctcgttatgacctttcaagaccctactctttggcattgttggggtactttccctgactaaagctatgtacacactatgtatgacagaacttcattactattattcaatatataccaat

SEQ ID NO: 211021 - DNA, 413 bp, Glycine max
  unsure (1)..(413): unsure at all n locations
agcttacaaatatgttttgggagccaagcccatatgtaaaatcaaatcaaatctagataagataagataagataagatctagattaaataatatctagatgagaaattcaaatctagataagataagataagatctagattaaataatatctagatgagaaattcaaatctagataagataagatctagattaaataatatctagatgagatcaaatctaaataatatctagataagataaagataagataagatctaattttgtagaataaaatagtctgccctcttcaagtccaagctcaattctggattcaagcccaagcccaattctggattcaaacccaatgcttcattaattcctgaaattagattaanaacatcaaattagctgaatgggcccaaataataaaact

SEQ ID NO: 211022 - DNA, 496 bp, Glycine max
  unsure (1)..(496): unsure at all n locations
ngagaatagcactactaagataaatacaattgtccaacatatttactgtaggaagatctagcatttaacgcataagaaattgtgaattaattggaaaataataaaatcttactactttaatgtatatatatcatattctttcaatacatagtatggagcagttaaaaaaaatcatcaagtatgcatactagtaatgtttttatcccgtggaacatcaaccaaaagtgtaaggcctatgaacagaacaagtagtgtataagttgtcggcatctaaagtagaaccaaatgacagcaacaccaccaccaccaccaatagtaatatgaacaaaaatgattatgaagtaaattaattatgaaccctacaactaactatctaattnggttaattcgacattgagttaaagaaacagacaaataatataagttgcagagagagcagtggtatgttaccattgaggagtgtacgtcaagtgagtcaccacgaagtcgagtcata

SEQ ID NO: 211023 - DNA, 361 bp, Glycine max
tcaagcttgagccaaaatgctgactcttcattaaccttgacccaaggtgagaatgccaatccttatcctcggaagcaaaaaaagaggagaagaaaatttccaatctaaggaaaaaggagaagaaaatttcccatcctagaacaagagaaagaaaatttccaatcaaaggaaaaaaaggaagcaaagaaattcccaatcaaggagtgggagaaagaaaaaaagataagataggaaattcccaaccaaagaatgggagaaagtaaaaaaaagaaagcttctgatcgaaagaaaacagaagaaatgtgcagagaggtctttggaccggacaatatctgaacaatacagaattgtcaccaaatga

SEQ ID NO: 211024 - DNA, 479 bp, Glycine max
  unsure (1)..(479): unsure at all n locations
tatgcgcatatttccttacaacgttctcttgcacaagacatttataccgaaaaatgcacccatatacaatcaaggcagcttcgtcatctagattatttacacgtacctccaaggtgtatttgttacttatatcacacacatctccttggctaaattcacatacatgcatactcaaagcattttggggtaccaaaaattgcacatgtgcacctcttggcatttctaatacctatacatacgcaaactttatgatgaatcttgactatccacacaataaggtgctacattntcatgctcttttttcaagttttgctacctaaagccgcatgcaaattcaagcatattttcctttgctgactaaaattgtattcaaattaaaaggtatantttttgaatatgtttcttcaataacatgcacatattatataattntttttntggagacatttgactaccaaaatatatatcatacattcaga

SEQ ID NO: 211025 - DNA, 396 bp, Glycine max
  unsure (1)..(396): unsure at all n locations
ttcgattcattctatgcacccatggtggtccacattgtgtttcgtgcanttttattctcgtntggttactntttatacccnctcttgacgtgcttaagccattttacttaagtcatttctcgcttaacttanaaataaaataaatttccaccgaacgtttgaattgtattatccgttaacttcggttaaaataaattccgaccgttcggtcgtgccgtaaccacgttggaaatcaaaaaaaggtaaaaataatataacaatcaaaaaacatcttttagtaaaataaaagcggaaaatcaatcggacgtttttctctttgggatttctcattcttaatcgaattgattaataactaaagtgaaactaaggctaaaatcaactcgcctagtcaagctc

SEQ ID NO: 211026 - DNA, 419 bp, Glycine max
agcttcatgagatgtccatcgaatatcactgtattgttgtacaagaagtgggcttcttcacatactcattctttggttacaatgggccagctaaagctcatttattaaatttcgacaagcaccttgtgatacaggcttactcaaaattcctttaataaaaacagggaccgcaggaatttggcggattcaaacaataaaagatgctggaggatggaaagacccaaccacagtaaaagatatggaccttgcagtaagggcaaacctgcacggttgggaatctggttttctgggagacataaaagcgagtgatcccatcttatctacatcctttggaattaaaccttgacagttgaataaccagaagacaacccctacccatgtggggaattttgcgcttggacgtaaaaaagaactgccag

SEQ ID NO: 211027 - DNA, 453 bp, Glycine max
  unsure (1)..(453): unsure at all n locations
tcttctgataagggaagagctacagcatgtgtctgcaacgtctgcaatcttcttcatcgctnccaaggatgtgtacaaatctgccattacatgctacttaccaactaccatagttttttctttcttgtcaaactacttgaggatattttcagggatgatttatgaattttaggagagacaataggtttctgaggatatctgatgattctgtctgctatggttctcagagaaaccataatgctggaaattaatcactcaactgaaatggttgtaaaatagcttagctatagttctatattaatctttaacagcatcttgtaatttactactttcgtaagagtccataaagtttgcagtgcttgatcaatgcacaaatgatgatgatctgcatggatcgtaatgaagtcaacctaaaggcatctcggaatacatatctaatttttgtgactgtat

SEQ ID NO: 211028 - DNA, 423 bp, Glycine max
  unsure (1)..(423): unsure at all n locations
agcttcccgaatctactcttggaaggactggatttctgtcttcatcaagaagtatcagtataacaccaacatggctcctaacagaacctacttgcaaaatatgagcaagagggagcatgagtcctttaaagagtatgcccaaaggtggagggacctgtcagcacaagtggcaccccccatgatggaaagagaaatgataactatgatagtggacacgctgccagtgttttactatgagaagatggtgggttacaagccctctagcttcgcatatttggtatttgcgggcgagaggatcgaggtaggcttgaaaaggggaaagttcgattatgccgctcttgccagcacgagtaataggagattcagagcangtgnggctaagaagaaggaaggagatacccacgctgtgacttcagctcctac

SEQ ID NO: 211029 - DNA, 508 bp, Glycine max
  unsure (1)..(508): unsure at all n locations
ntaccaatttagttattgcatgatgtgagacagcaagtgatgtggttataactaactaaaccaccaatcagtggatgatttaactatcagtcatcgcacacctttgttggtaggaatcattgaattagggtatttgttgtttgatttgatctttagataaaagattatntaaactaaatataaaataaagattaagatttggatcgaattaaatatattattaaatctaaatcaaacaaaatcaatttcttacaatttgattcagtttggtagtttttttaatatattatgcataatgaaaatttattaactatataattattatgctatattactttaaaaataaattgtattctttattgattggtgttcaacacattttcagttaaatttattattttcacttttatttagtattattataaaatgatattaccaactcctcttatcacataatagtaattggggtatcacttaatatctatttattatctatctattcaatata

SEQ ID NO: 211030 - DNA, 413 bp, Glycine max
  unsure (1)..(413): unsure at all n locations
agctngtaggattatggggcacccatcacatgtggtactaggtggaggncgggcgatggtgcacaacatgttttccacatccacaaatcgcacataaacccaccatcccctgttgcccacctccaactgagctcacgtactcccacgtagcccatatccttgtttctctcaacaccaggtccccatcgatccttccacgcttccccaacatccaggtaattcaacatccaaatcatcacaagctaacaaaccaagcaaaacagggcaaaggcagaaaactctgcccaaaactcaaaccaaaatcacagctttttctcacttaaagaccccagtaacatttccttcgttccaattcgttaaccggtggatcgactcaaatattttactggaagtctctagtacataagcctaca

SEQ ID NO: 211031 - DNA, 441 bp, Glycine max
gggatccatagtctccacgccacatctgtaaatgagatgtcccaccctaaccaaggagattgtgaccatcaaggctgatcaaaagcaagcacaataatgctatgctgagagcctgaaggtaacaccctatcctcccactagggagcttgccaagcctcaccctacagcggttgaaggtactcaagtcatgaacaaagggctttcaatccgagccttcattgtttaccaaacaagcctggacgaatgaattgatatagatttgtgggagaacacttctgacagaggccaaaagcccatcgaagagcttgtcaagctgcatgtaaggacctcactagccttgaacacatgcacatcattgatgtcctatacaagaacatggaccttgtctcttggcaagcatctgacatgccgagaatcatcccaacattatcttgcacaagc

SEQ ID NO: 211032 - DNA, 335 bp, Glycine max
cctgcggcatgcaagcttgcttgggggcttctatggaggctggatctttgagcttcaatgaggttcttcaatggtgattttacaccatggaaatgcagcggaaggcaaaggataagaggagagggaaggcaccattcactagggaataagccaaggaagaaggagcttcaccaccaagaattgccttggatatgaagcttgaagaggatgctttaatggaggaaaataaagagagaaggggggagcacgaaattgaggaataaaaagggagagaagtggaactttgaagtgtatcttaatgactttcattcataaagttcaacaaatgtacacat

SEQ ID NO: 211033 - DNA, 494 bp, Glycine max
  unsure (1)..(494): unsure at all n locations
ctaagcttgagcctgatctcttataagggagtgctgtgcttctngaatatcaatggcagtggaattgatgcaatcctcccaaggagactccaagaagattgcgccaaagatgcaggagaatgccctatggttcttatgagccttacgggagactttgggcccatggactaagtatgagcccacttatctttttacatattaagatcagggtttcattatctttaggccttgtatttatggcttcatagtgtagggagggtaccctagtaatggacgactttttagcccttgtattttaagacacctacactaatttctgtattaacggtagtttagttatttcacatgcattaagtccactattcgatgtgtgtgtgtgtcgggagagatatataattgaattgtgataagcccaatccaattaacatttggaccatcctaatgaggacgtgagtttttgttgctacacaccattgcacatcatatagtcacac

SEQ ID NO: 211034 - DNA, 419 bp, Glycine max
agcttgtgtagcactgttcactgcagaagctgtttatatagcagctgaaagttggtgtgctcacagtctttggatgaagcaccacttgaagactttggagcaaaccttgatcacattcctttaaagatatgacagcacaagtgcgaacaatctaactaaaaatcttgtcatgcattctaggactaaacacataaataaggcctaattttcttagagatcatgtgttaaaaggcgattgttgcattgagttcatacatagtgatcatcaactagcatatattttcactaaaacacttgctagagataggttcttcttcattagaaatgaactatgcatattacatagatctagcatagaaagacattttggtttattgcacattgagtgatgcgcattgctattcatatcacttggtttt

SEQ ID NO: 211035 - DNA, 475 bp, Glycine max
tctcgccattgggaatggcggcatcactgagttcttcattcctcccggcggcacccttccaggtcagcaacgttctcaccattggaaatggcggcacaggtatctcgccaacgcagctaccggcatccatggagaaatagaccccctttgcaaatactttgaaaacagaccctgattggtaaatagtttttaaaagtaaccctctgtggtaaatttgccaccgcttagcgcacatttgttatttttggcttagcgcgcctttctcgcttagcggatgaactgaagcggtgcgcttagtgagatgaagcggtgcgcttaacgaacatgtacagctcatcttctccagagttttctcgcgctagctgagctcgctagccagcagatcgcttactaggagatgaaaatagcatttccaagcttgctaattacctacattgaagaaatgatattacaccaaatgaaatctagtattata

SEQ ID NO: 211036 - DNA, 421 bp, Glycine max
  unsure (1)..(421): unsure at all n locations
agcttgagggagtgtaaagatttatatattattcttttatttatgactagatagaaatttgtgatttagtccttattactcattatcagattaatacaatgtaatcaatactgatcctatttgctcattataaatagaggcttagtgtggtcatccaagacacacaacattacaacagttaaaccactgttataataaggaaacatggtaacctatcctaagagataatgaggaaataaggaaagcaattctaaaggataaaggataatccaaaagtcaaaaatatggttaagacaatattggatattcctgacattctaacanactganttaaaaaaattgctattatgttttgcacttcagtggtaacagaattagcaccaactacaacaaaggctgcatttaacttatattacagagg

SEQ ID NO: 211037 - DNA, 437 bp, Glycine max
  unsure (1)..(437): unsure at all n locations
cgctctanattacattgatgttngtatttatgggaggaggttgtatgccatttttgttttaagagtagtgtcccactggtaaaactaactttccaaatgtttgccttcgcaggaaatggccccgaggaagcttgcctcaaagaggtccaggaaggacaaggcagccgaaggaactagttccgctccggagtatgacagtcaccgctttatgagcgctgtacaccagcagcgcttcgaggccatcaagggatggtcgtttctccgggagcgacgagtccagctcatggacgacgagtatactgatttccaggaggaaatagggcgccggcggtgggcatcactggttactcccatggccaagtttgatccagaaatagtccttgagttntatgccanagctttgccaacagaggagggcgtgcgtgacatgagatcct

SEQ ID NO: 211038 - DNA, 238 bp, Glycine max
catcgtacgctatatgctttctcttgaataccatacagaaagacactccgctaatagttactctcttatgaaacgagcgtcatattctggaccctcactgaatcccaatcgtagtggcatgactagaacttcaaaatgatgctccgttgtgacaactcaaaagacccttagccttttcatgtgtgacatgagcatatgattcagggttccgtcccaactctatttctaaatcgattgt

SEQ ID NO: 211039 - DNA, 363 bp, Glycine max
  unsure (1)..(363): unsure at all n locations
agcttattntctggaaaattccttccctatttgttgttttgattgggattaagggtggtgtttggtcttggatgtgcatcaagtggattttgtggccgacttggggatggcctttgtggatgattgggtgttcttggctggtagggtggtgggtaatgagaatgattgatattggttgagtatagacattattgggctaatgggaaattnggccatgtaggaatgccagccagagcatgggtttctcactccttcttattctctccatttgccctaggcttcctattcatcaaagcaggataattaaatttttctcttctcacacccacttttatcctttcattggngaaactaaatcgacaa

SEQ ID NO: 211040 - DNA, 450 bp, Glycine max
  unsure (1)..(450): unsure at all n locations
tatgttgcnacatctacaacagacctgcttaacctcaacagcaaaatcagncacaacagaataattatgacctctccagcaacaggtacaatcccgggtggaggaatcatcccaaccttagatggtcgaatccttcacaacaacaacaacaaccttattttcaaaatgctgctggcccaagcagaccatacgttcctccaccaatctagcaacaacaacagcaacggcccctagaaacagcaaacagttgaggctcctccgcaaccttcctttgaagaacttgtgaggcaaatgactatgcaaaacatgcagtttcaacaagagaccagagcctccacttagagcttaactaatcagatgggacaattggctacacagntaaatcaacaacaatttcaatattctgacagattaccttctcaatctgtccagaatcccnaaaatgtgagt

SEQ ID NO: 211041 - DNA, 409 bp, Glycine max
  unsure (1)..(409): unsure at all n locations
agcttgaaagatgaagatcctttgattccttattggccaccacaatgtgatcaaactttgatgtcagtgttctgagcaccttctcaaccaccaggtggtccttaaatctgttctccacaacactttatcttattggtgagtgggagaatcttggtgaaatactcagctattgattcagtctccttcattgcaagaagctcatactgtcttctcaatgtttgaagctttaccttctttatcttttctgcaccttcataactctttataagaatatctcatgcttccttcgaggctgtggcatttgcaattttctcaaagttgacatcatttacacactggtgaattaagaataaggcttngcacgcctttatctcaaatctttgaagtaaattgttggcctcataacact

SEQ ID NO: 211042 - DNA, 393 bp, Glycine max
  unsure (1)..(393): unsure at all n locations
ntgtcttacatgtttatatatcaactcgtgatatgtactatcaaaatagttagttaggagtaaaagtcttgtgtgcatgagcttgcttctagtaccctcgatggaatgtaatgtgccatgcaatctttttacgtattatttattcaaattgttttttgagaattaattattttgaaattcaagagcttataaaaaaaatccaatctttaatgtgacaaattgtgatgagacttgatcacaaaaatcatgagatttccttcttatttatgtaattntctcttttgtctttaaatgcttttattaccttatcaaattatcaattattttaatttccttttaattccttcttatttatttaatgtctcccttttgtctctaagcatattatcccct

SEQ ID NO: 211043 - DNA, 389 bp, Glycine max
acctgtagcatgcaagctttacagcagagtataggagtgtatcactaatcctaaaataaaataacttaatgccattaacctagggaattaaaaacaactaaatggctgagtgtaactgaaattgttggcaaccaaaagtcacccccaacagccaacaagtcagccaccatttggtctcccaaaaggctgatgcctaggttgccaattgggcccttattacaacttgaactaaagcccttttagttgattaacccaaaacatatttttggtcagccaactttacaaggattgggccattatttagacaaactatacactctaaaattgaaataaagtggtgtcatttagtccttcatttgggccatgatacaactcacaaccttggactt

SEQ ID NO: 211044 - DNA, 336 bp, Glycine max
tgtctcagcgtttatgcgagacagagaccaacatgttagctatcatcgccaagtacgaagaagagttatgtctagccacggcccacgagcatagaatcgcggatgagtatgctcaagtatatgcggaaaaagaggctagaggaagggtgatcgactctttacaccaagaggcaaccatgtggatggatcggtttgctcttaccttgaacgggagtcaagaacttccccgattgttagccaaggccaaagcgatggcagacacctactccacccccgaagagaattatgggcttctcggctattggcagcatatgatagactcaatgggccacataa

SEQ ID NO: 211045 - DNA, 423 bp, Glycine max
  unsure (1)..(423): unsure at all n locations
agcttgtatcaaattcaaacgacaataagttntttctcggatgtccaatagagtcccgtaatatatcgagacgctccacattgaaaatggaagctcgtatcaaaatcaaacgacattaacttttgacttggattgccgattgactcccgtaatatatcgcgacgcttccaattgaaaacagaagctctaagacaattcaaacgacaataactttttattcggatgtccgattgagtcccgtaatatatcgagatgctccatattgaaaacggaagctcgtatcaaaagcaaaccacaataacttnttactcggatttccgattgagtcccataatatatcgagacgctccacattgaaaacggatgctcgtatcaatatgaaaccgcaataacttttaactctgatgtctgattgaggcccgt

SEQ ID NO: 211046 - DNA, 427 bp, Glycine max
  unsure (1)..(427): unsure at all n locations
tctggtttcaattggagcgtctcgatatattacgggactcantnggacatccgaatataaagttctcttcgtttgaatatgctcagagcttctgttctcaattccgtgcgtctcgatatattacgggactcaatcggacatccgagttaaaagctattgtcgtttgaatntgttcagagcttctgttctcaatttggagcgtcttcatatattacgggactcaatcgcacatccgaatataaagttattttggtttgattatggtcagagcttctgttctcaatttcgtgctcctcaatatattactggactcaatcagacatccgagttaagagttatagtcgatcgaatttgcttagaacttcttttttcaatttcgagcgtctcgatctattatggtactcaatcatacatccgagttaaaagt

SEQ ID NO: 211047 - DNA, 56 bp, Glycine max
ccccctctcacatcacaaacatcacctcacctgcctatcattcaccacctcccccc

SEQ ID NO: 211048 - DNA, 388 bp, Glycine max
tcttcatgatcagggaagagctacagcatgtttctcaatgtctgcaacttcttcaactcttctaaagatgtgcacaaatctgccattacatgctacttaccaactaccatagttttttctttcttgtcaaactacttgaggataatttcacggatgatttatgaactttaggagagacaatatgtttctgaggatatctgacgatactgtttgtgttgttctcatagaaaccatattgctggaaattaatcactctactgaaatggttgtaaaatatgctagctataagtttaaataaatctttaacagcatcgtgtaatcttactactattgatagagtctcataaaattccgcagtgtctagactcaatgcacacaatgcatgaat

SEQ ID NO: 211049 - DNA, 132 bp, Glycine max
agcttgactctgatgctgacgatgaattgagttgttttctatttcactgggtgtaaaccgcacagcaattgcgtgggctgattgatccagataaatcccttagtaaaagttaatggaaggctcactgcctta

SEQ ID NO: 211050 - DNA, 251 bp, Glycine max
atgtatcggacggagaataattgtgattcgtttagaaacaatcttaccgtcgataacttgtatatattctctcgaataacattgtgtcttagaagaatactcatggcttacagaagtgatcttgagatgtgatatgacctctctagagtggtatatgagtctcatcccacgccttgatagtttcgcgagaccctccacgatggaatatatctctctccgaagaatatggtgtatgatcatctacatgtttc

SEQ ID NO: 211051 - DNA, 422 bp, Glycine max
agcttcagctttgtccccaaggcttcatgtagactcgtccaaaatcgcgaagtgaaccttggatccctgtcagatacaatactagaaggaattccatgcaaccttactacttccttgatgtacaactccactagtttctccattctatacttcatattcactgggataaaatgagcagatttggtgagtcgatcaactatgacccacacagcatcatgtccacgactagtcttgggcaaactagatacaaaatccatagatatgctctcccatttccattccggaatctccaatggcttcaattctcccgatggtcgctggtgttcaaccttagccttttgacatgtcaaacatcttgctacatattcagctacatctttcttcatgccatgccaccaaaaacttctcttaaatcttgtaca

SEQ ID NO: 211052 - DNA, 433 bp, Glycine max
  unsure (1)..(433): unsure at all n locations
gagtgcaagagtgcatgataatgagagcatttggtgagggctgcaccatgatggtttctttgcacctagatgatgtgaaagtgtttgtttaccatgtatatgcgtatatagaatagctagcaagaggcaagcaccttttcaaacaaagcgtacatgtgggataggtagtcaagtgctttgccaatgtgcatatatgttgaatatggcatgaaaatgtttctcaaaatgggaacatatggcatgaaattgcttttcaaaatttgaataaagtagtataaaaattgcctttccaatgaatatgtaacatggaattgcttttcaaataaatgcaaatgtgtgtgaatatgtagcatgaaattgactctcaagtgtgtatatatatgtgaataaaatgtgaacatgtagcanaatagaatgccacccaaaatggagt

SEQ ID NO: 211053 - DNA, 426 bp, Glycine max
  unsure (1)..(426): unsure at all n locations
agcttgtcttagtaggaattgcatgttttctaatctgcagatctcgctaagcgacaacattcttacgctaagccaaattttgtgctaaaaaaacatttgaattttttaatttggctaagcgcgggaccgctgagtgggaagaaaaattgagaaaccaaacgtcttgtcttttcactcagcgaaccactccgctaagtgaaaagaacgaaacgttcttagtgggtgtaatgtcagttacacccactcttcgaaaatttgcgccccttctgctccctttctctctcaaactgctccctgtgcgtttntgcttcttctactctgcatctacttattttcatcaagcatcccgcagcacaagtctttgatctctatctttggttatttatcaaaccttagggtagacaactctagagtatggttaaactt

SEQ ID NO: 211054 - DNA, 470 bp, Glycine max
  unsure (1)..(470): unsure at all n locations
ctcagctgtcaacctgataaagtttcagaacatatatcatgcatagatggatgaggacttcaaggaattaggtgtcatcaattagccattcaacgcagatatctttctaattaacttctgacctcaatatagaaattgatttgtaagtttgcacaggtttcttgcaaaatggcataaagaacttggacgattaatccaaattagaagagggtaaataaaatatgtctagaaaattacagaaggattaaaaatttgaatattctttgttaacaaaaatgaagaaaaaagattcacggatggttgtaaatatatctatctattcagaataatttaacacccagaaaagatcaagacacaaagaagctaattctaaaaaattttcaagaaatggatgtgacaaaacatagaatatttccattcccctcntctatgattccttatggctaataagaatgcctatatatttatac

SEQ ID NO: 211055 - DNA, 405 bp, Glycine max
  unsure (1)..(405): unsure at all n locations
agcttccacaatatccaagcaagtcaatttctattcatcatgaactaccctaaactaggaaaacagagtaaaggtagaaaaatctgcccaaaacacattcacatcttacagctttccttactcaaataccccagtaacattctctttgttccgattcgttaaccggtggatcgacttgaaaattttactggagattcctagtacataagtctacattctgaccgttgggatctgctagaaaatgtccagaatccaatatgtactacctttcccataaccagcaatgcacaagcatttttctgcacattnggtcaacgtggctgcacaatttgacagctntttgctgccacaattggcagatttcgaaattcctcttacccacatccaatattgctcaaattggat

SEQ ID NO: 211056 - DNA, 489 bp, Glycine max
  unsure (1)..(489): unsure at all n locations
tccatcatgatgaganaaaagatgacagagaaagctaagagaatacttaataaaaccattaaaatgagaagttggtagaaacacttggtttatactgattcactcaaatagagctacgtctagttctcttttatagaagagtaaagggttccattaatctaaaaatttgattaccaaacaagtattctatcctttcactcctggctatacaagtattcttctagccacttttggcactaccttagagttcccctgaatctaagaacacctaagtatattttaacaataagccacttctagctctcacaaacaaaattatgaatgaatacaatgattcgataacactcaatgagtggatgaacaataaagcttaagtaaagagtaagtttgcttagcataggataaacaatgaaagatcaatcgtatcgtccaatgatctctgcatatgttcacttcagagatgtttggtttcttatgatatttgcatct

SEQ ID NO: 211057 - DNA, 416 bp, Glycine max
agcttattcaggaatcagaattgcatcagttcttttttaagacatttctttattcttgaattgagtgaatgccaactcaaaatgaaaatcttgccattgttcttttgcttgaagcttgcataatttctgatgatatattggcaatttgggggttaaaatacatggcaaaagaaagggtcattctataggccaagatttgcaaattgattttgcaacaacttgattgtgtttcccagggaggagttggcaccatcctttctctgatttgtagaaatttttcgttggcttctttatatgttcaattgccaaaaacttgtattaacaataatcagcttgtggatgacaatcatgcagaaaaaggaaacaaagagccgttggaaacaaatccctatgattatgcttctaataatgacaat

SEQ ID NO: 211058 - DNA, 411 bp, Glycine max
  unsure (1)..(411): unsure at all n locations
ttagactttcaagtcatcacatgattgagtgggaaattttgaagaattatctatattttcttcatgttttccttgaaggtggttataatcttttgaaagaattttgaagtcttttctgatattatgataagctttggacaaaatggatgagtcggagagaagttcatcatatgctaattcaagacgttcatggttgtttatatttagctcttcatcttatcagagtctgattcttctgatgtcgggtctgccatcggataaagggtggcttcttcttcctctcttgtcttcacatcgaacgatgtgtcatcaagtctttcccttatgctcattagtaatntcttgtcctcttggttgaagtacttttcttgtgatttgacctatcaagatctggacatttaacttgaagtg

SEQ ID NO: 211059 - DNA, 402 bp, Glycine max
  unsure (1)..(402): unsure at all n locations
agctnncacatcattcagtctgcagaggtatcttatccaccaagcccaactaatactgggcgtgagggggtgtgttgaataacactcacatcccacattagttggagatagatgccaaatacaatatataaatgagaggtaatcctcaccccttgaactagctttagaattgagttaggctcaaactctaagacaaaggactctctcataacacctccacaaccagcttggcacattagcggcggagatatatattttgtacttgatctaaaataagaccatgaagctcaaggctgaatgcacacactcgtgctaaaatttatcacatcattttttttgacttctcttctacataagaatgatctaacattgcacatgttgactttctgacttgaaatacaa

SEQ ID NO: 211060 - DNA, 461 bp, Glycine max
  unsure (1)..(461): unsure at all n locations
tcactaaatagaaaggctgaagcgtctgaactctgtatgntaccttgcattaanggcatagaactggctaagctcgtagtatctacattaactaagaatgtcctattagactctaactctaaccctctacctaccattcataaggatttcatttttccaaaaccataacaccaagaactaatgcttttatgtacaacatcagacacttgtcctggacttaaatcaggccaccatacataataagtatgataaaaaatcactgaaatacatggactgaaaaaaaattgatccattctgacaaggagaaagaaattaaaccatcttttacctttaacttataaagttaaattgtaaacaatgatattaatttaagaatgggaaacacagacgagaatactttatccaacaacgaacacttgtctcaagagaagacactttatctcatactctctcatgcatct

SEQ ID NO: 211061 - DNA, 434 bp, Glycine max
  unsure (1)..(434): unsure at all n locations
agcttgtaggattatggggtacccgtaatatgtggtactagggggcgatcgggcaatggtgcaaatcaactctcccacatccacaaatcaaacatgaacccaccatccccaattacccaccttcaactgagctcatgtacccccacgtagcccttatcctcgttcctctcagcactgggtccccatcaacccctccaagcttccacaatatccaagcaatttaatatccaaacatcatgaactaccctaaaccaagaaaacagggcagaggcagaaaactctgtccaaaacacattccaatagcacagctttccctactcaaataccccagtaacattctcttcgcttcgattcgttaaccattggatcgactcgaaaattntactggagggccctagtacataagtctacatnttgaccgttgggatcagcta

SEQ ID NO: 211062 - DNA, 437 bp, Glycine max
  unsure (1)..(437): unsure at all n locations
tcggagagaggaaagagaccagtcacgggtgcatggcatgatcttaaaagaagagttagctgcttgcgcaagatccaagaggagtntggctcaacacttggaagccacggagcaaagcatgctagctatcatagggcagtacaaggaagagctaaaccagtatgtgacccatgaacaaaagctagtagaggatttcacacaagagtacgccgtaaaggaagcaagagggagggtgattgacgcattgcatcaagaagcgactatgtggatggataggttcgccttgaccttgaatggaaatcaagacctcccgcgactactatccaaagcaaaagccatcgccgaagtgtgacagcccccgaggaaatcatgggctaatcaatactgccaacacatgataaaattgatggcccatataattagaaacggtatgttct

SEQ ID NO: 211063 - DNA, 430 bp, Glycine max
agcttatgctgcaaacatctacaatagacctcctcaacctcagcagcaaaatcagccacaacagaataactatgacctctccagcaacaggtacaatcccggatggaggaatcatcccaaccttatttggtcgaatccttcacaacaacagcaacaacaacaaccttactttcaaaatgctgttggcccaagcagaccatacgttcctccaccaatctagcaacaacagcaacaacagaaacaacaaacagttaaggcccctccgcaaccttcgcttgaagaacttgtgaggcaaatgactatgcaaaacatgcagtttcagcaagatatcaaagcctccattcagagcttaactaatcagatgggacagttggctacacagttaaatcaacaacagtcccagaattctgatagaataccttctcaatct

SEQ ID NO: 211064 - DNA, 498 bp, Glycine max
  unsure (1)..(498): unsure at all n locations
tccatcaagtcccatcaagtggtaatcaaagcacatgagcttcaagtagatgctccttaaacctccattgttgcttattcattntttattcatgtatttcctcacatatcctgtgttgaatgttgttaacaagattatgtagaatttccactgatttaacttgctatagaagctagatttgattttctatgattcanatttttgtttttgttcttgaaccatgaattgtgttgagtttaggttcctttgagtttttttttcttgttatttttttgcgactgacacctaaaccataaaattcttacaaaatcattaaagtagaagtaaatttcanaaatctagagtgacatgttcacctattgtagttttgtcatagaagtcatgtctagatgaaactngtcacanaagatttcttatngtgtgttgaattntatcttttcctttctctttatctaactcattngttcatgagtgtatgaaattctttagcctattttt

SEQ ID NO: 211065 - DNA, 413 bp, Glycine max
cagctttaccaaaccttgctagacgttattccctttctctcctccatcattctctttctcttggtatacttgttctacctcaagagaagggcttcctctctctcttccactactcacttgcttcctaggaccattgccaatccacccaccacctctccctatcattcctcaataagtaacaaacactctcttaaatagccttatcttaattatcctctctctaataccaaacatagattaaattaactacttacatgtgttaatttgcttgctagcttcttgcacgtactgcaccatcctttaattatatatgatcgattaacataataatctcatattccacagccttgtcgtatggatctgaccctccatgtcctggataaaactccaagaaatttgtttgatgaggattt

SEQ ID NO: 211066 - DNA, 439 bp, Glycine max
  unsure (1)..(439): unsure at all n locations
tttctgatgaanattctatctataggctcttatgttcaatggtgaggggtatcattattggaaaacctgaatgcagatcttcatagaagccatagatctaaagatatgggatgccattgaatttgattcattcattccttacaatggtgagagaaatgcagctacataaaaaaaactatagaagaaagaaaatgatgatgaaagaagaaagaagaaggttcctctttagccccaaaatgttgagtgcgatcaacttgggcacatgagattcaattgtcctgtgtttaaaagaagaatggaaaaatccgaaaagatgaatttcaaagagacgatagacaagaaaggatatatcacttgggaagataatgtcatatattattcaagtgagtcanagaagaacatcataagtctaggtatcatgatgaaagactatgaaaat

SEQ ID NO: 211067 - DNA, 463 bp, Glycine max
  unsure (1)..(463): unsure at all n locations
tgtacggatgtaagagacatcttcttcgaccttggtaatccttgactccatctcctcgaatcgcatgtccacttgtaactccaaagtatcaaacctttcaccaacaaaggtttaaagaccatngaacctttccaaaatcttttgaagaatagaggaatcttctccaccttgtaaatgtccttcttcatcaatgggttgagcaccctttttcacccaagagccatcatgctcttttcggtaaccaaaggatgcaatcacagcagcgcctattagaaaggatctcttgattggaacataaggttcagaatcaagagggatgttaaagtgttgaaggaagagagtgactatgtgtggatatggcaatggagcatttaatcgcaatgccttatgcatgcgatatcagactaagtgtacccaatcaatttgtccgcctgtgtgaaaagcccacatgacaataagatct

SEQ ID NO: 211068 - DNA, 237 bp, Glycine max
actccacccagtcgtaccgccatgacgagaggagatgacacatttggagatcgttaccagtttacttgaaagcgatggctaagccactacttgcaatctctcttcgcggaaaaggatgaatccgacacaaaagaagttgaaatgctgcattggccccacatatctataaggatgaacccccgcgcccccgccgagtggtaaaccccatattcaaactatacaccatcccaattttat

SEQ ID NO: 211069 - DNA, 402 bp, Glycine max
  unsure (1)..(402): unsure at all n locations
aaatcgctagagatgctgctatcactttcngttatacangtgaaccctcttagagtaatggatgagtttatcgcatctggcgttagaatgaacatgtgtaaagatccttatgggatcaaattggggtttattctggtatgtttattgaatggaattcttcatgtatgattataatttgcagattcttatattgagatcataaaattatgattaaaattgtgtgtaagtgataaattgaatatgtgatgaattgtgagataacatgtggctttgagatcataacattgttattgagattgggtatatgtgcaaagttgaacatgtgttaatttgtgagatacacgtatacatgtgatgatggattgtgatattatgagaatgtaaatngcggatatgaaatat

SEQ ID NO: 211070 - DNA, 294 bp, Glycine max
atcttctttatcatcttttgatacaaattctgtagtatacatgaaacgcataattgttgaactaaaaactctctcttattgaatagagagctattatcaatgaatttgtgatttataaatacatcaataactgttatgtcatcgtggaattgtctcctcactccttgttcaatcttttgaaagtttgagactctcatatctctcttactatacgctactcgaatcgccgctttcacaatccgcctatcatatccctgttacatgaattacaaaacattaatatttatatatgac

SEQ ID NO: 211071 - DNA, 373 bp, Glycine max
  unsure (1)..(373): unsure at all n locations
tatctccnctttttgatgatgacaatccctgatacaagacagttattacaagatgatagcacattcacacaacccctactccccctatcttttggcatgtatgcctaactctacttaatgaataaattccaatggataatttatttataacccaagttctctcccactttggcagcataaaaaagatctaagcagcaatatcaatatccaaacatagccaaacaataaaccaatatatattcatacattgtcataaccaaccaaatcataagcaagaaatataatatatgtgcaagattacgattactcaacactatattcgctatacacgacgataaaccaaagtacttataatacttattactaatatact

SEQ ID NO: 211072 - DNA, 386 bp, Glycine max
cgaagtgagaaagtgtggaagagtcagtcttccttcttttttttttgaccacatagtggtaacctcgagatatgtcgcgggggtcaagagaccttgtggacgtcaagtggggtgctatttcccaaaacgaagcttgaccaatcccggcccaacccgggcatattcagtcagtgagaacctgtgacgtacctaaacatgcgagctcctggcagtcaaccgattaaagaacaaagaccacaaatcatggatgcttgtgtggtggctggccagctatggattttgagtgatatatggaatatggcctctggtaatcgattaccaagggtgtgtaatcgattacaagggctaaaaatgaagacaggaaagtaatattgtctctggtaatc

SEQ ID NO: 211073 - DNA, 309 bp, Glycine max
  unsure (1)..(309): unsure at all n locations
ttctgcatgtctagagagttctagagagagaaatgttcacgtgctttagagcttgacagaaancgcngcgggaagatctgcagagaccacatctggaataagaagtcgtcccgagagcttgagatgaatttgtgagtgattgtgagggcctagaagtggatgagacatccccactacttgtatttatgcaatctttcatctttctcttctcttttgtgtaaaagaagcttcccagttatggaaagctaaatcttctgttggatcttccttgtatgtacttgatgtaaatatttttttatctatttaatg

SEQ ID NO: 211074 - DNA, 316 bp, Glycine max
gctctgatcttcgttcgtctgaacctctaatcagcactcagttagaaactctcattcgtaatcttcacgcctatttgcttcggtggaaaaaaaaaatgcttagtttattaataaaaataatttaagttttagatgctccgtacaaagctacggaggaaaagaggaaactgagaggagcttgtaaatttactttatgtgaaactttgctataagagacgacgtgagatgaaatgaatgatattgcagagtaattagcgatgggtcttcttacattgatttagcacgttcatccttggtttctttttttttgagaaaa

SEQ ID NO: 211075 - DNA, 353 bp, Glycine max
  unsure (1)..(353): unsure at all n locations
agctagagcttanctacacacacccctctcataactaagctcacctccttgagaagcttccttaagaagattcctaaagaagctggagcttaactacacatacctctctaatagctaagctcacctccttgagatgagaagctagagcttagctacacaccccctataatagcttagctcacccccatgacaaataacatgaaaatacaaaaataaaagtccttaatacaaagactacttataatgccccataatacaaggctgaaaccctatactactagaatggccaatatacattgcccagacgaaggaaatacctattctaatatttacaaagataagcgggctcatac

SEQ ID NO: 211076 - DNA, 421 bp, Glycine max
  unsure (1)..(421): unsure at all n locations
gcttacctccttgagatgagaagctagagcttatctacacactttctatttatctaatctcaccccatgacaaataacatgaaaatacaaaataaatagtccttactacaaagactactcaatagagtggccaaaatacaaggcccatacaaaggaaatacctattataatatttacaaaaataatcgggctcatacttatcccatgtgatgcaatcttaccccgcaagggcattggatagaaaattccaagtagattgcgccatatatgcaagataaggccctatggttcttatgaaccttanggtatatttcgggcccatgggctaattatgagcacaagtatctctgtaaatattagattaaggcttcattatttttgggcctgtatttatggctccataatgtaagtagggtaccct

SEQ ID NO: 211077 - DNA, 213 bp, Glycine max
ttcttctgggaaagttccgaaaaaaaggtcttccggaatgtttccggaaaatagcgtcttccagaattagattttactgtatggcagtttcgcacttcactggttgctcgatgccccatcaactttgtttggtgcacgtatcaactacctgttatatttccttcttccagcactcgccgactacatcgtatgagatcttgtaattgcccacaa

SEQ ID NO: 211078 - DNA, 347 bp, Glycine max
  unsure (1)..(347): unsure at all n locations
tctttgagaaaacttccttgagaagctagagcttttcttctctccccatctaaaaactaagctcacctgcttgagaagcttcctttagaagctagagcttagctacacacacccttctaataactaagctcacctccttgagaagagaatctagagcttagctacatacccctataatagctaagctcacctgcatgacaaaatacatgaaaatacaaaaaaaaaagtccctactacaaagactactcaaaatgccctgaaatacatggctaaaaccctatactactagaatgtgcaatatacaaggcccaaacgaagganaaaacctattctaatatttacaaaga

SEQ ID NO: 211079 - DNA, 232 bp, Glycine max
  unsure (1)..(232): unsure at all n locations
catgaaataaccttgttgaaagcttttggttgtgctgntgcaataacaaatagaatatttgagtatggctctgacctacaaaagaanaatcaaccacatgctaattaatacttttatgataatttattaacgggttaatttgttaatgataataacactatatatagtgaatattctgtaaaatcaagtttctaaaaaataaggtgaagtactatctagatacttggggtac

SEQ ID NO: 211080 - DNA, 361 bp, Glycine max
  unsure (1)..(361): unsure at all n locations
tgtaatcgattacacacatactgtaatcaattactttatgttattntcagaanatattctcaacagtcacatcttgttatttgattcttaaatggccatcaaaggcttatatatatgtgacttgagacacgaatttaagaagagtttttcagaacaaaaaggtcttatcctcttaaaaagaaaaattgttttatcctcttacaaattccttggccaaaacacttgtgattcaacaaggaattatttgagtgcttaaattgttcaatctatctctttcaagagagattacttcttctcttcttctttattctgaaaaaggattaagagaccgagggtctcttggtgtaaagaaatctgaaca

SEQ ID NO: 211081 - DNA, 422 bp, Glycine max
  unsure (1)..(422): unsure at all n locations
ttatgctcaatggctccgatcacatctatgccctatttttttttacaaccnatgtgctaccaagacgttcaaaggtatgggtggagcattaacattattagcgaatgcttggcacttatggcatttcttcacatggatgcaacaatcactctccatagtgagccagtaataccttgctctcagaatttttcgggccatggcatgtccattagcatgcgttccaaatgatccctcatgtacctccaccagcatttgctcagcctctctggcatccacacatcgaagcagtaccatgtcatggttcctcttgtataggatattcccactcaagaagaaaccgggcgccaactgtcgcaacattcatttgtcgntatcagaagtctgctgcgggtattccttatctttgatgatcatttgatatc

SEQ ID NO: 211082 - DNA, 363 bp, Glycine max
  unsure (1)..(363): unsure at all n locations
gggagaggatgcttcaatggatgacaagaaagacggagtgtcntacggacgggggancaccacattgaagaaagataagggagagaagntgaactttgagttgtgtctcacaagactctcattcatcaaagttacaacaagtggtacacatgcgtctatttatagactaaggagctttcttgagaagctctcttgagaaaacttccttgagaagcttctttgagaaaacttccttgataagctaaagcttatctagacacacctctctcataactaatctcaccatcttgagaagcttgcttaagaagaatcctaaagaagctagagcttagctacacatacccttctaatagctaagctcac

SEQ ID NO: 211083 - DNA, 312 bp, Glycine max
  unsure (1)..(312): unsure at all n locations
tgccgccacggagttttccgacttttctcttgtgtggnggttcaagctacaaaaggagagagcaagaaatgaatagccaatggttgattcatggacagagatgaaaaatatcatgatgaagccgtatgtgccggctatttactcaaaggacttgaaattcaagctccaaaaacttacccaagggcacaagggggttgaggagtatttcaaggaaatggatgtgctcatgattcaagcaaatattgaagaagatgaggaggtaactatggctcgatttcttaatggtttgactaatgatatccgtgatattgt

SEQ ID NO: 211084 - DNA, 426 bp, Glycine max
  unsure (1)..(426): unsure at all n locations
tgtggtagtttactatacagagtttgtgagttaaggaggatctcgagaaacgccattgtgatgaggagttgactgactctgtggatggcaatattgatgttgccattgtaaaataattctatgcaaacctctatgacctcgatgacaaatcacctaagcaggtgagggtgagaggtcatctgattaagtttgatgaggatactcttaacacatttttgaagacccgcgttgttgtggaagagggggaaacactntgtgcatagtccatatttgcactcctgaggcctgatcctcaggagttggctgctaagctttgtatccctgggaggggattcgagcttaacgctgatgggcaacctttgataatctgaagaagaacattacaactttgtcagacttgagcatatttcctttctacctatccca

SEQ ID NO: 211085 - DNA, 309 bp, Glycine max
atagaagcatgtgtaacacttgttgtaactttgatgaatgagaatcttgtgagacacaactcaaagttcaacttctctccctttttcttccttcaatttcgtgctccccctccctctttctctccctctttcttttcctccatggaagcatcctctccaagcttcttatccaaggctcatcttggtggtgaagctccttcttccatggcttattccttaatggatggcgcctcctttcacctcctttcctttgtcttccgctgcatctccatggtggaaaatcaccattaaaggaccccattgaagctc

SEQ ID NO: 211086 - DNA, 442 bp, Glycine max
  unsure (1)..(442): unsure at all n locations
caactgatccttggggttagatattttgactntngagtccactggtaatctttaattaatcattcctagaatggatcttatcctttgacttaaattgatagatacgtaatcattatggcatggacttaaggcatagaacatcttatgaccttgataatagactttagttaatgttgggaattagtaattaatatggaaaggaatttcattaggactatgattgaggaaaaattgatactagtgaatcataacccatgatcattcttatcatcacttaaatctctgtctatattcatttaactaatttattataagaactagaactacaaaagtatttcatacctctttgtaaatcaattatattgttaagttaataagcttactaatggggaatacaactggtcctttgtgtatatattcggactcttgatccactgtacta

SEQ ID NO: 211087 - DNA, 476 bp, Glycine max
aaaaaattgctcctgcatacggacactttatactaagcttctacgaataagttgatcggcaaagagcttacggatctacttatccgtaagaagcttgtgaaccaagttgatctatgacgaaacctgatttaaatgagtggacaatgagtggatttgtctccaccattacaaaatggatgtgtttggaaattggtgcatgcatatgatgtctacccgacatatttatgacatagtggatctgtttgaaatactactaatcgatatccttttggaaaaatatggaattggtggaatcaaataaggattttaactccactactttgtagtgtattggtctctcaacaaatcgaagaatctctaatgccacgataaccaacttttcatgtggcatgctaagcaaaaatttaaagacaggatcaatccatatatgatatggaatacgaagagcaaatgatactacacagctagctttgagt

SEQ ID NO: 211088 - DNA, 422 bp, Glycine max
ctcagctttatgaagtcagattgatgtccgattctttcattaactatgcttttgtgtcttcattttacttttcagcacatgtatgatagcgtacccccttagataaacgacaatattaatatttctccacaaattatcaagcatagtagagcattgaaaattcctcatcaatacttgtctacttcatttttacttttgtttttaaaaagaaaaaattgacctctctatatagaagaatgtcaatttagtttgttcatacagttattttcaactacaaccttatatgaaatttcaatttaaattactcataaaggaaagcttcgagcatgggtttggcaaatatgtattccctcccaccaagcatgtggtagctttgtatatttccagaatatgcatctgtcaaatgaaatctgtatagtatg

SEQ ID NO: 211089 - DNA, 383 bp, Glycine max
  unsure (1)..(383): unsure at all n locations
ctcagcttgcaccacggagttatccgactatggtcttgtgttgtgttatatgctacaatacgagagagcaagatttgaatatcctatggttgatacatggtcggagatgaaaaagatcatgaggaagcggtttgtgccggcttagtactcaattgacttgaaattcaagctccaaatactaacccatggcaacaaggtggttgaggagtatttcaaggaaatggatgtgctcatgattcaagcanatattgaagaagatgatgaggtaactatggctcgatttcttaatgtgttgactaatgatatccgtgatattgtcgagctgcaggagtttgttgaaatggatgatttgcttcacaaagcaatccaagtggagcaacaat

SEQ ID NO: 211090 - DNA, 226 bp, Glycine max
gggagtacgtgagctgatatggatgtgtgcaacaagggatggtgggtttatgcgcgcattgtggatgtggaaaacttgttgtgcaccatcgtccgaccgtcacctagttccacatgtgatgggtaccccataatcctacaagcttgagatgatgaagtgttgaacggtgaaacttcctgctgttatatgtgaccacacagtggtacctggagatatgtagcggggg

SEQ ID NO: 211091 - DNA, 336 bp, Glycine max
  unsure (1)..(336): unsure at all n locations
actcgctgaatgaaaagcatgcaccagcttggttctttttctncnaaagaagcccattgaggaattacatgacttgattgaaaataaacatcgttggcattcatttcttctgtttaaacgtaaacacacatttattgccctggttcccatccctctcctttatcccggttccatcgttgtatatatcacctgatgagtgatatgacctgaatgttccctccagaaaaaagcgatagaatcttatatctttttgaatagttattcttccattaataaaagtcacggattgactggctgccacaattccaggttgggattaaactggtggacacattt

SEQ ID NO: 211092 - DNA, 347 bp, Glycine max
  unsure (1)..(347): unsure at all n locations
tatntattacttctaccgagctaataagaataccttatgtgtattatttaaatcgagactgaagtacggccataggtatacaagtgggccgattgtatggtccaaaaacaatggtgaacttgtcttcaaacagcacattaacctaaataaacagaattgaactgggtgttatattttgattcaaccaccacacgctcacacaaacaaaaatattcaaagtcggaaaatcgtggtaagattactacgactattattattagccatattatcagattcatatttgtaaatataaacaaacactgattcaacaagaaaaagattgatttatacaacaaatggaagtgatt

SEQ ID NO: 211093 - DNA, 233 bp, Glycine max
agatatgtctcgggggccacgagaccttggggacgtctggtgtggtgctattgcccataaccaatcttgaccaatcccgacccaacccgggcatattaagtcagtgagaacctgtgatgcacctaaacaggagagctcctggcagtcaacacataaaaggaacaaagaccacaattcatggaggcttgtgtggtggctggccagctgtgaatcttgtgcgatatatgggttat

SEQ ID NO: 211094 - DNA, 396 bp, Glycine max
tctatgggaactgacagaagttaatcataagttttctgtgaggactttttgccgaaagaagtgacaatcaatctctgtttggtcaagaaaggtggggggaatcaaaagtgggcatgaaaggctgaaccctatgtgggtatggagggaaagtgatatgtgcatgagcaattggtggtgactggtgacaaagatgagttctacaggaaagattcaattggtagacaattagcagaagaaatgatagggcaggtcttgaataaagtggcaccaattgagacataatagtgctagagatataagaataaagccaataaccttttggagtggaaaaccaagaataaaattggagattgaactaactgctttccaacgtaatatgacatactgtgcacaaac

SEQ ID NO: 211095 - DNA, 439 bp, Glycine max
tgtgcaatttcgagcttagtaagctcgtgtcttgtgatttttcatgaactaatacccttgtatggagtagtatttgccatgaagcatctcataatattgactgtgggcattgcgaaattgaatgatcctccacgatgttgcatgatctgtcaagttgtctttagatacttgccattaaaatatgcaagtgaaattcatgtttctatattatacagtatacaatcttttatcaattcttatgtgagcaacaactatctctgattcaataatgccttgttgtctataatatgatgttttattgagaaacttatattgagttgccctttgataattttgatctgctgaagtcctacccccaaatgtagatattgagacctctgaatgttattgtaaatttcaaacaaattgttgcgtgctgttgttgcaggctattcttatg

SEQ ID NO: 211096 - DNA, 417 bp, Glycine max
acctccttcttcactacatcaagattctccggggtgagacgtctttgtggctctcttactggcttagccccatctctaaattattcgaagcacacatgtggatgggatataccaacaatgtctgccagggtccaacctatagccttattatgcttcttgataactgattacaacttctcctcttgctcatcaacaagggaggcagatataattactggaagacttttgctatcatccaagttagcatatggtagattcgatggcagacgcttcaattctggagtggatggctggatagtggtataaagagatggtatctcagcctgtacctcatatagaaagtataggtatgtgcacttcctgaacatggtgtgtcatccgacgcataaattcatgtgaagatggaaacatcagcgg

SEQ ID NO: 211097 - DNA, 387 bp, Glycine max
  unsure (1)..(387): unsure at all n locations
cctcttttctatttcntatgataaggtgtaaagaaagtgatattttatcctacaatattaaggggttggcaaattagataagtttcagcatatgaggaagtggatatcgaaacaccatctagatatcagactcatataagttgtcactctaacaagacattatgtaagcttctccttaaaagataatggatttatggatgacatgtttgggagactacaagtgctcctaactgagcttaatgctctgggttacacctacaccaaagctcagataaatctaaaagtgttgtatagtttttccaatgtgtgggaaccatagacaataaccattctgaaggctatagactcaaaagactcgtgtaagatgaacgggtatggattttcatt

SEQ ID NO: 211098 - DNA, 226 bp, Glycine max
attatccgtgttctctatttatgcatacctattggggctaatccttcaagccaattggtgtgggagtctctcatcactaaattcaagtctaaattaccatatgggctcagagagatatatccatggctgggaaatcacccttataactctgcctcatgctttcccatttatctactctctttttaactacctaaagattccaaagctgtatccctcaaagatttct

SEQ ID NO: 211099 - DNA, 394 bp, Glycine max
actgtgaaatgtctctcaatcaagttcctgtgaaaagaaagatagcttttggtgtgataaaaatactaagaatatgttgaaagtgtgcatagaagacgtgaatgttggaaataaacctcacaaccacttcactaagcttggttgggcaaatattgcataatagttcaataagacaacaaatgtgagatatgaatataagcaattcagaaataggttggattctttgaaaaaggaatggcaattatgggccaagcttattgagaaggacacaggtcttggctgggatggggagaagaaaaccatcgcagctagtgatgaatggtgggaagccaaaattcaggtatgtgttattcaacgataaccattgcagacttctttggtcttttgtttttat

SEQ ID NO: 211100 - DNA, 350 bp, Glycine max
  unsure (1)..(350): unsure at all n locations
tttacggtactattaatctaagctatctacacaccnctctataacaagctacctttctttaagcttnctgaaaagatcctaaagaactagagcttaactcacacacctcttgagatgagaagcagaacttaatacacaccccctatatagctatctcaccccatgacaaatcatgatatacaaaatagccctatactagaccctcaaaacctcgcatacaagtatacctatctataaatgacaaatacatggctaacgaagaaaaaacatatttatattacaagatagcagtatacatagcatgggctaaaatcctaagtatgaaactaggctcctggatttgccattat

SEQ ID NO: 211101 - DNA, 425 bp, Glycine max
tgatatgtgaacattgaacactaagcatattcccaagatgttttccgttcatattatcaaatattacatcatctcattaagttagttctttataatacatgacatagtatacggactaagatatggttcatgccagaacaataatcaagcattgtccatgctttcttaagttaattaaattaaattattcttcccgcggccatcaccaagttgtaatattccatattacctactatagtaaccactccacttgctctagttattatatatagcgcacacacacacaaatgcttataattcaagcatagcatagatgggaactgaacttataaccgattccactgactatataaccgagctttttcaccaacaatagcagtagagaatgtgtctatggctatgcaaccttcatggatgatcaacat

SEQ ID NO: 211102 - DNA, 432 bp, Glycine max
tctcagcttgaaaagttttttggaaactgtggctttacatgccttactcccttgagtggcatttgtattggttgttatctgtgctgatgcatcttaatacatttgatatatgttttgcattgtgcattatcatattgcgtgtgaagaaaattttctaagttaaataaatttctttagaggcaaaaactctctatgttaatcgattgcaacctcattgttatcgattacaacaaattgtttgaagcttgtgaattaagtctcgtatcggtttaatcgattatcgatatctcataattgattacactgctgtttgtacaatgattgattattcaggagtctccctttaatcgataccaagtggattaatcgatacttctcttcgtcatgtgtcagagtgaaaagacacttaatcgatacataggcatctactca

SEQ ID NO: 211103 - DNA, 423 bp, Glycine max
  unsure (1)..(423): unsure at all n locations
cacggagttntccgactatgctcttgtgttgtgtttctangctcataaggagagagcaagaattgtatatgccaatggttgatacatggacggagatgataaagatcatgacgaagcgatatgtgtcggctagttactcaatggacttgaaattcaagctccaataaataacccaaggcaacaatggggttgaggagtatttcaaggaaatggatgtgctcatgattcatgcgaagattgaagaatatgaggaggtaactatggctcgatttcttaatggtttgactaatgatatccgtgatattggttagctacaagagtttgttgaaatggatgatatgcttcacaaagcaatgcaagtagagcaataattaaaaggaaatgagtggctagaggagtttaaccactttgttctttatttgg

SEQ ID NO: 211104 - DNA, 326 bp, Glycine max
  unsure (1)..(326): unsure at all n locations
ttttcttttatcattttaatcaaantagcatggtcaactgcgataataacctcacaccgcctcttgttttgttgtgttcacaagtttacatagtgttgtttatgagacttttactctattntcttggctcattgttctaatgaaacactgcatgcccaaacgcctcacttgaagaattggtagattttatatgtgttgctcaaatggcaaaagctgaagatgctcttctgcctcctgataaaaaggtagcaatgttaccatattattaatctgtggatgaacaaaatagaaaattattgcatgtaattttctgtaaattttccttc

SEQ ID NO: 211105 - DNA, 435 bp, Glycine max
  unsure (1)..(435): unsure at all n locations
cttgatggtgtcgagaagaaatcacatgtttgtcatcatcttataaggngagaatatgaatgtatgtatacatgatcttgatgatgtcaaaagaagaatcaaacaaggctcatttgcttcaagattaatacaagattgtttcaataaacaaagcctcgattcaagatttcttcaagatcaaggcttgcctcaaaacgaaaggtttcaagtcatccaaggcacatgtaatcgattaccaatacatgtaatcgattaccaaggcacatgtaatcgattaccaatacaagtaattgattaccaatggttcgaaagtgtgtaatcgattacacatcatatgtaatcgattaccagagactctaaacgttgggaattcaaatcttaaatgaagaagcacaactggttaagataaataactatgtaatcgattacactaat

SEQ ID NO: 211106 - DNA, 466 bp, Glycine max
  unsure (1)..(466): unsure at all n locations
tctaaatgataaggtgagaatgacttctcttactttcaagtctattgctcttgccatgccatcaaattactaatcccctttgctggtaacctgtataaaattaaattcatctgtgttatgataatttccacattntatgtccttgttatgcattttacaaatataaaccttaatacccaaaataatacagtggctccctgaagctagcttattcataagatgatatcttagtttcttccagatataacagttcaccctgattatcaactacatagccaaaaaagggttaaactgcaaaaatggaatacatagaaaactagtaacacaaaccanatgttctgcttcactctaattaagaaggcatctttctgacatgcatgctcgagaatctggggnggatgcactattattatggactatcaagaataattaattaattaaatgtaaaattaaaaaaataacatat

SEQ ID NO: 211107 - DNA, 456 bp, Glycine max
tctatgttagtgtaccatatgattgttgccccagcctaactatcttgaaagaaatgcatcaataacttctcgtccctggaatatgcacccatctttcgacagtacatttataggtgattcttatgacaattcgtccctttgtacctatcatagtcaggtaccttaaacttcagaaggatgacaacatccagcaccaggcacaggtcggtcatgtctatgaacagataatcgccgaatccttcaacagccctcaatctctcttcgatgagattgagtttcccctttccttccgctgccaggggcggtcctcccacggacagaaacattggttgcattgtgtggtttcgaggctctctcgtgatgttgggttgaggtaatgcgttgggcaccggccactcagcggaaacggggagtatgagtcgacgtctctctgagcgtgctctcgaggattctcgt

SEQ ID NO: 211108 - DNA, 401 bp, Glycine max
tgccccacattatttccatgacacaaatgtaaagatgatgatttggaaattttatgcaaaactggtcatgcatgcacctatgcggacactcaagtgtcaaatttttatggtcatgtgatgctagggctcatgattcatttcctctattttaaatcaacctaatggttccaaaatatgttcttttatcaatttgtacattcatccgagtccattgtaggtactcgggaataattcacagcattcacccttcatgtgtacacacatctttttccaaaaactatctatgatcagcgaatttttctctaaagaaaagatggaagtcatctcttttcacaagcatgttgtgttttaactagacaacttattattccttttttttcttactttgtttatcaatatca

SEQ ID NO: 211109 - DNA, 483 bp, Glycine max
actcagctttcaaaataacaacagatgataagcactaaggaaaaaattcaccttgaatttatatgtggttacttaactcgagctacgtttggtacctatacttgtaaactttccaccatggtcaactactctggagttatctttcttttttgaagcctcctacaattgttgtattctttctttaaccatgtcattctttctttgtcaaaaacttcataagctctgtcaactgagatatttgttttctcgaagtctccatacgctcctataaccgtgatattctttctttcatgaagcctccacaagttcttacaatcgtgatattctgtctttcctatagccttaacatgctcttactttatgatattcctcttttttgaatcctccatacgctcttctcacagatcatttactatatacatataaactattgatgtgtccatgtacttcatagcaatagtacttgatacactctaattctct

SEQ ID NO: 211110 - DNA, 365 bp, Glycine max
ttatgaccactaaaattttgtagtctcctaacacttctaatattttaacataaaataactgttgataacttattgatgtttttcaaactggtctataagaatgaaatgtatagtggaatgatagataatgtaaaatcaaatgtcattaactagacgcgggcttggacttgaaagttagcaaacagattattaattataaaaaaaggaacaattatgactataaggtgacatgtataatataaataaaaggcacacaaatgaatgaaaatatgacagacactctacaatgtttcaattgtatgcaaatacaatattttttattttaaacaattgtctactactctgttatgatccgttgcaaaaaa

SEQ ID NO: 211111 - DNA, 237 bp, Glycine max
  unsure (1)..(237): unsure at all n locations
catggcgggcataatgtaattctttatctntaaccctacaactgggcctaggctttataagttttctccgcgttaatgacgtatgttcttgctatcgagatatataatataagatctttccttcatctgttcttgcaccttcacccattctcattcatctgcatgtatatttctgttgcgatttatggtataaatccgaccatgagtcctgcgaatgactaataccgatggccctga

SEQ ID NO: 211112 - DNA, 356 bp, Glycine max
actaagctgaatgagaaggtgaagggaacttctgctttgtgtgacctttagggacctgagaatgtccggggtatgaaccttgggacgcagtgggggctattgccaaacaacttgacatcccaccacccggcatgtcggcatgagaaccggatgacctaacagcgactctgcagtcacgataaagaaacagaccaaacaggggctgggggtggcacttaatttggtattgggatgggctcggtatcatacaggggagaatcatcaagctaaatgagcagagctaaggcctgtatcatacaagggtatatacagctgaacaacagactagaccttgtacatacaccggatcatccaag

SEQ ID NO: 211113 - DNA, 342 bp, Glycine max
  unsure (1)..(342): unsure at all n locations
cgccaagactacgcacacgtcctcttgtgtcaggttctctgtctttngaatatatatcatgcgtccaatcaggagattcgtgagcgcttcgcaaatattgtgaaccctctgcgtcaaccatcttctttcttaggtcatcctacataaatacacgctataaatgattatcatacatcaatatcccgaatacttcaatatcactaaacaaaactcatctccacattagttactccccctcaccccataaccttctatgagaaaattgagcgaaacagagaagaggaactgaaataaaaagtaaaattcttagattacaatagcagcgctttcagtaacaatgct

SEQ ID NO: 211114 - DNA, 298 bp, Glycine max
ctctcatgaagctacccagtctataaatagaagcatgtgtaacacttggggcacctttgatgaatgaaagtctcgtgaaacacatctcaaagttcaactgctctccctttttcttcttcaatttcgtgcacccacctctctctgtttctacctctttcttttctccattgaacatactctccaagcttcttaacaaagctcatcttggtggtgaaactcctcttccatgcttatccttaaggatggccctcctctacctcttttctttgctccgctgatcccatggggaaaacaccat

SEQ ID NO: 211115 - DNA, 402 bp, Glycine max
  unsure (1)..(402): unsure at all n locations
tgtatattgtcttattaaaacatgaccactttcatattctttccttgcattggcataagggacaattactgtcaatgcttttggagcatctataacttgttcaactatantttgtgcaacatttcggttgataagctgcatcaaatctctctttttcctctgtattctttcaacacgaaagtattttttggttttcaatcgcttggcaactttagtttgtatctctcctttgacaatcttcttacgtatcgcatccagagaagcccccttctcaagctcttctaacaattcttttcttgcttcctcatattccatctaattcaattaagcagtgagtgccaacaagtatcgttagagaaaatgaaatatgattgacaatctaagtaattaatacttaatact

SEQ ID NO: 211116 - DNA, 217 bp, Glycine max
taattaataaaaaggggctgaattaattattaatgtgtcttgactaattaagaaattattccctcttaatgttactatattcaactaggcttttactactaagtttagaaagtaagaacagaaacaattacttatccaaaagtaaaagcgtgaattataagtacacaacggaaattaaagagtgttgggaagaagatgacacacaagatttatactg

SEQ ID NO: 211117 - DNA, 172 bp, Glycine max
tcataaaccatattaatgcgctcgaaaagacatttgagggacagcgagtgactgcaccatcctatgttgatgtgagcctgacatgtcaacaataaattaggatggcgtggcacgcacgtatctatggactatggtcatgccatttacatctatatgataacgatcattatgc

SEQ ID NO: 211118 - DNA, 393 bp, Glycine max
tttatactaagctgaacctgaatctgattctgattctgaaatcaattttctcttgtaccttgaagtgttctttgagatcatcatctctgttatcatgaagtattcttgacctttgagctctttgtcatcacctttgttatcatcaaaacttctttgaatcaatcttgattcatcatgaagctcgcttctacatggtgtacatttcttgcttactttcatagcttaatttctttaccttccattgtcaaaccgcctatatagctcgccttttaccaattaatttgtaccttatctttcacacctcttttagtggttattttatctaagttcaaccataatgtcttttaccctttgttttctagccccccacaagaaataaccacaacttttaaa

SEQ ID NO: 211119 - DNA, 429 bp, Glycine max
  unsure (1)..(429): unsure at all n locations
tctatanatgaatgagttaatacctgtctattcttttaaatatttattatagcatcttaacctcaaataaacatctattctcatcagcttctcatattttctgtaaaattatgtttagatcatatcattcattatattaatggtttcacaatttatgaccattttatactgtcataaatatgtttttaattgattttccttacaataatttgtgataatttaaaaccccatatgtgaaataatccaacaattcatattttattttattttttaaaatcatcaaatttatacaatattggtccaaatccagcaaatgtttcgaagttaaattgtcaaactatttctataaccaattaaaaatactattaatatttacaatggaacttgaataaaggactatttttttaaatgaggatctaacaattttta

SEQ ID NO: 211120 - DNA, 351 bp, Glycine max
ctacttatgtggcatggcgggcttacttcactctcttgtttcattcgcgagcttagactatcgcccttgcttcccgcgatgcttctctttacatctgcctgagtgggcttatatccttatacatacttcccacgatttcctttggcatttatcaagctaattatgccgccgttgtctttgcctaaacccatttcgggttcgtaacacgtacccaacatatactcggccatcattactgctgcatcggacatgcaagcctgcccatagaatgaatccacggaggaaatgcttaccacctcaaaagactggatagcggtttctaatgactcctctgctgcttcacataagcat

SEQ ID NO: 211121 - DNA, 235 bp, Glycine max
ggtaataatctctgccatcatacactatcatcattatcaaaattaatgattggctaactgatatggatgtggaagatatcccgtgctttggaaacactttacttggttcatgccaaatggctcttgtaaaagcatgctaaacagagcgctggtgtcggaccattggattgcttagtgggctgatagttctcatcacaatcttgatatgaactactcagaccactgtactatcatg

SEQ ID NO: 211122 - DNA, 248 bp, Glycine max
gatggtcctctgagatgggggataccctccaagacctttgacttccacctcaataagtgtaatctcaggaaatgagacatcctctgcaggctcgaatccttcagatgtattggcgttgcatagaaccactatggcattgttgtacaagtgatccacgtaactagatacaagcggaccctggccattgccactaatagtattattagataaagggctcactagcaaaattctgcacatcctacattgat

SEQ ID NO: 211123 - DNA, 403 bp, Glycine max
  unsure (1)..(403): unsure at all n locations
ttttctattagacgtgaataatgcatttctgcatggagaattgaatgaagaaggtacatgagtcttcctcaaggaatgttgtcagcctattccaatcaattatgcaaattgctgaattccatatatggcctgaaacaagctagtaggcagtggtttgcataattatcttcttttcttattcaacatggatatcatcaatctgcatcatatcattcattgatgtttaaattctttggttctctactacaacacctcttatttacgtggatgatattgttctagctggcaacatttattctgaaattaanttcattactagtcttctcgatgttgcttaagatcaaaatctatgcatcttaaaacttatggggttgaatatctcgcacaatctggcatatcctct

SEQ ID NO: 211124 - DNA, 387 bp, Glycine max
tgtacgtcacaagtcatttctacgtgcctgctatttcactctttcatacaaacaataacaaggtgaaaaaagataatattaaaagaagggttaactaaccttttaaataggatagtgacagaaaaactaacaaaacaagtatgtctaatatatattatagaaaaacgtacaaaaattataaataatataattttcaacttttaataaaattattcttattgtcaaattctgactagtattgttaagatactaattaacatttggtaaaaatataataaaaaaatagcgaccgatatgaaataccacatcccaactataatcagccccctaattgaattccggattctctatattattatttaacggtgggacccttattatagttta

SEQ ID NO: 211125 - DNA, 108 bp, Glycine max
gtttcaaaaaccggatggtatatacactacacgacatccgtgtttaagaaaaaaccgatgtcgtatagtacaaaatgtgtaataaacaaaaacttcaaaaacaacatc

SEQ ID NO: 211126 - DNA, 351 bp, Glycine max
  unsure (1)..(351): unsure at all n locations
gacactatgaaactcagcttaacattaatttaagcgttcctatatattacaggacgttttctgacatccgagtaaaaagntattggtgnttgaatgtgctcagagcttcggtattccatttcgagcatctcgatatattacgggactcaatcagacatccgagtaaaaaggtattgtcgtttgaatttgctcagagcttctacattaatttcgagcttttcgatatattaccggactcaatcatacatccgagttaaaagttattgtcgtttgaatttgctcagagcttctacattcaatttcgagcttttcgatatattacgggactcaatcagacatccgagttaaaag

SEQ ID NO: 211127 - DNA, 371 bp, Glycine max
ctcagctatgtgcaacatttaaatagaccttctctacctcatctatcaaatcaaccacagcataacaattatgacactctcaggggaccatccgttggtgggatgcgaccctcatttgaccactttgaggtacttggcacccaatcgtatgcaatttgtgaagttccatgacgtgccggaagtcgaaagatagcattgtagcacgatccgtgaagttccgcgacatgccggaaattaaaaggaagtgttagtgtgcaatccgtaaagtttcgtaacatttccggaaggcaaatgaatggatggttacgtaatccgtaagggttcgtaacattacggaaagaaaacaagccatcgtacaaaattcgtaaagt

SEQ ID NO: 211128 - DNA, 259 bp, Glycine max
tcatgaacgattgaaatctacaatgtcacactacgactgtttacacgtcaactgctcacgatcctctgaaagtttctggacgatggcaaatcaatacgggatgagaggatataagatcatttaccattcgcaaacaccgagaccacattctctaagatcctgctctccggcgtatataattattaccggtgaaatgagtggatctcctctcatatgtgagtgtatgagtgtgcgcgcatgcctgcgcatgtgcgcgtgt

SEQ ID NO: 211129 - DNA, 468 bp, Glycine max
  unsure (1)..(468): unsure at all n locations
tgttctaatcttcctcaattgttggaccaaaagccctatttttacgtttagataatgtgggtcttcacccacaagcttttcaaaggcaactngatacttcgtatcaacatctagcataaagaatgtagagtttcaccttgtcaggacatcaagacatgccatttttttacattcaataccagaaaatctatgcatttgtgaaacttagcatacctttggtgtgaagatcttacaaatctaacaacatttcaaacgcttgtaagggaattctattttccttttgaacaatcacttacaactagatttaatgcatgggcacaacatctaacatattgatactcaccatccataactacccttccgtcccccataatctgtaatctttgtttaaatgtacacacttacttatcaaaaatgattatcactgtattatgacatattccatgcctatcctttgactcttcattc

SEQ ID NO: 211130 - DNA, 457 bp, Glycine max
gcttacatgagttattcctaaactatgttaaataatgtatgatactattctaaatcttatggaccaatcataagatattttggtagttctcctaaacactctcataaatatttttaacataaaagaactttgaataacttattgatgtgtttccaaactgtcctaataagaatgaaattttatagtggaatgatagaaaatgttaaaatcaaattgtcattaactaagacgcgtggcttgagacttgagagtttatgcaaacagattattagattatcaagaaaaaggaaacaaatagatgacatagaaaggtgaaacatgttaaaataaataataaaaaggtgcaacacacaatgaaatgattaataatgacatgacactcttacaaatgttctccaaattgtatgcaacaattacaaatcatttgttttatatttcaaaacaatttgatcttaca

SEQ ID NO: 211131 - DNA, 311 bp, Glycine max
ttctaacttcttaagaaagcttctcaaggaagctacctcattgaagctcatagatccagcctccataaaagcttcacaagcaagcttacatcaattagtaatcaaagcacaagagcttcaagtatgtgctccttatacctccattaattgtcagctgtaccttttgctccattgttatttcttcattgtgtaccatgtatctcctcacatgtcttgtgctaaatattggtaacatgattctgtataattctcaccgattaaactgtttatagaagctagatttggatttctatgaatcaaatttcttggtc

SEQ ID NO: 211132 - DNA, 201 bp, Glycine max
aatactaactctcctgacatacaggcaagactactgagtcttttgttttcaagcttgacttcctatttatttgatgtctaccagaaaacggcaaccaatccaaaatgggtttactctcaagggaacggaagatgaaatggttatcacccgatggtgatgaagaaactctgctaagccaaattattgatgtgctaaaaaaaa

SEQ ID NO: 211133 - DNA, 411 bp, Glycine max
  unsure (1)..(411): unsure at all n locations
tataagaacaaantngcctaaatcatttccaaatatgcatgtgaattangaagcatgaacaagaattaagccaatgctattgtgcaagcaatcaatggggcataacacaccaaaagattatgatgatggatggctcanattctcacaaaggtaagcttatcactttcaaattgagctttcaaaactatcatgacatgtagaggaaaaacaaggatttcaaatcacacaatgtcaagagactnttattttcagaacaattaccanagcttgatttgtgagttgattntaaccttggtttcactttgattattagtcaattaattcaaggaaactttcaaagaanaacagctgattgaattttcttgattaatttattaattttttcaagatatttcgattattntattatta

SEQ ID NO: 211134 - DNA, 365 bp, Glycine max
gacactattaaactcagctgctcaccttgaaataaattatacctcttgtgctcgtttgagccggaagggcatgatatacaatggactcaacccttaagactgcttcgtgctacctacatgggaaatgaaaccttggttgactgggaatcctactataaaactatggaaaagttctgacaaaaagacatctcttaacaatgcatgtaatcataatagtatagtcctgcataacctgcttttgaaaatgtaggtcactctaacaaagatgctggcttgggtgctatttctacttatttcaagcgttgtgaaaacaaggggacgggggatagttaccacagttaaaatttcacgaaaagaccggaact

SEQ ID NO: 211135 - DNA, 317 bp, Glycine max
tcatagcggcttgtgttgattatcgacatatgaaatatgttatccagaaagcagctatgttgctttgctctttacttgttcccttctagccatgggaagatctctccattgacttcatcgtgggcctgccggtgtattacaggcacaccgccattctagtggttgtggactgtgttttgaaaggcatccatttgggaatgcttccaactcatcatactactcacactgtcgcgctcctctttatggaaattgtcaggaaacaccacgggatgcccagaagcttggtttcgaattgcaaccctctgttcattattcgc

SEQ ID NO: 211136 - DNA, 365 bp, Glycine max
  unsure (1)..(365): unsure at all n locations
tcaagaatcaagttgcanagaatcaagattctagaacatttttgtttcaagattcaaaattcaagaacaattgagtttcaagattcaagattcaagaacaatcaagtttcaagaatcatgattcatgaacaatcaagatcaagattcatgaatcaagagaagactcaatcaagataagtactaaatttttttttcaaaacattgagtagcacaagaatgtttcacaaaatcttttaccaaagagttttactctttggtaatcgattaccagaagggtagtaccgattaccagtagccaacaatgtttgtcanactggattacatagttgtaattgattaccatgagcatttaaacgattaccaat

SEQ ID NO: 211137 - DNA, 392 bp, Glycine max
  unsure (1)..(392): unsure at all n locations
tcttatccaaggcaattcttggtggtgaagctccttcttccttggcttattccctagtggatggtgcctcccctctcctattctcctttgccttccgctgcatctacatggtgaaaaatcaccattgaaggaccacattgaagctcatagatccatcctccatagaagctccacaagcaagcttccatcatgaatgttccaagttagtgtaccatgtaacaactaccccagtaagactttcttggaaggaatgtatcaacaattcctcatcttttacgtatgcccccatcttccgataatacatctttagatggttcttgtggcangtagtccccttgtacttgtcaaagtccaacaccttgaactcgggaggggacatgatattgtgcact

SEQ ID NO: 211138 - DNA, 187 bp, Glycine max
agatataaactctcctccaatggttttctcttcacactcttcacaaaggatttctcctttcacaaagagctaatgcccgatctacagatgatatgggctccctctctcctatccttcttgcctttggtatatttaataaacccctctaactaactatactacttatcaatattctatctgttgtaac

SEQ ID NO: 211139 - DNA, 144 bp, Glycine max
tgtgatgtaacctaaacatggcgatgctccttgcatgtcaacatgattatatgaacaatagacgacaaagcaaggatgcttgtgtggtggctggccaactgtgaactttgaatgatatatgggatatggcctctggtaatcgat

SEQ ID NO: 211140 - DNA, 375 bp, Glycine max
tcctcacacggacccttcgttgttttgtctaatataggggatcaagacagaacccgtgcgtgatgcatatgcgatatgcacaacacgggagtgtacagtttgacaatattcacaaaatatattgtcacgcagcgtgttcgcttatgcatgacagtgtgaaaaaatgacagtgtgaaatggtacatgacacttatgcatgacagtgtgaaaaaatggcacgcagcgtgttcgcttcgtgcccctattcaaagggacctatatgggagagagctaataaggttcttagtgataatcaccaaggtggtcatatctcttttgatggactctaaaagtatcaatctcttcgaagaacatattgcagcagtatggactact

SEQ ID NO: 211141 - DNA, 226 bp, Glycine max
tcagtcgagatgttgaagtgtatgaatacgcttcatggaattgggatgaagaaatagaggagacaaacgattttatcccgctcaactacctcaggaagaagatgaggaagaaaacccatgtgaacagcttacctgcacccacaacaggatcaagaactatcatcaccagaatctactccaagacgagtaagatcattggtggacatatatgaaacctggaactggc

SEQ ID NO: 211142 - DNA, 444 bp, Glycine max
  unsure (1)..(444): unsure at all n locations
agatggtctcagcaaactccttatttccagattggaattctatcaatagacctccaatctttaatggagatggttaccactattggtaaacccgaatgcaaatttttattgaggcaatagacctaaatatttgggatgccattgaaatatggccttatatacccaccacagtagaaagagttacaatagatggtagttcatcaagtgaaagcataacaatagaaaaacctagagataaatggtctgaagaggatagaaaacgagtacaatacaacttataagccaaaaacataataacatctctgccttgtgaaaagatgaatatttcanggtttcaaatcgcaagagtgctaaggaaatgtgggacactcttcgattaacacatgaatgaaccacagatggtgaaagatctatgataaatgcactaactcatgagtatgatta

SEQ ID NO: 211143 - DNA, 258 bp, Glycine max
  unsure (1)..(258): unsure at all n locations
atacagangcgtctattacagtaccaactggcacttgacaaaaaaaataggttgataaaaaaatacaataaccgagtgccaacgtgatgataacaatttaattagaattatttactggcattcaataacaaggtgctatgtgtaggaaattaatcactattttattcaaaattatcaatgnttatcataattactataaaagttatatttatgatgatttctaattgattgatattataaattgtttaacacttaaat

SEQ ID NO: 211144 - DNA, 449 bp, Glycine max
  unsure (1)..(449): unsure at all n locations
tctaaatgataaagtgagaatgacttctcttactttcaagtgctattgctctgtccatgccatcaaattactaatccacttttgtgttagcctgtataatttatatttcatctgtgctatgatantttccacattttatgtccttgttatgcatttaacaaatataaacctaaatacccaaaataaaacagtggctccctgaagctagcttagtcataaaatgatatcttagtttcttccagatataacagttcaccctgataagcaacaacaaagccaaaaaagggttaaactcaaaaaatggaatacatagaaaactagtaacacaaaccatagtttctgcttcactttaattaagaaggcatctttctgacatgcatgctcgagaatcttggnggatgcacttatttattaaggtactatcaagaaataatntaattaattaaaat

SEQ ID NO: 211145 - DNA, 350 bp, Glycine max
  unsure (1)..(350): unsure at all n locations
tgatttatgagttgatttcagccttattttcactttggttttttttcaattcattcaaggaaacttccaaagaaaaacgtccgatttgattttttttattattttatccacagatattctgactattttattattattttgccctttgtggattaaaacgtggttacgacatgaatgatcggttggattttattntaacagagattaaacgatattacaactcanatgatcggtggaaattcattgtattatttattagacgagaaaacggcttaaataaatggttaaagcacgtcaaaagggggtacgaaaaataaacaaaataaaaataatagcatgcgaaacaagtg

SEQ ID NO: 211146 - DNA, 267 bp, Glycine max
  unsure (1)..(267): unsure at all n locations
aggtttaaccatagaataaattctctaactttagaaactttcttctaacttccacatggcgatgcatgatgcacctatgaaatgatgaagactaagatgcaacacatagtacaacaatcaatacaaatgccattcaagagaattgggcatgtaaaagacaacttactcgagctccaagggtaagtcttcatgttggtgccaccatctctaacatattctactaacggtggtgcagccactagagtatntattcttccttcactctct

SEQ ID NO: 211147 - DNA, 168 bp, Glycine max
  unsure (1)..(168): unsure at all n locations
agcttctcaaggaggtgagcttaattatgagatgtgtgtgtgtatctaanctctagcttctcaaggaagttctctcaaagaagcttctcaaggaagttttctcaagaaagcttctcaaagaagctacctattctataaatagaagcatgcgtaacactggttgtaact

SEQ ID NO: 211148 - DNA, 227 bp, Glycine max
  unsure (1)..(227): unsure at all n locations
gcactaagatntctgattcaggatcctaatgtatcgagacattggttattgaacaatggaaactcccgaaaaagtaaaatcgtcattacttttcactcggatgtccgaatcaggcactttaaagatcgagacgctctaaaactgacaactgaagctctcgagatattagagtggtcattgctttacacatggaggtccgatacataaacactacatgatgagatgct

SEQ ID NO: 211149 - DNA, 454 bp, Glycine max
  unsure (1)..(454): unsure at all n locations
agctntagatagtgtataggtagagacagtctatctattatccttccgcttccgntagcaccacaatggtaagtttgtctaaatgactccttattgtcttcacactcaagagtctttagaggccaatatagtataacgtctgagtcttcattcctgtggttatagtaaagagatatttctcctatatgctatgtttaccttcccaccataatctttgctatcgaaattagaattaagtttggttgatgatacaaaaattgtggaggattgctacacttcgctgaagtataaatactttctgcttgacatatgacttttaataagaatatttcttttgagataattcattatctgaactggattccttgatgctatgtctntcacctggatggatggactattgacaaatgatcaagatggatacaacagatattgacaataaatctgtcatgat

SEQ ID NO: 211150 - DNA, 370 bp, Glycine max
  unsure (1)..(370): unsure at all n locations
tactcaacttgacagaggaagngtanaagggtgaaactgcctgctcttattctttgtacccagcagggcacctggagatatgtcgcggtggtcacgagaccctgtggacgtcaagtggtgcgctattgcccataaccaatcttgaccaatcccgacctaacccgggcatagtcagtcagtgagaacctgtgatgtacctaagcatgcgagctcctggccgcccacagataaaaggaacaaagaccacacagcaatgatgcttgcgtggtggctggccagctgagaactttgattcatatgtgtggtatggcctctggtaaatcaataccacaggatgggtgatccatcaccatgctcacatatgaagacc

SEQ ID NO: 211151 - DNA, 430 bp, Glycine max
agctctgagggcgcgtagcccaccatctatttatagtatagcactgataatgtgtctaccatcacgattatcgtctcccttctttgcacatgttctgtagttgcatcctatccggaaccatatcataatagtactgatactgcctaacgaaggcaaccattatctccttccaagtatggactcgggaaagttccaagttagtgtaccaggtaacagctaccccagtaagactttcttggaagatatgcattaccaatacatctttagatgggtcttgggacaagtagtccccttgtacttgtcaaagtccatcacctttgacttgggaggggtgatgatattatgtactatgaacaactcttctaggctagcaaaggcataatcttcacctacttcaatgagcctgagccatttctctagatgatccgcc

SEQ ID NO: 211152 - DNA, 449 bp, Glycine max
  unsure (1)..(449): unsure at all n locations
cttgcagataggtctctcccacagaaaggatcaatgtgggttcgttttatgctaatctgatcatcctactcagacgactgagaaaactggggccaataaaagaaggagaggatgaaggagaaacccatgctgggactaccattcctgtacagacaagtgttccaccaaccccacaatatctttactcaggcaataacaaactttgtgcttacccaccacccagttattcacaaagggcatccctaaatctaccacaaagtctgtctaccgcacttgctatgacgaacaccacctttagcacaaaccaatanacaccaaccaagacgtgaatttcgcagcgagaaagcctgtagaatccaccccaattgcagtgtcctatgctgactagctcacatatatactcgataatcaatgggagccataaccctaccaaagttcatcacctccat

SEQ ID NO: 211153 - DNA, 450 bp, Glycine max
  unsure (1)..(450): unsure at all n locations
agcttcacaaatccacaattgcgtannataggtctttctcacaaaaatgtccccagaggagttcgcaactgtcgcaacgtgcccttcgcgggcgagcgatggcgaggctcacgggtgcgctttccaaggaggaaagatgcgccgagtcgccaccaacatttatttgtggaaaacgttggaaaaaccgaatgccacccgtcaaaaataaaaattctaagttcgggagttgtatttacgcttgaggaaggtattagcacctcttacgtttgtctcgaaagacaacacacctatttttagaattgtggaattgtgttatcttaactcttatttctttttgtttttgaggtcgacaatagcggagctcttgctcctacgtactcttctttggagaggaaatcacacctacgtaattctttcgtatgtgtgaatcaagtgattcttttttacttg

SEQ ID NO: 211154 - DNA, 403 bp, Glycine max
tctgtatggcggtcagcagacgagcataaaccatagactcttgtgacagctacaaatttctgattcaaggccagctgggttaccaagttaaccaatgcatctagtttgccttcaagcttctttgtttcagatgaggcagatgagtttgtagctacctcatgctgggagttggaagccatcttctcaatcaagtttctggcttcagtaggagtcatgtctccaagggctccaccaccggcagcatctatcatacttctctccatattactgagtccttcataaaaatattggagaagaagctgctccgaaatctgatggtgagggcaactggcacatacgttttaaatctctccagtattatatatgctctctcactagagtgctatacctgagatatcttctg

SEQ ID NO: 211155 - DNA, 372 bp, Glycine max
gtcatagagattcacgcttgaaaggattgattgaatgaatgttaaaagtgttgaatgaattaattggatttaattgcaaaacaaagccttgctttatagactcttcgtgtctggtcaagaagatcatttagaagagttataactcttataaaaacttaacaccaatttgagaaagtcaaataccttttgaagagttacatcttttgatatatcaaaaacagtcactggtagtcgattaccaaagtagtgtaattgattacacaaagcttttaagtgaaaggatgtgactcttcacctttgaatttgaattcaacattcagggcactgaaatcgataccaaacatgtatcgatacagttttgaaataatggac

SEQ ID NO: 211156 - DNA, 278 bp, Glycine max
  unsure (1)..(278): unsure at all n locations
tcggagagctcctatagcattgccacatttctagtgctgaaaagatgttcatgacttntgtacttcacataggtgtaaggatgacactactatatcttttttccctacactataaccagtgtcttcgccataacttaattttaggaaaattgagggacaccctacaaaggatcaagccactacagcacttagcgggttatgcataatgaagtattggccgtggcccattaatgaagacatttcttccatagtggtcatcaagcctgccctgacttgct

SEQ ID NO: 211157 - DNA, 476 bp, Glycine max
  unsure (1)..(476): unsure at all n locations
tggtgaaagaagaagttgtgaaaccgacacatcacttatggtcagaggaaagaatagtgtatgtagtctgaatagacnatctaacatggactcacaagtctaaagctattagtaagcgaaagaaacaaaacagagcctagacgtggaagaaatgagtggtatgaacccaagtttcgagggggcttnntgtgggagtagcaataaccaagctctaaacttagaaggggccgagagggaacaaattgttcgccctcactcacggttcacttcttactcttttcttttcttttcaaaacacgaaaatggggttgtgtgtgttaccggtaagcagaccagatcgtcaagtattttaaattaaaatggagtgatccgagtattgaacacagggaacttgtggattagacaaagttttgttcaagaatcatgcatagtgtanacaaacattgatactcataaatagaaacagaaatgtaata

SEQ ID NO: 211158 - DNA, 486 bp, Glycine max
  unsure (1)..(486): unsure at all n locations
ctaagcttgaaagcattgattngatactgcttgcctcatcatgtggctcatgatggttacaaattaatgatcctttgctaccctgcaatgagacacacacagatacacaaacacacacacatagagacaaacacacgcagacacaaacacaaacacacacacagacataaagatacacacacgcacacacacagagtcattcacacataaagacacagacaaagacacaaacacactgagccacagacacacacaaagacacacacactgagtcataaacacacatacacaaacacacttacacacatggacagacacacacacacataatgagacaaacacacacacacacaaataaagagacaaccacaaacacacacactcacacacacacagataaagagacgaacacacacacacacacagtcacacacacataaagagactatacaacacacgaacacactgagccatagacacacacac

SEQ ID NO: 211159 - DNA, 459 bp, Glycine max
  unsure (1)..(459): unsure at all n locations
agcttctaaactgtatacaagaatgaagctctgataccatntggtagacaagtggcctcagatatcttaagaaggggggttgaattaagatatcgcaaactatttccccaattaaaaattctatttcaatttcaatgcaagttgcaagttaccttaaaaattaacttttaaataatgattcaaatagaacaatctgaatataaatataaatcaataataaataaacgagtttaagggaagagaaagtacaaactcagatttatactggttcggtcacacccttgtgcctacgtccagtccccaagcaactcgcttgagagttccactatcttgtaaaatccttttacaagttctgaacacacaaagacaatccttccttttgtgttagaattcttacaacaagagattctcggtctctcaatcccctttgagaaattagaaagaagagaagaataaatc

SEQ ID NO: 211160 - DNA, 481 bp, Glycine max
  unsure (1)..(481): unsure at all n locations
tactcagcttcagagaaaacatactgtgagagcgagagtgacacctattccgtgagcttgagtgagaccgagagtgatagtgtcgacactggtttcagtgccacgagagtgagaccgatagcgagagtgagaccaagaacgagagtgacactgagacctatacgatcgtgagtgagagtgagaccataagcgatagtgccgatagtggtttctgcgccgcaagagtgagagtgagagtgacaaagggttggaggttaccagaagcgtgagggagacgagtgagatgctataagtgcaaaaaatattataaataggataatacaacgtcctttttttttaaaccgatgttaacgtgagttggttaacatcaattttttgtaaaaatcgatggtaaataagtcatgttaacatcgacttttgaaaaacttatgtttaccaactcacttaacatcgggatttcataanatcgatataacgaatt

SEQ ID NO: 211161 - DNA, 366 bp, Glycine max
atcatcatcgacgatgtgctcgattgcaacgtccacattatctgtcatttgctccttatagcacctacctaaaatggagatccttatataagaatctgttatgcatacagattcacctcatgcctggacactctaaatacataagcggatgtcttcaattggttaagcaaggcaaacaaccacgattttaagtttttaactctaggaacacctatccaatctcgtgttatgctagtgcgatcctgtatctgcactgacagtaactacctaaagtcccatgcgttaataaactgatcacatgtttcacaatgccatcgtccagttgcattattagcacctctttgatacatagccatcctctatctg

SEQ ID NO: 211162 - DNA, 440 bp, Glycine max
  unsure (1)..(440): unsure at all n locations
ggatcttaagtcaccgcngctgcagcttggaaaggatataaaagcttgttgtggaacttgtttggtagattgtggtagcctgatttatctgtacagtacgccagaagtggctttcagtgttggcttggtcagcagatttatgagtgatccaagacaaccacacttgattgtagctaaaagaatcatgaggtatctgagagggacactcgaatatggcattttgtttcctcatcatactaagggagatgatagcctacaccttgtagcctactatgattctgacaggtgtggtgatctagtagacaaaaagagcatcgtgggataagttcacctgttggtagggtctcccatatcctagagttccaagaagcaaaaagtagtagcactggtcacttgtgaagccaaatacattgcagccttgtgcacctgctgtcaagctt

SEQ ID NO: 211163 - DNA, 469 bp, Glycine max
  unsure (1)..(469): unsure at all n locations
tanacggagaagaagagagcgcaagttaaatatggctcgtgttctaatatntttaaatgtaccttcaacatcaattntcaataaaaaaaaatttgatgntaacaaagcaatgtatatgttaacatcgattttattaaaaaaaccgttgttaacttatcatacgttaacatcggttatgcaaaaaaccgatgttaacgaacttacgttaacatcagttttttgtactctccccttcccttctcctttcactcatttactaccactagaccagccttaaggcaaattttagtatgctttaatttagacttaaagacttctttntattaaccgggagacaatcacaatggtagtcatgttggaatagatgtaattagaaaatataataataccaacaactaattggtgttgtcaattatgaaagcattcctactaatagtacctcctacgaacactacgtacaaaatggctt

SEQ ID NO: 211164 - DNA, 209 bp, Glycine max
agtgccttattaccatgtatcaaacgtacgtagactgtgtactcttcacagatggagcatgcatgatgacccttagcactgttactgatgagacttccatatgctggaaaggcattaatggtacaaagaagcattgaacgcatttgacaaggctccttacgaaacccatcaaccgctaaaacctcctcatccagaactcttctaggtct

SEQ ID NO: 211165 - DNA, 305 bp, Glycine max
ctgcagcttgggtggaacgctgacaaattttttttttgctccaaaaggtgagatgaaatccctagaattactaccaagctgcaactcggggtggagaccatgaacaaacgcatttatggggctccaaaaacggttgaagatggagaattacactaagcaatcactacccatggctccaaactcgtgggtggaggacgcatgatcgaaaacgcaattcatggtgcttccgaaaagggttgagaatggagaattacactatacgatcgctacgcatggctccaaactcgtgcgtggagggcgcatga

SEQ ID NO: 211166 - DNA, 313 bp, Glycine max
ttctgcagaatcttctggagggcccaagtgggcctaggtgctatttgcactcccatttttactaagcacacccccctgcctctttttggtgattcttttttcgtataggtaccgaaacatacgatattctgtaacgatacttagtttctttccgtaatgttacggaaccttgccgattacataatcatcccctttttgacttacagaatgataccgaacttcactaattgggcaacgatgccttcatttgatttccagtgtgtcacggaaccttacggaatgtgcatcaatattttctttttgtttctggcat

SEQ ID NO: 211167 - DNA, 259 bp, Glycine max
gtgcaagaaaggaccataagctctggcttggtctcttccttggaaattactggtggcattctatccatattcctatgaaaagctagccatgccaccctagtttcatagagtagagcataatcactccctcactaaaaggtgaataagtgggacctcacgaaaagttaacgaccataagcattgtcaaaataaatacaagtcagtcttctggataacctaaccaccactctttgtttaattgaaggtgagagactagttg

SEQ ID NO: 211168 - DNA, 303 bp, Glycine max
tgagctcattggaggggcaacaagggatgggggtttatgcgcgatttgggatgggaaaacttgttggcaccatcgccgaccgcacctataccacatgtgatggaccccatatcctacagcttgaatgaggaagtgtcaaggggaaacttctgttttattcgtgacacagagggtcctggaatatgtccggggtaggaaccttgggacttaggggggctttgccaaaccagctgaccatccgacccacccagctagtagcagtgagacctgtagtcctaacagcgactctggagcaacaataaa

SEQ ID NO: 211169 - DNA, 478 bp, Glycine max
  unsure (1)..(478): unsure at all n locations
agcttaacactaanatccttcataccatctagtgataagagagatgaagaaagtgcccaaggttctgagagcgagaatctaacattgattgttagaaagtttaagtttctaaagaacaagaatctcaaaggaagatccatccaacataagaagaactttaagaagaatgactcaacctcctctaattctacttattttgagcgtggcaaatcgggccacataaaatctgaatgctccattagtattataatgtcgattcaaatttgagtcgatcttaagattgcattctaacattagttcaaattagaatcgatgttgaatggttttcttccttatactaagattaaagtagttattggtgtaataactntaactagtattcatcanatagaanattaacattctaatggcacaaatgacttactaattagttgtaataactttaattagtagaaatacttggtttaaagtatttagt

SEQ ID NO: 211170 - DNA, 404 bp, Glycine max
  unsure (1)..(404): unsure at all n locations
tacctccttgagatgagaagctagagcttagctacacaccctctataatagctaagctcaccccatgacaaaaaacatgacaatacaaaaaaaaaagtccttactacaaagactactcaatagagtggccaaaatacaaggcccagacaaaggaaaaacctattataatatttacaaaaataatcgggctcatacttagcccatgtgatgcaatcttaccccgcaagggcattggatataaaattccaagtagattgggccatagatgcaagagaaggccctacggttcttatgagccttagggtagatttcgggcccatgggctaagtatgagcccaattatctttgtacatattagattaacgtttcattatatttgggccttgtatntagggctccataat

SEQ ID NO: 211171 - DNA, 305 bp, Glycine max
gctggttatactgtctactcatatgtatgtattgttgcagctaatatattatgaacaattggtgaattacatgatgaataatgacttggctctgaaaggaacattggatggggttgagcttttaatttttccatctaacattctggctgagaatttacagtggaaaggcttttactcttatatatcttggctctaactacattaataatttgtgattacagttgtctccctattgctattagtctattactatagctattccctagcacttatttagaatttaactatattagcaagtatttatt

SEQ ID NO: 211172 - DNA, 465 bp, Glycine max
  unsure (1)..(465): unsure at all n locations
tgctgcgtgcaagcccgacatgaatcagctaaagagcatggagggttgcataccgtttattttattagccagggattcgaactggttgaggtaagttgtcacagatccttgttgtgtgagtntgaataggatcccgatggggtcctcataaggtgaaggtgagaatctcgtctcgagtgcttctaaaaaaccagcccaagcggtcagctagtggtttcgggtcatccactaaaaccacgctaacgctgggcccttcatgtaaaaggaggcaatcgtgaggcgctcgcattctggtgtagagtggtatgctaagaattgagttattttgaagacccaccccgaagggttcgagccgccacactgaaggatgtccacgtttattttcgggtgagtaatggttatggtgtctgatgcacgtgtgggtgaacaggatgacggatatgtgttcgagtgtgctgtctgttc

SEQ ID NO: 211173 - DNA, 435 bp, Glycine max
  unsure (1)..(435): unsure at all n locations
acgaccaatagtcgagtcaatagaccacaaatgtgtgttttcttggtaagatgttgagggtttctcattagaattttaaactttgcgggaaagaaaatgaatcaccataaagtctatttgtcgctaaatggaatatcctattaagcaagaatcaaaccaacaaggctctatagcactgactagagagaatgtttgncaattaagtgtgaaaaagagcataaagctgggaaacacgccagctaaaaatactaatgagaaataaaatgtaataatttatctattttttttagcataattctattttgtttgaaatccatcatttactttntttacttgctcaacctgtgggccacgatatctaattttcacaaggtaaaaaacttttaagttatgtgtcacaacattataatgaatcattaccatcgaaatatgaat

SEQ ID NO: 211174 - DNA, 466 bp, Glycine max
  unsure (1)..(466): unsure at all n locations
agcttcaagaanaagatggcctcatcaaatttcttatttccagaaaggaattctatcaatagacctccaatctntaatggagagggttaccactactggaaaacccgaatgcaaatttttatcgaggcaatagatctaaatatctgggaagccattgaaatagggccttatatacccaccacagtagaaagaatttcaatagatggtagttcatcaagtgaaagcataaccatagaaaaacctagagatagatggtctgaagaggatagaaaacgagtacaatacaacctacaagccaaaaacataataacatctgccctaggaatggatgaatatttcagagtttcaaattgcaagagtgctaaagaaatgtgggacactcttctattaacacatgaaggaactacagatgttaaaagatctcaggataatgcactaactcatgagtatgaattatttataatga

SEQ ID NO: 211175 - DNA, 400 bp, Glycine max
  unsure (1)..(400): unsure at all n locations
taattttggttgtggtatgcatgttttcttcttaactaatagttattntttcttattgactttcccacttttgttttgggtccttttttatttcccgcttaccaggctatcgacgaagaagcatccagtaggcaagttttttttcccttttgctggtatgcatgtttggtttgttactatttggctctatttgcaagggtttaaattttgtttgttgttatgcatgttttcctcttaactaatagttattttttccgatggtgacattgatcttggctgcctgatatggtatntaagaatggaactctgcatgctttactctttcaataatatctctctcttccttttcttggctgtataattgctggctcatattattcatttttaatagaatgatctt

SEQ ID NO: 211176 - DNA, 403 bp, Glycine max
taaattttgatattcccacaaatgcctctcatacttgtttgcaaacttgttccggtgacaggggcggacaactgaagattgctttcggccctgtcactaacagaagaaatgcggaacaaccttctgtcagggttactcagttaaattatctcggtaactataagactattgcgcactggctaaataattctttcctcttagaagttgaccaatgaccgattcttttacgcaccgcatgatatgtgtcggtcacatttttcctgaaattttttacacgaaaattaaatttggactgctcgttcttcacagttacacaccactcgaggcacacacttctttctctgtctatttacctaactctgaccatgcaataggcattggtctcatttcattctgtatacaa

SEQ ID NO: 211177 - DNA, 372 bp, Glycine max
  unsure (1)..(372): unsure at all n locations
tcccgncttatatggatgatacttcaaagtggtgaatcgttgggtcgtgacctacactctatatggatatttattccgttattttttctggtttagccctccgcttatataagacaaggatgctctgtatttctttggaataagcttccacttgtaaactgcattacgtataaatacgctttcttgttttcctcccatggatgtagccttgatcaaaggcgaaccacgtacatttgtgcgtgctttctcatctcgctctctttgtctttcactttgctgcaacatcggtgtatgacatttttgttctgttgcatctactgctgctgtatttgcttgtactcatcacttcctaaccgcttgcttgtgattatc

SEQ ID NO: 211178 - DNA, 424 bp, Glycine max
  unsure (1)..(424): unsure at all n locations
agcttgatcgtccaatgactaaataagataaagtctttaaaatagtttttcaggcaaatacttggtatgaaaataatgacaaaaggtgctaatagaatgcttaacaaaccatcaaagaatgatgtagaaacacttggtttatactggttcactcaacctgagctacgtttggttctcccttacagaacaataaaggaaatcaaaacttgattacaaaacaagtattttgacctgtcactcctagctatacaagtattcttaataccacttctggaactatcttaaactccccctgaaactaagaaacccaagtattatttaacacaaagccactcctatctntcacaaatagtagtttgaatgaatacaagtattcaataacactcaatgagtgagtaaataaaaaagctcanatacaagataa

SEQ ID NO: 211179 - DNA, 389 bp, Glycine max
actcagcttgatgcacatttggagaaggtaatgaaacaatgagatgatgcctccatgagagggtggatcaaatggagaacagagatcattatgaaaaagaaaggaggagaagagggaatgattgggttcctaaacaaaaccgaattgatgggattaaactcaacattccttcctttaaaggaaaaaatgatccggaggcctacttggagtgggagatgaaaataaagcatgttttcctatgcaacaactatgaggaggaccaaaaggtgaagcttgccaccacggagttttctgactatgttcttgtgtggtggaacaagctacaaaaagagagagcaagaaatgaagagccaatttgtgatacgttggtggagatgaaaaggatcatg

SEQ ID NO: 211180 - DNA, 445 bp, Glycine max
  unsure (1)..(445): unsure at all n locations
agcttaattatggagggatcatgtgttttatgactatatttgcaaagccattttatttatatttttgtttttttattaattaaaaaatttgttcgattatttcataaacaaatttaaattaaaaaaaataattatacaattaggtaatgtgacaatataaaatatataactatatagtcattcaatcatatcctataatatatgataaattgattatcttttataataattatcttaaaaattatataattaataatttataattaaataattatgtaaaattattctatattataagtatataaaaagtgtcaactgtacaccatncaattaatgactcttaactacttatctttgaaatgtttcaaattccatccaatgtangcctcgagattcctagaaatggcctactgttggtactaacttgtcctttctcttaatgata

SEQ ID NO: 211181 - DNA, 467 bp, Glycine max
  unsure (1)..(467): unsure at all n locations
tcttatccaaggctcaccttggtggtgaagctccttcttccatggcttattccttaatggatggcgcctcctctcacctcttttcctttggtttccgctgcatctccatggtggaaaatcaccattaaaggaccccattgaagctcaaagatccagcctccatagaagccccacaagcaaacttccattaggtacctttctcaattttcttctaggatcattttagaccctaagtacctagacatagatttcttcaatgatgagacatttgattgttatcaagtgtttcaaaattctggcctggtcgatttcaagtctttaaaatggccttattaccctaagtacctatccatgggtctttntatgtctttttatatttttatctctttgggggcgacgagaggtgttcccttgctcctacgtattcctcaattgtgataaggaaatcagacctacgtagttctttg

SEQ ID NO: 211182 - DNA, 462 bp, Glycine max
  unsure (1)..(462): unsure at all n locations
agcttcttatccaaagcacattcttggtggcgaagctccttcttccatggcttattccctagaggatggcgcctcctctcaccacttctcctttgtcttccgttgcatctccatggtgaaaaatcaccattgaaggaactcattgaagctcaaagatccaacctccattgaagtttcacaagcaagcttccatcaagtggtaatcaaagcacaagagcttcaagtaagtgctccttaaacctccattaattntcaactttaccttttcctccattgttagttcttcattnttctccatgtatctcctcacatgtcttgtgctaaatgttgctaacatgattctttagagtttccaccgattaaactcgntgtagaagctatanttgattttctatggttcaaatntcttgttcttgctcttgaaccatgaatagtgtttctttgagtttatcttgtattttt

SEQ ID NO: 211183 - DNA, 384 bp, Glycine max
  unsure (1)..(384): unsure at all n locations
ntaggataaaacttntttctctctgtgtgtctcaactattcttcattcttcttcttcttttcacttctattattccattttcttacacaaaatttcattccttttccattggtgatgattatggaaggctaaacacttcatcaatccaaagatgcactccaagcaaagctaaatttgagttttggtttaatatttctaatctttgtgaatgttcatctttctcttcaaccctactttcgattttcatgattntgattatgcttaggattgaaaatagattaggttatgcattcatttcctaatttcgaaagttaatcctatagaagccactatgccttcaatctcatgtgcaagtcttccaaaattgtcaacctttctctcatg

SEQ ID NO: 211184 - DNA, 401 bp, Glycine max
  unsure (1)..(401): unsure at all n locations
cgttcaagagacatagaagcttgcggaaatcatgattntgcagcccgcaagccaccatttttgcactttgcttccattttggtattcttgctcactccatacaagtacaccatccttcggttctctagctttccattgatgcattttagagctctaaattgtatgtatttgctcaaatccatgaagtaatttgtccttgaattcatgtttgttttagtgaaatggggggtcgtgggggccttacgcctaggttgtgttcttaaacaatggggcatgtcacattagtctcattcccttgttattcgtgccaaaacatgcgcncaccaagtgcttggtaaatgcctcaatggaactttgcatgaatttggaaatatacctatggaacgaatggatacatgtga

SEQ ID NO: 211185 - DNA, 476 bp, Glycine max
  unsure (1)..(476): unsure at all n locations
gacctataaaactcaagctgangattatggggtacccatcacatgtggtactatgtggcggtcgggcgatggtgcacaacaagttttccatatccacaatgtgcgcataaacccaccatcccctgttgcccacctccatctgagctcacgtattcccacgtagcccatatcctcgtttctctcaacaccgggtccccatcaatcctcccaagcttccacaacatccaatcaaaacaacattcaaacagcacaagctatcacagccaagcaaaacagggcaaaggcagaaaactctgctcaacacaccaaccaaaatcacagcttttctcactcanagaccccagtaacaattccttcgatcccaattgttaaccgttggatcgactccaaaattntactggaagtctatagtacataagcctacattgtgaaccgggggatctactagcanacatctagaactcattctgcactac

SEQ ID NO: 211186 - DNA, 423 bp, Glycine max
  unsure (1)..(423): unsure at all n locations
tgcaagcttatgtctcatgctttgtactaaattggattttgtcataatgaaatnatgggagcgtcactcatagagttgtttgcaaaatgtagtactatagattatgcttacaaggttttcaaggaatgagacataaagatgttggtcctggagctaataattgcgcttactgattccatggcaaagaaaaaagctttgaaatattctatcaatgtctatcatcagatgtaagcctaatgatgaaccttcgctcaatctatctgcttgatcatgccgtttgattgaaaaggataagatgttcatgtatggtaatgaatccaatgatcccaatattagcatacggataaggttatctctcgtcgatggagagtggataagccttgattgataatacatcccatccactggcctattatgggagct

SEQ ID NO: 211187 - DNA, 444 bp, Glycine max
  unsure (1)..(444): unsure at all n locations
agaggaatgtggtagtttactatacagagtttgatgagttcaaggaggaactcgagaaacgccattgggatgaggagttgactgactttgtggatggcaatattgatgttgccattgtaaaataattctatgcaaacctttatgacctcgaggacaaatcacctaagcaggtgagggtgagaagtcatctgatttagtntgatgaggatactcttaacacatttttgaagacccgcgttgttgttgaagagggggaaacacttngtgcatagtccagatttgcactcctgaggcctgatcctcatgagttggctgctaagctntgtattcctgggaggggattctagccttacgcttatgggcgactcttgaagatcttaggagaacattacactctgctcgacttgagcttatttctttttaactcataccactttacacttt

SEQ ID NO: 211188 - DNA, 453 bp, Glycine max
  unsure (1)..(453): unsure at all n locations
agcttatgcgcatacttcttcacgaacgttcacttgcattatacattcttataactaagaaaaatgcacccatatacaatcaaggcaccttcgttacctagattatntacatgtacttccaaagtgtatttgttacctacatcacacacatttcctttgctaaattcacatacatgcatactctaagcactttgtctattcaaaaatgcatacgtgcacatncttggtattctaatacctatacatacacaaacttcatgatgaatcttgactatctacacaataaggtgctacaattcatgcttnttggccttttttttttcaagtgtttttttttactacctagagtcgcatgcaaaatcaagaatattttcttttgctcactaaaattgtattcaaaatagaagagtattttgtaatgtattttctttacataacatgcaacatatttat

SEQ ID NO: 211189 - DNA, 369 bp, Glycine max
ctcatgggtttttttagattatatgctgcaaagaatgggttgttgccacaaatggagacactggatgtctacctgtctcaagtcatcaagcatttctattcttatcaatggccagcctacaaaggaatttgctcctactaaaggtttgaggcaaggggatcctttatcccccttactctttaatatagttggagaaggcatcacaggattgatgagggaagcagttcacaataacttatatagaagctatatggctggaaagaaaaaggaacccataatatttgcagtatgtggatgacacattttgtggggcgctgatgggaaatgtattgtttgaagcttgccagggattgaatgcctagtctaaat

SEQ ID NO: 211190 - DNA, 330 bp, Glycine max
  unsure (1)..(330): unsure at all n locations
agcttcatgtgcnatagtgatgcccgccatgttatcatctttatctccagtgttacccatgccagaagtgtcacccgcttctatagaagaggagtggacatcctgctaggcaaactactgtcgaaaagcctctggcatcatcagtggaggctccatataaaggtgaatgcgatagtgatgcaagtcctagatgacgaggcgatagccatgatggatgctctacagtatctggactatatgctcctgctgggaaaaagaggaaaaatgcttgtcaccagtataagaggttgttggaggagtggatatctaatgtggagctagtggaacatc

SEQ ID NO: 211191 - DNA, 450 bp, Glycine max
tcacctcattaagaactactttgtcctgctcgatgtgtcttgttcttatgaaagacgtctgcctctcatcaataagaacacatatcacttgtctccatctatctgctcataacttaactatcaccttgtacataccttctatcaaggagattggtctgtagtcatcccatgactggggatgtttagttttcggaattagagctatgaaagaagcattactggctctatggaagctgtcatgcacatggaattcatcgacaaatcttctgaactcagctttcagcatttcccaaaattctttaatgaatttgaacttaagccatcaggtcacgacatttgtacccatccaacttccactgcttgttgatctccaatcctaacaagacaaccaaaactcctctgtcctggttattgaaagatagactcatcacagtggttacaaactgtgct

SEQ ID NO: 211192 - DNA, 467 bp, Glycine max
  unsure (1)..(467): unsure at all n locations
agctcgggtgaaatagtatgcataaaaccccttgttgttagagtatatatggtagagattagctacagttgactcagcagctgcgccttcctagcatattgtagacaacattgcatgagtataggcatactccaatactctcaagtatcaatcactataatccctcaaaagcattatttcacaaaaatcctgtctactcattccttagagtattggagtacaggcataatccaatactctcacattaagaactacccttattatgttgacaacacctttcatacagacatctttttctttnttccattgaggcattaaattaaatcccatataactttgattcaatttttactgtttcagttattctcattctagctatctattatgaagaatagacaagcaagtgattaggtgcaataagttctatctgaatgaaaacaaatgtngttcttgtagtctggttcact

SEQ ID NO: 211193 - DNA, 427 bp, Glycine max
  unsure (1)..(427): unsure at all n locations
tctcagctaattatctcatacttgccctgatgcgatcactatatttttaggagtccttttcttcttttcttgaagtagctgcagtaaaggagaaagatatcttgagaaacacagtactccatagaccatataagtgatagttttttctttttttctttcttaaccacctatatagcaagatgtgccatatcccagtaattgaggccggcttaaaaggaaagctactaaatctcatgtttttataaagcaaaataccattatgttgtagaaaatattcaaaatatagttctttcggtaaaagtaaaaaaaaattcttaacactagatatttcactcacccgtaaactgatcctatcaataattaattttgtatcaacgaatattaattattaatntattaattgattaaatttgttatttctttctta

SEQ ID NO: 211194 - DNA, 364 bp, Glycine max
  unsure (1)..(364): unsure at all n locations
agcttcccgtatgcgtactaggttatatctgttttctgcctncctaaggcaataccagtataattccgatatggctcccgatcgcactcagctgtagaatatgttcaagaaagagggcgaaacctttaaagaatacgcacagcggtggagagacctatcggcacaagtggctcctctcatggtataaagagagatgatcaccatgatggtagacactctgccagtgttctactatgagaagctagtaagttacatgccgtccagcttctcagacctattgtatcgcggggaaagaatctaggtttgtgtgaaaagaggaaagttcgattacgtttcctccacgagtgctaatgccaaaagaatc

SEQ ID NO: 211195 - DNA, 431 bp, Glycine max
  unsure (1)..(431): unsure at all n locations
ttcttggatctgacaacagatactgctctttttattatttgcgatgngctcaagattggtctctctcttttcttcgatgcttgagctcactgttgctgccccacaaagctccacggaatttgtctcggccatgctctttcttgcgagccctcttggtttctttgttcaaggctcttgtggtagccgcattatcttctcatatctcggtacactctttccagacgtctgtagtgactaactggaatttttctttggcaagtcttgcttttcctaattctatttttagagctcggacttcttcattctcttccggagcttctaagttctcctcgttgataactttcaattggagagccaatcttctctcgtgtacgacattaaccattatgataccaccgtgatgccttctgatgccctaagtcttatctttc

SEQ ID NO: 211196 - DNA, 395 bp, Glycine max
agctttagccaatcgccataaaccactttcctaaaatgcatttcactagagcaatcaacttttattgaatattgttctattcttgataatgttctttaggtatctgaaattgttcaacacttgagatgcaagcagaaaggtaaaattaagaagtctctctgaaaattgatattagcaaggctttttacactactagaaaaatggctgtttacgacacgtgatctacgacggttatatgcggaaccgctttagaaagtggtgccgcggcactcttgtaattcttgtgtaataaattgcatgttacgacgcactctctaaggcggttattgaaaaccacctcagaactttatgtctaataaaatctacgcctgttcttagaaaaacaccgttgttat

SEQ ID NO: 211197 - DNA, 444 bp, Glycine max
  unsure (1)..(444): unsure at all n locations
aagaagatgaaaataacagagggttcatggctgtataaggtgacgtcgaccgtggtgcaagggaatgttgtngactgcgaagagtggggactgaggacctttaaggttttcaaaggagtaagatagtcaaatgtgtgaccttttctttgttttttggtcattaatgttaaaatgacattgcttagagtaagtttgtttttttaaaaaaagttgcatggtccagctcgaatcagcatgtcaccacttcaaccacactatgtcaacaagtcacaccgagttgactgcataatcgatctaacatctaacccgatttggtcatacctcaagttcatagtcgaatcagtctaggttttaaaatattctctaatcattggatatgatcgagatatgtacctcaaattgtntgaatatctcttacatttttttttgcttaattggatatct

SEQ ID NO: 211198 - DNA, 362 bp, Glycine max
aagcaccgagctgcagcttaccaaggactacctgaatttttcttgatgccctttgagccttgttccttcttgttgaagctactacgcctaagtgaaaaccatgattcacctatcttagaatttggacttggaattgtttggaataatgggggggggtttgtaatggataatgtttgtggcttcttatatgtttagggtcttttatgacttgatcttggtatgatgactctgatgaaattaatctattgattctttagaaaaattgtttttcgaataatcttaggctatccataactctctgataaatgagacattcggctaattctttgagttatattctttccgaatacttttttgtatta

SEQ ID NO: 211199 - DNA, 442 bp, Glycine max
  unsure (1)..(442): unsure at all n locations
agctttactananaattatagcatttganttttcttatgcatacgcatacacatgcatacttgttatcttgtgacagggacaggatcgttntaagcaatagtcaaatatcgagccaaatccaagacagagacaaatcaaggtaagcggtaacgcggccacgatttgctacgcactatcatttcctgctttcaggtacttggggacgggcacgagtagaggctatgcccatgatcaacagatcgccgtcccacgtgcatctccggacaagcaagaagtgctactgggaggcagcctagtatcctttaaattcctacttattattggtcgtgtttctttaacgngatggtcggatgcctaatttaccctatggacttcgagtaagtaaacgccaacccctagagagtgcgtaccttcattgttaaaaaaaaaagaaaaaaatgc

SEQ ID NO: 211200 - DNA, 409 bp, Glycine max
  unsure (1)..(409): unsure at all n locations
ntagtcttcatgttgnncatgctgctccctctatctctattattgattcctctaagaggaagcactcgtcacttccctaactaattcccgcgatatctgggctttggagcacgatggattttcagacttattctggtgaagatctgattttgaggggtccaatgagaagaaaaggagcactgtgaagtggaccacgacagaggaggacgagtagtagttcgaggaggagagcttacattttgtggcattctatggccaccaatatctttatctcattaccaatgtcaacttaagatggatgggaatgaatatttctaatcacattaaaaacatgataagaccaaaataaactttttataaaataaaaaatctaactgttaaatacaatataagatccaaatgagcatta

SEQ ID NO: 211201 - DNA, 358 bp, Glycine max
  unsure (1)..(358): unsure at all n locations
agctaggacaatcacgaaccaactttgtcattatcagtcagngagaacctgtgacatacctaagcatgcgagctcctggcagtcaaccaataaaagaacaaaagttcacgaagcaaggaagcttgtgtggcggttggccacctatctattttgtgttatatctgaaaaatctactctggtaatcgattacagggtctaaaaaaattgaaacagaacgtccagtagcctctggtaatcgattaccaattgtgtgtaatagattacacagtgtcatatgctactggtaatcgattaccaattgagtgtaatcgattacacagtgttatatgctactggtaatcgactaccattatgtgtt

SEQ ID NO: 211202 - DNA, 339 bp, Glycine max
ttgttttggttaaaccagtgtgaccctccaaagaagatttgtggaattcctcaagccagagggtaatgaatgaattccttttgttcaaccaaatgcactcttgtgaagaagcagttcttcgttgatggaaaatctagggtgatcaaaaggatgataatggatagctcgaatagggtgacatactttgtagtatctcgtaattcttttctaacgtcgctatggaactggaaatgaggcatagataatatccaagaagcctatgcctatttttcgttccttcgagatagtgcatcagccacaatgttggtttaccccgatttattcttgatggtataatca

SEQ ID NO: 211203 - DNA, 463 bp, Glycine max
  unsure (1)..(463): unsure at all n locations
agcttgagcaattctggtcctanaagttaattatactgtngaggatagccgcaagtcgcacaccaccttgagccagcctcttcaccacaataggcagccgagaaaggaagtactcatctacattattgaatggaataacaaagaatgaggggtcatccttcagatattgtgatgtacaggggtggcaatcgtctaatgttgaataatttggtgcattgcatcggtcgtcatgctcgggtacagagaaanatgaaatacacacttttagatattatttgatataaaacaaaggattcaaaagaagaaaaagacaatgggatgcattatgatttaagaccaataattctcttaaagtagatagtaacacaacacacgaaaaattaaatattcatgtcagagagtagatctgtagttaactcaatcctacaaaatcactatgtaagatgaggattgtttccactta

SEQ ID NO: 211204 - DNA, 375 bp, Glycine max
  unsure (1)..(375): unsure at all n locations
taacaaaataagattatnggaataacatcttttgtaaaaggtacnatggtttcctcggatgagtggaactggagctgattctattttatgcaaacacagtgtttatgactcaatttggggcattgtggtataatgaagggaacaaaagacattattgtttttaagtggctaatggtatatcgtattcaattcaattttgaaaaagcatttttacaatattttgtactattgtattcatttatttgaatcagacacttgttttgctgaccagatttttattaaaaaaatttttcttttttctaatggtgggcgaccccatgaccaaaagctaatttattattgggaatcatcaccacttctccttaggatgtcgcc

SEQ ID NO: 211205 - DNA, 426 bp, Glycine max
ctgcagcttgagccaatcaaacgacaataactttttactcttatgtcttgatgagtcccgtaatatattgagacgctcgaaattgaatgttgaagctcttagccaattcaaacgacaataactttttactcggatgtccgattcagtgacgtaatatatcgggacgctggaaattgaatgttgacagtctgagccaattcaaacgatgtatgattgagtcccgaaatatatcaagacgctcgaaattgattgttgaagctgtgagcaaattcaaaagacaaaagctctttactacgatgttagattgagtcccgtaatatatcgagccgctcgaaattgaatgttgaacctctgatccaattcaaaaacaataactcttttctcgaatgtctgactgagtcctcgtatatatcgagacgctcgaaa

SEQ ID NO: 211206 - DNA, 417 bp, Glycine max
  unsure (1)..(417): unsure at all n locations
ttcgagcgtctcgttatattataggactcagtcttacatccgagaaaaaagttattgacgtttgaatttgctcagaacttcaacattcaatntcgagcgtgtcgctatattacgggactatatcagacatccgagtaaaaagttattgtcgtttgaatttgctcagagcttcaacattcaatttcgagcgtgtcgatatattacgggactcaatcagacatccgagtaaaatgttattggtcgttgaatttgctcagagcttcaacattcaagttcgagcgtctcgttatattatacgactcaattagacatccgagtaaaaaagtattggcattcgaattgctctgagcttaacattcaatttcgagcgtgtcatatattaccggactcaatcagacatcccgagttaaaagtatt

SEQ ID NO: 211207 - DNA, 475 bp, Glycine max
cagctgccttgcccctagatataatagagggactcatggtttctatgaaagacaaattccttgggataaaggtagtgttgccatattttgaaagcccgtactatagaatacaactccttatcataagttgaatagttaagggtacgaccacttaacttttcactaaaataagcaattggatggccttcttgcatcaatacagccccaatcccaacatttgaagcatcacactcaatttcaaaagatttttgaaagtttggcaacacaagtatgggggcattagttagctttagcttaacaacattgaaagcttcttcttgtttctctccccatttgaaaccaacatttttcttgagcacttcatagagaggtgctgctaatgtgctaaaatcctttacaaatcgtctataaaaactgctaagccatgaaaaatcctcacctcggtcacggacttaggtgtacgccattcttgaat

SEQ ID NO: 211208 - DNA, 382 bp, Glycine max
cctcatcgtccctcacagtctgtagatgtgggagcttatctattcttggttcggactctcaaccacttatgatagccgccgatgatcccattactgcttcccctaagctctctgtcctttcttcacgccgcatcccatgccttgcgaactccttggagtaccctcgcgtttgtggtcactgaaaccccatgcgatgaaaggcatgatgctttcatctgatggcacttctctcatggggtagccaagctgtcttatggcgaggacgggattataattaatacaaccccttgttcccatcaagagaacatttggacatccttcgcatgaagatagaatcctgattcttccttccttctagcgaggaaaccaattaacagacgcc

SEQ ID NO: 211209 - DNA, 442 bp, Glycine max
  unsure (1)..(442): unsure at all n locations
ctcagctttggaaattattttcgggcgctcgagcgaaacccattcttacctcaagctnttaataatatggccgtgatctgtcattacgtgcgactatctccactatagaaagaaaaaagaagagaacaagcgaatccacaaatactaatataataaatactagaaataaaggctttctacatatacatatatcgtccaaaacaacgatttttatcagctgtagcaaagaatgaaacttcatagaagtcaaaatatgaagaaatcaatatgtctagatacccccttttctatggataaaagatctaattgataaaggaagcatcgcgaggatccattaacgcgggtttgaaccgatacaataaaaactggttacttatctcatgatagaacagtcaggaatccacttatgtaataaagtagatcccccgatatattgagcagc

SEQ ID NO: 211210 - DNA, 456 bp, Glycine max
  unsure (1)..(456): unsure at all n locations
gagtcacctgcggcatgcaagcttgacagacgnggccagatccacttgcattatatcttattctaaatgccagnaatcttgctgatagtgttccaaatcctctgctaagactctcgcataaagtcgcccctgagatcaaaagaatgttagaaactgaggccatttatactacgtgttcatgtaatatagttcgttcttaagcatgtgtcattcttcaattagaggaacagagacaccagataactagtccctatatttctatcgcccaagttatattaattgatacgagcttttaatttagataagtatttcatttttagcatataaaccaagttttttttattacaatatcattggtatggagtgtacactattttgcctatggttaatctntattaagaatactcctttcaaccactttttatacgttcattaactcgagctaaggaccttact

SEQ ID NO: 211211 - DNA, 426 bp, Glycine max
tctaagctttacaaagtgggcacatttaatgagagggggaagcttcttttgttatttctcacatagagatcttggcacaagtctatttcacttggaacgcttcaacttaccttcatgatactcctccatgacctgttaaagctccaaagaagaccattgaaatggagcccactcagttgataaacctttggaataagtaaacaaagatgacagatgtcataatatgacagctagcaaggtcattatgaggtttccattctaagaaacctttccaataagcattctgaagtaacatcttaatgattattctaatgttagctaaaaaggatccatacttgatgtaaatcctttgatgaagtcacatgtatgttttctgaagagcacatccgctcaacttaaccatttccaacaaaagattctgattat

SEQ ID NO: 211212 - DNA, 435 bp, Glycine max
  unsure (1)..(435): unsure at all n locations
agcttgcttcanattaccactatttgtattgataaaaaaagtaatctaaatataagatagtataatgttttttgtaaggcaaaattcatatgagaaatatatttgatgtgctctaactcttaccaatattaattacaaagacagaacaaattgttttctcttttacaatattaacaaagtagtgaatagaataatataactcaagaaaaaaaggagagaacacccttaaatttgacaagaggttgtttcctttactggtagtctggtactcaatagaatttttgtggttagatgtaactagtgatgacatttgtcctcctttatcatcttccatggattagacatgactctgccttaattcaagctttgcatcatcttggtgtaacttcttaatgctcttaaatcaaacaactttcatttggaaagtagaaagta

SEQ ID NO: 211213 - DNA, 356 bp, Glycine max
  unsure (1)..(356): unsure at all n locations
tggtggcttcacaagtatatattaacacattatattatatgtattacacacacgtcatcgatcttatatttatataaatttaatttattaatcgatcatatgacttattttacttcccctaaaaaaaatcttaatttacttcatattttacgcacataaattctagtgctggcacctatctaaaagagatgcattggacagacgtaaaaaataaataatgcctaacaatcattttcttaatttaaaggtcactatagaaaacagaagttntgatggctagcgaaccactgcttaacaaatctagaaaagacagaacatctctaactcacaagcattttattaacaacaattctttt

SEQ ID NO: 211214 - DNA, 268 bp, Glycine max
  unsure (1)..(268): unsure at all n locations
agcttcccagatccgctcatggtttgtactgttaactgccttcattaagcagnaccagtacaatacggacatggcccccgatcggaaccagctccagggtatgactaaacgagagcatgagttcattaaggagtatgcccagagatggagagatctcgcagcccaagtcgtgccgcccatgacggaaagggagatgatcacaattatggtagatacggtacccacgttctactatgaaaagctgataggctacatgccagctaacttt

SEQ ID NO: 211215 - DNA, 448 bp, Glycine max
  unsure (1)..(448): unsure at all n locations
ntntggagtagaaacatgggaccaactcattttatttcatattaggaagtcatatctagtcaaggtctgagagaccatacaagtttcctaacgatttctaattatgtgggccattaagtctatcatatgctgacaatagccgagaagcccatgaatctcttcgggggcggagtaggtgtctgccatcgccttggcattggctaacaatcggggaagttcttgactcccgttcaaggtaagagcaaaccgatccatccacatggttgcctcttggtgtaaagagtcgatcacccttcctctagcctctttntccgcgtatacttgggcatactcatccgcgattctatgctcgtgggccgtggctagacctaactcttcttggtacttggcgatgatagctaacatggtggtctctgtctcgcataaacgttgagacaagcttcttttg

SEQ ID NO: 211216 - DNA, 455 bp, Glycine max
  unsure (1)..(455): unsure at all n locations
agcttgcagtntgggttggcaatgtagcttttaatagcactgaatttatcttttcagaaaagtgtcatacacaatcctaatgctggctgcttataattcatattttttttatgtattttaccttctcaggcaacgaaatttaatgatgttaaatcaagcaaaggatctccatactagatgtcccctaaggtttgtcatgctcttgtatcatttgcttggagtaattcctacaaaggaatgaaatcattttcttatatttaaataaaattatatttaaggaatatggaaaaataaattatacctttgaaaaaaattacttctaaaaattttgaatgtaattctgcaataagagttaaaatgcaaataanaaatcttcaatttactgtacaattacaattacaaatattagaanaagactaacaaaaagacttgagatgagaagctaactntttcta

SEQ ID NO: 211217 - DNA, 345 bp, Glycine max
  unsure (1)..(345): unsure at all n locations
cttgaaaacaactttaccactggtaatcgattacaggtatactggtnatctattaccacagagttaatactctggtaacttatataaaatctgagaaaatttctcttgtaaaacaaaaatgtgctatgtttggttcttgaaaaatatttttcaatacttaccttgtgaagtcttgactttttgctttcctggttcttctcttgaatcttgaaatcatcttctcttgaatcttgattcttcttgatgtcttttatttaatcttgagctagaacttgttgactcaatcttcgacatattcgtttgcgctctntgtcatcatctaaaatacttgaatcatacttgaat

SEQ ID NO: 211218 - DNA, 393 bp, Glycine max
  unsure (1)..(393): unsure at all n locations
ccacnncaacaagcaanaatcttatggggaggctcctagagagtcggcgnngaccgaaagaggtcattacgnccacataggctctggtctttactattctgtctacaaagccaaggagtggaccagcgtgagggtggacaatatccggngngacctcaagcctatgaaaagttctccaatacaagatgtcggtggagttgccctggtcgatgaggactttggacaccataaagtttgtgatgatgatggagaccaccatgggaatgatacccttgaagtccctatctgggaaagtgataagagggagacttcactataatggtgcgttgacaaagttgatgtcccgaatggcatgaagatggtcatttcgagactaactggactgtctctcat

SEQ ID NO: 211219 - DNA, 401 bp, Glycine max
  unsure (1)..(401): unsure at all n locations
ttgcttatacattaaccccctgtggtggaaaaatgtgctttttctactcttgatataaattctctctctatcgatttaataataatgcacttgcattatcctttcctctgcttaatattattacttggggcttgatcacccattagtatgggaagttttaggggtagcgttgagaaacattattttctaatagaactggaaaagagtatctaaataaagtcatcactatggataagttgatatttgtttagcctattatacatctctattcttaatgcaatctactattttagctctgcaaatggattnggaagaaaaaatagatatattatggtttttcatacggcggagcanagttaaagtatactagcatatgcaggtgttaatggagtaattataat

SEQ ID NO: 211220 - DNA, 488 bp, Glycine max
  unsure (1)..(488): unsure at all n locations
gatccttaagtcacctgcggcatgcaagcttgttagtggaaaagggtcacccaattcttgtgctactgcttagctatggagatatttctttctatggcagaaaagacatttgtttggcagtttggctctttttcctaatggctgctactcaccccaaaccactttatcaatagaacaacaagaatatcctgtgagatctaaaaaacaaggtttacatcgagcaatcattagggtttgctgctgaaggggatcagcttaccctatcatcttcacaagtctttctatgaccttaaataatctttttggggttggtttggttgattcagtgttgtaattcaacaattaggtatacctcagatcaactttactactatgtattctttgccataagacccaaggttgtatttgtntgattctttatgtagaagacattatcactactgatagtgatcaccgcggcatacttcaagaataacaccatctatcat

SEQ ID NO: 211221 - DNA, 438 bp, Glycine max
  unsure (1)..(438): unsure at all n locations
cttgaattcaaagaatgcagctaaatagaatcactgcaccatctgttgcaatttgcatggaggcataatcattagcttagactntgtagagcagctagtgccaccgtcattagctagtcttaggcactaagtttattgtatttattgttataatatgcctataaaaggcacctccctgtatcacaatgagtgcaatagagtgagtgaattagagaaactcttcctttgtacacgtgaatgtgtgagattgtggttttctggatttaatttatccccgtgttaagaatgtataattatatatcgtcaactaacctggctgctataatataaaaaaaaagctaggccagtagtcgaacgaaccaacataagcataagagctggcaattagttggctcacgcaatcttgtcgagttcaatcacactcttatctttctatta

SEQ ID NO: 211222 - DNA, 277 bp, Glycine max
atcttctcaaataaatctctggcttcagcaggagtcatgtcttcaaaggctccaccactggcagcatctatcatacttctctcgatagtactgagtccttcataaaaatactggagaagaagctgttctgaaatctgatgggaggcaacctgcacatagtttcttaaatctctcccagtactcatacaggctctctccactgaagtgtctaatacctgagatatcccttctgatggctgtggtcctgaagcacaggaaattttttctaagaatactc

SEQ ID NO: 211223 - DNA, 353 bp, Glycine max
  unsure (1)..(353): unsure at all n locations
nncttgattttgttgtgattacatgatgataggttagttgttatttataacagtgttaggggttttgattcgcatacaatgtacgtcattttgacatgttttggttagtatttgatggcccaatagaggactatgttgaggggctaaaaagccccaagtttttttggaaatctcgatgatctcgctaagcgcgcctgtgcgctaagcgagttcataagtttttgttgaatatctggatttccagatgaattcgctaagccattccttatgcgctaagcgagttcatcttctctgatgatgaatgttatgtatgaacttgcttagccgacatttcgcactaaactagttgatgt

SEQ ID NO: 211224 - DNA, 418 bp, Glycine max
agcttcaacattcaatttcgagggtctcgatatattacgggactcaatcggacatccgagaaaaaagttattgtcgtttgaatctgctccgaccatcaacattcaattccgagcgtctcgatatattacgggactcaatcagacatcctagttaaaagttatgtcgtttgaatttgctcagagcttcaacattcaatttcgagggtctcgacatattacgggactcaatcagacattcgagtaaaacgttattttcgtttgaatttgctcagagcttcagcattcaattttgagcgtctcgatatattacgggactcaatcagacatccgagtaaaaagttattgtcatctcgaattgctcaaagcctcaacattcaattttgagggtctcgatagaatacgggactcaatcagacat

SEQ ID NO: 211225 - DNA, 468 bp, Glycine max
  unsure (1)..(468): unsure at all n locations
tgcattacggaccttgaaactcagcttgaggattttaaacgacaataactttttacttcgatgtctgattgaggcccctaatatatcgacacgctctaaatcgaatgttgaagctctgaccaaattcaaacgacgatcactttttactcggatgtatgattgagtcctgtaatatatcgagaacgctcgaattaaatgttgaagctctaagcaaattcaaacgacaataactttttactcggatgtctgattgagtcccgtaatatatcgagatngctcgaaatgaatgttgaagatctcagcaaattcaaacgacaataactcttttactcagatgtctgattgagtcccgaaatatatcgagacgatcggaattgaattttgaacctcagagctaattcaaacgaaaataactttntactccgatgtcttgatgagtccccgtatatatcgagacactctaaattg

SEQ ID NO: 211226 - DNA, 462 bp, Glycine max
  unsure (1)..(462): unsure at all n locations
agcttgacaatttctttcagaactacaacatttactcgttcaatatataatattaaaataacaattaattgtattgtcatattaaaaagtaaaaccggtcaggcaaattagtagtgatacattaattctttgaattgaatatatactattaaatgcatttatacttcaaaagcgcataaatacgatgcaagacaaagaattcaataaatattaaagttgtagaaatttggtaattaattgaaattctaattggttaaattaagtttttctttgcatatagcaagagtattntattgcgtagaaaatttcaaaatcaagtatatcattagataaaataaagtgaaaacatattggttttttaatctaatgtggaatagtnttttattcccgtgttcaaaattaaactgattcaaactanatcagatttattgagaaatttaaaattaatacacgaacttatat

SEQ ID NO: 211227 - DNA, 310 bp, Glycine max
catacggaccttaatctcagctagctattctgggaagacccatgattgattttgagggcaggctgctatctgacatgtgatgaactatgatgatgatgacattgtgagagggttaactatgatgttgtgtagctatgaattgtaatgttctactaatgcggtattgattttatataattgtaagaaactacccctccattttgaccggtggtgtccctggtatcggaccttgttggggacaaatgacgcataagaccaaagtgaatctttgtgaccgcgaccacgtgaacatggatatttggaaagtggt

SEQ ID NO: 211228 - DNA, 477 bp, Glycine max
  unsure (1)..(477): unsure at all n locations
agcttatcanatcataaagtgataaggaggtgataacttcatatatataattagcatattaaatgctgataaccgtggcatgttattcaaaagttgaataaatagtgcttacaataggatgaccatcatgatgtacaataaacaaactatagcacatagctagtgagctaaaagcaactatagtggcgtggtgacccgattgcaccttatacgtttagaactaggttattttccttggtgagggtgtagttaattttcaactaatggagcaaagctactgctacttcttttgtctaagttgatgctacttcttttggggcttgtaccanagctagccacacttaatgcactcacatttaatttctacttgaatatgtatttcttagcttanaatagatcaaagaacaaaaatggagcanagcatganggtgatgcaagctaataacttcactatgtgtgaatatcanagaactaaca

SEQ ID NO: 211229 - DNA, 444 bp, Glycine max
  unsure (1)..(444): unsure at all n locations
tctaggtagtgaccatatgattgttgccccagcctaactatcttgaaagaaatgcatcaataacttctcgtccctggaatatgcacccatctttcgacagtacatttataggtgattcttatgacaattcgtccctttgtacctatcaaagtcaggtaccttaaactttagaaggatgacaacatccagcaccaggcacaggtcggtcatgtctatgaacagataatcgccgaatccttcaacagccctcaatctctcttcgatgagattgagtttcccctttccttccgctgccaggggcgggcctcccacggacagaaacattggttgcattgggtggtttcgaggctctcttcgtgatgttgggttgaggtagtgcgttgggcaccggcccctcagcgggaaacggggagtangagtcgacgtctctctgagcgtgctctc

SEQ ID NO: 211230 - DNA, 361 bp, Glycine max
cactctcgtcggtcatgtgacgatactcgcatgcaaatgttatcacaagtgcttcattacgactacgatcgtgcattgtaggagcgactaaggacatcctcgatgcttctggttgaaactcgaatggctaaccaagtgcctctgcaaggttttctagcttctgccttatgttctgtacgcctccaacagatctgttgctcagactcaggatcatcaactccagtcaacctaccatggtgtggcttgctggcctttaagcaagtgtttgattacattatgtaccgacttctctgtagatgcaacacctttatatgaacttcacgcgtctttcactgcttcgtatagtttattccagcctgat

SEQ ID NO: 211231 - DNA, 300 bp, Glycine max
aattccggtaataatggcgataggagtatatcaactaattgagaattacaaagacaaacacgaaccgagagtacggttccattgtaaaataagataagaatgaaaggcacgaagagatatggatcattgaatggaatgcatggcggaccaccttagttggtcacctcagaaggaggaactcagggattctaaaccgatctaaactctcgtcgcgaaaaccgtttccatatattgtgcgcatcttagagcttcattgtgagaatgccaaaaatttttttgacactggcaatgactaatagc

SEQ ID NO: 211232 - DNA, 423 bp, Glycine max
gcttctccaatggtggttgtcttggaggatatgaaatattttatataagaaactctcctttgagagaaattcttgaatgcgaaggtctatgagggaattttaacccttccacttctctctatcttcaccttggcttctattaaggacacctatctttctcataaatcaaaagctcattcatctaggtccaaacacaccaaaacttagtgatccccattgaacacatgctcaccatcactaactcatcaattaattaattaattaattcaagtacttaacttaaatttaatttctcttataatttaatcaaatcacttgaacaaataattacgaacacacaacgttacaatttatatgttcaaatcgtttctttgattcctcatgtctctctttataatttcgtatgctatctggcttacaatc

SEQ ID NO: 211233 - DNA, 449 bp, Glycine max
aagcccttaagattagttgtggtttattatcttatttgccaaacatgtttcatagatgagacatttgtattaaatgtttttagactaggcatgtgtgtgatatagtttaagtccttttcatgctttgtgttgatcaaatatgaagtgaatgaagtattctagttctctaagtttcctaaaaacttacttgtacttaaaatttggctagaagcatcaaattaatcgattgtctaacctcgtaattgaatgcccaagctaatttcaaaataaggaaggatttgtagcttaagataatcgattaactagctcctggaaacaaagataagctctgtgtgtgattctataatcgattaccatatgtgacaatcgattgcccataaagcacacaagaaacagagatactcacactgaaacaaatcaatctattaccccatttgataatcgattat

SEQ ID NO: 211234 - DNA, 242 bp, Glycine max
  unsure (1)..(242): unsure at all n locations
agaacacttcattcgagtaagacgagtatttattcgatctagccctcgagataatcgattacattagccatttaatcgattacaagaggtcataactatnttctctatatatagccaccctatattctcagttcaacaatgatataaaacgaagattttacaactcaaaaacgttattttcattcttggacattcaaggtaaagtgagttgtcacatctgatgcaatcctactccacaaggc

SEQ ID NO: 211235 - DNA, 472 bp, Glycine max
  unsure (1)..(472): unsure at all n locations
tgcatgcatgctcgcttatcgattcattctatgtacacaggagtggtccacattgtgttttacgcattcttatcctcgttcngcctactatttatacctcctctagacgtgcttataccattctacttaagtcatttctcgcttaacttataaataaaatcaatctccaccgaacgttcgaattgtattatccgttaacttctattaaaaaaaattccgaccgttccgtcgcgccgtaaccacgttggaaatcactaaagaggttaaacaataatataaaaatcacataatctatctttagcaaaatatagcggagaatcaatcggacgctttctctatgagacttcttattcttaatcgaatcgactaataactaaagtgaactaacgctcaatcaacttgcctagtaagctcgtcacataagacgttttggagtatgcatttctactctcataagtagatgatcatttca

SEQ ID NO: 211236 - DNA, 422 bp, Glycine max
ggatatgtgaatactatactgctgctgtcttttagaaaaagcaattcttttgatagctgacaacatgaagtttttcataatgaaaattaattttgtttcaatatatacgtctttttttggcacaccattttgatatgtgtatccacagtttcgacttgcagaagagaagtgtgaaaaagctgaatcaagagttaggcaactagaaccaacatgtaatacatggcatggcaatgtttgtcagtttaatgctctactgtacaagtgaatcactatgaatatgctagtatgacaacttggatgtgattataggtttaaacactaataccatagttgccccaaaaagaataagaaaatctagtgcacaagcatacaataatacaatatacatgtgatgttcatctcagccgtggacacataatcta

SEQ ID NO: 211237 - DNA, 424 bp, Glycine max
  unsure (1)..(424): unsure at all n locations
ttaacagncaaaacaagtgacttctcgtatgtgatttagctgaaaaataatattacttgagaaacctattagtggatgaacatggattcatttagttacttaaggggtgattntagaatgaaaagcaattattctccttgatgaagtcgaaatgcgattttacctgaaaaaaaggattacctgatcgagaaacctattattagttgatgaacatgaattcatttggctacttaagagattgatttagaataaaaagatgacaattttccttgatgtgaccatttggaatgtaagatgtcccaaccattggctatcttattgcagacaattaagtatttaaccaagtatattgatgataaacaattgcacaagtgacttctacattacgaaaacataatcaaagggaaagatgatagttatatta

SEQ ID NO: 211238 - DNA, 324 bp, Glycine max
  unsure (1)..(324): unsure at all n locations
aacctgtgtatctatccaaataattttacttctgcaaatattcttctttctcagatgcatcattctttattacacatttactgaggacaacttaacacctattgtactctgggaggggattaaattgttgtgggggaggctgtttatttgtccttggaaacaggcggagatgaagagctttcttccgtggaacttatactctttttgcaatttattttggcgtggggtgatattgaattatgctctangttcaatgccatctctattttcaaaaattagatgctctgggaacaaaccatataatatttatttaatcccatatat

SEQ ID NO: 211239 - DNA, 426 bp, Glycine max
  unsure (1)..(426): unsure at all n locations
gcaagcttgtggattntaaggattgaagactgtttttgtttgtgtttangtttgagtttgtggttgaggtttgtgttttggaagaaaaactcgaacaaaaagttttgggtttaggtgtatgtttctcttcatagagtttggccaacgaaattgttctgaggagtcatgtatgtgattgtgcaacgacatcccttctgatatcaggttntaatcctcccacaaagcaatccaatagagcttcttgtgtaattccttgtactcgattagctaaagccgtgaactgcacgtaatatgactgaactgaaccaatttgagcaagtttaaacaactgagatctangacattcatacggtgatgggccanattctgtctctaaggctcgcgtacaagcaatccatggtttgaatgaattttcacgagtcatca

SEQ ID NO: 211240 - DNA, 389 bp, Glycine max
agcttgtatccaaatggacttaccttgaatttttttcttagatagccctttggagccttgttttcctatccttgttctgaagctcactacaagccttaagtgaaaaaccatgatatcaccatatccttaaggaattttggagctatagaatcgttttgggaataagtgtggggggggttttgtttcattggataacttgttttgctggctatacttcatgatgtattctgggccatactagacgcacattgtatattggttaaatgttggacatgctgaatgaaatgctgattctcagaggatatatattctaaaagaaattcgaaattaaaaaagagcagcaatgtatctgagcgaataagatctctaatggcaaaagaatgatgaga

SEQ ID NO: 211241 - DNA, 445 bp, Glycine max
  unsure (1)..(445): unsure at all n locations
agctnggagaacatgcgtgacgttttggactttttttttacacgccacaagctgcgaatcccggtgatcatgcagtaagttaaactgtactgcttggctctcttgaatcctccgtgctactaagtaaaataattaaatgtttggttcttatgctgtgtangctgtaaaagacgaagttattattgatcttgttgaccgctgtcgcacaaaccagaaaaaattgatgcagatgctaacaactactgagttagttccactcaactattccatctggcacacacgcaaatgtacttgtgtgttaccttgagaaagctatccactgatatgtggaatgatctcattgtcttgagtttgtcgtaaggatgacgacctttctggacgaggcctctaattaaacgatagtattcaaagtttgcntgcaaggcatgatgcacttgcttctggt

SEQ ID NO: 211242 - DNA, 479 bp, Glycine max
  unsure (1)..(479): unsure at all n locations
gacctatanaaactcaagcttatctgtaataccaacatgacaatgataaataatcttntaatatataacagatacagcactggagtttgtgacattgcgaagaagttgcaacgtgtcttccacagactctctttttttctccctagaaatagaagccatgcttcttcttctgcttcttatcacttttgtctacttgaatttgattttcctatggtttctctctctctgtgcccttccttttccatatgtcgcttagagtggtggttttccctcttgttttatagaattggctgagcaaataaaaaatatatgtaatatattgtttgtttgcatgacgactacctaaatattctccacaccatattatgctctgacaaaattcacctcatacgtttccgattactcgaaacataattcttggagaagcaatgaatttatggaaagaaataacacttttaatcataacatacaacatatat

SEQ ID NO: 211243 - DNA, 453 bp, Glycine max
agccttttgactcctgattctttgaaacttacttaactcttgattcgttggcatcatcaaaataatcttggaagtcattgcttccacatttgcaacagtcattcttatttacattaagctgagtctatccgatctttcccaatctttatagtgggtttctcttcattgctattagcatcaataatagtaacatacttctcttccaacatagcaagatcatgatccaaaacactgaggtgaagttggacttgctcatttctgtcagagaagttaagcccattataaatggcacatttctgtcaaaaaagttaagcccattaaaattggcacagatgatacataagaatccaatgaattcaaaacatgtattatataataaaattcacataagtgttttgagacataaaatacatgtcatacatatgattcattcaaataacggtcaatgtatat

SEQ ID NO: 211244 - DNA, 463 bp, Glycine max
  unsure (1)..(463): unsure at all n locations
tggccatgaatgtcttctaacgaactttaaaagaatgcaatttggaatgagccactcgaatttatgtcccacctgtgaagagttggaggaacatttattccactagttcagagatttctcagaagcaaaactagtttgacaatttttccttataattgatgcaaagggtgatttccatacaatgacaaattggccttcctggttgaggaataatatccttattggtaggaaggtgcatgaagtgagttggaatcacttatttggaattgtgctcaatactatctggtggaagaggaatatgattatattccaagataagaagtggactgctgatgtggtgatcaagaaggcttgtaatatggctcattcctacaaagatagattgatgaatnttgaatctttagccanatttggacatatcaattcanataggtaaatatcatatgggaagttcctgttgtga

SEQ ID NO: 211245 - DNA, 414 bp, Glycine max
  unsure (1)..(414): unsure at all n locations
agctngagcttgccctttatagtaaataagttatgccgagccgagccttacataagccgagccgaaggccctcgacaagctgctcgactcatttccacccctaattacgagcatcagtcttccaaatgattaagtataactagtaaaaaaaaaggtgcagaacaaaagccatgtgtgacaaacctggcaaataaattgtgtcattccaacacccattctttttgataatgtccacaattgcttcctgatagctgcaaaattaatcattgccaacatttaatttgtttgtcatagaatgcacatccataactctaattacatatataaatctaaatgatagtactagtatttggtagagcaattaaatacacttcatcaaactaactttgaagaaaacatgatgcttaatgcaat

SEQ ID NO: 211246 - DNA, 345 bp, Glycine max
tggaacagatacacggataacattctctgttctgaatatccttccagagagaaatgtccagatatatcatactgagtttgatgagtttaaagtacaattggagagggtggtttaccgcttggtaactcacatggatatgaacattggcgcccttatctcgagtcaaatttcttctattactcaaagtaactcctctaggctcggattccatccttgattactgctctctgtagagctagaggagttacttctgatagtttgacctatgagagccttgagcccgccattaattggtcctacattaaaaagaactgttcggaattgggtggtcttatagtttatctc

SEQ ID NO: 211247 - DNA, 456 bp, Glycine max
  unsure (1)..(456): unsure at all n locations
caagcttgcgagattcctcacggaatatgtttctgttacgtnncggaagcgcctcggcttataatttcttcacggaaacaatctttccaagcaatttccaaagagagagaagtgcctaaggggctgggatccttttcttcttgcattcctcccctanttatagcanaataggggaggtggttgccgcccagctcgcccaggcgagctcagctcgcccaggcgagcagggttgcttcctccagaagcaaccgccttctggaggaatcttctggagggcccaagtgggcctgggtgctatntgcacccccatttntactaagtacacccncctctgctgtttttagggattcttttttcgaaagtacggaaacttacgaattnctgaacgatacttggtttctcttcgtaatgctacagaaccttgcggantacataatcatcctctttttgacttac

SEQ ID NO: 211248 - DNA, 363 bp, Glycine max
  unsure (1)..(363): unsure at all n locations
tgcttgtggggcttatatggaggctggatctttgagctttaatggggtcctttaatggtgattttccaccatggagatgcagcggaagacaaaggaaaagaggtgagaggaggcgctatccattaaggaataagccatggaaaaaggagcttcaccaccaaaatgagccttggataagaagcttggagaggatgcttcaatggaggaaaagaaagagggagagaaagagagaggggggagcacgaaattgaaggaagaataaagggagagaagttgaactttgagttgtgtctcacaagactctcattcgtcaaagttacaacaagtgttacacatgcttctatntatagactangtagcttc

SEQ ID NO: 211249 - DNA, 466 bp, Glycine max
  unsure (1)..(466): unsure at all n locations
agcttgatgtggaagaggaatacacggctaatgaagttgttccaggtggccaccttgtccctactggagaatgatgaagtgctgacgatgaaattagaatgttggttgtggcaatgcaacactattagaattcacacattacggtggtaacacctttaacaatctccaattttggatttgttttggtctctttatttgggtttgttatgatgtttgatggtagtgacaccatgttattaggaagaggcttccatatttgcatatttgtttatgtaatttgtggtggtttttaacgtccacaaattatgttttaaattttgcattattttttttgtttcttctataattaggggagggtttttaaccnccataaactgcattttaatatataacatanaaaatgtcatgtangttcgaatgagttcaagcctaactctggnngcaaaaataacacattataatttta

SEQ ID NO: 211250 - DNA, 398 bp, Glycine max
  unsure (1)..(398): unsure at all n locations
ctatatagtcatcaacagtccctgtttgcttcaaatcttttatctttacataaggattttcaacatttctccctccaaaccttgcaacaaggctaccttaaaattgtcctaagccaaaggtgcctcagttactcttatgtattgtttggattgatggaattacaaaaggaaaaaaataatttatttttaattgtttggttagagtaaaaagagaatgaaaagaaattggctaaattactaagcataaaactttaccctttaaatattataatattataattataataataaaaaaagcacaaccaaagtttgcttctacagggcctgtccatctctctctctctntctctctctctgngnnngctgaaatgcatatgccatgtcatngcttctactat

SEQ ID NO: 211251 - DNA, 459 bp, Glycine max
  unsure (1)..(459): unsure at all n locations
agcttagacaatttcagagacaaaaccagattgaagcattatattctccatcactntcttcaaggaaccaaacttaggggcagaagatcactcagttccaagctctcctgcaattcctacatacatggctgcaacaaaatcaacacaagcaaaagcaagatcaacaagctccccaagagcaaggataggagggaattttgacatcaactctgatagctattcaccatgcaagaataagttacctattgtgacttctattaatggtgaagtgcttantaatggtaggattggcaagctcagcagtaatcagcaaagatcacctagcttaaagggccttccaagacctctaanattaagtcaaacattgaggcgtcttagcattaattcagattgcccagtgccaatatgagatcaacaaagttgcttcatgtgatggatattactcctaatagttncatg

SEQ ID NO: 211252 - DNA, 472 bp, Glycine max
tctatgaaggccaataaagtgacaataaacaaaaatgaattatgctttcagtatcaagtatcaactataaacatgtatataagaacagaaatcactctttaaattttaataaacaaaacctcaatgttttgaaagaaacaagcatatctcttgggttacagggctatcaaacatcaaatgatccactgtatagcagctcatcttaacccttagcatgcagagatactcaactcacatgtgaatttacaaaattccatcccaaagaaaaagcttcaatatgtatcttggtattcacatattgcataagaattccaatttatgaaaaaagcttcagatttagattgtcttgatataaacgataaaatcattaaatcataagagctcatctaaattcttgacagcaaagccatgtagatatatacactgataatataacccatattttaaactattggatctctgaaatgaaact

SEQ ID NO: 211253 - DNA, 351 bp, Glycine max
tgcagcatgcaagcttcccttgcctcctctctacttatttcttcttctttctctatccctctctcgattctcttttatttctatttgttggtgattctatattgagttttgctcttcattactcgatcgctgctaataatattactatcctttcttctattagccctatctgtttttttttttttttgataaaattacattcttttcctctagttatatctaattttgatcttaatttttctttaaagttattcattagttcagctctcacatccatatttaaatattgataataaaaaatattaacagacatgtatcatgtttttatttaactgtaatatttttatgaca

SEQ ID NO: 211254 - DNA, 481 bp, Glycine max
ggttcatttgcaaacctaaatatcacaacgaatcatgtctattaagactaaaaggcatgggtataagatatgcggaaaaagttaaaacaagggtacatgtatgggaggaagagtatattatgtataaatataaaaatgaataaacaattaagtcatcatttcataaataaatgtagtaatgcaaaattccttaagagggcataggatttgaagaaacaaagttgcagtttatttaatttaaagcaaaaaatgatcttttgcatggctgccttgtacgtgagtgatgtcaaactcgttgcaattcttgaccaagatgttcccaaaggtattgaatgtaagagaaatagtattaataccatttctcttacatttaatagcaaaaatgtacccatgtgcacccaatagcctacatcaggtacgtactttgtacagatacataaaccatttaagaatatccaggaatcaaagcatagtagcaata

SEQ ID NO: 211255 - DNA, 456 bp, Glycine max
  unsure (1)..(456): unsure at all n locations
agcttgaagattatggccattgagagtagatctggcgttatactcacttaagntagttttacgcttctctctaagcgagccactgcgctaagctgacatttgaaattcaaactcaggcttcttttttttaacaaacacaacacttggcttagtgcgtaaaaagaccgcttagcaaggtctacagatcacaaaacctgcaactctcgctaagtcgggctctgggccggcttagctaaaatgatgcatcttgtgtacagaggagcatgcacttagtggaaaaggagtcgcttagcgctaacattgctgcaaggattttagcttagctttcatgaggggcacttagctcgatgaaacctcatttaggccacanagaattaagcttagctaccatgaatggcgcttagctcaatgaacctcagttctgaccgcaaggaaatgagcttggcacaacgactt

SEQ ID NO: 211256 - DNA, 393 bp, Glycine max
cctgctcgctaagcacatcatattcaatagctaagcgtgacatgtcgccgctaagcccaattccttgcggcctaaattggggttcattgagctaagcgcttctcatgccagctaagcccaattccttgctgccatagcagcgctaagcgatccatcatccgctaagcacctgcccccttgtattcaagatgcattattttagctaagtcagcccggagccatggttagcgagagttgcaggttttatgatctgcaaaattcgctaagcgccccttctgtgcgctaagcccaacttaaaaaaaaattggattatgaatctaagcttggctaagcacccgttccgctatcgaacctctttgagaactaaacatctctccgactcgcttaacgctg

SEQ ID NO: 211257 - DNA, 443 bp, Glycine max
agcttattgtctgcccaaagaattctcttctacttcttattatttcaaaggataagttctctggttgttggccttgatttgataggacagcatgttaccttaagctcagattttgaattttaagtgcatacaaatcctctcacatcctcattcataaaggtcagaatggccaaatcttatacccatccccgaacacattgatttgagcctcattgttgtcgccaagtcatatgccttaagttacataaagttgtttcacttcctaatggctaaacgtatcaacaccttggaaaaaagaccaaaggggtctaacattcctgacctataatacaatgccattatacaattccctgcctgcctgaattgaaaaagtggagattgttagattataacatctcgtattctttcgtttttatcactattggcatactgtacagccacat

SEQ ID NO: 211258 - DNA, 362 bp, Glycine max
ttaagccaagcccctacttttgaggggcaactcccgccttatgacgactatcccgagcaagacgatgaggaaggagatacccatcttggccccctgctccacctcaaagatccgtccccacatgaactaccccaaccgaacatagtctgccatatcccggcctcacccacacccgtaaaagaatctgttcactttgcggaagataagggaaagattgaggcgcttgaagagaggttaagagcagtcgagggccttggcaattacccattctcggatttggcggatttgtgtctcgtgcccaacatcgtcatccctcccaagttcaaagtaccagacttttgatagtaccaagggacgacatg

SEQ ID NO: 211259 - DNA, 174 bp, Glycine max
agctagcttctacagcaaccagtcaatcactggtcgaagccgtacccgaatcaaataaacatgaaaatgcagtaactatgaagtgatcctaggtcgtttcccaataaggaatgataaaccaaatgttcataatatacttgcagtaacagttatgattggggggggggggtttgt

SEQ ID NO: 211260 - DNA, 414 bp, Glycine max
  unsure (1)..(414): unsure at all n locations
gaacattggtaatgtgtctactatcattggtatcatttctttctccgtcattgagggaaccacttgggctgccagatccctccacctttgggcgtattctttgaaagatccgtgcccccccctcttggcacatgtttttgtagttgcatcctatccggagccatatcagaattgtattgacaccgcctaacgaaggcaaccattaggtccttccaagaatggactcgggaaggttccaagttagtgtactaggtaacagctaccccaataagactttatgggaagaaatgtattagcagttcctcatcttttgtgtatgcccccatcttccgacaatacatctttagatgggtcttggngcaagtagtccccttgtacttgtcaaagtccgacaccttgactggggatgatcat

SEQ ID NO: 211261 - DNA, 474 bp, Glycine max
  unsure (1)..(474): unsure at all n locations
agcttgccgccgccaactccctctccacgcatctggcagagttctgctccgccgcccaccttctctgcttcccggaggtccagcccagcctcgagaaacacaccgaagacgtcgatttccaaacctacgataactctcagaacttctccaactacggaacgagtcgacccggcggaaccgactcgttcagaaactacgccaccaccttctccagccgtcccgacaacagttttcgtcgctacagccgccgatccgccggccacgaagacagcttcgtcctctacggaggcttcatcggcgacatctaccagaccttcaacacctatggcacttcctccgctggcggcgccggcgagttcaaacagtacgccaccgaatcaaacttccccgagcttgatttcaccacctactnncgacagctcggcgggaggaggcagtcgttctcgagctacggngagaacggcaactcctgcg

SEQ ID NO: 211262 - DNA, 423 bp, Glycine max
  unsure (1)..(423): unsure at all n locations
agctctcaatgtcaataagcataaatccaaacttcatctacacccttcttaagttcctccaagcaacaatatctggagccacaaaactatctgatctattaaacaatgctggaaacaacatcatagataacaaaatatgagcagtccaagactgtagagaacttcaacaatccaccttatcttacttaaaacgatcactatcaggaatccgttcccaagactctaaaaaactagttgatgcaagaacctacctaagtgcagcactcaccaacaaggacacgtgtctagagagcatagattctgcttcgggtacccttaagccagttgtagtaaattctgtgataagctcttacaaagatgtcagngagtctctctcaatgctccctanacctgagaggaaggccttcaaaggacacaagaacc

SEQ ID NO: 211263 - DNA, 436 bp, Glycine max
tactctattttcttagaagatgtatttttttttacttattgaataaagtgaaatccgcatatatcaccgggttatacgtactaataactaagttgagaattaaactaaaagtgttctggaaattagaagaaacaatacttattacatgaaattacatacattacatgggacgaacaatagaaaccatttatttcttaattaaaatgagaagaatttcattttaaaaaataatatggaggggggttatgagatctagagggattatgattggaatgtgctaaaggcaaatttgactacaattatttactgaccaatttaagttacaacaagagcaagaatagcctgcagaggagcactagccacctacaccttctacaatcgagcaatgtctgatgtatcttgcgcaaagtttgagacacaagacactacatgcaga

SEQ ID NO: 211264 - DNA, 411 bp, Glycine max
  unsure (1)..(411): unsure at all n locations
agctggcatcagtataacccttcagtttcaattcatagtctccatanaagaggaattggtctttagttcttcttaagtacttaagtatggtcttaaccactttccaatgttcctcaccagggtttgcttgatatcgactagttacagctagtgcataagcgacaccaggacgtgtacaagtcatggtgtacatgatagctcccactgcactagcatatggtactctactcatgcgttctctntcttcaagagttgttagacaattcttcctactaagagtaattgcaacacctacaggaaaatatcctcgtttggaaatatccatgttatatctctttaagataatatcaatgtacatagaatgggagagtccaagcaaccttttagatctctctataaatctttatacct

SEQ ID NO: 211265 - DNA, 413 bp, Glycine max
tgcatgatttacattctccccctttctcaagcaaattctttttgcatcatcaagatcttcatgaattacaacatgagttttatggatgcagatgcatgttatctttgtcttgaaatgcagtaaatgccgacttcttatgcaacaatgcaatgtaatggaaagttctacaatgttcatgacattttttccctattttgagatcttgattttgaattgaattttttgaaaaacgcgataattcatcccatctcatcctatcttttgcaaatctctttgggaactcccttagagtgtatgttctgtttgatttaatcacttgacaaattttgagtgacggatatggagcccgttgacctttaatcacgccattgaaatccacggtttgtcccccttttttgttaaaacatcatggg

SEQ ID NO: 211266 - DNA, 426 bp, Glycine max
  unsure (1)..(426): unsure at all n locations
agcgttgtgtaatcgattacatggttttggttatccactaccaatgacaagttttgaataaaaatcaaaagatgtaactcatccaatattnttcaagtttttctaaaggctataactcttctaatggttttcttgaccaaacatgaagagtctataaaagcaagaccttgatttgcatttgaataacacttacaacccttacaaacaacttttccacatattcttttacaacctttgaatctttttgaacatcttcttgaacttcttcttcttcttcttcctttgcaaaagctttctaaagttttctggtttccaaaccttgaaaacaaaagtgtgctattcatctatttcattcttttctccctttgccaaanagaattcgccaaggactaaccgcctgaattctttttgagtctctcttctccc

SEQ ID NO: 211267 - DNA, 327 bp, Glycine max
  unsure (1)..(327): unsure at all n locations
tttacttttatcagatgttcacacatgtgcgcaaaatgaagctggttatgaaccacattggaattatatatgtgcagctgtggtgatgccaattatcaagtgtacacgtctctaatttatgtgtgggcttggtgctgataaaaagtaaagttgaagggtgagtatatgaacgcttggtggtgggttactacttactagtgcctcttattatcttcataaggttcaagggttaggcgttttttgttatatcggcctatacatatatgtatttttgtttaccttatgagatgatggataagttacttctaagngagttgtgatacttat

SEQ ID NO: 211268 - DNA, 464 bp, Glycine max
  unsure (1)..(464): unsure at all n locations
agcttcanaatagaaagctaaccggtcgaataacgaagaacgatgaagaaaggacgaataatggcgaagaatgatcacggaattgatcacagaaatgttacggaagtgcctcgaccttgattnttcttcttctttctccttcttctcactaatttcagtgaaaactccttacaaatgatgttgaaccccttcccctcaaccccccacgcctatttatagcaaaatgaagggaggaggttgcatgacagctcgcccaggcgagctagttgcttctactttaagttttctaatgggcccaagtgggcccaagggctggaaaatgtccccaaagtgaccattttgcccctcttttgaacattntacacatttccttccaaaacgtcacanaacccttcgaattgcgcggcgattagtgttaagtagctcaattcagccagcaagaacccaaatatcaaccaacgatc

SEQ ID NO: 211269 - DNA, 438 bp, Glycine max
  unsure (1)..(438): unsure at all n locations
tattgatttgtcattaactaaaccctgaactttaaatgattatctcttaataccttggttagattcaaggagagcataaggttcaagacaaatttactctaaatttgggggagaaaagttgaaaagaatgaaaagaaaaaggttaagcattagcacacataacaaataagttgtattgtaaaaaaaaagaaaaagaaaataagttgtgttattacaaaaaggtcgaaagcaactgaagaaaaggaatagtgagaaagctatttgacaaaacaagaaagatcatcggattagctagactttgctctctagaatctaactttngaatcttagaaaaccgtgaatttttgtaccacacctcctacaacctgagaaagtctctgatctgttatatattntgacttgtgactagataaatgctagatgacctctgtagtgtat

SEQ ID NO: 211270 - DNA, 437 bp, Glycine max
  unsure (1)..(437): unsure at all n locations
gcttatcctctaaggctggagcactngacaatgtctagaggaaaagatcctcatggcagataacaacaacagtcagttcattgttgagggagcatccctcacgaggtcaccaggcttcacaagagaggactatccttattgggaagacaaaattgagatgtacatcaagttcaacccctacaaactctggctaatcatcacaaatggagatatacccattcccagaccttgtcataatggagctaaacacaaaagttcattatactctaacatgtagtctatcaaggaatgagtacaacaatatatgcagaattaagacaaccaaagagaattggaactcactgggcatcaactatgaatgagcataagatgtttagcttagaaaggctacaactctgagatgtcatatganagcttctccataaaagaaagagaat

SEQ ID NO: 211271 - DNA, 349 bp, Glycine max
  unsure (1)..(349): unsure at all n locations
acatttagaagttagttttttttgataatgcttatcttaacgcaaaaaatgtcatgctaatccctccggtttaaaacgaactcatgcacatgtttaaagtaacacatttatgcacatgcgtatgtatagaatatcctactatttatatcaacatagaggccatccaacacattctaattgtcatacatatatatgcatttgaaaagaacacacattctcacgctcaaggcattgcgtcaaaatttacacttaactatgtcctaaacatttgctatcacaaactacctacatatgtttgaaatatatatcatacaacattntattggttcattcacatttattcatattg

SEQ ID NO: 211272 - DNA, 477 bp, Glycine max
  unsure (1)..(477): unsure at all n locations
gcagcttcaacanaggtaacactgtaaacgaatgttgcanttttggnataattatcntttttaaatcacatgctctatatgttaacagaagtaactaacaccgtntaggagagagggagtgtgactatcatgagaataaaaaaggaagaaatgcatgtgttactagattatgagtgcactgcaatttgctctaatattataataacttttagtttatgacttcttctattgtatgacattaattcatgataaaagtgttattttcaaacttaagaaattcaaggccatttagtaaatgttacacccaacactgggttggctagaccgtctcatcatatatacaatgccacaatacagaccattaggccattgattcataatgctttattcttacccatcagtaaggataacaatcctcacagggtattcccaggtctagatctttgataactgctaatcacacgaaaacaagagaca

SEQ ID NO: 211273 - DNA, 323 bp, Glycine max
  unsure (1)..(323): unsure at all n locations
atgagacgctaacatacatgaacccgaacaaaatagccaaagaagtcaccttaatataagtcgcacaaccaagcaatgagaaatgcgtttgtcaatacttgagcaatattttactatacaatcactattcacaagatatacaatcaatccttgaaatcaacgaataaagaaaggtctaaacgttccaccaacaatgtgccctcaccctatacaactgcccctcaacanaaaaaacaaaaaatggtgagtatttcatcttaagctaattaagatacatgctcccacgagcaacaaccgtgcaggaaacatgagcgctacaaaca

SEQ ID NO: 211274 - DNA, 475 bp, Glycine max
  unsure (1)..(475): unsure at all n locations
gcttatcccatgccttcttggccgtcgttgcgttggatatcttctcaaatgtattttcatccaccgattgataaatgagaaagagagctttcttgtctctctttcttgactccttcaacgtcttctttacaccttggcttagcgaggcttcatcttgctcctcaaagccattctctacgatatcccacacatcttgagctcctagtagcgccttcatcttgatactccaattatcatagttgttctttgtgagcatcggcatttggaaaggaaaacctccattcgccatcttttgaggatcttgaagctctgataccactttggtggaaataaggctttttatgtttaagaaaagtgtttatgaatatcggagactctgaatagaaacttgataggaacgagaattnattatggaggagagaactttgtatttttgcttgatacaaatgtgtaggaatacatctctatttatact

SEQ ID NO: 211275 - DNA, 464 bp, Glycine max
  unsure (1)..(464): unsure at all n locations
ttctactnttatattataaactaaaatataacttatatatttggtccctcaatgtaaacaaaattaaaaagtgaagaaacaaattaaacatttttaaaaaatattatggacaaaaatgttccttttaaaaaatatgtgtatgtttatgttcacgtttacaatggtcaacaataactaacttaaagttatttggaaacattaggaattaaaatgaaacttctaaaatataaaagactaaatcgaataaaaattatataaaagaccaaatatatattttagctagatatttttcactctaaaaaagaatttaaaaaaagtgtggaaaatagctcagtaataaaattgagttaaaaaaatgttgagagttgcttanaaagtgtgttaataatattattcttactatacctataatctgtcgtcattatttcttcgattaatccaccgttgtatactgattagagact

SEQ ID NO: 211276 - DNA, 431 bp, Glycine max
  unsure (1)..(431): unsure at all n locations
caagctggtgggatttgtgatagtgatcttgccggagatgtttatgatagaaaaagtactaccggatttgtattttttatgggtgattgtgtttttacatggagttctaagaagcaaggcattgtgacactttctacttgtgaagccgagtatgtagctgcaacttcttgcacatgtcatgccatttggctaagaagattgttggaggaacttcagttgttgcaaaaggaaagcacaaagatctatgttgataatagatctgcacaagagcttgccaagaatccggtgttccatgaacgaagtaagcatatagatacaaggtatcatttcattagagagtgcattaccaagaaagaagtagaattgactcatgtganaactcaagatcaagttgcggatattctcaccaagcctctaaaattaaagatttc

SEQ ID NO: 211277 - DNA, 439 bp, Glycine max
  unsure (1)..(439): unsure at all n locations
gtctcatgantgtcacgtgctcatgccacaattgttagcccgggctatatgagacatcttgccaaacaaagtcaggttagccataactcacttgtgctttttcttccatgctatatgtaacaaagtcattgatcatgtcaagtttgatgagctggaaaatgaggtcgcaattatagtgtgccagttggagatgtattttccccttgctttctttgacatcatgattcacttgattgtgcatttggtaagagaaatcaaatgttctggtcctgtttatctacaatggatgtacccggttgagcgatacatgaagatcttaaaagggtatacaaacgaatctatatcgcttagaagcatctatcgntgaaaggacattgcagaagaaccattgaattttgtcagaaacattgagaagtctaacttgttgccttctgatctc

SEQ ID NO: 211278 - DNA, 435 bp, Glycine max
  unsure (1)..(435): unsure at all n locations
agcttggacttcacgacgaatagcagggtcgaggccggatataaagcaactcagaagtgaggaaggggataagcctgtgattcgattcgccaaggcttcaaactgcgtaaggtaatcgcgcactgagcccttttgcattaatttgaataactggcctgtgggatcctcgtaaggggaatgagcaaacctagcttcaatggcttgcaagaatcctgtccatgtgggtagctgatgatttcttgccatccactggaaccaggcaagcgcgggtccgtccatataaaaagacgcgatcgttatgcgttctaaatcagggacggaatggtattcaaagaactgggaaatcttgaatacccagcctgatggatccgtgccatcaaaccgagggacctccancttgagtctgtggagctgaagtgggtgggttggtattac

SEQ ID NO: 211279 - DNA, 465 bp, Glycine max
  unsure (1)..(465): unsure at all n locations
gctttaatctagttataatataggagattgaaaacagaaagtatctcttcattntgggtttgaaattcataccagtctcaagcagctttaagatacacatttttcaaatatgtcatatgaacaccttcccttttctttgatctttccatattgtgaagctcatcctttaacattgcctcctagagttagaatatttgaaattcatgagcctaggttagcacaagaaaaaaacaacaaagtcttaactttttcctttgttaagggaatctatatcgaaatgtaaaatcacattagaaatttcagttntaaataaacctagaanattagtccttgaattaaagaaacaatcattgaccttgtagagccacttgtgacattntntcagatggaaatacaattacaaaattntaacatgtataaacctggttggctgtggagcgatctcacgttcaagcttctcaattt

SEQ ID NO: 211280 - DNA, 466 bp, Glycine max
  unsure (1)..(466): unsure at all n locations
agctngagatgaggaagagtagattggtgattctctcctgcttcactgccgaccaccagagtggtactctggagatatgtcgcgggggtcaagagaccttgaggacgtcatgtggggtgcttatgcccaaaaccaagcttgaccaatcccgacccaacccaggcatagtctgtcagtgagaacctgtgatgtacctaaacaggcgagctcctggcactctacacataaaaagaacaaagaccacatagcatggaggcttgtggtggctggccagctgtgaactatgattgatatgtggcgtatggtctctggtaattgattaccaagggtatgtaatcgactacaccgctcacaatagaagacatgaggctaagatggtctctcgtaatcgattaccactgagtgtaatcgactaccaagctcgaaaaccatgtcttgaagcttacgacgccctggaatctattac

SEQ ID NO: 211281 - DNA, 320 bp, Glycine max
  unsure (1)..(320): unsure at all n locations
tttattcagaaaattagaggttatctcttttatcttagtgagagtgattctcctaaattcttgagtgattcaagaacaccctggctgtatcaaaggactttcacaacctttgtgtgttgtcctcgctggaaagagtgattctttccttccaatcatctccacccttgttctttcaaaccacaattccagaaaatccacctctgcccaaaattatctcgtgaccataactcccattttacacactcacattaagtgattcttgagcctaaatngaatttcaaaacgagaacctttcacctcgtttggaatcaccttatttg

SEQ ID NO: 211282 - DNA, 451 bp, Glycine max
agcttgtacttatcacattaaaagatatgatatctgctcaacaaaagttgacattgaagtgttgtttagtcatgtcacacaaatgagaggaaaaacatgatctgttatttgaaaagaatgttattgcgaatgtggagttttcaagtttacatatatccttgctcccacggcattcgacatgtgcatgtgtagaaatcatttcgtaccagtatatagataacatgttcaaaatcgaaagcttcattcaagcctattttgacaactaaaatttcccttactgagagaaaacctttaacaccctaaaaattacaactcatagtataaaaagttctatgttgtgtgatctttagacatataatctatattaaaaattaattataatgaacacttgattcaattagctaatctcaaattttagttatatgcatgttatttcatgtgataagtttat

SEQ ID NO: 211283 - DNA, 451 bp, Glycine max
  unsure (1)..(451): unsure at all n locations
tagtaagccctggtttgaagggacgtgctagaatataagattatatcaaagtatcttatcatatcttagaatatccgctaggattagtttccctatttcctcattatctcttactattagttcccatgtttccttatcttttcatgatttggttcctttagtagttaggattatgatcaatataaataggggttagagctagttntacataacaaattcaacacactgaaatgttatctttggtaatatattaattattggttcattntcttttatctctctttctctttccatacttaaaccccataatgtcaaaaacaaaccatagtattggttacgagcatttcatcatttatcttagaatttaggcttaggacctaactcatccataaaactagcttataaggtgaggaatgcttaagccttatcaggactacattgatcatatctc

SEQ ID NO: 211284 - DNA, 466 bp, Glycine max
  unsure (1)..(466): unsure at all n locations
agctggtccaccttccaattagcagtctcattttatccttgcactgcttgacgtggaggacgactcgctctccatgtgcagtgtcgagcaaaacgtctcgttggaggactacttgagaggccggtggagccgctcatcaagctttgattaagcaaactactgcaaattgatagaagaagaaggattgtgttttttaaaatctaaatccttttgtaaataattttgctgtgttgcatgtgctgtgaaagtttttataaatgggtttaggatgagagagtgtttgtgtgtgccctcctccttcccttgcttgccaaggaaattatgccttgtaatttttaaagctagttaccctttgtctctctactttatttggggctagcttcaacccttaatctcaatntgatcgagtgtaatatgttctggtgcgaagaatgaacaatgaanaagttgtatcttaaaactacat

SEQ ID NO: 211285 - DNA, 418 bp, Glycine max
  unsure (1)..(418): unsure at all n locations
agcttagtcaaaagatctctgcacacatatttttctctcgcaacgtgtgttggatactgaaatttcacgatctggccatgatntcttttttctatcgaacaatattaatttgctaattagtttttttatcttaatggtaaaaaaaaaggtcatgaggataatcatgattgaccatgttggggagattaagaggtggcaccagctatttataaaaaaaaaacaaatcaccctctggtatctctaaattattccaattacaactgtgaatcccatgataaagagccaggatttcagcatgcaagatatctgtagcaccacaactaccattgaagccagcaataaaatcttctttcatgatcacgaatgatcccgtcgaacccaacacaatgctctttgcgtatcacgctaccatcaatgt

SEQ ID NO: 211286 - DNA, 410 bp, Glycine max
actcagcttagaacccaaacaaaaattattgttattagcttttttgttaacaaaatatatgacatatgttaataaaaaccatttcatacactctgcaaaaccatttcatacagtatttgtagagtactctcaatggaaatacacttatgagataacctctaatatttttttatcagtgaaaaactctataaaaaaaggtaaaaccaaaagacagaaactccaaggaccttataagtccaatcagctgagcccactgagcatcaacagtactccattgatccccctcaataaccaaaaaaatatgaaatacggcatgtgagaatatggtcagagaggataacattagcacagaccatgatatcaaagatggttgacagacacgaaatctttgttgcaaacaagaaaaaaga

SEQ ID NO: 211287 - DNA, 448 bp, Glycine max
  unsure (1)..(448): unsure at all n locations
agctnngaaacctccagaccattcaggagagtttttttcctgcagcaccagcagccgtgtcaggaccaagttgaacccaaacagtgtcaatcctcggcgacacaggatcaaaatagtcctggtgatacgctttattcatccctcccgcgcgcacaaacacatcaacattatctgcagctgtcttattgtttatgtagatcctaaatatcctctcgttggccttgtcataaaccagctcacagaaatgtaaacggaccagataatcaaagtcgggatccacttcaaatttccatgacatgttgaaccttttgtccaagacttcagtgttggacattgcccttgcagtttcatagacaaggagaggagccaccgcagtatcattcacagaagcatatgtaatgttagaactgttcttaattccagaaccagcattntctgtgatcatata

SEQ ID NO: 211288 - DNA, 309 bp, Glycine max
tactagcttgtatgagagcctcctaagagttattctcagggatatgttttggaccatggtcggtacgaaggtgtgttccaactcttagtacactcgcactggtggtaagatcataagtgagaaaggcgtggggacgctgttgtcggtcacagcgagcttgaaacaatgtattaagccagttatgaagttgaggttttttcagggggatagggataccgatccacaccttgttttcgatgtcccccccaccacgcacacccaatgttatatgaaaattttttgttaatatggttgagtggatagatatga

SEQ ID NO: 211289 - DNA, 475 bp, Glycine max
  unsure (1)..(475): unsure at all n locations
acccggaccttaagtcaccgccgctgcagctgaatgatgtttattttgtctttattntcaaacagttnttaagaacaacctgtctcggtataatttttcagaaagacttctaacaaaataagaaaagaaaagtttntcataattaccttatacaccagctaatgatagaagctctttcatattagcttcttccaaaagataattgtgaattatgtataaactaacattaacttatagaaaagtttatttaatgtttttctttgtatattctttttttagtagtacttctaaatacatttatccaaatagaccctcaatattaatatatatcaacaatacttacatccaaattatcacttaatcaagcgcttgaaatattttatataanataatcagattaattaaacaattacgtgcttggtttcatttctaaatcaatattagaattattaaaaatttaaagaatatttagcat

SEQ ID NO: 211290 - DNA, 390 bp, Glycine max
  unsure (1)..(390): unsure at all n locations
cctgcattcggaccttaaaactcgcttttcactttgaagggatagtttttaaactacatgctaggtacactgttttctaccatgtttcagttggatgtagcttgtgtcttcttcacagatggggcatgcatgatgacccttaacactgtaactgctgagattcccatatgctggaaagtcattaatggtacaaaaaagcattgcacgcatttgaaaagtctccttacgaaacccatcaaacactangaccctctcattccagaactttcttaggtcttcaatcaacggacttatataaacatcaatgtcatttcctggttgtcttgggccagatatcatcatagacaacatcantgtatttcgcttcatgcacaaccaaggccgaaaatt

SEQ ID NO: 211291 - DNA, 352 bp, Glycine max
aacaccatggagaaattcacttacaagatctgattggtgagacatggagttacaagatctgctgccacgcttctatagtttgcagagattgtataatgcaaaaggtctaccttaaaatgatgtttactctcaacacatggacgagttcaaaagacactaaataacttaaaggaaagacagcgatcaatgtcgtgctcactccatcatattggaatgaagtcgtgtacactctcgaggatatggaacctattgtacgtgtgtagatactggtggataactaacaaactataatgggttttatctatgaagctatgaatatgtgctcagagacaatttaacagctgttaatgac

SEQ ID NO: 211292 - DNA, 281 bp, Glycine max
ctggtatatctcacgatggatacaagttctctaagctgttataatctgagagaatattgacggaaaatatttgattaacacccaatgtgttatcaaatacttataagaagagagcaaatgtcgatattatagagtttatgatatgattgaaagacagatatagagagagaaattggaggtgttggtgcggtgttttactgttcaaaaataaaagggatttgtgtatcatcactctattggatatatgagactgcaaaactttgacaaacatttgagtgaat

SEQ ID NO: 211293 - DNA, 377 bp, Glycine max
  unsure (1)..(377): unsure at all n locations
agcttcatggtgaatcaaaagtgcatcgatgtgtgtttgtatgatactatgatgatcaccacagatgatgactagagcgacgacactcagctcatagatcaatctacgaacaacgcctgtgaatcaagaacaattcacgagttctagatatgaatcaagaggagatcatgctcaagacgaaagtttagattcgagaatcnagattcatggttcacgatctcatgaatctcgatcaagattctggactccagattcatgaatccagagaaggcttaaccaagataagtatgaaaagttcttctcagaaagtgagtagcacatgattnttctcatcacatgtttaccaaagagctcttactctcaggcaatcgagtacc

SEQ ID NO: 211294 - DNA, 463 bp, Glycine max
  unsure (1)..(463): unsure at all n locations
agctngactntgagagttgatgttagccttactttcactttagttattagtcaattcaattaagaaagagaaatccaaaagtgaaacatccgactgattttttcgctttattntactaaaagatattttttaattatattattattttatctctttttagtttccaacgtggttacggtacgacggaacggtcggatttcattttagcataaattaatggatattacaaatcaaacgatcggtggaaatttattttattttttgattaggagagaaaatgacttaagtaaatgactgaagcacgtcaaaaggtgtacgaaaagtaaatgaaacgagaataaaagtacaagaaacaaatggagaccaccacgggtacatagaatgaattgaanacttcgatttcgggtacttaccggttgaagaccgaagaanaatgaagaatggacgatgaatgacaaagaac

SEQ ID NO: 211295 - DNA, 380 bp, Glycine max
gtggtattatgccacataatgtgaaacaattctactagatgtctgcattacctttcacttacccttatctcaaattggtgtgggattaaccatcactcaaaatgactcttcattcatccttcgattcgcaggatcccaaatgacaagatgcgaatccatgcatgtttatgattgaacgttaagtgcaacaattaaaaagttgctatcgtattcaattttacttaaatgcttatgacacctcgttgatcaagcaaaatggctcacgattcagtgggcaagatcgaaagtgtgtgttcttaaggacaataagaagtaaaagacacaacacaagaggttgagataccatatattaaccctcatttattaatgctacgattatg

SEQ ID NO: 211296 - DNA, 456 bp, Glycine max
  unsure (1)..(456): unsure at all n locations
agcttcttgaatgtatgtttactctttcagtatgttgttattcaaacttcttgaagattaatcccttgtactttttttctttatatatatatatatggcataaaatgagcatttatgtgataagtacactagaaaatttgtaagtgataaatgtatatgaatctgaccttttgtcttttgtcgggaaaaaaggttctgaagcatccacaaaatactgggaggttcaacttcaccacacagtttccttactacaaagaagtaacttacaagccagattttgaaaataaaacaccggggaaacctgttgtgtttgatatggacatgagtgcaagcgaatttctggctctattttacctcctanaagtgcctgttcaagtaatcgaccttaagggaatcttacttttctttnttaataggttaatgattacttggtgtctacttaagtncatataaaac

SEQ ID NO: 211297 - DNA, 443 bp, Glycine max
atattttcacgttccatctttctgaacaatgtgcattactgatgtatatttactggtccctacattttatgctgccaacttgccaatttgaggtgcattatcttggcagcaaaaagaatttgttcataatttaaaaatcacacgtggtatttggtaaaaaatcacagaggagaacacttgtgctcatattcctgtgacgccattgcacctccactctacatatttgatcttcggaagggaatcaatgatgagcttgaaataaaacgagattgaattggactatcattcgcattgaatcctgcaagaaactcatacgatggttgctggtcaactttggaggcagacagatgctactcaacatttaaattcatcgccctcattatcatgtagatgctggatccaacctttgcctggatatcgattgatagaattcaagataattc

SEQ ID NO: 211298 - DNA, 470 bp, Glycine max
  unsure (1)..(470): unsure at all n locations
agctngtaagattatggagtatccatcacatgtggtactaggtggtggtcgggagatggtgcaaaacaattctccacatccacaaatcacgtataaacccaccatcccctgttgcccacctccaactgagctcacgtactctcacgtagcccttatcctcgttcctctcaatgccgggtccccatcaatcctcccaagcttcgacaacatccaagtaattcaacatccaatcatcacaaactaacacagccaagaaaacagggcaaaggcaaaaaactctgcccaaaacacaaaccaatatcacagtttttcacattcaaataccccagtaacattctcttcattcctattcgttaaccggtggatcgactcgaaaattntactggaagtctctagtacacaattctactatttgaccgttgggatctgctagcaaatgtccagaacctcatatgtactacccctttcac

SEQ ID NO: 211299 - DNA, 461 bp, Glycine max
  unsure (1)..(461): unsure at all n locations
tttcgattcattctatgtacccgtagtggtccacattgtgtttcgtgcacttttaatctcggtttggttactttttataccccctggtgacgtgcttaagccattttacttaagtcatttctcgcttaacttaaaaataaaataaatttccaccgaacgtttgaattgtattatccattaacttcgggtaaaataaattccgaccgttcggtcgtgccgtaaccacgttggaaatcaaaaagaggtaaaaaataatataataatcaaaaagacatcttttagtaaaataaagcggaaaatcaatcggacgttttctctttgggatttctcattcttaatcgaattgattaataactaaagtgaaactaaaggctaanatcaattcgcctagtcaagctcgtccataaaaataggctnttgaagtttgtcatttcattttctcacttaagtaaatggatcat

SEQ ID NO: 211300 - DNA, 453 bp, Glycine max
  unsure (1)..(453): unsure at all n locations
nagcttccaacaagcagacttggaatgtgatgtttgngatcttcaagactcaaccacctggctttgatgtcaacaatgccttcctcaatggcattcttagattcttacaaagtgagtttatgcctaactcaatcccataagctatctcaaggggtgaagatcgtccctcacttatatactctaacttgagattacgcaacatgtttttttcttccgctgcgtggcctggattgccgcttcttcccctctctttgatggcctatatcgacatttttttctgccttanaacaccctgcacgcatttgaatctcacccaacaaaactgataatgcctgcagcagccaataacccctcccaagccaaaaataacagcactgttgagctgaaaatattcacccacccatcgtctaatgagcaaactacctcaaggtctactttgccaatcttttaaaa

SEQ ID NO: 211301 - DNA, 406 bp, Glycine max
  unsure (1)..(406): unsure at all n locations
ccttaatctcagcttacttattctgtgtatgtgtcccttcttaacgggggaaagagttaaagctactcacaaacctcatttattcagggggcanagatgatccctatgtctataaactattattttntttgataaatatctggatgaagtaagagatagttaagtggatttggatgttttaagttggtagaagctaaactcaggtcgatttccatttcttgcaagcatggcaagagatgtgcttgctatacatgtctctattgtggcctttgagtcttcctttagtagcgaagcaagaagtttggatctatatcattgctctcttactccccacatggtggaagcatttgttngtacacaagattggatgaaaagaacatcaacaccattggctttcaatgaaaat

SEQ ID NO: 211302 - DNA, 463 bp, Glycine max
  unsure (1)..(463): unsure at all n locations
agcttatgaatgtgtcaaacagtttctattttaaagaanaactctacgtttagcatataacaagattaagtttagcataattcaagcaacttaagattataaactaaacatattaaaaacggtcagtcccatgcaaaagtgctaataatagtagtaggagactaggagttagcaaagcatactttcaggatctgtgccaaaaatgaagaatatactagcatcaagctttgagtatagcagttgtttatatagttagttctgaaattgacatagcatttgtcagggataaaaccgttttagctccagaacctctagctgattatcctaccccatatgannatcctcctgttgattcagctaaacaaccttcactagataatagcccttctgatggctcagctgaatacatggagttatattcaacgctattagaatatttcgatctaactcgttatggagcagt

SEQ ID NO: 211303 - DNA, 422 bp, Glycine max
  unsure (1)..(422): unsure at all n locations
accggtttctcacctaataaatgatataatgaatttccaccgatcaattgtgttgtaatctcgtttaatcactgttaaaacaaaatctaaccgatcgttcacgctataacctcggttaaaccaaaaaaaagaaaaataataataaaataatcaaaatatcttgaaaaaaataataataaaataatcaagagaaatcaatcggacatttttctttgaaagattccttgaattaattgactaataatcaaagtgaaaccaaggctaaaatcactaaaaaatcactaaaaaaccgtgtaaggtccaacgccttaaacggtcctctntgcttttatcggttaacatggaccgttcaaaagcataaaatcaacatgtaactttaccaactttgcaagaactacgtangtctgaattcctcatcgcaa

SEQ ID NO: 211304 - DNA, 369 bp, Glycine max
  unsure (1)..(369): unsure at all n locations
agcttccctgtatctctcacaaatatatatatctgtgtttatgctaataccagctatcaacctttaaagtataaaagtccttcaaagaaatattattatgatataaaacctggtatataggcatgctaaatttaaggtttattcttgaatattggttgtggacttaaccctgattttttgtatgatgactataaattgatatctgaattctgaatcataggctctgatctagctttagaaacaaaaaactgtttatgtcataaaatagttttatatattgtttggtgtagccgtatctttncttaattatcatgacaatcttttgtcatgttattatggcgacataatgtaagactataagagagatca

SEQ ID NO: 211305 - DNA, 334 bp, Glycine max
  unsure (1)..(334): unsure at all n locations
tgtaacctattatganctcgatgaagagcaacgcataactcttggccacttgcattttttccttatcttgcagagctgcctttactcttaggccttgggcaaaagaatgagtatcatatttatatgtttgataataataataacaattttatttnttttcttgatacatgtaaaagacaacaacattacataagttaaaaagatttaatttcagttgattgaagtggatatattgagtattataagtttcttaattttcacggataaacaaaaaacagagaactaacacaaacctttatatatgcatatcacattggaacgggaacataatgac

SEQ ID NO: 211306 - DNA, 443 bp, Glycine max
  unsure (1)..(443): unsure at all n locations
agctagtaagagtgcttaaagctttggtcctatggattaaagggttgatttatcttaatcactcaantttgattcatgaatgactcttggtagttcatggaaactgtgtaaatcaagcccacaattagtatggtttccttttcgaatttctactaaaaatggttaaagtagagtcttgtcaaaaatggatattcttgctttttactagaactagtaaattctatcctaaacaccttgattattgtgctaatctccctaggattacttgtaactagagtgaaactcacataaagattactcttacatagagctaaattacattgtcactcaggatacaacacnaatttgttacataaagaatcttcgttcagatagtttccatatctctgtcaagttagactaaacaaattatttacactaaatatagacaccacacatatata

SEQ ID NO: 211307 - DNA, 377 bp, Glycine max
  unsure (1)..(377): unsure at all n locations
gaaatctatccacagacctcccatcttttatggagagggttaccactattggaaaaccccaatgcaaacttttatcgaggcaatatgatcttaatatctgggaagccatagaaataaggccttatatacccaccacagtagaaagagcttcaatagatggtagttcatcaagcgaaagcataaccatataaaaacctatagatagatggtctgaagaggatagaaaacgagtaccatacaacctacaagccaaaaacataataacatctgccctatgaatggatgaatacttcacggtttcacattgtaagagtgctaacgaaatgtcggacactctncgattaacacatgaaggaactacagatgttaaagatcta

SEQ ID NO: 211308 - DNA, 408 bp, Glycine max
  unsure (1)..(408): unsure at all n locations
agctagctaaccttcacctatcccggaaacttccagatggagtgtctgtctatgctacccatgttaccggtgatataattgggacatgtacttatatacacccagagtatttgaccaaaggccggcttatcgtaaaaaatgatgtttatagctntggagtggtgttgtgtgagctcttctcatcaaagctggcaaagaattgggttatgaatgaagaggatagtcttgctaccattttaagcagaaaaattgaaaaccaaactttggtggagctgttggatccaagactcggctntgaatcataccttaagatcaagcggatgatgactgctacagctgaacttgcacatctatgcatgaaatgtccacaagaattagggcaaatatggaacaggtgctagagtcact

SEQ ID NO: 211309 - DNA, 332 bp, Glycine max
aaactcagctcatgggtcctaaagcttgttcaatcgcgatcttttttgtagtccacggaactgttcgataagcacaccccttggcctcacacaacgatatccttatagatggacaacaaggtgatcaacacgccttgaaagatcttccgcattcatcaccacggcctactgaaggtcaaaaccttctcttgtgaatggcctacacacctctgattcagcccggaaactcctttaagaatctatacaaccgcccatcaactgttctatggccttcaaatgaccggaatcctctgggacgcctgggaccaacccatatgtaacagggcaatgtt

SEQ ID NO: 211310 - DNA, 463 bp, Glycine max
  unsure (1)..(463): unsure at all n locations
agctaggttcgaggtacttacccgttgaagatcgaagaacgatgaagaacgaatgaagaacgtcgaagaacggttgaaacctttgcgagattcctcacggaaaacgttacggaaacgtttcggaagcgcctcggcttatattttcttcacggaaacaatttttccaagcaaattcgaaagagagagaagtgccaaaggggctgaacccttttcttcttcacttcctcccctatttatagcaaaataggggaggtggttgccgcccagctcgcccaggcgagccaggttgcttcctccagaagcaacaaccttctggaggaatattctggagggcccaagtgggcctgggtgctattctcacccccaattttactaagtacaccctcctctgctgtttntaggtgattcttttttcgtaaagttacggaaacttaggaatttcgtaacgatacttgttttcttt

SEQ ID NO: 211311 - DNA, 473 bp, Glycine max
  unsure (1)..(473): unsure at all n locations
ctattaggacctataaaactcagcttttatgtcttctttaaataaagatatgtgttggatcaagtggcctcggaataatatagaagggggtgctgaattaattattaatgtgtcttgactaattaaaaattatccttcttaatattactagattcaattaggctttactactaagttatgaggaagtaaagaacaaaaacaataacttagacaaaagtagagcggaaataaaactacacagcggaaaagtaaagagtgtagggaagaagaagacaaacacaagatntatactggttccgccacaactggtgcctacatctagtccccaagcaaccaccggttcttgagattntccaataaccttgtaaatcctttacaagcaaagatccacaanggatgtaccctcccttggtctctntgaacaaccaagtggatgtacgctccacttgaactgatccacaagagatgtaccc

SEQ ID NO: 211312 - DNA, 355 bp, Glycine max
  unsure (1)..(355): unsure at all n locations
agcttgtagaaaggctagacatgatacatgtcatggtttggtttggttcaaagataaaagggatgccccacattatttccatgacacaaatgcaaaaatgatgaattggaaactttatgcaaaactggtcatgcatgcacctatgcggacactcaagtgtcaaaattttatggtcatgtgatgctagggctcaagattcatttcctctattttaatcaacccaatgtttccaaaatatgttcttttatcaatttgtgcattcatccgagtccatttcgggcgtctggagaaatttcacagcattcacccttcaggtgtagacacattntccaaaaattggttatgatcaatgaat

SEQ ID NO: 211313 - DNA, 351 bp, Glycine max
tcttatccaaggcaattcttggtggagaagctccttcttccttggcttattccctagtggatggagcctccccttccctcttctcctttgccttccgctgtatctcaatggtgaaaaatcaccattgaaggacctcattgaagctcacagatccagcctccatagaagctccacaagcaagcttccatcacatatatcctcatatgtaggttccctgaccctaactatggtgttaaaatggtaaattttataataaactccccacacctatcgtgagctaccctgcggattcctcgtcatgtcacttgaagattcctttttgtccttgctcgttgattccactcaagcctc

SEQ ID NO: 211314 - DNA, 433 bp, Glycine max
  unsure (1)..(433): unsure at all n locations
agcttcttagtctcagctaatgaagatgaattcgtgactacttcatgcactcctctaatgacaatagcatcatttctggcactaaattgttgggagtttgaagccatcttctcaattaaatttttggcttcagcagggatcatgtctccaacggctccaccattgacagcatctatcatacttcgctccatgttactgagtccttcataaaaatattggagaagaagctactcanaaatttggtggtgagggcaactggcacatagttttttaaatttctcccagtattcatataggctctctccactgggttgcctaatgcctgaaatatcctttctgatggtcgtggccatggaagcanggaaattntttttctaagaatactctcttgaggtcatcccagctcgtgatggaccttggagcaaggtaatat

SEQ ID NO: 211315 - DNA, 439 bp, Glycine max
  unsure (1)..(439): unsure at all n locations
ntggataatgatttgtatacaaaagttagtcgtataaagtgactaacaaactcccccaaatttacagttttgcttgtcctcaagcaaagaaagaatagttcacttgtcctcaagtgacaaagacagtggccaatcaaaagaaaatggtgtttgattcatcaaggacatcaaccatatgaactgaatatcatggaatgcttaaatcaattacttttcacaagcatacagtttttcagagataagagcacaagcattagagtcatagctganataagctagtaagcatgacaganatcaaggaaggatcatcaaccaaaacctcacagtcattgtttcactcacactcaagtgtttaggcttattccatcataaacaaccaacacaagttccaacctttgctnttcatctcttataatacaacaatgaacacacaaaaatg

SEQ ID NO: 211316 - DNA, 327 bp, Glycine max
aaatttaatttaacctggttataataataatgattatacttaataatatatatataatagaatacgatcaccccactatttggtatcccactttaggggtagcttcttttgtttgctatcacgggattgacaactatgatatgaaaaagatatgataggaaaacaaccaatagggttttgataagcgcatcttggctctaatcatatcttggtggagtggattggtatccttaagggagaagtgagttaggatcagtaggataggataaagactctttggttctttctctatacattctaaagaaacactactacaatataagtttt

SEQ ID NO: 211317 - DNA, 318 bp, Glycine max
  unsure (1)..(318): unsure at all n locations
tggttttaaaaggaccccctacagtaaattgccaagaaatatagtggtgtacccataaaataattttttaaaatggataaagatgctataagagatacaaanaattgatattaattttatcactntatttnttaaaatttatagatcgacaatgaaaaaattatataatatctttgaaaatatataaatgcgtaaagaataattataatttggtaaaatataagtattntgaattttcttatcatgagattattatatttataaaaacttataataattttctctataaaacaattaaatatattggtactgaattca

SEQ ID NO: 211318 - DNA, 290 bp, Glycine max
  unsure (1)..(290): unsure at all n locations
acaccataactaaacgcgccgcaaggtatccctatcgcaccagatccaaatctagaacgatgggtgatgaagaggagacgcaggaacagatganagtcgacatgtcggctctgaaagaacaaatggcctccatgatggaggccatgttaagtatgaagcagctcatagagaagaacgcggccaccgccgctcgtgtcagttcggctgccgaagcatacccgactctcttggaactgcgcaccatcctccctanacatagtaggacagggaaagacacactggggcacgat

SEQ ID NO: 211319 - DNA, 430 bp, Glycine max
tcattagatacatcaacattgaagtagtcaatgaatcttgaggcaagcacaacatgaggaaattcacaatccaccaggcaatgaatttcaacataatgtcttcaatcagcagtacctagttcatcttgatatctgatttattcattacctgagcatgtttgcatgaccttggtgtgagaatgtagataatgaggtaaactaacattctgtcctttgcagtcagtacaccaactcctaagcaattctttaagttcctagccaggtcaagaagcattcccctataggtttgcatcttgttgtacctatcaagtgtttcattgaacttgcagactccacctatgtccagaccaattacttcctttcacagagcgacatcaatgactatatctactccattaacagtagataagaaggtaccttcaagccttaa

SEQ ID NO: 211320 - DNA, 402 bp, Glycine max
  unsure (1)..(402): unsure at all n locations
cactgcaatttacaagaggttcatcacatacttctcaaagaatgctataccccttagcaatttattagccaaagatgttcccttctatcttaacagagcctgttntgaggctgttaaattgctaaaagggaagttggtgataactcttatcatcatagctgtatagtgggaccaaaaatatgagttgatgtgcgacgctagtggttatgcagcgtgggtcatgctaggataatggaaggagaagatttttcatgctatntactatgcaagcaaagtgctcaatggatcacaactcaactacacaaccacagagaaggagatgttggcggttttttatgcactagaaaaagttcaagtcctatcttgtggtagaaaagttctcaatggagtgcaactcaacta

SEQ ID NO: 211321 - DNA, 349 bp, Glycine max
  unsure (1)..(349): unsure at all n locations
aaaaatgaaattaccagcaaagtcttgcaagtgaacggtcatcaactcaagctttttcatgagagctctcatgtgaaggaggagtttgtggcanacctctctttggtctcgcctattntatgtgatgatgngccttgaataacacttgagggagcctttcccttcttctatagtgttgctcttntgttgcatttcattgcatgctcacatngaagacaatgtgcacttcaagtgtgaggggaagggttacaaaatctcgttgttgtctctaattttgcattcgctgtatatttcgttctcattctatttagatttgcggtcgattttttccgttctattagctatatgt

SEQ ID NO: 211322 - DNA, 409 bp, Glycine max
  unsure (1)..(409): unsure at all n locations
ttcttcaatgttgatntttcaccatggagatgcagcggaaggcaaaggagaagaggataggggaggcaccatccactatggaataagccaaggaagaaggagcttcaccaccaagaattgccttggataagaagcttgaagaggatgctctaatggaggaaaagaaatagagaaggggggagcacgaaattgaaggaataaaagagggaaagaagtggaactttgaagtgtatctcataaaactttcattcatcaaagttacaacaagtattacacatgcttctatntatagactaggtagcttccttgagaagctttcttgagaaaacttccttgagaagcttctttgagaaaacttccttgagaagctagagcttagctacacacacccgtctcataactaagctca

SEQ ID NO: 211323 - DNA, 499 bp, Glycine max
  unsure (1)..(499): unsure at all n locations
gcttgctttgaaaggganagcgaaggggaaaaagaataggttgtgttgtgccgcccttgtgtgaagtggtccccctttacgggattntagtgtcaacgttgtgttatgtattgtctttgtgtgaacgtttgccacaaccacaaaaacaaaaacagctttgaatggaactaggcttacttggatccttgtcttaaagatgttacatacaactacaactatgttgttatgtttgttgctattacaactattactaccgctgccattacctttcatcatgcttatgctttaaacttaaatctcttccatttcagggtcccattccatggccttcctagctgttcaacgtttacttcactcacacagcttccattttcttttttgctntataaaaaattaagagtgccaaccccctctcttntcttcttttctaatgttcatctccattatatattcacgttcaatcattganggtgcttcccgtgtagtattaactgggatt

SEQ ID NO: 211324 - DNA, 340 bp, Glycine max
  unsure (1)..(340): unsure at all n locations
acaccaggtattgtctctatttaacaaagcactaatctactattacacttgacaaactatatgtgatagtccatcagaaccaaaaagggacaatggatggactccatggagggaaccctctccccccacctcaactnttggaaagtacaaactaaaatcaagctccgatattcaattatatgtgtacactataaggctaggtacaagtagttcatacanatcactcacaaccacaaatactcatggtacaattgtgggcttggcaggttcaaagagtttaatgggccaaatagaatcaatcgggcattggtgttgtacacactcatgacaagaaaagccc

SEQ ID NO: 211325 - DNA, 467 bp, Glycine max
  unsure (1)..(467): unsure at all n locations
aaactctggtatcataccagagttgaatcaaatttaatagctgttgtaaatcagttttggccactggtaatccattacatcctctggtaatcgattaccagagagtaaatttgttgaaaaagaatttntaacttaaaattcttgaacaaaccttttgctacttcaattggaattcccttcctatttaatatatcctttctaagactctagagaatgtcttgatcatccatcttgaatatctttaatttctctgtcttgaataaagctttgagacgcatgtgaaactttggcatcatcaaaacatttagcttgatcctttgtccacacaggcatctcacaaatgtcaagtgttgattcatcattatggccactatataccaatggtcttncttgtagaaccatagacaatcttgaattacacagatctttgacgtaaaaaacctgtctggcttgttctaccataatga

SEQ ID NO: 211326 - DNA, 471 bp, Glycine max
  unsure (1)..(471): unsure at all n locations
gacctttaaactcagctctattgtgcaggtctcagacatgaatgtcaagtcgccgtgttatgcgaggatgactcccctatgaggtcggatttggtagggccatgtcctcctggtttccgactaggaaattggcgagtggaggagcgcccagacgtttacacgacgagcataatgtaaccctttgtagctctaaaactctacggttgggcctaggctttagagtttccttttgttaaggcattatgtcttttgttcttgagtttataatataaagactttcttcatctgttcctgtgcctccatccattctcattcatttgcatgtttatttctttacgcttaaaacaccagatctgacgacgagtccctcgaaggtactaatacccaggactctgtcgtcgatttcgagcaagatgcgggacagatggagagtgaataggacgaagatgtgggactntccccacagctgga

SEQ ID NO: 211327 - DNA, 460 bp, Glycine max
  unsure (1)..(460): unsure at all n locations
gctgaagncacttctactttttacanngcncttatatcttattatcattgagcttagctcaactgttaaaacttttcaacttgttgtcgtctattttctcctcctcttgcttctgtactttggtactcacacagttgatttcttaaaaaggcagggccaatatcctttattctaattcgttgggttgtaccaggactcaatagtcaataatactatctctttccttaacatacccaaaatgatataaatacagaaattattcattgcttttattagtttgtcatagttatgtaagcatctaaaatgattgctgtatgtcaacaccatatataaatacagaaattgctcaacaagtttatgtgtctttgccatatatatagttctttggtaagcatctaaaatgaatgttgtatgtatgtatgtcaatgtcataagaggtaatttatgatcttgcatttta

SEQ ID NO: 211328 - DNA, 479 bp, Glycine max
  unsure (1)..(479): unsure at all n locations
tctcaacaacatgacgggtacctcagtctgttntatctcatttatttggatttcaaacttcatagataatagaaaataagatatcggttntctttcaatcattgattttccgtgttattagtttcgtgttttggttttttgtttttaattgagtcattaagatttaagggaaaccggtatgcagatttttttcatgtttatttatatttctcgccctgtgtagttttgattgttctcaaatgtttggcctttagcgaggtttgtatgtatgtatggctgagaggtgctatctgctgtttcggttggtttatgtatattgctaggatgctnttacgttaccatcgatgttttgactattgttggataaaagttgggaaagtaagtntatgaattctaatgcataattgggaattgcacaatatgaagcaataagaaattggtacactctangagtaaaaatactgttgaactctctcaac

SEQ ID NO: 211329 - DNA, 326 bp, Glycine max
  unsure (1)..(326): unsure at all n locations
agcttctagccanatggacttatctcttgtattaattttctttgatagcccttttgagccttgtttccctttccttgattgaagctcactacaagccttaagtgaaaaaccatgatattaccatatccttaaggaattntggagctttggaattgggttgggaataagtgtgggtggngggttcttgtttcattggacaacttgttttgttggctatgcttcatgatgtattttgggccatacttgatgtacattgtatattggttaaatgtcggacatgctgaatgaatatgttgttctcaaaggctaaaaaaaaaaaaataaaa

SEQ ID NO: 211330 - DNA, 365 bp, Glycine max
  unsure (1)..(365): unsure at all n locations
acccaggngagaatggcaatccttaccttcggaagcgaaaagaatagaagggaaatttccaatcaaagaaaaggaaagaaggaagaattcccatccaagagaaagcataaaaagaaaagaaggagaattcccaatcaaagagtgggagaaagcaaaaagaaaagaaagaaaattcccaatcaaagaatgggagaaagaaaaaagagaaaaggaggaaagaaagctcctgatcaaggatcgaaagaaaacagaagaaatgtgcagagaagtctttggaccggacaatatctgaacaatacagaattgtcaccaaatgaacaaaaagggaaggaaaggaaaccacgacctataatggtcttctccct

SEQ ID NO: 211331 - DNA, 448 bp, Glycine max
  unsure (1)..(448): unsure at all n locations
gggcattattntcaagaactctattgtttctttggttngncattatccatttaccattgtctgttntcaataagtaggcatgttattgaattgaattgaattcttaagaatctaggcattgtaatcgattaccagagacagaatacttataggtttttcaaaaagaagtttgaaatttgaattttaaatactgtaatcgattaccatttaactgtaatcgattcccagtaacgaaaattttagaaatntgaaatgaaaagtcatgacccctcaatgtataactgtgtaatcgattaccagtgagggaattctaaaattgttctgaaaagtcacatctcttcaaaagttcttgagaaaccacaaagggcctatatatatgtgagttgtctacgagaatcttcagagttattcataaccttattgtcttattctctcaaaaacaaatcat

SEQ ID NO: 211332 - DNA, 291 bp, Glycine max
  unsure (1)..(291): unsure at all n locations
atgtgtagggggttaattatgcatgcaatgtatgttcttttgtgtggatttgattangttttgaggcctgagaggcgcctatggttaagggcctgaaagccccaagtttctggaaatttccatgtgctcgctaagtgctcatatgcgctaagcgagttcatcaattattgttgaatttctgggttttcggatgaactcgctaagccggccctgtcttgctaagcgtgttcatgaaatttttttgaatatatgaatgtttttatgaactcgctaagccattgcaccttgggc

SEQ ID NO: 211333 - DNA, 466 bp, Glycine max
  unsure (1)..(466): unsure at all n locations
nntgaaatggaacttatggcagttcatcttannatagtgcatttactcttccttcttcctagtagctagtgcctaaatcatcttcttgttagctccagacattgaccttgctgtccccactgcttttgcaatcaggttactcaacacaaatcttattgacatattgttctttgattttacataaatcaaatgtgtaaacatagattacattcttatccaaactttggttgttagtttttggtcggagcaagctaattgaaattgcttanaatagactctaagatgcagtaccttcaataatttaacacaaattaaatgcatctctaaataagctacaggatgcaattctcaaagtanaagatgcaagtaanaataattatagatgaagacaatcattcanaagttaatttaggtaaattntatnaaaaataactaatagacctgagaatgatgattaagattaatc

SEQ ID NO: 211334 - DNA, 433 bp, Glycine max
cctaatcttcttcacttcactattctcatgacatgcacagaattggctaactttcatctcccaatcaagatatgcctcgggttatgcttcatttgaaaattaaggaatattctcttacgaaggccatgtcaatttgataggaagatcatttacaatgacctaactaatgagattaccctcaactatcttggaactaaatttgtgttgcatcctcaaacaccttctcaggttgctaaggatcaagttcaaataatactaaaataggattaggaaaagaatagaaatagaaaatatgaacaacctttaatggttaaggaggagtgtaaggaggtaagtgtctcctccaagaggttagctaagaaggagagtcattttacaatatagacaaacattaaagaaacttcccttcttagacaacctccacatcttcttc

SEQ ID NO: 211335 - DNA, 394 bp, Glycine max
  unsure (1)..(394): unsure at all n locations
tagacattnttgtattangctntgtgtcattaaatcttacatttatagcttcttctataaataagggtttagggttgtaaactctgtatgccttggatgtntcaaagtacccaagtaatgttccaataccacacttagagtcaaactttcccaagttgtctttaatgttaagaatgaaacactagcatccaaaaggatgaaaatatgaaatgttgggctatcatcctttccacagttcataaggaattctttttagaatgagtcttatataaattatgttctattaataacaagcagtattcactgtttcagtccagaaagttttaggtgtaaagttgtcattgagcatgagtctattcatttcttgcaataatctattctttctctcaacatc

SEQ ID NO: 211336 - DNA, 368 bp, Glycine max
  unsure (1)..(368): unsure at all n locations
actgacaactatttattctgtcctaaagctgtacatcctcagtacaaggatttaaggcattttcagtggcattgggaacaggaggagcctgtcattgtcagcaatgtgctcgaatgtacatctggtttaagctgggaaccgcttgtcatgtggcgtgcattatgtcatgtaactaataccaagcatggccaacaattggcggagaaaacaattgattgcttatattgcactgaggctcgcttaatttcccaatctttaactttattgaccttggagagctttttacacaaatntcattcttcaccttcattctcatgaagaatatgtgtaattgtttaatgatggcacttattttaactggaaccact

SEQ ID NO: 211337 - DNA, 460 bp, Glycine max
  unsure (1)..(460): unsure at all n locations
ttcctcaactctaactcatcaggtcattgngataacttgttacatttattgggttttagatataaatagaattctaatattcttaatttttaatgcataaatgtatataaacggaatttaaaaaaaaatataatatacacaaactatatggaaaatacatggtttccgtgtttaaaattatcataatggcaaactagaaagttatatatggaggaaggcgtggaagtggggtaacagacagctaaatatgactcaattatttgataaatagtataataaagaattaacaaatgttagttcgaaaggaattattctatagaacaaataaataatcactttcaattcactacaagacagatgtaaattagaagcgtgggatcagagctntggattatatataaggaaagttgcgtcctcccatatcttgcaactccattcccgctatcatttcctcttgcat

SEQ ID NO: 211338 - DNA, 457 bp, Glycine max
  unsure (1)..(457): unsure at all n locations
ngagtataattcattctttgtgttgtgagcctacgtcagatagtttttgattactgttgtttcttacataatcaaacagttgttaacatctccacctgngtttacactgtggtcatgttttcgtttatagaattcattcagaatatttgttgttgattatcgtctcctaatcaattgagtgttcattttgttattggctgctcatcttccaatcatgtcttgtcaaactacttgataatctgtcatgttgttacttctattatgaatagagagagactttgctcttgttaatcacattaaggtgtttcgagaggaaaatacttgagtaggcatgatccttgctacctatagatgaaagtcaacttagtaagtcatgtacctgtgttccttaaggatgtgcttagttaccacctaagtgcaagactgagaatcttataagtgtaatacccatagaaaa

SEQ ID NO: 211339 - DNA, 183 bp, Glycine max
tttccacatttgagcaaaggcaacgtggtcatagacatgtgctgtagagtcttgaatgccctggatgatgaactcaataatttggactaccctacaacccctgaggagttgacagtggggccggttaaagaccaatgaacacaatggtgcgcaacagtaagttggagacatgtttatgaccga

SEQ ID NO: 211340 - DNA, 484 bp, Glycine max
  unsure (1)..(484): unsure at all n locations
gtgcgatgtgtcagagggttcatatccacaatatactggtgtaattactctatatgggaaagaagatctgtattttgtctgacatattccatttcctttggaattggatgtatattgtagttattttcctcttcagaatgaatattgatcatgttcttaacaaatgcagcttttccttttacctagtgaccaccaaacccaataaaatattgttctaactcttggtctcacattcagatattgaatcataatgttggatctggatatgatgcacctgaagttgccttgtctggtcagtatactntgaaaagtgatgtctacagctntggagtcgtcatgttggaacttctcagtggacggaacccttttgataggtgaaattaatggtttctttatgtctgctctcacgtttntgagcaatattctgcagattttaaattatgcacaataataatgttgtctcctgattgcaaacattcatgac

SEQ ID NO: 211341 - DNA, 322 bp, Glycine max
  unsure (1)..(322): unsure at all n locations
cttaagacaaccactatctactcnnatattctttcattctntcttgtaaagctttatgtaaattcttgtaaagatagaaaactctcaaaacatcttgtatatctggagagaaaagactaaaagcgtttagtgatatattcgtctattagacaatcatactttagtcaatgagtaaacttccaacaaaccttgttggtttgtttagagccagcagtggcttgaaaggacaaagaatattggttttaagtcaagcttatgatagagcttgcaagtgtaaaaactagaagtgacagtgaacaatacttatagctttgataagtta

SEQ ID NO: 211342 - DNA, 507 bp, Glycine max
  unsure (1)..(507): unsure at all n locations
ctatagacccgagtctcattcaggatcaaaggtggcttgctgtatcaaagtttgcaatatacataagtagtggctcctttgtttgattctcacaattatctgaaagaattatgagattctcaactttggctttgtggcagtcagtataaaacaatttaataaatatgctaaggagtatctggacttctggactaatataaacttattagtgtgacgatttgttttctgtattgtatgttacactgccatccaatgtattcactattcagtaccatggtagatctgtgagagattcagaaatctgcaaacagctcccacatcaaatggtaggtggctgtaacttgagaatttggtgtaaggtgtcaattatgatgtcttcacagctgaaacaggtgaaagagaggatgcacatcanagagtttggttgtctttcctggaaatgccatangccacctgttcctatcacatctcataattggaatgctatntccttttcatggatatggg

SEQ ID NO: 211343 - DNA, 341 bp, Glycine max
gtgcttattgccaccagacctggaaggcctctcattttgtacatgacaatcttggacgagtcgatggggtgtatgctggggcaacatgacgaatccggaaagaaagagcgcgctgtttactacctgagtaaaaagttcacgacctgtgaaatgaattactcattgctcgaaagaacgtgttgtgctttagtatgggcatcccatcgcctaaggcagtacatgctgagccatactacctggttgatattcaagatggacccggttaagtacatcttttgaaagccaactctcatgggacgaatcgcccggtggcaagcctgctatcgaatttatatagctac

SEQ ID NO: 211344 - DNA, 467 bp, Glycine max
  unsure (1)..(467): unsure at all n locations
aacttcctgctnttattgttgaccacagagtgttacctggagatatgtcgcggcggtcaagagaccttgcggacgtcaggtggggtgctattgcccaaaaccaagcttgaccaatcccgacccaacccgggcatagtcggtcagtgagaacctgtgatgtacctaaacaggcgagctcctggcagtcaacagataaaaggaacaaagaccacanagcaaggaggcttgtggtggctggccagctgtgaatattgtgtgatatgtggattatggcctctggtaatcgattaccaagggtgggtaatcgattacaaggcttaaaattgaagacaggaggctaagatggtctctggtaatcgattaccacagggtgtaatcgattacaggcttgagaacgaagtcaggaaactaagggagcctctggtaatcgattaccagcctgtgtaatcgattacacagagggatgg

SEQ ID NO: 211345 - DNA, 497 bp, Glycine max
  unsure (1)..(497): unsure at all n locations
ngcagtgattacatctccctctntctcaagcaaattcttcttgatatcatcaaaatcttcatgagttactttctccccctttttgatgatgacaaccacctgtaggttaggagcaacaacaaagaaaatatctatttgcatatagtttactccctcttggttttacaatgattgcttatatgagacaattgaagatttcatatttttcatatataaaaagttgtctcataaaacaatagataatttttcttactaatttatcttttatctttctctccccctttgtcaacatcaaaaacaaatcatgaatagaaaggagaaagatgttaccacttcgtgcaatgtatgagaataagtgataccaaaaggcattaaaacaatcattcaatattaatcaagcaaaaacaagtacaataacacatctatcatacacaatctaacacaatcaatcatcanatatgtcanatcagattaattatattaacaatcaactaact

SEQ ID NO: 211346 - DNA, 352 bp, Glycine max
  unsure (1)..(352): unsure at all n locations
ccttgaactcagctgccgagccgacagatcagatctgatccgatatgaagactatctcatagttgaaaggctctctggcaactcattgcccatgcactntactctctacacgaatgccaaacagatcttactctctggtaatcgagaaccatattgttgtaggcgattaccactagcatgatgaatgggaaacagttttcagctgaatttacaacgttcctgctgattacaacaaacctttaatcgattacgatgttttggtaatcgatttctaatgcctttgaacgaggaatatcaaaggtgataagcacattcttacacataaaagccttgcgtaatcattcactgattt

SEQ ID NO: 211347 - DNA, 358 bp, Glycine max
  unsure (1)..(358): unsure at all n locations
gtatntacaaaatacaaggcttagacaagaaagagggtttcgaaccattgggcgaatcgagctggcatatggtcgaatcgaagtcaacgcaacaagatttctggacttagcgcaatttctgataaaacttcacagaattagttcgacttcgagcaatatggataacccgtctaaggagcagttatgtgcatgcaaggtgtacgtagcaggacacttggcattaggatagtgttcgaccgttagggcagtttaatttcgaatgtctatatatagcagttctttaggcagatntcgaggtcgcaaatcattttacaaatccttatatactcaaagtacccagcgcagagagaaacgagta

SEQ ID NO: 211348 - DNA, 421 bp, Glycine max
  unsure (1)..(421): unsure at all n locations
agtatgtaagtttatttttactaanagtttaatttaactaaactctattcttaaatattattntattgtcatacggncgtactatanaaagttcaattaaattttatcttaacttattagattatttttaatgttactttttatgtttttttgtttgtaaaagacattgtaattatattgttaatgttactaaaaaaattcgcctcccctattttttttcttctgattccactgctgctaattaatatatacatacacacataaaagctgtcttactttaccaacaactagaanattataatgtctaaatattttggggtatacattngtttataatggtggcttgtcttgcagaaccgacaacgttcatacaaataagaatgtagttccctatatttatagttcataagaaagaatattg

SEQ ID NO: 211349 - DNA, 204 bp, Glycine max
  unsure (1)..(204): unsure at all n locations
cttgtggaggcccacatctcggaaaaaaatgacaataccaactttggccctgtagcggtctccattcaacaaattcatggatacgctaatgactgtctggagttctggactacanggaactcattcgagtgacaagtagaactttgttatgtctgagaaactgccgtccaatgcatctctattcagtaccatggtcacctgtga

SEQ ID NO: 211350 - DNA, 383 bp, Glycine max
  unsure (1)..(383): unsure at all n locations
agcacctgcggctgcagctcccgatccgacttgtatgatctgattttcgnctttctaaggcaggatcagtacaattctgatatggctcctgaccgtactcaactgcagaatatgttcaagaaagagggtgaaacctttaaagaatatgcgcagcgatggagggatttggcggcacaagtagctcctcccatggttgagagagagatgatcaccatgatggtagacactctgccagtgttctactatgagaagctagtgggttacatgccgtccagctntgcggatctggtgtttgccggggaaagaatcgaggttggattgaaaagaggaaagtttgattacgtttccttcacaaacgtgaatgccaaaagaatcggggcaac

SEQ ID NO: 211351 - DNA, 386 bp, Glycine max
  unsure (1)..(386): unsure at all n locations
tattcacggaaaacgtaattatgaaattgagatgcccgaagattcaccatttcctatttaaccatgcattaagtaccatgttcaatatatttgttatgttgttgtgtgtttnttttttttataaatgggtttatgatcccaacatggttggctcatggtgcctaacacatgcaactaagaatgtagtgcgaagtttcacgcttccccttttttgtttttgttttgtagaggaaaacacaatgatgagcaaacatgaaaacaaatggtatgcaattgtgcagatcaaaaagtttgttgaacgcatatgcatgacgatgccatgactcatgcaaaatgtgaggctgtaatatgataacagacaaatgcaagaacgatatgttcattat

SEQ ID NO: 211352 - DNA, 421 bp, Glycine max
  unsure (1)..(421): unsure at all n locations
tatctcttttatcttagtgagagtgattctcctaaattcttgagtgattcaagaacaccctcgctgtatcaaaggactntcacaacctttgtgtgttgccctcgctggaaagagtgattctttccttcctatcatctccacccttgttctttcaaaccacaattccagaanatccacctctgcccaaaattatctcgtgaccataactcccattttacacactcaaattaagtgattcttgatcctaaattgaatttcaaaacgagatctttcacctcgttttggaatcacctcatttggagccctgtagcttccgttattgccatttctatatttctgtccagccaccacttaacctacgttttaccatctcattcatccagtttatgccagaaaccaccttattaagacccacgagatt

SEQ ID NO: 211353 - DNA, 471 bp, Glycine max
  unsure (1)..(471): unsure at all n locations
tgccctttatgctcaacaatcaactntgtgttgcaccgtgatgttgccttacacctagaggtttgaaaatgttgctcatcatgtacttgtaggtgtaggataggtagccaaattaccttaagtagcgaaaatacctcacttagcttaggtagcaaaaatggccgtgttgatttattcatttaggtagcaaaaatacctttattgatttacaccttttaatatgtacatatgtaatttaagtagcaaaaatatttgaatgtgtgtatataaatgtttggtagcaaaaatgcctcataaagtgtatatatgttgcatgttangtagccaaaatacctcacanaaatcatatgtttaagtagcaaaaataccttgtcaatttaagtagcaaaataccttgttaaaaattaattatattaggtagcaaaataccttgtaattaattaattacgtacanagatacctataatgtat

SEQ ID NO: 211354 - DNA, 415 bp, Glycine max
  unsure (1)..(415): unsure at all n locations
tgattctgccctcattgctcatgtcttaatgaaatgcaagaattacaacgaccttggcaatgatggcatgtacaatgactcaaatgacatcctatgatccccttcaatatattaatcaggtttctcatggtttggcattaaataaaaatatgaagtttctttttcatttttaatctttttacatgatcaaaaaggtcggtcattgggggatggtgtttnggtcaaccaagtggccatggtgtctcatatcattcatctgtggagaataggttatcactttctttattaatnttctactacggggtcaaaagtaggtttaattcatgctatatgcttgtcatatctcctacctatatgttgacttcccaagttctaatcagagggctaccttgtctgctgtgatacacaaatgttt

SEQ ID NO: 211355 - DNA, 430 bp, Glycine max
ggacctataaatctaagcttccacatgaacagaagttgtctgctgtcttaactacattttgaagcttgtatgcttgcactagttcttttgctctacacactaactcagacaatatgtggacccaatatgctcctcagttcaagataaccatggatacattcatcattgactattggacacggaattcatggaagtaacaactagttgcaagtaagacttacatattcttaggaaagaaatgagctcgtacccttggaatagatctatcttctaccagattgagatttttgagagcagctctagtgcatttggatttacatgtgtcaatcgtagaccatacatgacacataacccacaccgtaggaaataacatcaagcataaatacaggagggagttgatgtttttatgttttcataacccaagaagata

SEQ ID NO: 211356 - DNA, 117 bp, Glycine max
acaccgagcctatcgtgcacacagactcttgacacctgactgttatctccaaggacgtctcagtggtcatcatggagaagtacgatgactggctctccccactactctcacttactg

SEQ ID NO: 211357 - DNA, 412 bp, Glycine max
  unsure (1)..(412): unsure at all n locations
tattatataatgaagcttaagtgatactatgttgtatatanncagcaaatatagtggtagacaattagacatcatcatgcatggatgtatggtatcgaacctgtgtatgacacggttcgagtaaaataccaatttggcaagcaaggggagaaactgctgcaagttgcaacaacgaaattggaaattaaggacaaaaaagagagaagaatgcgtgacccgtctttgcatttctacaattctatttctactacctgatggatctagctagtatatatatgcgaccaatcatgggagcataaacgacactccatgctcgtacacgtattgcattactagaatcttntcttataatcattagagcatgtatatagtacacaacgtcacttaacctgtgaaattcacgcactgatct

SEQ ID NO: 211358 - DNA, 470 bp, Glycine max
  unsure (1)..(470): unsure at all n locations
gtacatatntgnncattaatatcattgtatctttgcttattcttgtatcagttttatttactcactaatatgntttttattgtcgattnttttttagtgttttttacattaccatattttacatggtgatattttgttaaatatttttatttgtcaaaattgccttcaaaattattgattgtttttacaaattaacacaatatttttttaactatttttactcatgttttttgagaactttctgaaaaagttattcgttccataatcaatcttgggataaataatatcaattaattttttaaaatcattttaaattttatagttctatatttatatattttttagattcctctcatttgatgattaaattaactctaatccacacatgtattcatatttaaagtgtatacaaaatacaggtattgngttgtgtanggctgtgcgaattatttgaactgacctgtaattga

SEQ ID NO: 211359 - DNA, 351 bp, Glycine max
tgataggctagccctctcttctagctcttgcagtaccagccactctatgaacatagctttttatctcaacttttgcataatcatgacgccatacagagaaacttagcacgttgaaagcacgagcaacatgctatcatgcaagaggaagtgtactcttttcaacgaaagatagtgatttaacactgagggaagtcaataacactaaccatttcaagcagagttactaccaatcgggatcatacactattaacggtgacaacacgtggagacgcaaagccgataaatgtttgcacaccgataatctcagatctatattcacattcgcgaaggcccagggacattgatttaata

SEQ ID NO: 211360 - DNA, 500 bp, Glycine max
  unsure (1)..(500): unsure at all n locations
tagtcatgcaagtgcccaaatcaagaattgtctcatttgtagttcttgaagataaattcaaatgatatgaacacgaaaacaggatggattgccttgaagttttcaaaaagttgaaattgacttagttntctcttagagaaggatattgatgtcacactcaagaaatatgtgaaaagatgagtgataagtcatagatttgatcgccacaagttgccttaataaaatcaaattcagtcatttacccaagaatcaaggtaaactctcacaaaaagagcactactagaaaaagtagatttaacattgtcactttaacatcggttntgagaaaaaccgatgttaaggttaccacggtgacataattgtaattaatgtgtagtagttaacatcggntntctaanaaatcgatgttaataattgacgtaacatcggttttganaaccgatgtaacattaaattgaaacatcggtttttaataaccaatgtatcgtcagtaataacat

SEQ ID NO: 211361 - DNA, 377 bp, Glycine max
  unsure (1)..(377): unsure at all n locations
ttacaagagntcatgtaactcataaaaggtttcagcataatgtttttttatgtttaaacagagatgtgttaatatcagggtagaaaaagaaagatacagggggaaaacttgatgaaacttcaaataatatcagcgcaatttagttaggtatgtatagttccactcaagcttgctgcactttgaaatgccatgcaatatcttgagagctgtagctggtatatcaaatcctgatcgacttccaacanagattaatttaattttatggtgggttaattgtggctgccaatagttggatttaattgatccatctctttatatactatctgaaatgtaggtgtgaattcaagaattaccatggtaattgggttcgtgaagtc

SEQ ID NO: 211362 - DNA, 461 bp, Glycine max
  unsure (1)..(461): unsure at all n locations
gctgtaaataattgttatttttcccatgaactacttccttttcacagctngcttgatgaatttaactntctacatctactntaggttggtaaaagtagacatgatctagttnttgtctggtttcttcaaatccaaagctccttgttgtcaatggaattgattagcagaatattagttattaattgacacaaattgcagaatatttgttattattggcacaaatttgctggtcattcanaactacatatcttacatgattatacaactgtaattatctccttaattagtgatcccagctttaggataacatttattgcaaattgactatttaatgcatagatgtagaaatcaaattgtatgagcactatntaaagcagaattctccacaggagaacacataaattnttcatctgcaactttcttagctaatatggtattagtctanggtgcaatcctatcat

SEQ ID NO: 211363 - DNA, 268 bp, Glycine max
ttttatccccctgtgacgtgctaagccctttacataaggatttctcgataactagaaataaataatgtcccccgacgttggattgtttatccataacatcgttaaaaaaattccgacggtcggccggccgtaccacgtgtgaatcataagaggtaaaaaatgatataccaaaatatctttagaaaaaaagggaaatcatcggcgtttctcttggatctcatctaatcgactgatatacttaaggactaagctaaacactcgctagtca

SEQ ID NO: 211364 - DNA, 336 bp, Glycine max
  unsure (1)..(336): unsure at all n locations
ggaccttaaaactcagctgttttgtcaacatgttagtgtcttggacactcnttctagagttttttttatatccctgngataaaaatctctgtgaaaacattcatcttgtgaaatagtttccaaagtatatattaacaccttattcaacacctctttctagtgtgctatttgtatttcactatagcttgttggaaaaggggatcaagaatagcctcttggtaggaagaacgctcggtagactatgaatatangttaacaaggaagcaaaataatttgaataaaaggaataagcaaaatatagtaatttaatagacatacaatcataatgaggatatc

SEQ ID NO: 211365 - DNA, 335 bp, Glycine max
  unsure (1)..(335): unsure at all n locations
ataactctccacttcacaataaacataagacccatcccagtgccccctttaactgagctacgcactctacgtagccttatctcgtcctctagatcgggcccatcaaccctcagcttcacatatcaatcagtaattcaaaatatgactacctaaccaaaaacgagaaggcggaatctgccaaaccatcaaaccacagttcttatatatcccagaacatttttcgtccattcgtaaccgtggatcgctgaaattactgaggtacagaataaatacattgccgtggactgttanatgctgaacgaatgactatttcatgatacatgcagcattttgca

SEQ ID NO: 211366 - DNA, 461 bp, Glycine max
  unsure (1)..(461): unsure at all n locations
ngaagaggatgctctaatggagganaagatagagagaaggtgtgtggggggggagctttatantgaaggaataaaagagggagagaagtggaactctgaagtgtatctcataagactttcatagtgttacacatgcttctatttatagactaggtagcttccttgagaagctttcttaagaagacttccttgagaagcttctctgagaaaacttccttgagaagctaaagcttagctacacacacccatctaaaaactaacctcacctccttgagaagcttccttgagaagctagagcttatctacacacacccctctaataactaagctcacctccttaggaagagaagctagagcttagctacacacccctataatagctaagctcacccccatgacaaaatacatgaaaatacanaagaatcctactacacagactactcanaatgcgctgaaataca

SEQ ID NO: 211367 - DNA, 328 bp, Glycine max
  unsure (1)..(328): unsure at all n locations
tttgccgagatgggctaatggtttcctggccgaataaatgggaaaatgccagtttccgccgaaacgaaaagtcggttgagctcgcacaaaaaaacctagccgacctacanntttaaatttttatgcaacaccaaaacaagaaaacttcctgtgccgtaataaaaaaaaaaacattacatgacagcgagcgttttgaaaaacaaaattgcgcaacgtcggctgaaaaatatcagtcggggctttttcacgaccgatgtcggctattgagtattcaattcaatccgtgaacgaaaatttgtctgatgtcggttaagaaatgttcgatcgg

SEQ ID NO: 211368 - DNA, 425 bp, Glycine max
  unsure (1)..(425): unsure at all n locations
ggcattggaatagcgaaagccncactctatcattaggattagtacctgacatctcaaacaaacaaatcaaacgtaacaagacaattatagttgctgtttgaatacctcacccactcaagtgtatcacacaattatggcttttctctaatgaaacactcttgccttttaccactctaattccccttgagttcttaggcaattcaagagattatggccacaacaaagaacaattcaccaatatgtgtaaggtaaggctagagacaagaaggagggaatgatgagaatcatgaaactggccaaatacaggctaaaggcccaagtggagaaggacgaaggcccaagtggagaaagacaaagcccccgagtggagaaggatngatgagaatcatgaaactggccaaatacaggctaaaggcccaagtgga

SEQ ID NO: 211369 - DNA, 407 bp, Glycine max
  unsure (1)..(407): unsure at all n locations
acgctcaacaaagtactttcgacacctactgtacgttgatttgaccaatgctgttatgggaatgttgcgacaatccttcaaaccttattgatacattctgagaggttggttgncatgtggccatatcgacatccttctctatcataagccatcatccattnttcctttgaaattcgatcaatccatgtggctatggctggactcagttcacgaaaattttctaaattctgatcaaaaatgtgcttgcaaggagtgtacgctgcatataattagttatgaataacatggataagtatatatgaaaggtagataaatgggaccatcaaatatgaaatcttacccaatttcttcaacatgtctttttgtttgcattatcgaatttccgaatgaagttgcttgctatgtga

SEQ ID NO: 211370 - DNA, 489 bp, Glycine max
  unsure (1)..(489): unsure at all n locations
tcactatagagaaagatacatattatatatctattattngtgagaattgtattcctattatcattaatctaagagacctttaaaagttttacacattaaactaatcactaaaaaagaaatgttaataacagactttgtgaacacatttattataaataattaaaatttatatattttgctaagtcttacgagtctttntgtttagtgatggatccataatttcttttagtagaagcaaagaaataaatcataatggttttactaacaaaaaagatattataagatattataaaatatacaatctcatgataaaaaanaaatcaaaatgcctaagtttttacatatntaaaaggataaaattagtgcaatttgttgtctcttttattttacattgttttatgttaaaanatattntacgagtacaatacctattcntatggtggcaaaaatgataataatcatttaaaggattcacgtaaaaaattactt

SEQ ID NO: 211371 - DNA, 401 bp, Glycine max
gcaatacctgcgatattatgattcatgactaaagagtaacaattgcctctctaatattcaagctataatgctgctcttaaaagcataacttgcctagtgatgagaatgacctcacactacatgatttcgcttgcccagagtgtgtgtcacgcttatcacgccaataatgctctggtcttattcacgttaaggatgaaatttttctttatctagaagcgaggacgatgacagacttcaacgctagaatatatggaatgatgttgctatgcggactcgagaggttataatatacatgaactaatagtgtgtttgacaacacataaatatatttgattctattctacgaagatatggtgaaatcatggacaagtataagcgactatttgtctaaccgttattat

SEQ ID NO: 211372 - DNA, 363 bp, Glycine max
ctgaacgttgtcgttggttccacatattagaattcctcagattatctttaaaattgaatcaagaaccgcattaacatcgattcagaagaataacttgcacacaaaccacgataaaagcacgtatgaagacgcagattggaaacaaaacccgaggcacgtggcggagtaccttgagagtcgagatgaggcgctcttgctcgtccatctcctcgaaatgccggcgccagcgatcccaatcccaatcctcatcgacgccgccgccgcggccgcgatcgacgcggcgtttccgagggacttacagaaagaatatacgcggatcgcgacctcggagaagtggtgcagcacggactcccagtcgctgtt

SEQ ID NO: 211373 - DNA, 69 bp, Glycine max
tagataaatcaaaatacttctcagggaagtttgaaatgtattttcatacaacaaacctagcacactttt

SEQ ID NO: 211374 - DNA, 300 bp, Glycine max
  unsure (1)..(300): unsure at all n locations
tttacttcaattgcctatgctaggatcagggacagattcatttatgcatcaagggggggccgaaattnntttttatacaatatttaaatatctaacttctaataaataattatttaataaataaaaagttccacaaaaatatttattaataattttaggctaaaatatgtttttgatccctaataaatatccaaattntgtgttttctccctaataatttcttcgctatttgctccttgataaaacaaaaaatttgttttcagttcttggcacttttttttagtccctataaattagaga

SEQ ID NO: 211375 - DNA, 424 bp, Glycine max
  unsure (1)..(424): unsure at all n locations
cacacagatggtccgattcgggaaataatatatcgagacgcacgaaattgaaccacggaagctcttgagaaatttgaatggtcataacatttcactcggatgttcgatccggggacataatttatcgagacgctcgaaattgaacaaccgaagctctcgacaaattagaatggtcgtaacttttcacgcgaatgttcgattcggggacataactcatctagacgctcgaaatgaacaacggaagctctcgagaaattcgaatggtcataacgtttcacacggatgtccgattcgggaacataatatatcaagacaatcganattgtacaacggaagctcttgagaagatcatatggtcataacgtttcacacagatgtccgattctgggacataacttatctagacactcaaattgaacaacgg

SEQ ID NO: 211376 - DNA, 480 bp, Glycine max
  unsure (1)..(480): unsure at all n locations
tctatantaagctgaaccatttatcaataaacacaagttgagttntattcagaanattagagtttatctcttttatcttagtgagagtgattctcctaaattcttgagtgattcaagaacaccctggctgtatcaaaggactttcacaacctttgtgtgttgtcctcgctggaaagagtgattctttccttccaatcatctccacccttgttctttcaaaccacaattccagaaaatccacctctgcccaaaattatctcgtgaccataactcccattntacacactcacattaagtgattcttgagcctaaattgaatttcaaaacgagacctttcacctcgttntggaatcacctcatttggagccctgtagcttcccgtattgccatttctatatttctgtccagccaccacttaacctacgttntaccatcccattcatcccatttatgccaganaccaccttattaagacccacg

SEQ ID NO: 211377 - DNA, 391 bp, Glycine max
  unsure (1)..(391): unsure at all n locations
atgcaccaggtatccgaaggtgttttggtnttgttcttttaaaaaaataaagctattgagaagagtagattgtatcatttttagccatgtgaaaaagggtagagagagatcaaganatacattggagaaaattgctaagagggatccagtggtgaataatattcttgagaatttggtctttaactgagtccaataacattgatagatccatgtatccgatttcacttagtggaataaggctcttgttgtaaaggtagggaggcttgttatatggagggaactataaagtaaataaaagaanatcatgctttgatttttgcggtnctatagtaaacataagaggtggaatttgattgaaatatttgtgttgattctgttttaaaataggact

SEQ ID NO: 211378 - DNA, 468 bp, Glycine max
  unsure (1)..(468): unsure at all n locations
gatgctgattgggcctcggatccagatgatagaaggtctacctctagtgcagtgattntatttggttctaatttggtctcatggtggtccaagaaacaaattgtggctagatcttccactgaagctgaatacaggagaagcttggcttaagccacagctgaagttacatggattcaaacaaatgcaaagaataggacctcggtccgaaaatgcacctcgaccatacaaacctcgagaaccaccagagtcaccagttttataagcanttggatgcaaatagccttgagtgtagtttaacaaagcggaactcatctcctgtgcatctctgttgtagcgcgtgagtcgagtttcgtgaccatagaacanagctctcaattttgctatggatggagtgcgctntntgctttcgataacagaaaccaccaacgcgtaattagatggtagtccttcgatgagcgcatcaacgta

SEQ ID NO: 211379 - DNA, 445 bp, Glycine max
  unsure (1)..(445): unsure at all n locations
agttattttaccagngggacactactcttaaaacaaaaacggtatacaacctcctcccataaatacaaacatcaatgtaaatttagagcaagcttatgcgcatatttccttacgaacgttcacttgcacaagacattctatcaactaagaaaaatgcacccatatacaatcaaggtagcttcattacctagattatttacatgtacttccaaggtgtatttgttatttacatcacacacgcctccttggctgaatttacatacatacatactcaaagcatgttggggtaccaaaaactgcacatgcgctcatcttggtatttctaatacccatacatatacaaacttcacgatgaatcttgactacctaccacataaggtgctacatcttatgctctcttttttttcaagttttgtacctaagcccatgcaaatcagcatatttc

SEQ ID NO: 211380 - DNA, 316 bp, Glycine max
  unsure (1)..(316): unsure at all n locations
acacattttgagatctttataatcgttgtgttattgagcacattctctccatagatcatatcttttttccttttgataatcatgacgttcattcagctccttcaaattattttgaagatcttttacgtttttttcaaactcctgagagttcttgagaagaggagacttttctctagcatttgtctcaatctcaagatatagcttagaatctctttctttaacaattatgatgtaagcttgattgcaagcttctatggaggctagatctttgagcttcaatgagggccttcaatggtgantttacaccatggagatg

SEQ ID NO: 211381 - DNA, 235 bp, Glycine max
acataccttgctattgactaagctcacctccttgagatgagaagctagaacttatctacacacccgctataatagctaagcctatccccatgacaaaaaccatgaaaatacaaaagaaggctcttactacagagactactcaagatgccgccgaatacaaggctaaaaccctatactactagaatggccaaagtacaggcccaaacgaaagaataacctattctaatatctacaa

SEQ ID NO: 211382 - DNA, 298 bp, Glycine max
  unsure (1)..(298): unsure at all n locations
tgcgagacggagaccaacatgctanctattatcgccaagatcctataacagagaggtttattcacagaccacgagcatagaatcgcggatgaatatgcgcaagattacgctgaataagaggctagaggagaggcgatcgactctntacaccaacatgcaaccctgtgggtggagcgctttgtccttacactgaacggtagtttagatcattctcgaccgttatcctatgccaccgcgatggcagacacctacttcggccccgaagagagtcatgggcttatcggctattgtacgcaca

SEQ ID NO: 211383 - DNA, 321 bp, Glycine max
cgaagtatccgccctagaaggaagatcagtttggcaaaggcccccaattggaaagaccgtttaaataatcatattattcaatggtgcttatacattaagagctactcctaaaacgtcttggcataaggtagttttaaaaatataaccacctgtcgagttaataactaaatagaaaaaccgaaacataaatgcatacataattccataaggcatggtcatttcatcaaagtaatcaaatcaaattgaaaaaaattttatttctatgctgccacgctattaattttatgtgccttttttataaaccggcgactctctactttc

SEQ ID NO: 211384 - DNA, 328 bp, Glycine max
taatttgcaacttacctatctggatgcgacatcatggcatataggtcccaactttccgtcgaggattcagtgtcaaagcaaactttaatatgttggactgtgtaacacggggattttagattttatgtccacttggttctgggaagcacattctcaggctttgtatttaaacctctctcataaacatatccgcggtgagctggtgactacaactaaaaatacaatatctatccaaactggtgatctacgcacagatcatttatgtggcaaattaccctatctttcaaatgctgtgtataggtgagaccttttaaccaattcattctct

SEQ ID NO: 211385 - DNA, 393 bp, Glycine max
  unsure (1)..(393): unsure at all n locations
acaacaagtttncacatacacaatgcgcgcataaacccaccatcccctggtgcccacctccaactgagctcacgtactcccacgtagcccatatcctcttttctctcaacaccgggtccccatcaatcctcccaagccttcccaacattaaagcacaacaacattcaaacagcacaagctatcacagccaagcaaaacagagcaaaggcagaaaactctggcaaaacaccaaccaaatcacagcttttctcacttaaagaaccccgtaacaaattcttcgatccaatttcgtaaccggtggatcgaactccaaaatttactggaagactatagtgcataagcctacatttttgaccgttgggatctactagcaaaaatccagaactcattcta

SEQ ID NO: 211386 - DNA, 413 bp, Glycine max
  unsure (1)..(413): unsure at all n locations
gaagcactcattatttcattccttgcataanaagctctctgtgtaaattcttgtaaattttagaaaagccctcaaaacactttgttcttcttgagagaaaaaactaagtgttgaatttgtttatctgtcagtaagacgatagagtgttagtcattgtgcaatcaaaccaacaagtcttctgatttgtgttagagccaacaatggtttggtaggataaaaaatactggttttaacaagctctgtgtaatgcttgagttaagtagcaagaagtggcagtgataaatacttgtaactcgcgaaaattcgtggaacttggtggtttgcgaacaactagacatagtcttagtggttgagacaaaccagtataaattctttgcatcttattctaatcattctttttattcaactaacct

SEQ ID NO: 211387 - DNA, 490 bp, Glycine max
  unsure (1)..(490): unsure at all n locations
tgaacctgaatgagagaaatgaagaaggtgatagagcctntgttgcaatccaagccatggacgcttggttcagattgttccggatgcaaattcaagaaccaccattgttgatcttccaagaactcaagaacagaataatagaaaatatggataagatgagaagatgaacggaacgatgccacgatccacggagaattgataagctgaaggagaattcaccacacaggaatagcttccttgataagaatcaatttgattttcagccaaaaaccaaagaaaaggctaagctctttctaagcacaaacttaatttcaattatatcaaaagtttctacaatttagagtttttgagtatttatagaactagcttaagaggataactaagcctctaataaggcctatttacatcaagctcaagcccattacacaaataaacaaaaattaggaattgtcgtaaattcacactaaaggtgtgcgctaagccatacagc

SEQ ID NO: 211388 - DNA, 479 bp, Glycine max
  unsure (1)..(479): unsure at all n locations
catgcagcttcattggaacattgatttatttagccattttcacaggcacaacctgccacgctagagaagcaccagggcacgttcttcttccactcccgaatggaataaaatgataatgttgtcccctaacatccaattgattctgcccatctctgataaacctctctggcctaaactcaaaaggtttctcccagtgattgggatccctaccaatagcccaaacattgacaaataatcgagtctttgctggaatatcatacccacaaaccaccgcactntgtgatgattctctaacaaccaatggaccacctgggtgaagcctaagtgtttctctaacaatggcttgcaagtaanggaaggtggcaatatctgattcttctaccattctactttttccaaccaccgcatctatcttttgccttgccttctccaacacatctggaatgttgataactctgccatatcccattctatgctta

SEQ ID NO: 211389 - DNA, 472 bp, Glycine max
  unsure (1)..(472): unsure at all n locations
ttgtgtgtgatgtttgtgaggatattgctatngattgtggatgtgctactctactgagtaaagcgtggcacgtgtatgacaagcatcctctaagtctaaactattgtattgaaggggatttgagggaacatgaatgtggcatttgcaatgagaaaatgtctaagaagcaatggttttattgctgtgatgattgtgactctggtgctcacccttattgtgttgctggcaagtttaggcggatgaagttnggaggaagtttccaatatgatgttcactcacaccctcttgctctggttgaagaaactgagcagaagaatgaatgtggagcctgtggtgaacactgcaatggatggacacttgaatgtggccaatgcacacgctactttcacagggaaggacagctgttttggaaggaatttaataagagtgctaagtatttggagttatcangaatgatgagacacaggtatgc

SEQ ID NO: 211390 - DNA, 239 bp, Glycine max
tagccatacggcttgcctacggacttgattcctcgggccaatatttacaatgtctgccaagcctctactcgcgaggaggggcgaccaccttctgactactatagcactcatgactaggatgcatgagatgccgatgttgtcccgctgcgaccacatacagactcatgccttcctattctaccggaactgaacataatacgacgtgtacgggctctgcccacgcacagttatagaatcat

SEQ ID NO: 211391 - DNA, 373 bp, Glycine max
  unsure (1)..(373): unsure at all n locations
atatgggctacgcgggagtacgtgagctcagatggaggtgggcaacaggggatggtgggtttatgcgcgctntgtggatgtgaaaaacttgttgtgcaccatcgcccgaccgccacctagtaccacatgtgatgggtaccccataatcctacaagcttgagatgaggaagtgttgaagggtgaaacttcctgcttttanttgtgaccacagagtggtacctggagatatgtcgcggtggtcaggagaaccttgggacgtcaggtggggtgctattgcccanaaccaagcttgaccaatcccgacccaaccctggcatagtcggtcagtgagaacctgtgatgtcctaagcaggcgagctcctggcagtcaaca

SEQ ID NO: 211392 - DNA, 481 bp, Glycine max
  unsure (1)..(481): unsure at all n locations
tgcanaatgngtcggtcaaactccgagtatcgaccagattgatgaacagttggtcatgagctgacctaaggtacataacccctcaatctcgaaggcaaagcttggagagactaaaaggtgtaaatgactcagtatttatataatcgaaggatacacaatccctcagtctcaaaggcaaagcctatagagacgaaaaggtgcaaatgacttggtatttagacaaccggagggtatatagcccctcagtcatgaaggcaaagtctgaagagattaaagtgtaaagaattggtatttagacaactggaaggtacacagcccatcagtcttgaaggggaagtttgaagagattaaagtgtaaatgacttggtatttagacaactgaaaggtacatagccccttgattntgaaggtgaagcctaaagagaataaaaggtgcaaatagctctagtatttagatgaaccgtacacagcccctcaattt

SEQ ID NO: 211393 - DNA, 366 bp, Glycine max
  unsure (1)..(366): unsure at all n locations
gataagatccattcaaataaaaaagaattactcatcacattaaattctgcaaaaatattttcatagtctgatatgaaatccagattttggccaatccagatacaagaatcagatatgtacaaaactgcttttacagtacctttcgagcaatacaaatggaatgtcatgacattcagtctaaagaacgccccttcagaattccaaaaaatcatgaatgatactttcaatccttattcaaaatctgtcatcggctacattgatgatgttttaatcttctcccgaaatataaaccaacatttcatacatctacaaatcttgattcacagtatcatacaaaatggccttggtgtctccaaaacanaaatc

SEQ ID NO: 211394 - DNA, 476 bp, Glycine max
  unsure (1)..(476): unsure at all n locations
actcaagcttgtacaacccattattctntgtcctatcaagccactattggttctatacaaatcaaatagatttgttgattgtttgcactaactcttaatcatcttgcaaatgaatatacaatctcaacacttagtcttttctctcaaagtgttcaaggtggtttgagagctttatagaactatacataaatcttttcatagaaagaatttgaatgagagtgcataagttcgtatccatgtcttcaaagcttctatatttataggtcttcttcaacaagcgattgttgtctctaaattgatagatttcttcacttgagctcgtgtatgaagattctggttgttggaacatttaatgcttccaataaatgcatgtactcccatgctgaagaaccacttttgtgagctttcgtgttgatcacttcagcagaaaaccacttgctttatagtagagtatgtctatctcgaccaatgcaccg

SEQ ID NO: 211395 - DNA, 482 bp, Glycine max
  unsure (1)..(482): unsure at all n locations
ttatgacttaattcatttacanatatgaagccaatcatttttttcagaccctcttataaatcactnttcttattggtaataaaatagaaatgtcacgggttgtaacccatgcttgttgaatgttacaccaacaaatgtaagaagagaagaaaattatttaggtccttaaacctaaaaaatcaagaaaataaaagaataccacgccaaccaagaagaaataaatcagatatgcaatgtaccaagcttgaaaatgttcaatcatgtttatagacatcaccatatgtagattnttattatttctaattgcaagtttgtgaccatttacaaataaacaaattatccattatttctaattaaattaatgaattgtcttcacctagaatgttgtatacaatgtgaatatagttaatagtatattgtatatatcatacaaaatcatattaagaaacacacacatgatccttgtacattatagtactact

SEQ ID NO: 211396 - DNA, 326 bp, Glycine max
  unsure (1)..(326): unsure at all n locations
aaacaaccatgggagaaggtgaaaataaatattaatgtgagatattaggttcaaatagacttgagatacttactcttttaacccttggaagaaggggaaatanatccccacatatgcacatctattctgttttatgctctttaaatgcaactactgatactagatctagaattaagtctccaaagacaagttgtacgattctgatgggatacaagtaaaacatagtaataatgattagtatagtgaaagcactgattttgcaaaataaaacgaacagtaaaggaaggaaggctaatgaagtatctagtgactcttctttctttact

SEQ ID NO: 211397 - DNA, 369 bp, Glycine max
tatgttagaataatacccctagcttatttactaaaataactcttttttaataagacaataaaaataatgcaagagagccacacatcatatatcagtcaaaacaaaaagggtaacttaagtttcaaggtaaaagattgtcggcgcggcgaggtgtgtagggctaatcctatttagacgaaaatgtgcatatgacttggcttttatacaaacggagggcatatagcccctcccgcatgaaagcatagtctgaagagatataagcgaacaaattgtatttaactaacggaaggacacagccatcatcttaaggggagattgtaagataaagtgtaatgactcgttttatacactgaaggacatacccctgat

SEQ ID NO: 211398 - DNA, 416 bp, Glycine max
  unsure (1)..(416): unsure at all n locations
tgcagccgatagtcccaattatggtatttgttgtaaantgtttataatnntgnttatgggtaacgttgtctctagaaaatttccattggatttagtgatgaaatctgttcattntcaggtgaaaaagaggctaagttttgaatttcaaaaagtagcagttcggctaagcgcataaccaccgctaagcgcaacttcagcgcacttggcgcaaaggagaatctggcagagcattagcatcaggctaagcgcaacaggtgccttcagccaggctaagcgcgagactagcgctaagcccaattccacttactcacgctaagcgcgagggtggcactaagtgcaatgtcgcgaattcagagcctatttaaagcctgcctttgtgcagaatagggtgcaccttttatgactgcttctacaca

SEQ ID NO: 211399 - DNA, 477 bp, Glycine max
  unsure (1)..(477): unsure at all n locations
gaagaagaagaagtttcaaagagattcanagattattaaggctngtaaatgattgtatgagattgtttagaaagacttgattntttaaaatgcaaaacaaagccttgcttttatagactcttcatgtctggtcaagaaggccattcagaagagttataacttttagaaaaacttaaaacccatttgaaaaagtcaaaaccttnttgaagagttacatctttagatttttcagaaacaaacactggtaatcgattaccaaatatgtgtaatcgattacacaaagcttttgagtgaaacaatgtgactcttcacttttaaatttgaatttcaacgttcaaggacactggtaatcgattaccaaaacattgtaatcgattaccagcctttgaaaantattggaacgttgtaaattcagtttgaaaacattntcaaactcattttgctactggtaatcgattacagcaatatggaaataga

SEQ ID NO: 211400 - DNA, 378 bp, Glycine max
  unsure (1)..(378): unsure at all n locations
cacattatttccatgacacaaatgccaaaatgatgattnggaaatttcatgcaaaactggatatgcatgcacctatgcggacactcaagtgtcgaatttatatggtcatgtgatgctagggctcaagattcatttactctattttagtcaacccaatgtttccaaaatatgttctnttatccatttgagcattcatgcaagtacattttcggcgtccgggaaaatttcacaacattcacccttgaagtgtacacacatgtttttttccaaaaactacctatgatcagcgaatttttcttcatgaaagatggaaatcatctcttttcaaaagcatgacgatgtttatctatacaacttatttgttttttttccaccttt

SEQ ID NO: 211401 - DNA, 444 bp, Glycine max
gctgtacatgggatgctgatcatcttactaaacgtatatattgttaatgatatagtgatcatcaagacaaagggaaaaataaatgagagcgaagaagaagatctagagctacctttgtttgattatgagacaatagcatttgctactagtgacttctcacgcgacaacatgcttgtgcaaggtggctttggccctgtatacaaagtacgtatgcaactagtttctttgcaattaaaagctgagaacaaacagagaacatagcctgaccttttctggttgcatttaccttctttgaaatgtgaattttaagggcacgttaccagactgcatgatattgccgcaaaaggctttcgatacatcggacaaggattagatgaattaagaacgaggtgtgatttgtcataacttaacatcaaatcttgcaaagtacttggtattctttga

SEQ ID NO: 211402 - DNA, 398 bp, Glycine max
  unsure (1)..(398): unsure at all n locations
ggggagaatgtgaatgtatgtatacatgattttgatgatgtcaaagaagaatctaacaaggctacttcaaatgataagcatttgcttcaagaataattcaagattgcttcaacaaacaaatccttgtttcaagattcactaaagaccaagccttgccttaaaacaaagtgctttcaagacatgcaaggctctggtaatcgattaccaggaagtgtaatcgattacccgaagacagggttgagaaatagctgttgaaaaaggttntgaatntgaattttcaacatgtaatcgattaccatatgtctgtaatcgattaccagcaacgaaactttggaaatcaaattcaaagtctaacccttcaattataactgtgaatcgatacacaacattgtatcgat

SEQ ID NO: 211403 - DNA, 513 bp, Glycine max
  unsure (1)..(513): unsure at all n locations
aaggcagttgaacatgttgtgattnnttntttaagttaaatttgagtttcgttagtggttntaatttgttacgtatattaattacaaaataagaaaaattaattagtagtcttaaaataaattaaaaaataagaaataatttaaaaaaattaaattgattaaaaacacagtgaataaataattgttacatctcagttatatatacacataaattaaaacaaaacaataatttagatgagagacatagagatatacataataaataaaacataataaaatgagaataacgaaacatattagcaaatacaattgaaacatgaaaatgataaaactaatgatagtttgaaagatgttgtacatgagacatatcttcttccattngggtaaaaataactaannattctattgggtaaaaattgtttcaatagttggattctgctaacacctttaacacatcttcatggtntngcaactctgtatttcatattcaattaattttctgatattaacatg

SEQ ID NO: 211404 - DNA, 416 bp, Glycine max
  unsure (1)..(416): unsure at all n locations
cttcgaccaacacgggcgtgntttatctctgtccggattaaagcgggttgcaacaccggctccgcttccctaaccgtactggaggcggttgccgtggctttgtcctctatggttttctggagttttaacatgacctctgagatggaagccatttaatcttttaaagccgatagatcagccttcatctgttcctgcacgccctcttcatcatccatttttctggatcgagtgttataggggtgcctcggtgttttcttagttatgatgaaattcctaaagaaataaacaacggtgagtatgccaccaaaacatgagtatgcaaatggatgatcggagcacttggatccaccccaaggttttagataacatgatgaagtcagaacttctcatnnttataaaagaacaaagcttcatct

SEQ ID NO: 211405 - DNA, 474 bp, Glycine max
  unsure (1)..(474): unsure at all n locations
nggtggagaatgagcacatangccaaggagtggcatgtatttgtagagttgagacattaaatgtaatgcgactgtgaatcactacaaacaaacacgaaagcctttggagtggaatcgggtttgagataaatagaaaaaaaaaaaacatgaaaatgaaaaacaaattgaaggagcgtgcaatactacaactgtacaactaagggtgtgcgtgggttgtcttggtttgtgggtggtgcgtgcatgctcacgcgtgttcgggtacgtggataatttgttttgcaagtattttgtttttgctccaataggtacgtcgttcgaagacttattttatgacacattntgagcttagtagnttgtatctaattattancaatttttttagtcaatttcatacctaaatttgtattaactanccgatttgcactaaaaaaatacaacttatttaaagaaaaatcatttttgctctaatatata

SEQ ID NO: 211406 - DNA, 352 bp, Glycine max
  unsure (1)..(352): unsure at all n locations
cacaacaagttttccacatncacaaagcgcgcataaacccaccattccctgttgcccacctccaactgagctcacgtactcccacgtagcccataacctcggttctctcaacaccgggtccccatcaatcctcccaagcttccccaacatcaaagtaaatcaacattcaaacagcacaaattaccacagccaagaaaacagggcaaaggcagaatactctgcccaaaacaccaaccaaaattacagcttttcttacttaaagaccccagtaacaatgtcttcgatccaatttgntcaccggtggatcgacttccaaaatttacttggatgactaataaacataagcctacat

SEQ ID NO: 211407 - DNA, 511 bp, Glycine max
  unsure (1)..(511): unsure at all n locations
gcttgctgctcagccaaccaatcaacctagtgcttacaaactcagtttctcatggcaatggtctagctagttcaacctggattctagattctggagctagcttccatgtgactggtgaatcacaacatatcaaactgtttgcacactttgatggacctgaccaaatatttataggaaatggtgaaggtttgcatatttctagcactggttcctcatcctttgtgtctccttatggctntcatattactntcaaacttaataagctattgcatgttccttcaatttccaaaaatctgttaagtgtgagtcagtttgcatgggataactctgttttctgagtttcatcctcacttttgtcttgtgaaatcacaataaagtactccttcanggtgttgttggtgctgatggtctttattcattccataacatcagatntcaagatcactcttcttagnntgtgcaacttccacttctggttcgatcacatctnnctactgtaatanaagttatg

SEQ ID NO: 211408 - DNA, 365 bp, Glycine max
gataccatactcagaaggcctatcatgtgtttaattatcgtcttccacgctgaccacatgacagcgagagagtgttatgtctctagtctcacactcagttaatggacttaatgagtcgtgcctacgacacagctgatggcatacactgacctgaataatctgagggatacctaccttgatccgagagaagaataacacatggtaaatatgacggaggaagtgagcctttttactcaatcagaaacattcactgcacaaactaaaagttaatgatcgagatgtggaaataatattaccctgtctagagacaatgagacttatttgtgggcagatcaatatgctataatgactctaattcactatac

SEQ ID NO: 211409 - DNA, 302 bp, Glycine max
  unsure (1)..(302): unsure at all n locations
aatgctactcttaaaacaaaaatggcatacaacctcctcgaataaacacgaacatcaatgtaaatttagagcaaacttatgcacatacttctttacgaacgttcacttgcacaagacattcttataactaagaaaaaagcacccatgtacaatcaaggcaccttcgttacctagattatttatatgtacctccaaggtgtatttgctacctattcacatgcacttcttggctaattacaacatgctctcaagatttgggaccaaaatgcatggccatcngattctatatatcatatcaactt

SEQ ID NO: 211410 - DNA, 460 bp, Glycine max
tcttagtttcagatgatgcagatgggtttgtagctacctcatgcactcctctaatgactatggcatcatttctggcgctaaactgttgggagttggaggccatcttctcaattaaatttctggcttcagcaggagtcatgtctccaagggctccaccactggcagcatctatcatacttctctccatattactgagtccttcataaaaatattggagaagaagctgttctgaaatctgatggtgggggcaactggcacatagtttcttaaatctctcccagtacccatacaggctctctccactgagttgtctaatacctgagatatccttcctgatggctgtggtcctggaagccagggaaattttttctaagaatactctcttaaggtcatcccagctcgtgatggaccttggagcaaggtaatacagccagtcctttgccactccctctaatgaatg

SEQ ID NO: 211411 - DNA, 383 bp, Glycine max
  unsure (1)..(383): unsure at all n locations
acacaagaaactaagcttctgggacagtggtgcaatacaagcttgttatggctnactctcttatgggctttgncaaacaaatcacctattcctgtataaaatataactcttgacactgaatatttagtatatatatattgcactacattcatgtgctactgtcttttacctcttacacatgttagaaattgattttaggtaataaccaaaaccgttttgtgtgatgggaaggagataattatatagaacagaaattgtgtgtattccttatgaatctggtaccttcataaaggtctcttatattaacattctctttattctcatcatctaaactaaactatacataacaatggtgtggcaagacaaactcaactaacattcat

SEQ ID NO: 211412 - DNA, 490 bp, Glycine max
  unsure (1)..(490): unsure at all n locations
actcaagctnacaatgtaactcagatntatatatgttgtattctttctgtttatcaaaataattgtttatattgaaaacttacaactggttctacacttgtcagtcacattattacgaatcttaatagaactgctctgaagttgtgaggggaggaaaacaattcttaattgttgaagaaaaaaaactgattcaataatgcggactacagtaagagttcggtgtcattatgttaactaacaatggcttggtaatatattaacgaattggtatactacagaaacgcaacttcgaaagttcaggacttgagaacgcagctaaagatataaagacttgattattttccaagaagggaagccactatattaacttctatagtaaaaactcgtaagccttagtatttattctaagaatccctatcngaatcacagttggagatggtgtaagtacacaagtttaacacttgtgaccactctaatattgccttctaat

SEQ ID NO: 211413 - DNA, 220 bp, Glycine max
acaattttctcttctagtcatctaaggtccaacacgctatggattctgccaaggtccttcttcacctgaatttgacaatcctggaagagaatggacaaaggcaccaaaaggcgctaaacaaggtggtgtcattggaggctgagtttgccaaatggagggctactgctcgcatagtctagcaagtggagtgccctaaagtagctaatgccatcttcgtatt

SEQ ID NO: 211414 - DNA, 458 bp, Glycine max
  unsure (1)..(458): unsure at all n locations
actcagcttacaagaaagcttccatcacaatatttatattgactatgaattcctataaagttaattctacttaaaaataattnttacatatacatattaaaattaattagttaaatatattttattacaaaataattttaaattatttacttaatataaaaataagttaaattagttttatttttcatgatagagaccacaacactactgcagaaacgacattcctcgacgtttataatgtacattcaaagacaattntgaaccgtctttgaagccaatgtcgtcgaaagtttagccttttgatgacggctccataaataaccggcttagaaaaaagggatgcttctaagacggttcttagcttagaaccttcttagaaggtcttagaaagatacttttctaagacgatctcacatgtagagtntatttatttatttatntttatctttgggcacatg

SEQ ID NO: 211415 - DNA, 430 bp, Glycine max
gtctcttacctttgaagtccatctaaactcaaaaaagaagctcaacaaggttttctttgctttcaaggtctcacctgctaatggagaggtgacctggagaatgaaaagagagtgctttgggttatggctcagttttgggtcaataaagctaagtatgcgactcttcatcttctttatattcacaccccatcacgttctaagctcacttatgttgctttcatcactcacgacccactcatctcatcccaaacactagaacttactattcacacttaaaaaaaggttgtcgcatacgtcatcataatcatatataagaatatcataaatcatcacctcataattaattagaagaacttaaattaaatttaattactcttgcaatctaattaaaatacttaatcaagcattatagaaattacagtgttacaac

SEQ ID NO: 211416 - DNA, 479 bp, Glycine max
  unsure (1)..(479): unsure at all n locations
nttaatggaagccaagagcacaatattgcaccgataccgntgtctggtgagcagatataccagtgggttcaacacctgaatattgtatttggaaagacccataagaaggacaaaagtaagagttgcatatggaagaagaggtccattttctttgatcttctgtactggtctgatctagacgttatacattgtattgatgttatgcatgtggagaaaaatgtttgtgacagtgtgattgggacgctccttaacattcaaggcaagatgaaggatggcttgaatactcgtcaagatctagctgatatggggatacgatcacaattgcatccaaggtctgataggaagaaaatttacttgcccccagcttgtcatactgtgtccaaaaaggagaagataagttnttgtcagtgtcttcgtcnggtgaatgttcacaacgatactcttcaagtattaagagctcttgtgatatgaaccctcat

SEQ ID NO: 211417 - DNA, 366 bp, Glycine max
  unsure (1)..(366): unsure at all n locations
tcagactgatcaacacttgcacagnggccaaagatgcatgggagatcctgaaaatcactcatgaaggaacctccaaagtgaagatttccagattgcaactctnggctacaaaattcgaaaatctgaagatgaaggaggaagagtgtattcatgacttccacatgaacattcttgaaattgccaatgcttgcactgccttgggagagaggataacagatgaaaagctggtgagaaagatcctcagatccttgcctaagagatttgacatgaaagtcactgcaatagaggaggcccaagacacttgcaacatgagagtagatgaactcatttggtctcttcaaacctttgagctangactctcggata

SEQ ID NO: 211418 - DNA, 482 bp, Glycine max
  unsure (1)..(482): unsure at all n locations
cctagtaaccggtctagataggtgtttgtcatcttctanaaatganaatgatccttctaaggtatattattctttgaagtttgatcttagaggatatccacaaattcttggatatgagggggatacaataagatttggagtagactcatggaatggactggctttggtgggtcatccaataattcataaactgacacaagaataagtacatgaatttgtgtttaatgaaacggaagtgtattatgattacaagataattgatagatcaattttcttcatatttacattgtaccccttcagggtctggggaacattttctttgaaaaaatcaaactaggagcaaacaaattctctcatttggttcttagatagttttaacatttatattcaactacttttatgcaactatnttctttcatattatattgtttaaaatccacaaaatatgntcatgcacactatgtaattattaatctattctt

SEQ ID NO: 211419 - DNA, 297 bp, Glycine max
  unsure (1)..(297): unsure at all n locations
tactctggtaacttagaaaaatttgagaaaactcttttgtaaacaaaaatgtgctatgttttgtttttgaanaatccttttcaatacttcccttgtgaaatcttgacttgttgcttcttgatttcttctcttgaatcttgaattcatcttctcttgaatcttgattcttcttgatgtcttttcatgaatcttgaaatcaatcttgatcttgaacttgttgactcaatcttgaaatcattcttttaggctttttgtcatcatcaaaactacttgaatcatacttgaatcatcatcatg

SEQ ID NO: 211420 - DNA, 472 bp, Glycine max
  unsure (1)..(472): unsure at all n locations
acattccatacagatgacacacacaagccagntgcagtgattngctnntgtggtcccatgttatttcttttaggaaaattattctgatttggaagcagtgtgacacagctatatgacttgtttcaaatgcctaggggtgcattgcttcacaattcagttaaatgtaattcttttttggattaccgattataaagttactgctatcattctatttacatagaatgacttgttatcatgctctattatataatatttgtataacacaccacagtatttaatgacttcttcaattgtaaggtgtggtgtgttatacaaataattataaatntaaatataaaataaattgaagaaattattaaatattgtgtatcattgataatgaatattatataacagtaagtaaaaaaattaaagagatcagacttttaanattaagaaaaattgtagaaacaaactgctaanatcaaaacat

SEQ ID NO: 211421 - DNA, 348 bp, Glycine max
actcttattggcttttggtagaatacttcagtataaaaccacttttgctaggtgaaagcatgcttttcacatctgaatgtgtcttttgatgttgttttaacaaattttgaactttagcttcatctattagtcataggattcaacaaatcatacgagaatgtctctccaaaattaatctcacacaaaaaaaaataaataaagtgtgaaatatcattcgttaatgttgtatcaggtcatgacttggtcctttcttatctgatactctagacgcatgattgatacaacatgatcatcgaatataaataattacgagtctttgattatcttaagacataaatgtttttaact

SEQ ID NO: 211422 - DNA, 433 bp, Glycine max
gcgcggtctggagacaaagtcagtggtgcgatatactaaatgatgttccgagtacatgtatttggtcaaccatgccgtcctgatttccacctgggaaatcggcgagcggatgaacgccccggcatttacgcaacgagcataatgtggacctctacgggttaacagctctatagttgggcctaggctttatagattttgctgttgttaaagatatgaagcttgttgtctgtgacattataatacaaggaactttgttcatctggtcctacgaatgtacccattctcattcatttgcacgtgtacttctttattctcgagatggcagatccgatgacgagtcctctgaaagtactaatacctgtgacccgcttatcaactttgagcaagaaacgaatcataccgaagatgaaaggaatgaggatgtgggacttcc

SEQ ID NO: 211423 - DNA, 416 bp, Glycine max
  unsure (1)..(416): unsure at all n locations
tctncccatatttgctataaatagggggagaagtgaagaagataagggttcagccncttatgcacttctctctctctcgaaattgctgaggaaaattagttccgtgaagaanatccaagccgaggcgcttccgtaacatttccgtgagtaattacgcgaagattctcgaccgttcttcaagattcatcgntcgntcttcgttttcttcggtcttcaacgggtaagtacttcanatcaagcttttcaattcattctatgtacccgtggtggtccacatnttggttcatgtatttntattctcattttcatctgctgtttatacccccttttgacgtgcttaagccatttatttaagtcatttctcgcttaatctaaaaataaaataaatttccaccgatcggttgaatggtatcatc

SEQ ID NO: 211424 - DNA, 423 bp, Glycine max
  unsure (1)..(423): unsure at all n locations
gctttgtttttgttgccttcacacagcnaaatttctanaactctctgganncagacccttctctctctagagtctctcacatgcagaagctccttgagaaaatggctaanatcccagaacttgaacctctctttgtaaaatctctcacatgcagaagctccttgagaaaatggctaaaatcccagaacttggacctctctctctctagaaatctctaaaaaatacataagctcaaggaaaagcccaaactcctctccaaaatctgattcaaggcttaaataggtggctntgttgtgcttgccgctagtgcactctgaaccgtatcgccatagtggattggctacacggctttctcctcacaatgactaaacgtgcctagcgatacctttgtactacagccaatatcttctcaatcttctacct

SEQ ID NO: 211425 - DNA, 423 bp, Glycine max
  unsure (1)..(423): unsure at all n locations
tcaagtggtcgcaatactcgaagatgatgttccgagtacactggatntggttcgaccatgccctcctgatttccagctgggaaattggcgagtggaggaacgctccggcatttacgcaacgagcataatgtaaacctttacggttntaaaaactctatagttgggcctaggctttagagtttttcttttgttaaggctgtgtgtcttttggttttgaatttataatacaaggatctttcttcatctgttcctacgtctctacccattctcatccatttgcatgtttacttctttatttctgaaacggcagatccgatgacgagtcccccgaaggtactaatacctgngacccgcctatcaacttcgagcaagaaacgaatcanacagaagatgaagggaacgaggatgtgagacttctcccga

SEQ ID NO: 211426 - DNA, 442 bp, Glycine max
  unsure (1)..(442): unsure at all n locations
ntgactcgagtcatcgagagagtatttatatatgaccatggttcgaactncataaagaatctatctttcaatcttctctcaacatcattcaatatctttcaaccctttctacagaatgttctgattcatttctcttcatctttctcaaagatgttgttcaacaattttctcttccaagaaaagttctttgttcaaaaacttgtgctatttattttttttcattctcttctcccttggccaaaagaatagaaggactaaccacctgaattcttttgtgtctctcttctcccttacaaaagattcagaggactaaccgcctgaattcttntgtatctctcttctaccttacaaaagattcaaaggactaaccgcctgagaattcttttgattcttcccttccccttaagcaaaagatttcanaggactaaccgcctgagatatc

SEQ ID NO: 211427 - DNA, 379 bp, Glycine max
  unsure (1)..(379): unsure at all n locations
tcagatatcttaagaagggggggtgaattaagatatcacaaactatttccccaattaaaattctatgtcactttctattcaagttacaaattcccttaacaatgaacttcttagattataattcaaatagaacaatctgaatataaatatgaaacaataataaataaaagagtttaagggaagagaaagtgcacactcggatttatactggttcggccacacccttgtgcctacgtccagtccccaagcaacccgcttgagagttccactatcttgtaaaatctntttacaagttctgaacacacaaggacaacccttcctttgggtcagaattctttacaacaagagaccctatgtctcttatccattagagaataag

SEQ ID NO: 211428 - DNA, 500 bp, Glycine max
  unsure (1)..(500): unsure at all n locations
ntgtgacaaactatgtacgacanaacttcattactgttattcagtatatacaaatgatcttgttgcaattcttctagacttggagtgataacatgcagtcctcttgaaccctttcctcccactctctcgtcatactgagacttaggaaccataacaggttttgccttttccatgtactcgaaacaaaactcaatagtttcttccgcaacgtacctttcaacaatagacgcttcaggatggtgtagattttttgtgtactcttttaagatcttcatgtatcgctcaatcgagtacatccaccgtatagaaatacgaccgcaacatttaatttccaccaccagatgaacaataaagtgaaccatgatgttgaanaacgaaggaggaaaatacatctccaactaacacaagataatagcagtcttattttccagctcatctaacttgagaggatcaatgactntactacatatgggattgaagaanaaacacaacgagttatg

SEQ ID NO: 211429 - DNA, 341 bp, Glycine max
  unsure (1)..(341): unsure at all n locations
tcttcgaagggcatggttatttccagtttcctgaanatatctaataatctcgccggatgatgatctttttctttcttggaaggtaccacaggatacggtacttccacaccttcatccacagctttttcactcttactcttctttcagtcatattatctttttcttctttttcaattttctcattttctattcctttttgttcttcttggtccttcaattctatattcttaaccattatttgttcctctctttcttgattaagttcacctttcacctcatctttcttgccatcagtacctttcttgtctgcagttttcttcttatgcacaacactatcctca

SEQ ID NO: 211430 - DNA, 477 bp, Glycine max
  unsure (1)..(477): unsure at all n locations
tcttccgtatagttatttcattcagagtttatcacatacatataataagtcaatttgtgctgaaacaaggcttgcattcatatacctacatgctgcaggtctatactccgtacttgatttgagaacaaccctgttcttgtcaactaaaacaagaaataacaaatttcattttactttccccaacgcaacccagataacaacacaatanacccttgctactaaattctaaaactaattntcccttgaaactcacagttaatcgaagtaagaattttcatgggatattatatagcaacttcaatgtttcaaatgaaaacttaacaaatcacccgcaaagtgagttatctacgcctaaactactacgacctagatgagtatttctaaaatctcaccattttcaaagtaaatctctcttattgaattcaaagcactttgccacanatacgtaataatgcgttcaatctccttgccatgagt

SEQ ID NO: 211431 - DNA, 306 bp, Glycine max
  unsure (1)..(306): unsure at all n locations
tttgagatacacgactatcatttagtactgaattttgcgtgaatctctgaagtatggactgaatgcatgaaattgaggatgatgaaggccatgtttgattgtgaaagccacttanccaaatagctgaccatgtgcttgaatgaattgtcccttgtacccaatttgagatgaatgaattagtgattgattgaaccctgagcctatacaatgttatctcctgctaccttgacttaggttgtagaagagcatatccacaggaagtgtggttcaaagcaatattgtcccaaatttgggggagtaattatc

SEQ ID NO: 211432 - DNA, 464 bp, Glycine max
  unsure (1)..(464): unsure at all n locations
tctgttgacactcaaaaaacttagggttacccttcttcttgagatntcttttgggagaactgtgatttgtgagtgattcttcattgttttcaccatcatatttgtgattgtggtggctgagtggggttcttgatagtcaagaacgcgggtagaggaacctctgagatagcagttgtgtataggaaagtgaaggaggatcaaggtgcaacatggctggctcaaacagtatcattcaaggatctttaccggttttcgatggaaaactgtttgatgattggaaggtcaagatgctggcaatctttggcttccaagatgtatttgaagtggtgacatttgngtttgaagatccctggangaaagccactgaagaacagcanttgatttcanacagaacananacttgactgcnagctcgattctcattacaatggtgactcaagatttcacagactcgaggcttactt

SEQ ID NO: 211433 - DNA, 475 bp, Glycine max
  unsure (1)..(475): unsure at all n locations
cttagggttcaccaggtctttcaaacccggcgtggcaatggttcaatataaaaagtgaactntcaagcatccaaaatactaactagtactacagagtacagactgaatatccgttctcgcattcaacttagatattatttcactatacattatccattgatttcatctttatatatcacctttcacaaattctaaacagagaaagaaataaaatactgaaacatacctaaatccactgaaatatgattctttagctcaaagcttcaagtacaaggaacagggtttccaaatgttttacaacttctacagtttctcttgcatttaacctagttaaggtctgaaatattcttaattntaaaaaagaatgttatttcaatacctatcttttattggtccctcagcacaaatgttgcatacctcattgaacttaatngcattccttccatttgctgttctggtggaattggagtctcat

SEQ ID NO: 211434 - DNA, 338 bp, Glycine max
  unsure (1)..(338): unsure at all n locations
tctatagaaggttcgttcctaatntctctacaatngcatcactctctcaatgagctggtgaagaagaatgtggaatttacctgnggtgaaaaacaagagcaagcctttgctntgctcaaagaaaagcttactaaggcacctgttctagctcttcctgacttttctaaaacttttgagctagaatgtgatgcctctggagtgggagttggagctgtattgttacaaggtgggcaccctattgcttattttagtgaaaaacttcatagtgccaccctcaactaccccacctatgataaagagctttatgccttaataagagccctccaaacttgggaaca

SEQ ID NO: 211435 - DNA, 256 bp, Glycine max
  unsure (1)..(256): unsure at all n locations
ccgaaaattaaagaattaaacttatatagaagacttatctcagccacaacgnngcaagattcagatttgcccttcctactccttcttcagnattaggcccttcctgttggaaaaaacatacttgctagggttaatttggaaaagattntcctgatgttgctctaatactatatttaacttatcccgttgaataaaacaccataaactttaaatacaagaattataattataaagaaaaagaagatgtaaactattt

SEQ ID NO: 211436 - DNA, 475 bp, Glycine max
  unsure (1)..(475): unsure at all n locations
ttatcaatagacacaagtggagttttattcagaanattagagtttatctcttttatcttagagagagtgattctcctaaattcttgactgattcaagaacaccttggctgtatcaaaggactttcacaacctttgtgtgttgccttgctggaaagagtgattctttccttcctttcatcatcacccttgttctttcaaaccacaattccagataatccacctctgcccagaattatctcgtggccataactcccattttacgcactcaaattaagtgattcttgagcctaaattgaatttcaaaacgagatctttcacctcgttgtggaatcacctcatttggagccctgtagcttcagttattgccatttctatatttctgtccagccaccacttaacctacgntntaccatcccattcatcccatttatgccaagaaccaccttattaagacccacgagattagccaccttat

SEQ ID NO: 211437 - DNA, 340 bp, Glycine max
  unsure (1)..(340): unsure at all n locations
ttctttttggatggagattgccttctataaacttcattgaaagatccattatgggatcaatgttgatttcttgaaaaaaaatagttgtctctcaatgggagataaggctacatggaattcactgattngtaaggatatatgaacaagtacagacagtgccatgtgctctttgtcctcgtcaaaagcgacccttgaggaatattctatgcagatcttngattctcttctattctatcctttgcttaaattcaaatgttagcaattcaaataaagagaggcaaacttaaaattcaagagagagaatatgtgcacatcccttttctgctattatagccctttc

SEQ ID NO: 211438 - DNA, 511 bp, Glycine max
  unsure (1)..(511): unsure at all n locations
gcttttagaaaagttgaaattngaaattctaaaactgacaattgtaagatggaaattgaaaatctcagaagagccttttgaaaagacacatctcttcaaaccattttgaaaaggcacaatgggcctatatatatgtgtgtctgacttcgaaaagcagcaagagagagatgttctaagagaactaaattgtcaaatgctctctcaacaactattgtgcaaacacttgcaaacctattgagaattcatctaggaacttcaatttgtattatcatctctaaaagagagaaattcctctaggatcttcaatttgtatcatctactctaaaggagagaagtctttcttttcatcttagaaattcaattgtaatcaagagattggtgtctcttggataagagaattgaatcaagagactaattgtttcttggagaatcttgaacacaagggtgagggatcccaaagggtgtgtcaaagttngtaaggatttacagagatangtaaaaatatcaagtc

SEQ ID NO: 211439 - DNA, 456 bp, Glycine max
gtgctacaagctgagaagataactgactgacacatcaacagttattgtcagatctaacaaacagttatctgctacagcaaacatatctaacagacacctgactaactatatcggaagtctagcagacaactatctaactgtatgggaaattgtctatgttaggatatgcatgctcacctttttcctatggatgctgtgacactcacaggtcagatttcgaattttctagggcgaatcatagataatacatggccagttgggggttcatcatatgtatgtgatgttatgggagcaatacgactgtagctctaggctgaattttggctatttgggtgctgcgagtaatacctaggggatagagttggggtgtaatgggatagagcatatgagagaagcattatactacgtgtagatgacgtgaaccgttaatctgcgccaacactcttaacaactttt

SEQ ID NO: 211440 - DNA, 470 bp, Glycine max
  unsure (1)..(470): unsure at all n locations
agatgtgcagaaagtgatactagctatgcaacctaggtgtgaaagaattattgaaggagtttgaggatgtggaagaattattgaaggagtttggggatgtcttccccaaacacacccctcattgtttacctcctttgaaaggaataaagcaccaaattgatctcattctaggatcttccttaccaaataagctagcatatagaagcaatcctcaagagacaaaagagatccaacgacaactggagagcttgatgganaaaagatgggtgagagaaagcttgagcccatgcgctatgctcgtcatcttggtgccaaagaaggatggaactntgagaatgtgcacaaatngtagagccatcaacaacatcattgtaagggattgacattcaaagtggtcaccatcaaattagaatgagagaaggtaatgagtggaaaaccaatttaaactaagtttgattatatgatggatg

SEQ ID NO: 211441 - DNA, 429 bp, Glycine max
  unsure (1)..(429): unsure at all n locations
gtctaaanaaagcaaatctgatcatcatgctttgatacatgcaaaaaactggggcaaatgaagagggtgagaatgagggagaaacccatgttgtgactactattcctatacagccaagttttccaccaacccaacaatgtcattactcagccaataacaacccatcttcttacccaccacctagttatccacaaaggccatccttaaatcaaaccacaaaacccacctttcacacgaccaatactaaacaccacctttagcacaaaccaaaacaccaaccaagaaatgagttttgcagcgaaaaaaaaaaacctgtagaattcaccccaatttcggtgtcttatgctgactcgctcctatatcaactcgataatgcaatggtagccataacccctgctttgtttctcaacctccattttttcgaggata

SEQ ID NO: 211442 - DNA, 486 bp, Glycine max
  unsure (1)..(486): unsure at all n locations
tgacaagccaacaactctcgcacctgtagagtttaccaccctcgacaccggacaatacttattcaagttgaggggcttgacaaactcgcaaccctcttacttgtcaaggctactacctttgacaccataaatctcttttgccaacaagctaactcaaagcttgngggattatgtactgcccggggtccacaaaatggacgtggcaagtgacgtggcactccagtgagcacgtcagccctctatgtcaaccttggcataggagcacagacaccttgcccttagcagccaggctactgngccgataggttatctctgatacctcattatntgaatattaatgataatgttagaactcccttatcaggtgacaggtacctaattatctataagccacaacttatctactagctattaactataagctataattatcttcaagctagtaattatctacaannggttgtacaccaccgaaatagtccctac

SEQ ID NO: 211443 - DNA, 413 bp, Glycine max
  unsure (1)..(413): unsure at all n locations
ctgagattaacctcaagctagcatgactctgcttcttatgtctaacccaataatgctctttgactgagagtaggcatgaaacttttggactagacagatcaccaagtttaatcttatacagatttccttgtctcttagcctagaagagtgaagagttttccttgttctcaatgatacacatatccttgttaaaagtgacattgtatccactatcacataatttacttatgctaagcaaattatgcttcaaccctttaacaagcaaaacattatctatagaaggataaggaggaatacatactttacctacaccaattatcagacctttctgattccgttcgaaagtgaccaccctactagacatagggcttagggatngaaacatagacttttcacttatcatgtgtcgtgag

SEQ ID NO: 211444 - DNA, 295 bp, Glycine max
tataagcttacactctgttccgatatgcttagaaagggctctagatattctactcccgagtgctctaacacaaccacactcggtgtaggcgcctctgattactggttattctctctacactttctagctattgatgacacttttcctctgacgcaatgcctctacttgatagcgagagctggtgaacaccctctgctgcaaccatatagaatctctagcagagactctttgacccttttgaccggaaaagagagcacagcatcgtgtgctctcttggaaaatgcagcatgatcat

SEQ ID NO: 211445 - DNA, 487 bp, Glycine max
  unsure (1)..(487): unsure at all n locations
tgtagcanattcgaacgacaacaactttttactcggatgtccgattgagtcccgtaatatatcgagacgcttgtaattgaaaacagaagctctgagcaaattcaaacgacaataacttttgactcggatgtccgattgtgtcccgtagtatatcgagacgctcgtaattgaaaatggaagctctaagaataatcaaacgacaattacttataactcggatgtcggatacagccccgtaaaatatcgagaggctcaaattcgaaaacagaagctctcacgagattcaatcgacaataacatttgactcggatgtccggttgagtcccatattatatcgagacgctcagaatttagaactgaagctctgagaaaaatcaaacgagcataacctcttactcggatggtcgattgagtctcgtaatatatcgagacgctcgtattgaaaacagaagcttgagcaattcaaatgaaataactttgacttgat

SEQ ID NO: 211446 - DNA, 452 bp, Glycine max
  unsure (1)..(452): unsure at all n locations
ttgccgttgtgcgtgtcgcgaaaatattatctacttctacctcagagtcttcatttgtcaattgaaatcctctcttacttcacaaattatgttttaagtaataattattntttagaatgaagttgtattttaatcttaattttaattgaaataatatttattataattagattaatttattttgaagttattgttgttatgattaactatttataaaattggttttgcaggtatattttggtatttaaagcctcgttggtgtcggctgccttggtacattnttgaagaaaatttttctacctaatcctctctcgcatcacanagtattgtttaaataataataatttttttagaatgaagttntattttaatcttaattgtaactcaaataatatttgttataattagggtaatataatttgaagctattggtcgtatgactaattatttat

SEQ ID NO: 211447 - DNA, 446 bp, Glycine max
  unsure (1)..(446): unsure at all n locations
tcanattattctatttctgatcatacataatattgagtatttgttggcaactattttcaagctcacacacatatcatgatatacctgttttatcttcactggtttaccttctatatacctatgttatttaccattgctattaataatgactctgggaagngaatcttaaaatgcaaactaatatgggctattatgtaacagataaactaattaagtacacacaaagtcatggagaactctgcttcattactacaggaaagagaattgaggttgcaccacgtaaactaaatacaacattacaatgtactagactatgcattaattgcttgccttacaatgagcaaatacaccatccaatgtcaccagagtaaatgttctgacattattttctaaatgaaggtcatggtctatgatgcattcccctatggccgagttcttgatatcta

SEQ ID NO: 211448 - DNA, 467 bp, Glycine max
  unsure (1)..(467): unsure at all n locations
aacgttcagaaactgctggtaatcgattacacagtgcacattntgaattcaaattttaatagctgttgtaaatcagttttggccactggtaatcgattacatcctctggtaatcgattaccaaagagtaaatttgttgaaaaagactttttaacttcaaattcttggccaaacctttttctacttcaattggaattcccctcctatttaatataccctttctaagactagagacttgtcttgatcatccatcttgaatatctttaatttctttgtcttgaataaagctttgagacgcatgtgaaactntggcatcatcaaaacattcagcttgatcctttgtctacaatcntcccccttttgatgaggacanatcctgaaatcaagacaagctatatacaagatgatagcacattcacacaacccttacttcccctatcttntggcatgtatgcctaactttactta

SEQ ID NO: 211449 - DNA, 347 bp, Glycine max
  unsure (1)..(347): unsure at all n locations
actgacctaaaaggttattcgcggtgtcccacgcaaaccttccaggatacaacatgaaccgtcttatgaagctaaggatacagaattttgcaagctatatgaaccaaaaactcttggtgtgagatagtgtctaccaatcacaagacaccctcatagtctttgttgttatcgctgtgngcactactagaccatgcgcgtgctctgattcataagtgctctagagatcttgtcaagatctcatgcaaacgacctcacttgacactcatatatgtgattcatcaaggcatgctgcatctctacacacccataaggattgacaacattaaaacttacagatataagttctc

SEQ ID NO: 211450 - DNA, 360 bp, Glycine max
  unsure (1)..(360): unsure at all n locations
tgaactntgaggttgtanttgcattcagttgtgttatgaaataataaanaagttcacaagcaagacttatgagttcaaccatactgtaccataagtattaagtagacttctgactaaaaacaaaagaagtactggagtaaggagacaagtttaaaataataaatgtgaagtttaaaatggagtgtatgagatgggaagaagaaaaaaaataaagaacgaagaagtaagaatatggtaagtgtgataaatgatgagatggaaaaagaagatagatataaagaaaatgggtggacagtcatgggttggattcaaataggtntagggataaaatcaaattttgatacataatnattaattgga

SEQ ID NO: 211451 - DNA, 204 bp, Glycine max
atacggacttaagcaccgagctgcacttgaaccaggacttggatttatacatactgaccttgttacaactcccttttgatgagacatcctgaatagacagcttaacagagatgccgtcaccaacctactccctatttggatggtccaacttctaagaaaattcaatggttaacccagttttagtcttccccttgcacatcaaaa

SEQ ID NO: 211452 - DNA, 487 bp, Glycine max
  unsure (1)..(487): unsure at all n locations
tgatctgtcaaatctaagttgggaagtataataagcacaagattttcttttctttgatgccatctggaaatataagatcgaacaacaagattgatcagggttattntcaacaaaacagaanaataaaactaaaaattgaactgggcacttagcgtagcaggttgggcttagcgcgccttataaacatttacttatgggctaagcgcagtagactcgcgcttagcctanagacacagaaaatattattntgcaaattaagcttagtgcagcatgctgggcttagcctaagtctacaattttcaaaacagaagagggtctgagcttagcgcaacatggcacacttagcttagcctcactagaatgacactcangcttagcgcacaggggcgcgctagcctaactattaatgcannaaacagaaatcaggcattgtgggataacattgataaacaatgggtaaaacaganataaactacttctatggtaa

SEQ ID NO: 211453 - DNA, 315 bp, Glycine max
  unsure (1)..(315): unsure at all n locations
agcttgtncgcacatcgttggcgtgtatgacttcctactcccangggtngaaggacacgagaccttcaatcctattatggctcgtggcggacaaaagagtgcagctaacttgaccaggtgattatggcgatggcggaatgatactgcgcttcactatacatgttcacatattaattgagcttgaggtttcgtgagccttggctactaccaatatagagatgttgtttatacatgtgagcacatcttataagcttactccgcacacatggggcctcttgtgaatagaacaaatatacctccttctaatgatgcatg

SEQ ID NO: 211454 - DNA, 279 bp, Glycine max
gacctataaaactaagctaagagagggatgatagcggcggttgttggtgagctgtgcattcctggaggacgaaaggtgggtgaactattgtctgcttgcgttgatttcaaccgtgttatgaatgctagagatgaccagtgggtattccaacacagagactcggaagaagctgcgtgtatccctccttatggagctcaccgagcacagagacattgttgacgtctagctgttgaatatgccatccattgtaggctggcagagctaacatgatgtgaacag

SEQ ID NO: 211455 - DNA, 158 bp, Glycine max
agcttgccgcgacacctaaattcgatgtacgtgatatccttttgcgggatcagttggaacatggatgccatagtggcaagggcatcggtcatctaattttccactctggggatgcggtgaaaggatacctcatcaaagtactctatcagttttctaat

SEQ ID NO: 211456 - DNA, 477 bp, Glycine max
  unsure (1)..(477): unsure at all n locations
tggactactntatctttgattggagtcgntacaatntattctaaacatctatgacaatattcttaattcttattagtagttcatgaaattattaaggctgacactgttatgctaatcacttgagtgtatttgactagataaaaccaaaagaaagttgctagattggagtaagtgttccaagattattagtggcattgctcgaggacttctgtatcttcatcaagactataggctaaggattattcacagggatctaaagactagtaatattttactagacacaaattttgaacccaaaatatcaaactttggcttcgcttgatcatntttgggagatcaagacgaggcaaacacaaatagggttgttggaacatagtaangttccttttgatattaattctttgactctccactatcacaatataatcaattgggtaaatttatttcaatggtacatgcctcctagtatgctactcg

SEQ ID NO: 211457 - DNA, 365 bp, Glycine max
cctaattaagaactagcgtctttctttctctattgcctctaagtgcatacacctttatttggttctctatttgtgtcttaaccttctcatgcaacttctttacaaactctgacctagattccccttctttatgtataacagaagtgtcaagtgggaggggaattaggtctaagggtgttagaggattgaacccatagacaacctcaaaaggggattgcttggtggtctatgagcccccttgttgtaggataattctacatgaggaagatactcatccccagacttatggttgcctttcataagaacccttattagggtggatagagacctattcactacctttgctttgccatcaatttgtggat

SEQ ID NO: 211458 - DNA, 380 bp, Glycine max
  unsure (1)..(380): unsure at all n locations
agcttatggcannaaaatgcaggacccttattctctttctccttcccctatttatagaagaaaagggaggtggttgccgccgataggcttcttgaggaagattcctgagtgcacccccaattaataagttcaccccccagggttgcttattgattaagtttcctgagcgcacctcccaattaattagttcaccccacctttcagagtgttctagatgaagtttgctgagtgcaccccccgtgtttgataagtgcaccaccttcagggttgcttactacataagtttccttagggcacccactaattgctaagttcgcccccccttcaggggtgcttattgattaaagtttctgagcacanccccacataattagttcacc

SEQ ID NO: 211459 - DNA, 365 bp, Glycine max
  unsure (1)..(365): unsure at all n locations
tacttacttgttggtgatgaatataagcgcttttttgtttttaagaatgcaaaanatagagatcctagggctgcaaactcgtaaattccgcgggtatggctcttgaaaggggggaaaagaagtttttgaatgcaaaaacgtcccccctttcgtcacttttatattttggtgcaggggtggcttgcccaggcgagctaacctgcactcgtttttttttgagaggaacattaaccatgtcccctccttccctatgggctagtgttttgcctatttgagcctactcaagttaaaattacgcgttaattactaaacacaaacaatggtagtaaaatactgcgactccaaaggatactgggccgccttgc

SEQ ID NO: 211460 - DNA, 328 bp, Glycine max
cctcattcctttaattgatgaattccactcacaggtttggaaataaaattataacacagcttaaatctgagtataatatcgcctgaagaagaaaataccaaacctgatgcggattccataaccttatgcggataaatctgaacaaaatctggacacacaccagcttaaatctgagtaaaattacacagctcaaatctgaccaattccataactttatgcggaaaatctgaacaaaaacaacatacttaaaaaatataacataattataatttgaaatacaacctgataagatattactgaaaacaaaaaaatacccgcgtaaattgag

SEQ ID NO: 211461 - DNA, 472 bp, Glycine max
  unsure (1)..(472): unsure at all n locations
aaggatgtgactcttgacattngaattttaatttcaacattcaaaggcactggtaatcgattaccaaacattgtaatcgattacagctttttgaaaataattggaacgttgtaaattcaatttgaatactttttcataacaatcttgctactggtaatcgattacaacaatctggtaatcgattaccagagagtaaaaactctttggtaaaagggttttgtcaaaactcatgtgctattcaaagttttgaaaaactttntaatacttatcttgattgagtcttctcttcattcttgaatcttgatcttgattcttgagatcttgaaccttgaatcttgattattgtctctagactttcttcttgagtcttgaatcttcttgattctatcttgactcttgaattgtcttgatggacttgagattttgcatcactttgcataattttgtatcacattgtatataaacactttga

SEQ ID NO: 211462 - DNA, 207 bp, Glycine max
agcttcagctctcagcccaatctcccttctctaaatctgatttcaggcttaaataggtggcttcgttcgtgctcgtgcgcttagtgcaactttgaatcgcttagcgcgcatgctcttctcgctcaatggatggactgaagtggtgcccttaatgagatgaagtggtgcgctcaaccaactctggccactcattttcttccacaatat

SEQ ID NO: 211463 - DNA, 480 bp, Glycine max
  unsure (1)..(480): unsure at all n locations
tatgtgcatatttccttacgaacgttcacttgcacaagacatcctattaactaagaaaaatgcacccatatacaatcaaggcagcttcattacctagattatttacatgtacttccaaggtgtatttgttatttacatcacacacatctccttggctaaatttacatacatgcatactcaaagcattntggggtaccaaaaattgcacatgtgcacatcttggtatttctaatacctatacatacacaaacttcatgatgaatcttgactatctacacaataaggtgctacgtttcatgctcttttcaagtttttgctacctaaagtcgcatgcaaattcaagtattatttcctttgctganaanattgtattaaattaaagggatattntttgtatgtatctctttcataaatgcacatttattattnttttggaacatttgacacaaaaataatgacatcatcaagatttgtatatac

SEQ ID NO: 211464 - DNA, 156 bp, Glycine max
ccgaataaaaacaatgtttagaggatcttcccaatgacattttttattttgtttctatgatggggtgttggcagatcctttgaagactccctcggattggaggacaagattacagatagctaatggcgttgtggctgcattgtaaaatctgctttt

SEQ ID NO: 211465 - DNA, 419 bp, Glycine max
  unsure (1)..(419): unsure at all n locations
taactaatacttacatgataagtaatgaatgttattaaatattcttttataattaaattcaaaattttaattatatgtcaaataaagatcaattgcgttataacacaaatatttcgtcctgtgttgcgtactatatgtggccgtgatgtaacatgacgccccaatttttctctttaaagacaaagntcattgagtatcttatgggcgtctgatctgcagccgacaactatgtccacaaaaaatggtggctaaagattaactttcgccgcatgaattgtttgaaagccataagtgatatcttactttaagaatgatcaatgctctgaaattaattatcatgtgctttaaataactccttatctctagttgatctttgcgagacatttgatatgttccttctcctgtacttcgtctccatc

SEQ ID NO: 211466 - DNA, 370 bp, Glycine max
cgggatccttaagtcaccgcggctgcagcttatggggatgggggtgagtcaaatgtgttttgatgataacaatgatgatgacagaggtgatgacaaaaagctcaaagatcaatcaaagaacaaattcaagagttccagaatcatgaagaattcaagactctagaagaaagtctagagaccagaatccagattccagggtccagatctcaagaatcaagatccagattctaggctccagatttcagaatgaggagaagactctatccagatacatattaaaaagatttttcaaaactttggataggccatgagttttgggccaaaccctttaccaaagaatttttactctctgggaaacgattaccctatt

SEQ ID NO: 211467 - DNA, 460 bp, Glycine max
  unsure (1)..(460): unsure at all n locations
tggaaatggaanangaacgaaggtaatgtgggtgtgtaatgtacattgagtcgagctatggcagtcgagaggtgcaccactcccgaatgagtggcgtgaacatgatggccatttggaagctttaccatgatcgtgttgatacgttcgtaggaatggagattgctcatggaacaagttacatgatctgtagctcttgaatctaatatccaggaggtgaatctttgagttgtagaagatgganatatacctgcgttcggtgacttatcacgggtgcatgatgagatggaagcaacctatttggtctgaatctggttaggagtcgccgtccccgaggatggctgttggattaaggcaagtatgcgccttgactgctcacgggagaagcgaacgacatcttgngactcatgatgctgagtttgatcatctgtggtatactatctactggcaccactgtattcac

SEQ ID NO: 211468 - DNA, 374 bp, Glycine max
  unsure (1)..(374): unsure at all n locations
agcttggggttgagaacctatataacttacttatgntttagnttagaggtttcttttcgttttggggagaaagaataattttaggttttgcaattccagtttttactattcacgtggcaataaaattttgtttctgcttcaatctgcaatttcgttttctactgattaatggaaggctaagtctccaacgtttgtttctcttgaggaacaagcacaactctctttgaagttttattattactattgaattctgattagtttttcctcttcaccaattactctggtattgttgctattaatccatgcatgcttaatgcttgataattgtctctgcgctcatataccgtcatgcttaatgatcaatatcgttcatg

SEQ ID NO: 211469 - DNA, 446 bp, Glycine max
  unsure (1)..(446): unsure at all n locations
tctanaggttccattctcctatgtcaaattctattttcttttcgngccgtcttttgctgtaattgaatttacgctcttcttacctatttaattgcgtgcttttttttttgggattggtaattgaactagttttaggttntagttaaacgtaatctattcattagccgattttccttatgtattttgccttggaaatttactgtgccgctttttgactttctctgactagttttcagatatgctatttcttgtgatcaattaaatagatggatagggtgttgtttgtttctgcatcagtcttgaattatgcaacgatatacagcttctgtgtaattgaagaaaattgacgtgattatctgtgtatcactgaatgtcatgcgtgttgtcgcattgcacagaagcgacagtgtacgacttctgcgtaactgaagaaaattgacatgatt

SEQ ID NO: 211470 - DNA, 335 bp, Glycine max
  unsure (1)..(335): unsure at all n locations
ccaagcggacggagccatctctcacctcttctncattatcattagctgcatctccatggaggaaaatcaccactgaaggacctcactgaatctcaaagatctagcctccatagaagctacacaagaaagcttccatcacacaatagctactaaggtcctgcagtcgacaattttctggccaacacttattaaagatgcccatcaacacgtcttaaagtgtgatcaatgtcaaagaatggtggatttcccgaaggaatgagacgcctcgttcaaaagatatggaagatgaagttttgatggatggctattgactcatgggcacttcccctatctgc

SEQ ID NO: 211471 - DNA, 248 bp, Glycine max
  unsure (1)..(248): unsure at all n locations
agcnnagatatgagtgagcgcggggtcgatttattatngcannaagagccgaactaacatgcatacctaatatatccactctcagataccactgactagtaagaaaggactccacatgctttgccacaaataattcccccggaaggacattcccctcatgtggtaaaatctctttgccaaccaagaaatcaacaaagtgaattattatattttgacccatctacgagacaagagtagtgacaccagca

SEQ ID NO: 211472 - DNA, 394 bp, Glycine max
atgtgtatcttatcttccagctagcatatttttatacagaaaaagtatagggggcaggagatttcagtccaatttgtatggcaatatatgggggaagcgttatttccaatagattaggccttattgtctaacagtggagtttgtgtaattcaatgtgcacaatcctatgcactaatggtacactaccaaaactttaactatgtgctaacggtacaggttaggttccatccattgcacccacatatccttgctagtgggagctcggatcaacaagttcgtttatgggactgctacacattacagtgcataatatctcatcatatctgtatgcttacttactgcgaatctctcttatctattctaactactctcgtacagtgtacagtactatata

SEQ ID NO: 211473 - DNA, 399 bp, Glycine max
  unsure (1)..(399): unsure at all n locations
agctntataagcgcgggtctgggagacgaatgtcatgtggtcgcgatatacgaagatgatgttccaagtacattggatttggtacgaccatgccctcctgatttccagctaggaaattggcgagtggaggaacgccccgacatttacgcagcgagcataatgtaaacctttacggttttaaaagctctacagttgggcctaggctttagagtttttcttttgataaggctttgcgtcttttgtttcttgaatttataatacaaggatctttcttcatctgttcctacgtctctacccattctcatacatttgcatgtttacttctttatttctgaaacgggagatccaatgacgagtcccccgaaggtactaatacctgggacccgcctatcaactttg

SEQ ID NO: 211474 - DNA, 470 bp, Glycine max
  unsure (1)..(470): unsure at all n locations
ttngctttgacttttgaaccatatttacactctctgcaggttgctttntatcttggaagaccacaggagttcanaataacagtgtcgcggtaagtaattgctcgtacatttccttggtaattaggtctcttattgcgtattgttgccatcatttttgaggccttgtctggcttgcatcacaattgaaagaaattagtttgatggttaaaatggtataccttttgtcttcattattactcgaattacatttagaaagacctattaataattacttatttgacgttatcatatcacataaatacttatttaaacgtctgggagagtattgtacgaaagtaacataagaattgacttanaagttaaatacttttggctgaatatgtttgtcatttgatatagaagaagagatagaatatatctggcgattaaacaatctatactaatatttttttgagcatccattttatttt

SEQ ID NO: 211475 - DNA, 267 bp, Glycine max
  unsure (1)..(267): unsure at all n locations
tataagtcacctgaggcatgcaagtctcgcaaaatgcctcagtggacagaagatatttttctacgagtngctatcggnttcacctatgtaagtgtttaaagtgcaactgttgtatccaaccatttatctatgtgctagagtttctactgttagttttaaaaagagaaaaaatgactttaattttggacctacttttcaactagggcctanatttatgaaagagaatggacttaagcatgtcacaatttcaactgctgatggagcaca

SEQ ID NO: 211476 - DNA, 431 bp, Glycine max
  unsure (1)..(431): unsure at all n locations
acctataatactaagcttgagatgttcgtgttaagttgttgaataacaagagaatattttgatacataacaatcaaagttctgcaatggtatcagtcttactggatgaaagaaacttgagtgaattaagtgaatcttagttgtacttagttagcaagtttcattgattaaggatagtaccaggagtggcatagagagtactcattgtagccaaaagtggtatagagaatacttggttatgatcaaagaattgataagtggaagccttcaaggtttgaagaagaactggacgtagctcaagagttgggatgaaccagtataaaaccttggttntctttactacttctatataactagttcttttctataagttacttctacattattgtatccaagctntgtgaactgatttcttaagcacaacgtgatttt

SEQ ID NO: 211477 - DNA, 298 bp, Glycine max
  unsure (1)..(298): unsure at all n locations
taagtcacctgcggcatgcaagcttattaccagnagacggcgatcgagatggtgattatcctttngntattactaatgtctttccccacggcgtatttgagataaaaatgaaataccaccaagtcttcaagagacgtcatcaactcaactttttcatgaagctctatgtgaaggaggagtttgggcaaaccctctcttggctcccctattttatgtgatgatgtgccctgaataacacttgaggagcctcttcccttcttttatatggcgaccctttggttgcatttcattgcatgct

SEQ ID NO: 211478 - DNA, 447 bp, Glycine max
  unsure (1)..(447): unsure at all n locations
tcaatggagatttttcaccatggagatgcaccggatagcacacgagaagacgatacgggaggcaccatccactatggaataagccaaggaagaaggagcttcaccaccaaaaaatgccttggataagaagcttgaagaggatgctctaatggaggaaaagaaatagagaaggtgggagcacgatattgaaggaataaaagagggaaagaagtggaactttgaagtgtatctcataaaactttcattcatcaaagntacaacaagtattacacatgcttctattatagactacgtagcttccttgagaagctttcttgataaaacttccttgagaagctcttttgagaaaactttcttgagaagctagagctcatcttcacacacncgtctcatactaagctcactccttggaagcttcttagaagattctanagacctagagctatc

SEQ ID NO: 211479 - DNA, 150 bp, Glycine max
agcttgtctcagcatttatgcgagacagagaccaatatgttagccatcgtcagcaagtaccaagaagaattaaatctagccacggcccatgagcacaaagtggcggacgagtatgcccgaatgtacgcccgaaaggaggctatagggagg

SEQ ID NO: 211480 - DNA, 393 bp, Glycine max
  unsure (1)..(393): unsure at all n locations
actcagcttaagcctaaagccgcctgtcaacatgtcatacatcaagttgtttagaacagtcatgcacttggaagaaattccccttttatggtgcactttcttcaatagcctatacacatacctctgcattattagaaaatatgctttctacatcggttatttatgactttcaacatcggttnttcaaccgatgttgaaagtaccgacgttgatagtattatcgttaacatcggtttttgaaaaaccgatgttaacgtaaaattaccaacatcggttatataaataaccgatgttgccaatatgaattacacccagaaaatgtatattaatgttgaaagttaacatcggttnttataaaaaaccgatgttaacgaatggtgtactattgacagt

SEQ ID NO: 211481 - DNA, 399 bp, Glycine max
  unsure (1)..(399): unsure at all n locations
agctntgagccaatttagacgacaatatctttttattctgatgactgatngagtcctgtcatatatcgagacgctcaaaattgaatgttgatgctctgagcaaattcaaacgacaataactttttactcggatgtctgattcagtcccgtcacatatcgagatgcttgaaattgaatgttgaagctctgagcaaattcaaacgaaaataactttttactcggatgtctgattgagtcccgtaacatatcgagacgctcgaaattgaatgaagctctgagcctattcaaacgacaataactttttgctcggatgtctgattgaggcccgcatatatcgagacgctcgaaattgaatgttgatgctctgagccaattcacatgacaatatcnttttactcg

SEQ ID NO: 211482 - DNA, 465 bp, Glycine max
  unsure (1)..(465): unsure at all n locations
taagcttaacattcaatttcgagcgtctcgatatatgacgggactctatcatacatccgagtaaaaagttattgtcgnttgaatttgctcagagcatcaacattcaatttcgagcgtctcgatatattacgggactcaatcaaacatccgagtaaaaagttattgtcgtttgaatttgcatagaggttcaacattcaatttcgagcgtctcgttatattacgggactcaatcagacatccgagtaaaaagttactgtcgtttgaattggctgagagctccaacattaaatttcgagcgtctcgatatatgacgggactcaatcagacatccgagtaaaaagttattgtcgtttgaattggctgagagcttcaacattcaatttcgagcgtctcgatatatgacgggactcaatgagacatccgagtaacaagttattggtcgttgaattggctgagagatcaaca

SEQ ID NO: 211483 - DNA, 399 bp, Glycine max
  unsure (1)..(399): unsure at all n locations
gatccttaagcacctgcggcatgcaagcttgaggattatggggtacccatttcatgttgtactaggnggcggtcgggcgatggtgcacaactagtttttccacatccacaatgcgcgcatatacccaccatcccctgttgcccacctacaactgagctcacgtattcccacgtagccaatattcttgtttctctcaacaccgggtccccatcaatcctcccaagcttccacaacatccaagcaaaacaacattcacacagcacaagctatcacagccaagcaaaacatagcaaaggcagaaaactctgccataacaccaaccaaaaatcacagcttttcccactcaaagaccccagtaacaattccttcgatctaattcgttaaccggtggatcgactc

SEQ ID NO: 211484 - DNA, 250 bp, Glycine max
ttctcttgtattgaagctcactacacgccttaggtgaataaccatgatatcaccctatccttaacgacatttggatctttcgaattgtcttgggaataaacgcgaggggccattgctttcataggataacctgtcttgttggctatgctatacgatgtatgccgggccatactagatgttgaaatgatatctatacttctctttatgctgaaaatatatcattacttcattataatgtcttacatattct

SEQ ID NO: 211485 - DNA, 154 bp, Glycine max
  unsure (1)..(154): unsure at all n locations
gcaagcttcacacccgaagggcgttggttgaatctcatgtctatgcanttggtgttctgatgttggaagttgtgtgcagcggcagaagaaagcctgaatccaacctggacctaaaatgttccaccgacattgtggctggggttgggaaccttct

SEQ ID NO: 211486 - DNA, 399 bp, Glycine max
  unsure (1)..(399): unsure at all n locations
actcagctgcccacatcaaagaacaaacttgcagagttatttatcatttccgaggatttgtatttgggagtcaatgggtgaagtcggtgtcatcacatgctttaatattgataatgtggaggtgtagatgtttttacctcgacggaacgacgatgaatagtaaagagatgagaaagaacccttgttgtttcttgagtgaagtgaagaggcctatcgcaaccattgttcctggtcacggtagtagaggcatatgaggctttgaccaaggtgttgttgttggtcaaagttgagagtactatcaatggattgaanaaaccacgaaaccaaaggcaaaatcaccaaataaggccccttttagaaattattaccaaataaggtcccttttgtaattattacctt

SEQ ID NO: 211487 - DNA, 253 bp, Glycine max
  unsure (1)..(253): unsure at all n locations
tctgaggcatgcaagctacttgagaagcgaggggagaagtttatctnacctacacacacccctctaataactaagctcacctccttgagaagcttccttgagaagattcctacaaaagctagagcttagatacacacacnccctataatagttaagctcacccccatgccaaattacatgaaaatataaaaaaaagtccttattacaaagactactcaaaatacccaaaaaacaaggctaaaaccctatacta

SEQ ID NO: 211488 - DNA, 92 bp, Glycine max
gttggacaacaactgtcgctgacgatgctaataaaaaaaacctctcgacccttattaacatcgtaacatgcgacccttaaccgcaattacac

SEQ ID NO: 211489 - DNA, 350 bp, Glycine max
agcttgctccatactagaagcgcgggctgatctcaactctaacgccggcttaaatttctgcagtggggaagacaggacaagtccactagcttttcaatggagcaggaatgactacaatgttccattgactactaatgaatatgggaagagggagccatatgccgaggaccctgttggggaatcgaagttagtattcatgatgatgatgtgatggaaccgaacttgccaagtatgtgacaggaataaggtgggtcatttggggtgcgacatgatgaccaaaatttcaagaacaacagcttactggagtagtggcaaccacttgggggtttttcttttttgggaccaagtca

SEQ ID NO: 211490 - DNA, 440 bp, Glycine max
  unsure (1)..(440): unsure at all n locations
gtgtattattcaaaggtgcccaaaaaattatgccattatctatttgagaagtaactnccacaaataatgagaggacctagttttaggctggattttaagtatgctgttttgtattcctgaaatccttttattatcacccatacaatcatcacacttgaggaagtttctgtaaacattgtgaaaattctgtctccttcatatcggagaaaattaatgggaacacattttaattagtggaagaccctattttcctagccaatcccagatcttcactaaagtgcatcattatcaacagagtggcaaataattcatcaacatcaaatcaatcactacttcactatataattggtatttagagcactaatggcaatgcagtactacaagaagtgtggaacaagaaatcccttctttttacacattaatcgtttcttcattgtctc

SEQ ID NO: 211491 - DNA, 401 bp, Glycine max
agctcagagcaatggcaagactggctctttttctttgctcggcacacagggaaaggaatgcggaaattacacacctcgaagctcttcaattttacaactataacactagtcctagaccattgctcttttctttttgctaatgtattaatatctaagctagcctcagctaaagggaccaaccacaaactattacatcaaggggaaaatagaaccactctatcggtgatataaaacctttctaggtgatcagcgcatttgtttcttctctaacggaatgggcaccacaacatcccacactcggtgaattgagaaagaccttctttagatctctttacagccttacaaactggatcagtttttataatccaaatacctttctctaattaataatacctcctgta

SEQ ID NO: 211492 - DNA, 487 bp, Glycine max
  unsure (1)..(487): unsure at all n locations
tgtctcccctaccccgacatagctaactaacttgacacgtaatcacgcaaatgtgcgggtctcttgtggatccgagaagttccacgtgcttcttggttacttgcggtattaatgggctgcatgggtgcctctatggtacttatctcggtatcaatttgtcttttgtcctgagttaaaagcaattggaattggtggccgatgtacttgtttgttccttcattacatagcatattaaaaaaanatatacatcatggcatattattttacttacactgaattaaatgtatagcataaaatgattgaaccaaagatatcccttcatatttcagtttcctttttattattggcacatgaatatttntctggaatcgtgctctntatgttgtataatgatatgattcaactgggaacatagatgcattatattattaatattggcataccctaattttataccggtactanntcgtcgtgatcttttgatcct

SEQ ID NO: 211493 - DNA, 431 bp, Glycine max
  unsure (1)..(431): unsure at all n locations
gcaagcttgagatgaggaagtggtgaagggtgaatcttcctgcttttattgttgaccacagagtggtacctggagatatgtcgcggnggtcaggagaccttgnggacgtcaggtggggtgctattgcccaaaaccaagcttgaccaatcccgacccaacccgggcatagtcggtcagtgagaacctgtgatgtacctaagcaggcgagctcctggcagtcaacagataaaaggaaaacaagaccacaaagtaaggaggcttgtggtggctggccagctgtgaattttgtgtaatatgtggatggtggcctctggtaatcgattactaagggtgggtaatcgattacaaggcttaaaaatgaagacaggaggctaagatggtctctgggtaatcgataccacggggtgtaatcgattaccaggcttgaaaac

SEQ ID NO: 211494 - DNA, 486 bp, Glycine max
  unsure (1)..(486): unsure at all n locations
tactcagcttaacattcaatttcgagcgtctcgatatatgacaggactcaatcagacatcctagtaaaaagttattgtcgtttgaattggctctaagcttcaacattcaatnttgagcgtctcgntatattacgggactcaattagacatccgagtaaaaagttattgtcgtttggattggctcagagattcaacattcaatttcgagcgtctcgatatatgacgggactcaatcagacatccgagtaaaaagttattgtcgtttgaaatggctcagagcttcaacattcaattttgagcgtctcgttatattacgggactcaatcagacatccgagtaaaaagttattgtcgtttggattggctcagagattcaacattcaatttcgagcgtctcgatatatgacgggactcaatcagacatccgagtaaaagatattgtcgttgaatngctcgagcgtcacattaatttcagcgctcgtatata

SEQ ID NO: 211495 - DNA, 419 bp, Glycine max
  unsure (1)..(419): unsure at all n locations
gtcacctgcggcatgcaagcttctgaggagtgaaacaatattttgacatatttatatgaatatgacatggttacctttcaaagaaagtgggccacaagggacaatggttcaaagaatatcacaagatcctgctatgttaatacaaattcatttcaatcattaacacccggacagaattactagaaacagtctacattgtaactgaaaaaagaaaaaaccactggtgcggagtcaacaaaatatggagtctcaatttccccttcctgttttctttccacaactatagccctctaatgcttacaatggcatgggtgataggagatcctctagggttcatcaggtaggtggaagttaattcatctggttcttctcttgaacaaangatgaagatgttgtctagacagatggagattatgatg

SEQ ID NO: 211496 - DNA, 347 bp, Glycine max
  unsure (1)..(347): unsure at all n locations
tacattaagatatgagatcaaacgtacatgttntcctgattacgggtaggcacttttcttatgtggcgtatggatagacggttttgtgatcttcataacctaaggaaaagatatccagctactgccgcttgattctataaattntaattccgacctcaacaaatcaatcttacaagaattcgtacacatagtataatctttattcagagttaacttatactgcgatgttcgacgttatgtatcttcacacttctttgatgaaaaatcattgataactgtctttgtgactagatcgaaataacacacacttagatgatcttatttcgtacttatttcgacgagcatat

SEQ ID NO: 211497 - DNA, 306 bp, Glycine max
tcctttaaatgcttaggcaacactttatataaagaacggttataaattcttattagaaacgccgccccaaaaaaatatgttattatgtgttaaagagaaaattaaaatattcctcaagattttgcgaaagattttaattgaagaaatatggttgccctcccaggaagggttttattttttttccttacattccaatcttgcactgtatgtgctatttttcacaaccccttaaagccttggtaaaaaaaaaattctccacccgcaaatataacctacttgtaaattaaaaattcttgcctttttttt

SEQ ID NO: 211498 - DNA, 488 bp, Glycine max
tactcagcttgtggtgaaatgcctgtacgcgatactcgtggcaatgtttttgttgctgtgatttcctatagcagattaatatatatatattggagcattataaaacattcggaagtatacacaatgggttggtaatgtgattatcttgttctatagtatttcaagtatgcatcttcattgtgatgtgtgataataataataataataataataataataactataataataagtaattatatgaagaagacgaataaataaaataaggttgttatagaaattattatttcatagtgattatttttgttactttataaattaattgttgcagaagttttatttatcttattttgttgaattaatatatttcatcttaatcatattcttgtgtgtcaagaaatgttctattgaatatgtgtgtggatgcatggatgccataatatttatatgagatggattggatatgtgtaggatatcattggactaat

SEQ ID NO: 211499 - DNA, 498 bp, Glycine max
  unsure (1)..(498): unsure at all n locations
tgtgaacctgaaatcttccctccttttgaacaacacaccaagattagaaatctcaattagatatctaaaaatgcatttaatttcagttagaaagacttccctacgttcttgttgaaatgttgcacgtaaggaaatactaaacatgatatcaggtatagacgctgtgaggtgtagcaatgatccaatcattgttctatattgagtctcatccaccttngttggttcttcgtccaatccaagatatgttgttggatgaatgggtgtctttatttattttgcatcattcatattgaatttcttcaacaactcctttacaacatcaaaaataatatcgtccacatatacttgtactagtcgtaatttttacagaagagagttatgataacttttgcttattcgaagccatttttcaatagaaatgaacttagtttttcataccaagctttangagtttgcttagtccatttagtattttatttaagtntaaaaacatgatga

SEQ ID NO: 211500 - DNA, 344 bp, Glycine max
  unsure (1)..(344): unsure at all n locations
agcacctgagctgcagctttcgttacgaagcaaggggttttttgatatccactcgngtatttccgcccgacagtgtgactcaaaagtcagtatgacagatcttgtgagcacggaagatgacgtaaatctccgcgtctcaacgggcttgtcggccgcgattgacgaagggcgcacgagacgacgttagtctctgcgtgctatcaggctnttcgtcttacagatagcaaaaaggtttatacggataaccactcgggtatctccgcccgtcagcgtgactcaaaagtcagtatgacagagcttgttagcgtggaaagatacgtaaatctccgcgtgtcaacgggctt

SEQ ID NO: 211501 - DNA, 376 bp, Glycine max
  unsure (1)..(376): unsure at all n locations
gcttgatcaacacaattatctaatcattccaatccactcaaatcatacaattgctcattcaaatcattctcaaacactcatttcatgcanaacaatccactacatatcattgtcaatcaattcattgttcanacacgctnttggtacaaacaaacaactcaaagtgctgaaatttatataattgaaatttaaaaaaattgaaatataaaatctgaaattaaaatgactgaacataaatcataaaataattganaataaactaaaatgttcgagatgcacaaatttaaatgtcctgctcctgtggttgctcctatgcatgctcattaaggtccaacacctgagcagctggtgcagatggtgtggcataatcaagtat

SEQ ID NO: 211502 - DNA, 475 bp, Glycine max
  unsure (1)..(475): unsure at all n locations
gcttactggcatgttcaaagtaccgaaccgacttggcatatanaaaacaaagagnattccttgcaattatcattttctgtaatagaactgattcttttataaaatataaccagaggatggcccgatgaatgaagttccgagagtttcaacatgttagactgagattaagtttctaagaagtagggatggccatgctcacctcaacaaactctcccaaggctgccctggcctgacctctccttttccatgcctcaccagccaatggattaaattgtatagcctaatacatacaacatgtaaaacacttacatatagaagagataccatatctctatatacacctggttcgacagtttcattcaaccacctttgtaaaatcagctatagcagcatcaagttccctctggaatgcatatgctgtacctctctctattagtgcctcaggataagctgngtcctttttcagtatctacat

SEQ ID NO: 211503 - DNA, 142 bp, Glycine max
  unsure (1)..(142): unsure at all n locations
tgggatacctaatgtgagcattttttcatacccttaaggaanaattgatgaccgctccagtgctagttttgcctaacccgagagaaccctttgaggtgtattgtgatgcatcaaagatgggtttatgaggagtgttgatgca

SEQ ID NO: 211504 - DNA, 460 bp, Glycine max
  unsure (1)..(460): unsure at all n locations
aggaggttcagtatgggttacgagcctacatatgccgacaagagaagggtcaccatagaaagaanagaaagaagcctagcacatttacaggggcagggaccacagatggaaaggatccctatctgccacattagcaaatgctntgtcaacggcgggtggatgcatgaaaattangttgttgtgctagacgaagaaaccaaccaagagcagccaagttggatgcaatcatgctccccgggtttcgaattgaagaattggcagatcatggagtgacccaagattttggtgtcaaatccaatgtaatccagtagtttgaaccatattgctgggcctaggctttanggtctgcttcttttngtgggcatacctctntctttaatgttcccgcaattataaatatacaaccctttttattgatatgttccctctcacactatcgnncatttcattcttctacata

SEQ ID NO: 211505 - DNA, 278 bp, Glycine max
  unsure (1)..(278): unsure at all n locations
gtcacctgcggcatgcaagcttgaagaaggctaacaatggtgatggtttatcaagaagaaaacgtaggggaagaaggagaagaggctggaaatttctggaggaaagagaaagaaggtcttgctcttaacatnttttttctttttctttatctttttaattgcatttccacatgcaattttgtgatcggagcaaaaaggggcccacctttaatataactttgaccacatgctcccccataagagaagaaaaatctgacctttctggatactgaaatctt

SEQ ID NO: 211506 - DNA, 468 bp, Glycine max
  unsure (1)..(468): unsure at all n locations
ttctcaagaaggcttcctgagaagctaacgctataactactaatcaccctttaaaactaaactcaccgccttgaatataattacggataatataacacaacatattatataacatcaaacataattactaataatatatagatatatatatcacggtggtacattaataaacaaaaggaaaaaagaaaaaaaacaatcaggagcatgtttatcatgggtgtggtccccaaatccanactataaaaatatctagtcaagaattgaaatgacacatggttgtgtttcaacatcccaaacactaatttatcccttgctaccccctccgaagcaaagcatatttgttttctaaaagcaaataaaagacaaaagacacccttagtaggaatcaccgctaatccggcacgaggagcagtgcaaaatacacatgcatgatngtgagcaacaatgaaagaaaaaaagaaatataat

SEQ ID NO: 211507 - DNA, 262 bp, Glycine max
  unsure (1)..(262): unsure at all n locations
tccttaagtcacctgaggcatgcaagcttcctcgtggcttgtttgagaagctntctcaagaggcttctttgagaagctatattcttatctatccacacccctctattaactaaattaacttccttaaaaataattacagatgaaaataacgcaacaaataatcaaacatcaaacataattactaataatatatagatatatatatcagggtggtacaccgtgtggtgttagctggaatatggatgccaaagtggcaagcgca

SEQ ID NO: 211508 - DNA, 322 bp, Glycine max
  unsure (1)..(322): unsure at all n locations
gatccttaagtcacctgcggcatgcaagcttcanagggccaaaaggaatgagtttatgttggaaagtatgatattagaggacaagttgatggcttgttgtcataccctaatttcgtccggggaccatctgtttggtgggatgcgaccttcgtttgaccgcttcgaggtacttaacacccatagttaggcaatccgtggagttccgcacatgccgaaaatcgaaaggaagcattgtngcgcaatccgtaaagttctgcaacattcgaaagtcaaaaaagcattgttgcataatccataaagttattgcattatggaatgaaac

SEQ ID NO: 211509 - DNA, 425 bp, Glycine max
  unsure (1)..(425): unsure at all n locations
ntagcatggcctccgtgatagaagccatgtgatcttttaatgtcgataggtcggccttcgtctgttcttgcactccctcttcattatccatctttctggatcgagtgttataggggtgcctttgcgcttttttagttatggtgagttccctaaagaaacaaacaatggtgagtataccaccaaaacatgaatatgctaatgaatgatcagaacacttggatccacctcaaggcctttnttagataacatgatgagtttcagaacttctctttttataaaaaggaacaaagcttttatctagccaagatcatacaaaagtgttacaacagaacgtaacggtttctaattatatgggccatcanatctatcatgtgttgacagtaattgattagcccatgaatntcttcangggctaaacacacttt

SEQ ID NO: 211510 - DNA, 358 bp, Glycine max
  unsure (1)..(358): unsure at all n locations
agctngccgcccagctcgcccaggcgagcttatctcgcccaggcgagcaaggttgcttcctccagaagcaacagccttctggaggaatcttctggagggcccaagtgggcctcgttgctatttacacccccttttttactaaatgcaccccccttttctatttttttgtaattctttntccgtaacgttacgaaactttatgaatttcgtaacgatacttattttttcttccgcaaggttacgaacccttacgaattatgtatttactcttttttagctttcgaagaagttacggaaacttatggattgcgcaaaaacacctctttttgacttccgcacattacggaatttcacggat

SEQ ID NO: 211511 - DNA, 460 bp, Glycine max
  unsure (1)..(460): unsure at all n locations
caatgtgtgtcttaaaaaaggcaaatttagtcatcctgcttggacgaatgagaaaactggggcaaatgaagagggtgaggatgaaggagaagcccgtgctgtgactgccattccaatacagccaagttttccaccaacccaacaacgtcattactcagccaataacaaaccttctccttacccaccgcccagttatccacaaaggtcatccctaaaatcaaccacaaagcctacctaccgcacttccaatgacaaacaccacctttagtgtaacaccctggaaatttctacccgcgaattttggaaacgatgtattttgaatgattatatataagtattattcagtgtatattgcctatatgtcttggtagaaataagaatagtggnggcacgatatgcgggttggactaattaaggaagagaaatcataactgcgaggtatgggtaattcctaataaat

SEQ ID NO: 211512 - DNA, 167 bp, Glycine max
  unsure (1)..(167): unsure at all n locations
agcttatgttggcagacctatggttagactttggtacaaacttatgaggtttcatagctctctcttatcaaatgagcaaacagntctctcatcttcatatgtccattgttcaagctaggactgagttactaaaagcacaggaagagctaactgtggacaaaatgaat

SEQ ID NO: 211513 - DNA, 280 bp, Glycine max
ttcatgacacaaatgcgaccctgatgatttgaaaatattatgcgaaactagtcatgcatgcacctatgtggacacttaagagtcaaacttttatcggcatgtaatgcttgggctcaagattcatttgctctattctagtcaactcagtgaatccaaaatacgttcctttatccatttgtgcattcatccgactctatatgtgggtgttcgaaaaactttcacagcacttacccttctagtgtatacacattgattcaaagactgggtatgatcagtgaat

SEQ ID NO: 211514 - DNA, 420 bp, Glycine max
  unsure (1)..(420): unsure at all n locations
agctttacatgcatgagcacatcatatgtactatacttttatcaacngatgcaatctatgtgattgaaaagataatttatattactcttctaatgtagtcgacaactaaaaaaaaatataacagaaagtaatgcttaggccaatctaatcaagtcattttgaatctcgtcattactatcatgcatctcaaagagaaggagaatcaggcatcgtaatacatagcacaacaaaacattaaaagaaaacatgccttccaaagccaaccaaggttaaaatgtattcatatttggtgaactttttcaaaataataacacatatatataaacatggtggaacaatctgaccacatgcacaacacattccacacattnattctgaaaatgagtggcaggtaatattaataagcattgtattaaaact

SEQ ID NO: 211515 - DNA, 438 bp, Glycine max
  unsure (1)..(438): unsure at all n locations
tatcttacctatntatctcccagntgtctgtgcgaagattcaatagatataaaacatgaagctctaattcaagatgttttctttgttgcatgggcataatgcaatcactctatgtctagcaatgattttattaagatgtccctacctttgagttcaactcanaattatcttctctcgagcgactaatctctaaaactgatgcatataaaaccttcaatgtatttctactaaggattaccctctttcaagcgccaaacccctaaagatgatgcaaggatgaagcatataatacatttgttggcattttaggcctgccaagccctaactaaaggggtttagcctttcattgtcatgagagactnttacactttanggggttgatatggatggaagaagatggatggatagaggaagaaaagaggataatggacatatata

SEQ ID NO: 211516 - DNA, 181 bp, Glycine max
  unsure (1)..(181): unsure at all n locations
ttaataaanaaaactcagatgtgacacctccgatttacttctccctttatatttggcgattatgctttgagtggatattgtgcaaaaagattgtctcttgtacggtggtggtaacgacaacttgcaatggtggggcggtgatgaccatagtcataaatctattctataatttcttcaaaag

SEQ ID NO: 211517 - DNA, 438 bp, Glycine max
  unsure (1)..(438): unsure at all n locations
ctccatatatatatatacaaatatatatagaggcatatatttatattgaggagacagataattcaaggaaacaattccaatgatgagataagtagattatgattatgatgatggcaagttcaagagaaggtcgtcaagcaaagcaagagggtgacaccactaatattgacaagttctcccaggcatcgttcacttcaagacaatggtcagctttcagaaatccaagaattgtgagagtgtcacgttcttttggagggaaagataggcatagcaaggtttgcaccataagagggttgagggacagaaggattaggctctcagttcccacagcaattcagctatatgatctctcagacaaacttggactaagccaaccaagcaaagtgatagattggttgcttgaagccaccanatttgacattgacaagctncctcact

SEQ ID NO: 211518 - DNA, 152 bp, Glycine max
  unsure (1)..(152): unsure at all n locations
caagccctaagccgggaaagtgttgccaggcactttgccgagaagataaataaacagcncccggnncgaggggaggcgcgagngcaagncagggacgccacgnnncaaagaaacgccccccccgaagggggaggagcanaaagacaacacac

SEQ ID NO: 211519 - DNA, 504 bp, Glycine max
  unsure (1)..(504): unsure at all n locations
tanctggcttctcttgcttagtgcattctattctattggatcgcgcgcttagtgggctcttctcgcttagcgcattctattcagttatgcacgcttagcacctattgcgcgctcaacacacgtgacaactctcgagcttaacgcctctcttagcgctggtgccttcctgacccgcttagtgcatgttgcgtgctaagcgcgagctctgggctgggcctttctgatttcttctttttcttctttggtatttctcactttttgcttttagcacctccagttnttatatttgcagccaacattaaacaaaacatcaattctttaatatctaagcgcaaataactactaagataattatttaaagacaattntgcttgattntctactatcanagtacaattatttagcaagtatcagtatatgatggatctaggaattcatggttaagaataccacaagctgatgttgngaagttactcaatgacgcaaactaagagatcatgtcat

SEQ ID NO: 211520 - DNA, 58 bp, Glycine max
  unsure (1)..(58): unsure at all n locations
gacccagagcaccgcggctgcagctanaagccagaacagggactgcaggtcttccgtg

SEQ ID NO: 211521 - DNA, 381 bp, Glycine max
cattagaaaacttatacatatatcatcatcaatgtgcattagaatttattttagataagttaaagatttgaacctgaaaaactttgtgcatggcttcgatttgcttcctaaaccagttggaaaggagtccgtttctgttacagaacattaattaagtcctctcagttaaaatttcattgattttttatgattcaagttggataagatcaaccaaccatttcttgttatttgaccaacatttaaacttgtgagtagtgagtattttcagagcaagttgcacgagataaaaaaaaaaaatcaacatccaataataaaaaagataatgacagaacgtacatattaagatattactattatctacaagtgagatattgaaacaga

SEQ ID NO: 211522 - DNA, 381 bp, Glycine max
  unsure (1)..(381): unsure at all n locations
cacctgaggcatgcaagcttgaagtgagaaagcgtggaagagtcagtttttctacttnttattgttgaccacagagtggtacctatagatatgtcgcgggggtcaggagacctcggggacgtcaggtggggtgctattgcccaaaaccaagcttgatcaatcctaacccaacccgggcatagtcagtcagtgagaacctgtgacgtacctaaacaggcgagctcctggcagtcaaccaataaaagaacaacgacctcaaagcaaggaggcttgtgtagtggctggccagctatggatcttgagtggtatctggaatttggcctctggtaatcgattaccaagggtgtgtaatcgattacaaggcaaaaaaatggagactgg

SEQ ID NO: 211523 - DNA, 438 bp, Glycine max
  unsure (1)..(438): unsure at all n locations
ggctgcagctatcatgaagagtggacagactcttttatgtgtctcactntcttcacaaagatcattgttactattttccaaatcttcgtaatctttttgtagaaaaacatggtatgtctgaagatcatacctttcttcattaagctaatcttgaactctttaagtactttcaacttattttgaactacctcaatttttgtttctaaatcatgaaagttctataataagatatccttttctttggatagctgttcattttcaagttggagcaggacttcggaattttgtcctttttaaaaatcatcgcttattgaaatagattcaaaagaactaccatctttttcttcatacacatattgaagttggatatgaacttggaagttttttataaacctttataataagaaaggggagtttgggagtttctgatatgcttgt

SEQ ID NO: 211524 - DNA, 368 bp, Glycine max
tgcatatagagctacaaacgtcttggaattgatacatacggacatttgtgggccatttcatacaccttcatggaatggtcaacaatattttacatcactcatagacgattactccagatatgcatatatgcttcttatacatgaaaagtcacaatctctagatgtgttcaaaacatttaaagttgaagttgacaatcaactcaataaaagaatcatgagtgtcagatctgaccatagtgatgaattatatggcagatatgacagttcatgtgaacatcgtccgacgccttttgcagctacttagaggaatatggaatcgttccacaatacaccatgtctgtgtcacttggcatgaacagtgtgactga

SEQ ID NO: 211525 - DNA, 380 bp, Glycine max
  unsure (1)..(380): unsure at all n locations
catgcaagcnngtctcctgagagtaaggcagctgcacttatttggattgaagttaagggtagggatatgtaccatgcgttattgttgtctagatatgtcatgtaattatgtaatgcataggatattcaaatttttttcatatgtagagtcacgttcaaaccggatgttatgaatgtggatattacgtaatgcattggatgtggaacatcataaccagcgagataaagagtgactaggccatggtatgcataaactcgagtttttaacattgttgactgcaatcggaactgaaatttgttatctgcagtactaacttttaaatactaatacttgtagtgggttgctgatgcgacatcgttggacatcgacaacatcacaac

SEQ ID NO: 211526 - DNA, 485 bp, Glycine max
  unsure (1)..(485): unsure at all n locations
ctcacaagaaccaagaattactctgtcaagtgtttctgtatttgataagnctaggatctcaaattaagtattggaagcaataaagatcaatttccattcaacatggaaggttttgtaacagaaaaaaatacatcagaatactaaaaaatcattaaattcttactcgttactttttttgaaaagagaaacctaagcatacaaaaaacacatcatcctagccactaggtgtggctnttgtgaatgagctaccggctaccacttagaactctctgtcgtactttagacaccaaaataaaaatgtattatgtatagcccctttatattaaacaaaaataccacaccacaactaacggtagtgtctggtcttagtctgaaaatgtacagaaacacactatcanatngtcaaggggtgggaaacattcatattaaacaaaaataatcaatccacaataagtctataaaccacattgtatcctataaagagg

SEQ ID NO: 211527 - DNA, 472 bp, Glycine max
  unsure (1)..(472): unsure at all n locations
agagagaatgagtattaaacacacaaaatggaagtattaagtatttattacctatactcaacagaatatacttataacactacataataaccataaattggacgagtttgatacaatttacacaagttttatacacaaaagttagtcgtattcaccgactaacaactcccccaaatttatggttacatatttcaatgaacgttgccaagtgtgctaaggatcttcattaggtaatccttgaaataagttccnctgtattaaatgaattaaggaatgtgggtagttgatgttgttagcatgcacttcaagacgtgcaatgctggtgaaaaattgtggtactgaactacttgagtaatcctcaagggtaatcctctgtcatgctcttctgccatggtaatgacttcaggtaatcgagtgacagattccattgatgatggtgaatcangtgatagtaagttagacaaatgagtct

SEQ ID NO: 211528 - DNA, 399 bp, Glycine max
  unsure (1)..(399): unsure at all n locations
tagagcatattccttatgttaccaaacataacaagggaatacgtcatattgtagtcgatgctctttcttggcgtcatgcattgctttctatgcttgaaacaaaattgattggtcttgaatgtttgaaaagcatgtatgataatgatgaatatcttggagaaatctttaaacattgtgataaattttcagaaaatggcttctttacacatgaangctttcttttcatagaaaacaaattgtgtgcgcctaaatgatctactacacatttgcttgttcgtgaagcacatgaaggaggcttaatggggcatcttgaggtccaaagactctaaaacattccaaaacattttattgcctcatataaaaaagattgcataattatgtgaacatgcatgatgtaaa

SEQ ID NO: 211529 - DNA, 479 bp, Glycine max
  unsure (1)..(479): unsure at all n locations
agcttcatgatgaatcaagagtgattcatatatttttgatgataacaaagatgatgacaaaaagctcaaaagtcaagaacacttcatgataacaaagatgatgatctcaagaatcaaagaatgagttcaagattgaatcaagtacacttcaaagatcaagaggaaagttgaattcaagaatcaagtttcaagattcaagttccaagaatcaagatcaagattcaagacttaagattcaagaatcaagagaagactcactcaagataagtattaaaaagttttttcaaaaactgagtagcacatgaattnttctcacaaccttttaccaaagagaatttactctctggtaatcgattaccagaatattgtaatcgattaccagaagcaaaatggttntcaaaaaactttcaaactgaatttacaacgtctcaattaatttcaaaatactggaatcgattacaagtatttgggtaatcgat

SEQ ID NO: 211530 - DNA, 351 bp, Glycine max
  unsure (1)..(351): unsure at all n locations
acgttcagaaactgctggtaatcgattaccatatatgtgtaatcgattacacagtgcatattttgaattcaaattgtaataactcgtgctaattaggtntggccactggtaatcgattacatgctctggtaatcgattaccagagagtcaatttgttgaaaaaaaaactttttcacttaaatttcttggccaaactatctgctacttcaatttgaaaggcccttcctatttaatatatcctttctaagactctagagactggcttgatcatccatcttgaatatctgtaattactttgtcttgaataaagctttgagacgcatgtgaacctttggcatcatcaaaacattc

SEQ ID NO: 211531 - DNA, 359 bp, Glycine max
gagggtttatgagggatttttaaccctaccacttctctctatcttcaccttggctattattaaggacacctatctctctcataaatcaaaagctcattcatctatgtccaaacacaccaaaactcagtgatacccattgaacacatgctcaccatcactaactcatcaattaattaagtaactaattcaagcactcaacttaaattctatttctctcataatttaattaaatcactcgaacaaatattacgaaacacaaccgtcaattatatgtcaaatcgactcttgattccaatgtgtcttatattttggaaggatttggctacatcaactaattaaaggaatacgaggtggggtaa

SEQ ID NO: 211532 - DNA, 385 bp, Glycine max
  unsure (1)..(385): unsure at all n locations
ctctccctatttctatagataggggagaagtgaatggaataaatattcaacccttctggtaattcgagatcacttgaaattagtgaaaaagtgaagaaaatccaagccgaggtgcgttcgtaacgtttccgtgggtgatttcgcgaagatttcaaccgttcttcgacgttcttcgttcgttcttcgtcgttcttcggtcttcaaccggtgagttcccgaaatcgaacttttcaatgcattctatgtacccttaatggtcctcatttgtttcacgtgctttatttgcatttatttacttttcgaccctcttttgacgtgtttagtcattacttaagcattttaccctaatcaaaataaatagatntcaccgtcattcaattgtaca

SEQ ID NO: 211533 - DNA, 90 bp, Glycine max
  unsure (1)..(90): unsure at all n locations
agctaaacattcactttcgagcctcacttctacattcaattncgagcgtttttttatatgacgggacncaancagacannccgagaaaaa

SEQ ID NO: 211534 - DNA, 432 bp, Glycine max
  unsure (1)..(432): unsure at all n locations
cgacaataacgttgtactcggatgtctgattgagncccgtcatatatcgagacgctcgaaattgaatgttgaagctccgagccaattcaaacgacaataactttttactcggatgtctgattgagtcccataatataacgagacgctcgaaattgaatgttgaacttctcagctaattcaaacgacaatagctttttactcggatgtctgattgagtcccgtaatatatcgagaccctcgaaattgaatgttgaagctctgagccaattcaaacgacaataactgtttactcggatgtctgattgagtcccgtaatatatcgagacgctcgaaattgaatgttgaacctctgagccaattcaaacgacaataacgttttactcggatgtctgattgagtcccgctatatatcgagacgctcgaaattgaatg

SEQ ID NO: 211535 - DNA, 410 bp, Glycine max
  unsure (1)..(410): unsure at all n locations
agctntataagtgcgggttcgggagacaaagttcatgcgttcgcaatatgcgaagatgatattccgagtactttggatttggtacgaccatgctctcctgatttccagctgggaaattggcgagtggaggaacgccccggcatttacgcaacaagcataatgtaaacctttacggttttaaaagctctatagttgggcctaggctttagagttttcattttgttaaggctttgtgtcttttgtttttgaatttataatacgaggatctttcttcatctgttcctggtctctacccattctcattcatttgcatgtttacttctttntctaaaacggcagattcgatgacgagtcccccgaaggtactaatacctgggacccgtctatcaacttcgagcatgaaatgaatc

SEQ ID NO: 211536 - DNA, 467 bp, Glycine max
tccagaataaaaagaattggtgatccagtgaatgatgttacaggaaatttttgtgcaggagattatacctgaaaggaacattctggtgattaatataaactaataaaagttgagtagaagtaaccaagaaaggccaaatagccagactagaaccacccagagttgaaagcctaggaaaacagtgacaaaaaataagaataggggaactaaatagtaaaattcttaaataaaggaaattataaatacttacttattttttacaaaattgaccttgactcgaggtaattttgagaacccaggccaaattgtttatttggtgtccaagaatttgaaatctgaaagtaataataaatgttaataggctacgccgcttcagaggcacaaatgtagaaagaccaagtgagagcaagaactatccctacagttaaatgggtaatgctaccttgcagtgtcaatcggctccataa

SEQ ID NO: 211537 - DNA, 350 bp, Glycine max
  unsure (1)..(350): unsure at all n locations
agctntgccgatttagttgttgctgttgaatgtgatttatgtgggtctgagaagaaggcaaattgattatcctactttgatgaatatgaagcttggggaaaatggagagaataagaaggagggaggaacccatgttgtgattgtcgttcctacatggccaaatttcccaccaactcaacaatatcaatactcagccaatatcagcctttcttattacccaccaccctatcagccaagaacaaccaaccatccataagggccacccctaaattagccacaagactcgcctgctacatatccgataccaaacaccaaccttaacataaaccataaccccaccaggaaggaat

SEQ ID NO: 211538 - DNA, 444 bp, Glycine max
  unsure (1)..(444): unsure at all n locations
tcgatctagtcaaggtctgagagaccatacaagtttcctaacgatttctaattatgtgggccattaagtctatcatatgctgacaatagccgaaaagcccatgaatctcttcgggggcggagtangtgtctgccatcgccttggccttggctaacaatcggggaagttcttgactcccgttcaaggtaagagcaaaccgatccatccacatggttgcctcttggtgtaaagagtcgatcacccttcctctagcctctntntccgcgtatacttgngcatactcatccgcgattctacgctcgtgggccgtggctagacctaactcttcttggtacttggcgatgatagctaacatgttggtctccgctcgcataaatgctgagacaagcttnttttggaccttgaacaggcaactaactactctntcaaaacatgctatgtgct

SEQ ID NO: 211539 - DNA, 318 bp, Glycine max
  unsure (1)..(318): unsure at all n locations
agctngtnggaccttgaggcctcaataatcttaatatggataggctcaaaatgcacaattatctacatcaatcaatttaacaatgttctttaaacatgcaagacacaattgattgcaacaaaataaataagataagggaagagaaaatgcaaacacacatttatactggtttggccagttcccgtgcttacgtgcagtactcaagcaacccacttgagatttccactatctttgtaaaatccattacaaagtttgaatcacacagggacagcccatcccttgtgttcaggaatcctttacaacaagagactcacagtc

SEQ ID NO: 211540 - DNA, 327 bp, Glycine max
  unsure (1)..(327): unsure at all n locations
agcttgatgtcagaacgagataagtgtaaaactcaatttcaccacctttggtgttcatttcatgttaaatttggttgttgtatatacttaaagttttccgtcatttcttctgtgtgcttataggttgcttggacccagagaactttaaggcattcaaacttgttaagcgtgcacagctgagccataatgttgcaaagttcacatttgcactcccaacacctacatctgttttgggtcatccaattgggcaacacataaattgcacgttcaattgcctgatcttttgcttgcgtctattttccttgncaatgtaatcaagccatcata

SEQ ID NO: 211541 - DNA, 494 bp, Glycine max
  unsure (1)..(494): unsure at all n locations
ggatctgataccaatgcttngagatcaacatcggtgactctctaaggacaccaagcatatntgaattagacaataagaagacattagtttcaagaaatgatcaaaatgattcacaattaacaaacatcacaagaacacaaccaccatcatatagttntaaaaggcataatttttgggttgcttttgaccataatgcataatgcaatttcttgtttccctatttattaattttattttgcttctttcaagttttggttactttattaatatgcttcatgattttggatgctttctatttatgattagtcattaatttagtgttgcanaattttattctctcttttctatagtataagaaatatagacgtgtggctacaaaaccaacatatggtgaacatgaaactcttctaaattgtgttcatttgtangggcacanataacacacatataaagtatagtaccctataataatttagagctgaagtctctgatac

SEQ ID NO: 211542 - DNA, 384 bp, Glycine max
  unsure (1)..(384): unsure at all n locations
ccttaagtcacctgccgcatgcaagctnctaaaagctattgtaagcgtactggtttattttttcagctccttctagntagatctcataaatgccaaagctgacacagagctaggtcttcaataataggtgccatatattgatgcaaagcttacttcaactcatgctttgcctgctctaattactcttggatctgaccaaaacctcaatgtgaagtgtgccaccattgatgcatttggagtagggctcaacgctttaaaaatgaaatggtatctggcgctagtcaggccgctggatatatatatatatatatatatgtatatatatatatccctgggttttgctgctaaaatgttgatgctgctactcatttcaaattcctctcc

SEQ ID NO: 211543 - DNA, 413 bp, Glycine max
  unsure (1)..(413): unsure at all n locations
agcttggggtagtgtaattataaatcaatgatagcattaaatataatttaaggatatgatatttacttgcaataattaatgctctatactttttgctatcatgattgaagctaatttaacagtatcagatctttcccatttatttgcatatctagtgattgttaattaaattgattgacatgatatattctcaaagtaatctctattgcataaattaatttaattagaattgtatagatattagtataaaattatttatgcgaattgtgttcagcccaaagaaagacacaattaggtcaaataattttgtatatgtaatgatacatgtgtgacaattataaggtatcttcatgtgaattatatgtcggccanagaaagactatgatctgacagaattattatcattattgatc

SEQ ID NO: 211544 - DNA, 324 bp, Glycine max
  unsure (1)..(324): unsure at all n locations
agcttcanaagggcaggcggactctntctattgntttccctctnttctattactctatattttcacctttctaattcctgaaacgaacagaaattgcgaagaatcaccaaatgagaaagaaatacacggtccagcttggcgagaacgagctcgtccttaaggtaccctttnttctcctgatgaaaaaaaatatattatatttttaatttatcttaattatttatcatccatcttctggctctttttgttcttggtgcgttcactgattgtgtgtgtgtgttttaatgaaggaactggatttattgaaagacgacgcaaatgttt

SEQ ID NO: 211545 - DNA, 383 bp, Glycine max
  unsure (1)..(383): unsure at all n locations
acactaanaaactcagctttcaatattattattcttttataccgcaaggagctatatcacttccacataagaaaacattaatataatcaggtggatgatagaaagttcatggattaacaaataatcgatacgtcttacaggataatgaatgacttgattgtttgtctatcttcgatttaattcataacaatttacacgattaactatcaacattaaagtaaaaatgccttttattcttacttttgcagtgagcacttacaaaagtaatatatttttaaagataaacaggctcagttcttttttctattcacaattgaccatttattacttagaaagtagatcatatatagaaagaaaatgtaatatctaaattatatatgttt

SEQ ID NO: 211546 - DNA, 394 bp, Glycine max
  unsure (1)..(394): unsure at all n locations
aactcctgaaatgacattacaattagctgaacaataatgatacttgcacanctataatttccacaccattcttgaataattgtattatttcctttcatgatggagagaaatataatcaacaatagcacgtttaacatattcttgttcatccttttcttttctaagtagaacaaaaatagtctcctacagaaggatacacgcagtcaaaagcttatccacanaagcaaagggaagaaacaactaggaaaatacccctgaaataacattacaattgttggaatataagtntgtgctgaaacccacgttgatagaaatagaaagattgagttattataattagtgaaaaaaattctaatttaacttaaagtttaaataaatgtgatataaaatactt

SEQ ID NO: 211547 - DNA, 341 bp, Glycine max
  unsure (1)..(341): unsure at all n locations
acatcccaccaaagagtgtgtttggggtcattatgtaccactactctgggattggcaactatggaaccaggcattnttattatttaaaagtttatatagttatactattaactagaaatctagtgtctccatttgttgcgattattgatttgattagaatgcctaaaatatagatatcaggtgatggctgattaatcttgctataaatctttgaacttgctcattattctgttgcggatgtctgtcattgtaagtggggaaaatcacattggaatagtgcctgaatgagacacacaaaattacaatagattaatgaaaaggctacagtngatttttattct

SEQ ID NO: 211548 - DNA, 389 bp, Glycine max
ttaagtcacctgcggcatgcaagcttactggataatggacagattgtttattaaataaagagtctagatgaaaggataaaggcttgagtagtcactccgaagcaaatgttgttgaaaatggagggaggagcgagcaccatggtaaaagaggccatgggatatcacgaggaacattcaagtctcgccccaaaggcttaagttgctattactgtggaaagtcaagccataaaaattccgagtgtagattcttgaagaaagatcagaaggcaggaattgtccacgctaatcaaatttacccaaagaagaagaatgaaggtggaaccactactgttatgggctccaatgatgagaatgttttcttattggtatggacattattaaaattacat

SEQ ID NO: 211549 - DNA, 429 bp, Glycine max
  unsure (1)..(429): unsure at all n locations
ctgcatcgntaggtatcagaattcgggataatgcgtttgtgactatgttctgagaccctgatatgtactggataacgtaatcatatcccaataacttggacaaatagatattttgttaggagttttaattacttgggacataaggtttttcaagctccggtggtccgtcaaaatggtgaaggtgtggcctaacaggtagtgcctccattttcgaaccacattcgtaattacgtgtacgtctctgacatacgcagaggcaagctgcanatgagggcacaccatcttgctataatacgcaatggggtgagaattatgttgaaggaccgtgctcatagcccgtgaggatgcatctgtctctatcataaaagggatagaacagtttggtgaaaccaggataggggcttccgtcatcttacatttcagttgatc

SEQ ID NO: 211550 - DNA, 370 bp, Glycine max
agcttgtccacaaaataggactaaaaatggtatttataatttcaatatctcagtttttcctaccaagtaaatggatcatttctaaggcccaacgccttaaaatgatcacctttcaagtaaaaagaatcgcttgattcacccttaaaaaagaactacgtaggtctgattttctcttcgatggagggtacgtaggagcaagagccccgcttttgtccacctccaaattaaaaaaggaaataaaagttaagataacccaatttcacaattctaaaaaataggctgttgtcctttgagaaaacgtgagaagtgctaaaccttcctcaaccgaaatacacccccgaaattagaatttaattttgaccagcttcct

SEQ ID NO: 211551 - DNA, 418 bp, Glycine max
actcatcttcttagtttcagatgaagcagatgggtgtgtagctacctcatgcactcctctaacgactatggcatctgatggtggtggaaactggcacatacgttcttaaatctctcccagtactcatacaggctctctccactgagatgtctaatacctgagatatccttcctgatggctgtggtcctggaagcagggaacaatttttctaagaatactctcttaaggtcatcccagctcgtgatggaccttggagcaaggtaatacaaccagtcctttgccactccctctaatgaatgaggaaaagccttcacaaatatgtgatcctctcggacatcttggggtttcatggtggagcatacaatgtgaaattctttcaaatgtttgtgcgggtcttcacctgctatgccatgaaact

SEQ ID NO: 211552 - DNA, 383 bp, Glycine max
agcttaggaggctaagccccgtttgaggaattcttttcagggagacaattttttgctgatctttattacaatttttttttctgcgatctttattacaaatggacagggactactcccaaaagttagctcaagggaggagggttgcccaagtcttataaggagtattctagccatgttcctagccaatgtgggacaccttaacactcttcaaatgagatattctagccatgtcttataaggaggaggactaactcccaaaagttaactcaaagaggagttttgtccaagtcttataaggagtattctagccatgttcctagccaatgaggaacatcttaaaactcttcatatgaagtaatttaacactagccatatgaccataa

SEQ ID NO: 211553 - DNA, 407 bp, Glycine max
acgactctctggatgaagtcccctaatcatggtattgatgagttcaatcaattatactagtccttccaaggttggtattttctcccctaagttttctttattttttattgctttctgtctctagaataattgtgatttgcctttacttgtgtgacttagcttgtattgatcgctttcatgttctcattgaagcatgaataaaaatggttttggttcaatgcatgattgcggatggactcctacattctgtgattttctaatggtggttaatgtgtgcggcatgtttgtatggatgtctttgcttccttgatgaggcctatcctagtgaagaattaatgtgatatatatatatgttgagtcgcaccatatgttctggcacatatgatattgcttgatattcttgagtc

SEQ ID NO: 211554 - DNA, 384 bp, Glycine max
  unsure (1)..(384): unsure at all n locations
agctngcatcatttgttgttggaattcctcatccagcangnattatctccggccactaaaagatcatcaacataaagggaaattatgagaaaattgtttcccttacgtttcacataaagagtggattcagataagctttttacaaagtcgatgctcaaaaggtgatcatttatcctactataccaaacccttggtgcttgctttaggccatagaggacctcttttagtagatagactttatcttcttcacctcgcttcacaaatccttctggctgctccacatatatctcttctttgaaaactccatttaaaaaagctgatttgacatctaattgaaatactttctatcctttttgagcaatatccattaacaccaatctaatt

SEQ ID NO: 211555 - DNA, 281 bp, Glycine max
gatgagttctatcatggggatacatatgtgtcatatctaccatgaacgaaattcgtgcgtggactctatggccaatttgacttatgatctggagaggaaatttgtgattgttgagcaacctctcacttaggtgcatatgctactcttatgtgattgaggagatttatgctggaccatggcgcctattactaacttattatattaaaaaacacatagtgatgatgtttagtaactattattgagaatgaatgtattctacaatctaccagttcactccaccc

SEQ ID NO: 211556 - DNA, 120 bp, Glycine max
agcttaatggcatagcctactattgcttctttatttggcggaaccacacccaaaaattggtcacacatttccttccaatcataggatgttttagcagtgactgacctaccggtcaccatt

SEQ ID NO: 211557 - DNA, 472 bp, Glycine max
  unsure (1)..(472): unsure at all n locations
ttctagccatttcttggacttcatctgtggctcagctctccctcatgtttcttgattttgntgttgcaggaacaataatctccttgtcaatgattccctgactttgacggcgatcatggtgtgtttgttatatatgagttggtaaagagtttcattggtcgttgtttggggtgagtaatggtaggcccagagtatactggggagttcctctttccatanacccttagacttgtcgactctagtgtgtagggccttgaggataattttgttggctgcctctacctgactgttggtccgaggatgttcaacagaggtgacgagatgcttgaccnctagcctcatcangaagtcttcataagcttgagttttgaattgcgtgtcagttntcggtgacaatggcgtaagggaggccataactgcatatgaggtgtttccaattgaactctttcacttcgntggctgtgatttctcg

SEQ ID NO: 211558 - DNA, 369 bp, Glycine max
agcttgaagagttccgcaatatatggtccctttgaagcccaaagcgcaaataaaccacgatatctgtgcttacgtatcactgctaaacacacatatcatggggagatatgtgcaagaaacttatgtgatatatcgcaggtcgagacatcaggctatgttttgtagttaaaataggggcaagtctcctaaacgcatgacctccgataaacgcaacttcaatgcacgtggcgcaaaggcaaatctggctaaacaatgtcattactctataccccaccggttgtctttcccaagcatgagcgcgagacctgctctaaccctaatctactttactcacactctgagcgatggtggcacgccttacaatgtctc

SEQ ID NO: 211559 - DNA, 281 bp, Glycine max
tcaatggggcataacacaccaattgattatgatgatggatggctcaaattctcacaaaggtaaactcatcactttcaaattgagctttcaaaactatcatgacatgtagaggagaatcaaggatttcaagtcacagaatgtcaagaacttttattttcaaaacaactacccatttcttgaacatatcctataattcaaagaaaaacatgcaaagtcatacatgcacacaaaattgacccaaaatattaaactaaaaatccgaccgaactaacaacattaac

SEQ ID NO: 211560 - DNA, 476 bp, Glycine max
  unsure (1)..(476): unsure at all n locations
cctataaatactaagcttntatttncagcagatgaagatgaatctgtggccaccacatggactcctctaaggacaataacatcatttcttgcactgaatngatgggagttggaagccatcttctcaatcaaattcctatcctcaacaggagtcatatcaccaagggctccaccactggcagcatcaatcatactcctctccatgttgctaagtccctcatagaaaatatgaagaacgagttgctcacaaatctggtggcgagggcaacttgcacacaatttcttgaatctttcccagtactcatacaagctctctccactaagttgcctgatgcctaaaatgtcttttctgatggcagtggtcctagatgcagggaataatntctccaagaacaccctctgaaggtcatcccagctaaaactggacctgtgagcaaggtagtatagccaatctttngccactccctccagagaatg

SEQ ID NO: 211561 - DNA, 252 bp, Glycine max
agcttatgctggcaaaggactaaaccaggtgttgtctattaaagaaattgctctgcagagactgctcttgtgggagatacagttgaagattcaatactaatgccagatcctttaccttctgcaacttcatcaaacaattctctttctacatcagtggcgagtactaagaactctggttggctggggcctcctttgatggttcttacttatgggatccggcagtgggttacatccagcaactaaatgcttcta

SEQ ID NO: 211562 - DNA, 125 bp, Glycine max
  unsure (1)..(125): unsure at all n locations
agcttgccaacccatggaagctgcgtaaatcttccatactntntggggggggccattcctggatggccctgaatttctcaaggtcattttggaacccatttctaccaactaccaacccttagaaa

SEQ ID NO: 211563 - DNA, 456 bp, Glycine max
  unsure (1)..(456): unsure at all n locations
tctctaatacctgttagattcatgagagctatggttcaggcaaattactctaaattgtgggagaaaagttgaaaagaatgaaaagaanaaggtttagcatcaacacacacaacaaataagttgtatgtaaaaaaaagagaaaataagttgtgctgttacaataaaggtcataagcaacttaagacaagggaatagtgagaaggctatttgtcaaaacaagaaaagatcattgggattagtctaggacttgtgctctcttagaatctaaacctttcaatcctagaaaaaccaatgaatttttgtagccaaacctcactacaagcctgagaaagtccttctgattttgtttatatatttctgacgatgaaatgcacagattggacctcctgttagtngtgtcgcaacctacccttcggcgggagggcgacgcgagactcgtgggatgcgtgttccatg

SEQ ID NO: 211564 - DNA, 306 bp, Glycine max
agcttaggaggctaaacgcggtgtgaggaattcttttcagggagacaatttcttgctgatctttattacaatattattgttctcgcgaactttattacagaatggacaagggacttactcccaaaagttatgctcaagggaggagggttgcccaagtcttataaggagtattctagccatgctcctagccaatgtgggacaccttaacactgtataaatgaagtattctagccatgttttataaggaggaggactaactcccaacagttagctgatagaggatgtttgccaagttttataaggagt

SEQ ID NO: 211565 - DNA, 455 bp, Glycine max
gctatcacatatcttataaagctctaagtaaatatgtcgattttgaaaaatatgttcctctctagtaatcgattacagaggcagtaatcgattaccagaagcaaaaatggttttaacagatttcagacaagtttaaatttgaaatttaaaaagctgtaatcgatttccactattgtgtaattgattacgagtcacaaaaaggtttaaaattcaaactgaagagtcataactcctcacaataactgtgtaatcgattacctcatacctgtaattgattaccagtgatgaaatttcaaaaataactctgaaaagtccaactcttacaagtttttcgaaggtaccaaagcctataatatgtacttgtttcaaatcctatagttttcaaaatcattgcctatctctacaagaaaccttgcaacacttgaaatattaagatttatagtctcagtgatatt

SEQ ID NO: 211566 - DNA, 456 bp, Glycine max
  unsure (1)..(456): unsure at all n locations
agcttgcatgtcgcgtgagacctaaaatcatcttttgttttgaatatctcaaattgggctaagcgtgcaggcacaggctaagcgagtcatgcattcccggtaagcctgtggtgctcgctaagcggattttgcaggaaatttcctcctgcaaaactctctaagccctatgtggcatgctaagcccaataatatctctgaagttgcaatttcatttttgggcttagcgcacaagtttgggcttagtgcgcaaaanaaaaaatcaaaatttcttgtacttctattttggaatgtctcctacgcagcaagcttagtgcgcacttacacgctaagccttagtgttcctcaatgtttggatttttgtgttgggctaagcgccagttgcacgctaagcctaataagcttactgttctttatgttgcaaatgggctacatttcggtaactttatagtaacacat

SEQ ID NO: 211567 - DNA, 230 bp, Glycine max
  unsure (1)..(230): unsure at all n locations
ggagatgacgaagngtacaacggtgaaactgcctgctttcattcttcgaccacagagtggtacctggagatatgtcgcaggggtcaggatacctttgggacgtcatgtgcggtgctattgcccaaaaccaagctggaccaataccgacccaacccaggcatagtcacgtcagtgagaacctgagatgtacctaagcaggcgagctcctggctgtcaacagataataggaa

SEQ ID NO: 211568 - DNA, 404 bp, Glycine max
agcttgagaatgtggccagcaagaggtagtgttatggcttacaaagttaagaaattatggataaactatagtccttaatctttggaaaagtccttaatcccttcctttttattttcttaaacgcgattggcttggctatgagatgatatgcctctatgtagtgtgaaagacctcaccatattgctactttccatatattaatcttcaagatttgtcataaccattctcttattactttgtttattttgcccatgtatggcacttcttgtagcgataccaacaagttaaagataagtgacgtcacgagactacttgatgttacattaatacatatgatactccttttgatacatcacaatctttgtgccatggattatacaataagtgatgccagtatattatta

SEQ ID NO: 211569 - DNA, 474 bp, Glycine max
  unsure (1)..(474): unsure at all n locations
tgtaaggatatatgggatattaccgggagagcaacgtatattttttttatagcgancttagcgacaacgntagtaatggtattaatgatagagattaacacacagtaaatttagtggtccagacaccagacttaatttttctacatgtatggtcgaaatagtaaagtacagattattaataattaaacttactattcaaaaataataataattaaacctaatttgtaatttctttgtacttttctgaatgataaaaaaactaatttgtaattcaaattttttttatggaatgggatatatgtttcttttggaatgctagcatgcgtctaaaagaaaaagtggatatatgcaagtattttcgttttcgaattcatgttagcatgggagctatatcaaaagagtaagtgatattanatcaatggtatgtatctcatacaagataactcttatcgtgggagactttgtctatctccc

SEQ ID NO: 211570 - DNA, 323 bp, Glycine max
cgaaacttgaaaactttgcagcccattttcatctcaatccaaccaaagtttggttccactaagccagagtgagacaaggtgaagcttatagttttcggaggttcaacctcgctagatttgtgtgacaaaatggcgctttcactccacgaggatttgttccaatgagaattttgttataaagtgacgaaatggagtatatagctccaattgagttgtgacttgacctgaaaatggaagaatgacatttcttgattctagatcatgatgccaagtgttctattgttatgaagatacctatttgtttgatatattaatggatgaca

SEQ ID NO: 211571 - DNA, 426 bp, Glycine max
  unsure (1)..(426): unsure at all n locations
tccatcatgtggtatcaagagcatcttcatctaggtgatgttctttngcttcctctatctttctgttcggcgaattctctttaattccttcgtcttcatcttattccccatgtatatcctccattatcttgcggttcggtgctgcttagagtagactcaaaataataaatcgattaaatgcttagatctacacttgttcttgcatttctatggttcacantttgtacatccactcttgaatcttgcctttgtgttgattttacgctctatcaatttccattcataatattcttgttctgaacctttagatctnaatattctttccaaatattgattagaaacaaaacacacaaatctaagtgcagatcactaatccatgttgtcttacagtcatgtctagacatactaatttgcacattatgctct

SEQ ID NO: 211572 - DNA, 369 bp, Glycine max
  unsure (1)..(369): unsure at all n locations
ctgcagctttgctaagattattgcatgttaatattctcatgcataggcatgtacatgcatatttgttatcttgtgacagggacaagatcattttaagcaatggtcaaatactgtgccaaatccaagacagggatgaatcaaggtaagtggtaacgtgaccacgatttgttgcacaatgtcatttcctactttcaggtacttggggacgggcacgaatggacgctaggcccatgatcaacatatcgatgtcccgcgtccagctctggacaagcgagaagcgctactgggaggcagcctagtatcctttaaatttctacctattattatntgtgtttctttaagataatgatcggatgcctaacttaccct

SEQ ID NO: 211573 - DNA, 362 bp, Glycine max
tgtgcctcttcacgtctggaatatgaatgtagcatatggatccaaagacccttaggtgctttgctgatggcttcttcccgttccaagcttcaattggagtcttgtcttttacagacttagttggacatctgttgagtatgtaaacaacagtgtagactgcttcagcccagaatgtgttaggtagtcccttctccttgagtattgatctagccatttccataactgtgcgattctttctctcggacactccattttgttgagtagaatatgcgattgtaagttgtcactcaatgccttcatcctcacaaaatctttcaaactcacgagaggtgtactctttgccgtgatcacttcttagtact

SEQ ID NO: 211574 - DNA, 307 bp, Glycine max
agcttcttctgtgggaacttcttgggtcttatttaccatgtcctcgaggagcttggtgtgagtctcttcttgctgagccatcatcttgatgacaacactctcgcaaaaacccttgaacatttcgaacctatcacgcctcttcctcttgcgcacctttgaatttgacttctccccactgtgtcacttccaatatcacatcggttgggcgcttgagctgtttcaatgtctctcgaattttcttccaatgcgtgtcctcctaggtggtgagtcttttcactcctcactacaaccccattatgatcatgag

SEQ ID NO: 211575 - DNA, 367 bp, Glycine max
  unsure (1)..(367): unsure at all n locations
attcttacaggaagacacggcagcaatgcagtaaggttgtatgacaattgttaaattttttggcaggaggaagcttattttcaatactgactgatgccatcttcactggatcacctgatgttgttaaatataacaatgtatatgaattaataacagtatatgtgcaagtttgttatgatactgatatcaagatatcttgttgagcatcattcagttgtaccagaacatagagattaggccttcttgtttccatttggttgttatccgcctagtaatgtgctacactagtgtatatatatgtatcatcacatgtactctgatatcttganattcctttttacatgactaagaaattcttttataatag

SEQ ID NO: 211576 - DNA, 343 bp, Glycine max
agcttagagctaattcaaacgacaataactttttactcggatgtctgattgagccccgtaatacatcgagacgctcgaaattgaatgttgaagctctcagcaaattcaaacgacaataactttttttctcagatgtctgattgagtcccgtaatctatcgagacgctcgaaattgaattctgaagctctgagctaattcaaacgacaataactttttactcggatgtctgattgagtcccgtaatacatcgagacgctcgaaattgaatgttgaagctctcagcaaattcaaacgaacaataacttttactcggatgtctgattgagtcccgtataatatcga

SEQ ID NO: 211577 - DNA, 427 bp, Glycine max
  unsure (1)..(427): unsure at all n locations
tactcagcttaacattcaattntgattgtctcgatatgttacgggactcaatcatacatccgagnnaaaagttattgtcgcttgaatttgctgagagcttcaacattcaatntcgaacgtctcgatgtattacgggactcaatcagacatccgagcaaatcattattgtcgtttgaattagctcagagcttcagaattcaatttcgatcgtctcgatatattacgggtctcaatcacacatctgaggaaaaaangtattgtcgtttgaattagctcagagcttcagaattcaatttcgatcgtctcgatgttttacgggactcaatcagacatccgagtaaaaagttattgttcgttgaatatgctgagagcttcaacattcaatntcgaacgtctcgatgtattacgggactcaatcagacatccg

SEQ ID NO: 211578 - DNA, 392 bp, Glycine max
caagtctttggagtagaaacatgggaccaacttattttatttcaaaaagaaagtcgtatctagtcaaggtctgagagaccatacaagtttcctaacgatgtttaattatgtgggccattaagtctatcatatgctgacaatagccgagaagcccatgaatctcttcgggggcggagtaggtgtctgccatcgccttggccttggctaacaagcggggaagttcttgactcccgtttaaggtaagagcaaaccgatccatccacatggttgcctcttggtgtaaagcgtcgatcacccttcctctagcctctttttccgcgtatactagagcatactcttccgcgatactatgctcgtgggccgtggctagacctaactcttcttggtacttg

SEQ ID NO: 211579 - DNA, 458 bp, Glycine max
  unsure (1)..(458): unsure at all n locations
taagcgagagcgtagctacacatacctctctaatagctaagttcacctcctagagatgagaagctagagcttagctacacacctctataatagctaagctcacccctatgacgaaatacatgatacaacataaagaagatccctactacaaagactactcaaaatgcctcgaaatacaaggctaaaaccttatactactagaatggccaaaatacaacgcccaaacgaaggaaaaacctattctaatatttacaaagataagcgggctcatacttagcccatgggctcaaaatctaccctaaggctcatgagaaccctagggccttcccttggatctctggcccaatctacttggagtcttctatccaatgcccttgcggngtaagagtgaatcattccctccancttgggacaggattgaccttaaatttggggttcttcatactctgagctcttcc

SEQ ID NO: 211580 - DNA, 459 bp, Glycine max
  unsure (1)..(459): unsure at all n locations
ttgatccgttgagagatcccaactagtcgatgtctataactttgactcttgacacgacgtcactactgtgcagagagagtggggaccataaatgctttctgcaacatatcttcagagaagtaccagttgactgtgtcgcttagtgcttagatatgactatcatcatatagattgaaagaaacgttaacaacataaaacaaaagattagaatgcaaataaacattaaaacttccttttagtgagctaaagcacaagtttcttactgagtatgtggatgttactttcttgatttttcttcattccttgagaattgagtaactattctatcactnttgcattgtgaaccaagtgcgaaagcacttgtcttctcaaggctgcactactacanaaaccagaattaacatcggcatattaacatcatattttgaaagaaccgatattaacataaacaccgtgaca

SEQ ID NO: 211581 - DNA, 323 bp, Glycine max
gcaagcttggcttctttggaagcatgctcctgttcccttacagctatagctattccaagcttgtgaggccaattaaatgctgaatagtgaaattattgcctatttgagtcaaacatgtgcagaaagacccacttatattaaacaaaaactattaaaaacaatgtgtggcctcaaaagtaaacatcccaacaatttattgttttgtgggataccaatgaaatgatcaataatagttataagatttgaatttcatgtattgagccagatgaaaatgaggatgttgaacaaatttacttatacccataactagaataataccttga

SEQ ID NO: 211582 - DNA, 350 bp, Glycine max
ctttctcaagaaagcttctaaaggaagctacctattctataaatagaagcatgtgtaacacttgttgtaactttgatgaatgggagtcttgtgagacacaactcaaagatcaacttctctccctttttcttccttcaattcgtgctcccccctgtctctttctctccctctctcttttcctccattgaagcatcctctccaagcttcttatccaacgctcatcttggtggtgaagctccttcttccatggcttattcccgagtggatggcaccttctctcacctcttctcctttgtcttccgctgcatctccatgttggacaatcaccattaaaggacctcattgagctc

SEQ ID NO: 211583 - DNA, 451 bp, Glycine max
  unsure (1)..(451): unsure at all n locations
tacattctaagctacacggaaccgccacctaaaataaggccttgctaatgtgttcantnagacccatatattcgcccccttgaactatcccaatacacataagaatatcaccatttaactgttatgcccttctatatgcatatggtgcattgctcctcgacgtcatccacccctcattcacttaatttgactgttaaagggacttttatattacatgttgatattatgcactctcagatgatatggaattgaaatattttacttaagagagagtagacatagctaaatacacatagtacaacttgctatattcttaaattatacttttaaatggactgaacatcttaattaatgaaattctaataacttctcattcataatcttagtagacagaattaccatgtcgaaaattntcacctatgctaccatatattttatctagctctggctt

SEQ ID NO: 211584 - DNA, 416 bp, Glycine max
  unsure (1)..(416): unsure at all n locations
agcnnaagaataaagagcgaccctatgttgcttttaaactntctacaatcaattttataaataggattggtgcatgtaaatctagctagctagaggcagaagaacagtactagagtagtagatggaagccactctccacgcaccttaaataactcgcaattaaacttgagcataacatcaatagcgacttaagataatttcaattatgggctctatttgaacaaatctctctataaatatctccagaagaagaaaatattaagaaaacaataaattgaacttctcatttaagttaaaataaacatatttgtatattttgtatataaaaactctcatttaacttctcttaaaaaaattgaagtatatacattaattttagcttatgaaaaaaaaaataaccttatttattttctatt

SEQ ID NO: 211585 - DNA, 435 bp, Glycine max
  unsure (1)..(435): unsure at all n locations
tataatatgaagcaccagatatagatatcttgatgcctactatngatatatagcattgaacatacattaaactagctagagagaataacaattgctgattatagtacactccataggtagtcatgatgcgtacaccactactgcaagaaaacactttaaattatagtattagctagtaattgttgtggttgtcttgatcatgcttggcctcacatgactgacaggtggcgaatccatctgcctatatagacccttccccataacttcctttcttactacttcttaagagaatntctaataggaaacagtagaagagaattaccatgagacttccatggctgagaatgaagggtcatgtaaagagagttattgtgtataatgttgttcaaatgtatgagttattattcacttcatattaacctgtataatgagagt

SEQ ID NO: 211586 - DNA, 382 bp, Glycine max
  unsure (1)..(382): unsure at all n locations
agcttgcattcactaattacctcaacagcatctacagncaccaccaaacgtgtagacccagtcagtcaaagcccataacccactatgaaagtgaaacagaatcaacaatgcaatccaatccatgctcttcaatttgaagaagtgcaacattacattacaaattcaactgtactagcacacggaccaagcttctgaaacccaattccagactcaatcggtaccaatttctcaccatcacaatttcacaaattaaatcatcagttcattacattctccctttttcttcctcctctcctccaacaaagcaccagaatctaaaacaattatccaacatctaaaaacctagttaagttttccaaaccagcaggaaagtaaacaaaaa

SEQ ID NO: 211587 - DNA, 485 bp, Glycine max
  unsure (1)..(485): unsure at all n locations
actcagcttcagtggataataggggctcgatgaatactcggctaataaccaaccgaagcgnaccaatttaattttcaaaanaagcatcgataaaaaaaataggttttactttgtcaaaagtacaaatgtctttatttagcaagtcttttttattctataaggttctatgtctttctacatttctcaccaaacaaataacaatgaattaatatttttctttcaatgcaacatcaatgaacatatatctattatatatatatatatatatatatatatatatatatatatatatatataataagattttatttatagaatgataccaagtaacaaccttatatctattttctctaaaattattacataacatcacttcaattaatcgattcatcttaatgattcttattntattaattaatcatgatatcattaagtgagacatttatcntacagcaatctaaatatgttactggatatgaaatttt

SEQ ID NO: 211588 - DNA, 455 bp, Glycine max
  unsure (1)..(455): unsure at all n locations
ccgggatctntaagtcacctgcggcatgcaagcttctgaggaagcctgtgaagatcttttttggaagcnacatgaagctttctcggtaaaaacgttgtccagcctattgtaatcgttggatcttttcgaaattctgttttcaagcttcaaaggatacttgtcaacgatcatacacgtgggatctttgagaaaattttggagggtgcgcgaggtttttgttcccagagaaatgcccaccttggccttttggacccttgttccccaatgcttaaggaaaaggcgctttttttctttttttttccaaaaccattttattgtccaagttttttccatccctacacctcattagcccccacaaccgcgttttctcggttacacccccccgaaggaaccttcaccaacaaaacttcaacttgttctatttggagaaaaaaacctattagctttttttctca

SEQ ID NO: 211589 - DNA, 490 bp, Glycine max
  unsure (1)..(490): unsure at all n locations
actaagcttaagaatatggcctaacaaacttcttattcccagaatgatactctataaataggcctcctattcttaatggagagggttaccactactggaaaaccggaatgcaatatttcattgaggcaatagatttaaacatttggaaagccatagaagttggaccttatgtacccaccatggtggctggtaatacaacaatagagaaacctagagaagagtggtctgaagatgaaagaagattagtacagtacaatttacaggctaanaacattattacttctgccttaggaatggatgaatattttagggtttcaaattgtaagagtgctaatgatatgtgggacactctgcaagttacacatgagggaacaactgatgtcacaagatctangataaatactctaactcatgagtatgaattatntacgatgaagaacaatgaaagtatacaagatatgcagaaaagattcacacatatagttaatca

SEQ ID NO: 211590 - DNA, 376 bp, Glycine max
  unsure (1)..(376): unsure at all n locations
cctgcaggcacgcaagcttcaagcaggctcgtggaggttattttttatgagggcgcatgtcttgattattttgagtgcccaagaaaacaaagaaactatatggttaagattaagaaaaaatgtgtgtgcacaattcttttttatcacattttcggttattgaatgagttttacgtcttgctaaataagttgttattggctagctcgcttaaaacataactcctttgtcgttcgaaaaanaaaacataacttctttggggttactgtttacaggaacgttgccaatttccagagaagaaaatgacttaaaagtctagctaatagaaaaaggaataaccctacatcaagacgtgatttttttttacagcaagatatgg

SEQ ID NO: 211591 - DNA, 311 bp, Glycine max
cagcagttatctgccaatttggctacttttcgagcagcaccaaagtgaatattggttcttgagacgaggatcaatgatcttgctgaatctgctactgttagcaggtgaatttttaacccactctataagcttttgttcccctattggtctgtttctattcaatacacgccttcccgtgaggatctcataaagtaccacaccaaaactccatatgtcactctgaatcttgagatgacctgtttcaacatactctggagcagcatatacctgtgtccacactacctgataaggaagtagttggcgtatacaca

SEQ ID NO: 211592 - DNA, 366 bp, Glycine max
  unsure (1)..(366): unsure at all n locations
ngcttgagagatcttatcagcaatggtatattacatcacatctcctagggatcaccactactccacaggctatgcgaccaaaaagtcccctcctcctcctccacatgtggagtttcctacctctccacaactcatatttggggaggagattcttcagtttagccaccctcagcaccctctcttaatggtggagctttctgacttgttcaattgtgtggggtgcaaaaannntggctctggaaagagagttgttcgccagcaatgtgactttcagcttcatgacttctgtgccatggctcctcctgctctaaggcacaccccttccactcaaacactctgttttgttccattcaaacccagaaacat

SEQ ID NO: 211593 - DNA, 475 bp, Glycine max
ataatgtcatttaagttatttcatatgttttatgggcaaatttatggcataatctaccacataataataagagcttattgaagatgatgttaataaagtgtttccactgaaacacacccgaaatagattaaattaaagtaagtccttggtgaggttaagtattcacctttccccaaagtccagagcatttatcataccaataggatcctgtcttcagttgttttggtgggtttcgacaattgaggagcaacttaagctgttccctattcagaggttgcaagttgacacagacaagctctggtggtatttgatttgcttcacaagacctttcatcatccatggcttgggctgctttcgactcagacagcaaccctttcagcatacgagaacacttcccgagcctacttctatatctctcatcaattctgtagccaatgcaagtcacacattttcttccttctggcatggaccccat

SEQ ID NO: 211594 - DNA, 376 bp, Glycine max
  unsure (1)..(376): unsure at all n locations
gcttgaggatatggggacccatttatgtgtgactaggtggcggccgggcgatggtgcacaacaagttttccacatccacaaagcgcgcataaacccaccattccctctgtgtgcccacactccaatcttgagctcacgtgactcccacgtgagcccatattctcttgtntcttctaacacgcgggtccccattaatcctcccaagcttctccaacattcaagcaaaacaacatttaaacagcttaagtcttcacggccaagcaaaacagaacaaaggcagaaaactctgcaaaaaaaaacccaaccaatcacagcttttctacttaaaatcccgaaacaatccctcgtccggatataaccgtggacgactcgaaat

SEQ ID NO: 211595 - DNA, 403 bp, Glycine max
  unsure (1)..(403): unsure at all n locations
agagagaatgtgggagcaccacattgaaggaataaaagagggaaagaagtggaactttgaagtgtatctcataagactttcattcatcaaagttacaacaagtgttacacatgcttctatttatagactaggtagcttccttgagaagctttcttaagaaaacttacttgagaagcttctttgagaaaaattccttgagaagctagagtttagctacacacacccatctaaaaactaagctcacctccttgagaagcttccttgagaagctagagcttagctacacacccctataatagctaagctcacccccgtgacaaaaaaacatgaaaatacaaataaaatcctactacanagactactcataatgccctannatacaanggctanaccctatactact

SEQ ID NO: 211596 - DNA, 422 bp, Glycine max
  unsure (1)..(422): unsure at all n locations
agctnggacccganaaatttcaaagaatttaaactcataaagaagactcagctcagccacaacgttgcaagattcagatttgcccttcctactccttcttcagtattaggccttcctgttggaaaaaacatacttgctaggtttaatttggaaaagattttcctgatgttgctctaatactatatttaacttatcccgttgaataaaacaccataaactttaaatacaagaattattataataaagaaaaagagatgtgaaactattttatattaactgttaagcagggggaaagatagccaaggagaggaagttatgagatcatatactccaatcacgttggattcagatattggctacttcgagttggttgtgaaggtacattattttttgtggaaacatttcngcaggggataaatgat

SEQ ID NO: 211597 - DNA, 474 bp, Glycine max
  unsure (1)..(474): unsure at all n locations
ttatcaatagacacaagtggagttttattcacgaaaatagagtttatctcttttatcttagtgagagtgattctcctaaattcttgactgattcaagaacaccttggctgtatcaaaggactttcacaacctttgtgtgttgccttgctggaaagagtgattctttccttcctttcatcatcacccttgttctttcaaaccacaattccagaaaatccacctctgcccagaattatctcgtggccataactcccattttacgcactcaaattaagtgattcttgagcctaaattgaatttcataacgagatctttcacctcgttttggaatcacctcatttggagccctgtagcttcagttattgccatttctatatttctgtccagccaccacttaacctacgttntaccatcccattcatccatttttatgccagaaccaccttattaagacccacgagatagccaccttat

SEQ ID NO: 211598 - DNA, 381 bp, Glycine max
agcttcgacacaacaatagatagtgtgactatctgtttctacattaacaccctagacgcaagagaataactcgaggtttatatcgcccaaggtacaggcgcaagtaacactactactaacatctgatcctctatggaagagactctatatagcaaaaatataacccaagcaaactaataagatacaccacctccacattttgtgaaccatttgcagccaccctcttgagaatacttacaagaattgtacatggattctggcacggccttcttctcaccacagtataggtgcatctcacaacttatacgatggtaaatataggaacaccaaagaaataatatcaacagatctcattagaattataacatgctaatgaaattg

SEQ ID NO: 211599 - DNA, 302 bp, Glycine max
cctataaaactaagcttttctattctccatgcccaattatgatatatatattttttaccctaatactatcccaccccctttttttttcttcctatcctttttcaatttcatgcatggaccatttcccatctaaccctacattttctttaaattttctttccctgacgcatagaaaaataaaaaactacgaacacgtgatgaataatttaacttaattcttaaatatttttctcttcttttccacctaaccccaccttaagccttctcttctctatctcttctcgctcttactttatattata

SEQ ID NO: 211600 - DNA, 267 bp, Glycine max
ctaacatgcagaattaaaccaggcatgagtcatatgacccaagagacatgcatgtttctgagaacccattcttgggttaaagagtcttactatatttcttttttaaggacagcgagaaccactgacacaatggaccagggacagggcacaatagtatttggattttgattggaatgcttggagataagatgcttcatgtattccaagaatggactttgcctagcatgaggcatagcttgctgaaaaagatataacgtgcttaactac

SEQ ID NO: 211601 - DNA, 151 bp, Glycine max
gtaggcagcagaatgagtcaactataaggctgaagagacaaattatgatggagagcatgatgttagaggataagttaacgaggtgtcagaggagatcgatgccgtacccgaattaaatatacatgaaaacgcaaaactaggaagtgatcct

SEQ ID NO: 211602 - DNA, 375 bp, Glycine max
  unsure (1)..(375): unsure at all n locations
agctntagatattagctgagagactcatggatgactttatctctaaaatgcaccctcatgaaagagcccctctcacttgaagtgtggaattgtaccttatgttgaaatttgactttttacatagaagaaagtggtgacaaggtcaaacttttgaccactggccgttgaagctttgataccaagattaaagaaaatggtttagagaaattgtttgttaggcagcataaatgttttagtatttacaaatcctatttacaaaatcagagtacttctaacttaacacaaatacaataacttgtatagtaatcagtaggcttaattaattatacttttggctccttcgtgatagtcaatgtgtgattcttgtcctcttat

SEQ ID NO: 211603 - DNA, 500 bp, Glycine max
  unsure (1)..(500): unsure at all n locations
tctcttgagaatcaagtattcacatatgtgagttcttgatttaatccttatcttctcttcccctttggcatcaacaaaaagccaaagtgcgtaacaaatataaaatatacataaatgactaatcatacataacattcattgagaaatctaaaccaatcatggagaagaaacatgaataatccaactataaaccacataatcataatataattcataaaaattcagtcatactaagcaaacattaaaagaaatactaaatgttcaaatatcataataatatagattatttggataagtcactagcatctagcagtcctaattctcttctaatggtgtagaatgaatctttatttagtggttttgtaaagatgtctgcaagtcgattnttagtatctacaaattctaaaacaacatcaccttttagaacatgatctctaatagaatgatgcctaatctctatatgcttggttctagagnggaggactggattttagatatgt

SEQ ID NO: 211604 - DNA, 158 bp, Glycine max
  unsure (1)..(158): unsure at all n locations
agctnnaaacgagaaggagacggatgatgacttgatataancaacactccacgccaaccatgaacaaacatcgcgtctcaaccgtgctcaataccttgaacacgttcaaagtcacttcatttttagtgccacaaagacaatcctaaacatagagagca

SEQ ID NO: 211605 - DNA, 331 bp, Glycine max
acacaacaaacatgtaacaacaactatgttataaatgtacacatgcgcctgtctatactctccaaagcaaaaattgtcaaaacagtcacctagaaagtgtgcttaaattctcctaacaaatttattgctcaaatctattttcatgcataagcattgcatgctttatagaggtgttgctagttgcatttaactttactgttatcacaacaaacatgtatcaacaactatgttataaatgttagacatgcggcctcataaatcttataaaaggtggggggtgtaaattaagaatcgccaatatatcccaataaaaatctccttgaagctgaac

SEQ ID NO: 211606 - DNA, 335 bp, Glycine max
  unsure (1)..(335): unsure at all n locations
tagcttgaggaatgcagtggctggagttatttttgttgacngaacaccaacaattgtgtgtatatatagttagtaaattctgtggaaacccaattcccacagaaagtgactgtcaatggatggagggcatacgcatgagatatcacatggtgttgtcttccgtcaactattaaggataaattgtgaagacttgcgtaaccccaccttatcatacattaatgggccagcataaagccttcacatgtaatcaaatgagacgtgcctcaatgaaacgtaacgcctattcaagcattatttggcattccatatatttgtaaacatgctctgggcatgtt

SEQ ID NO: 211607 - DNA, 491 bp, Glycine max
  unsure (1)..(491): unsure at all n locations
tcataccattaatatanaacctataggctagtgtcacattctatcggagcgnngnngtcccgtgtcttctagcatgagaatcttcatagtcatccacctattcatctgctcccncgaacacaagttcaagatcattacaggatccaaacccaacaacacacagggagtgagctatcacattcctagctaatggagaaacaagacaatttaatatacatattatataaatgagataccacttgcttaaacatagctcacgtaacttcaccacttcatcattcaaaattcagtcttcaattatcaatcacattacacaagaatctcacacttcgatcaagatataataacacatcaattagcaagcatatgcaatagttatgctaagactcaatcctatatgccatggtgtaccatgtcagtgaaataccaccctgggggcgctangagtacataacaagacacaccacacaatgggttcgtcaggcactctc

SEQ ID NO: 211608 - DNA, 224 bp, Glycine max
ttgatgctttacctcccgcaatgttcaagacttgtgagttgtcctgaaatattatgaaagatggaaaacataacgcatctatctttggagtacacttgcataagtcaattaccaaattcaattagagaacttggccgacttcaaagtatataactgcacaactgtggaatggttcaagtaccgagtagcattgtcacattgcgagaacttgaggtggagagtat

SEQ ID NO: 211609 - DNA, 167 bp, Glycine max
  unsure (1)..(167): unsure at all n locations
agctnttgtaggtgaaatcaggtgcagccattttccttagagtcctctcacaaggtggaggttgtgccatgttctcagaatgttcaaaactataatgctcaaaatcaccaataacagaatgctcanaatgctcaaaaggtactaaatgatgtctaactaaatctatg

SEQ ID NO: 211610 - DNA, 409 bp, Glycine max
  unsure (1)..(409): unsure at all n locations
cattaactcaatcaatctatcattgctgggtaagnggaaatggaacctgtttcatagccaaggagagctgtgggctatggtactagaatcgaagtatgtgggctggaggggtttaagcgaaataactagagggaagggtgaatcggtatggtggagggatctaaagctcgtgcttaatcactcgcatcatggagcgataatgaagaatacaacagcatggagggttggttgtggggataagtttaaatattgggaggacgtatggatggngggagaggagtcgttactngccagattccctatgttgtatagcatttctactcaacaacaccaaagtatacagcatatgngggtcttcatagatgcangttgggaatggaactttatgtggagaagaccactcgttgat

SEQ ID NO: 211611 - DNA, 402 bp, Glycine max
  unsure (1)..(402): unsure at all n locations
agcttgaaattgagcaagggaatctctctatatactcanatgatcataacttatcacacagaggttcgattcaggcgcttaatatttcgagacgctcgaaattgaacaacgaatgctctcgaggaattcaaatgttcataacttgtcacacggaggtccgattcaggcgcataatatatcgagacgctcgaaattgacaacgaatgctctcgagaaattcaaatgggcataacttgtcacacggatgtctgattcacgcgcatcacatatcgagacgctccaaattgataaccggaagcgctcaagaatttcaaatggtcataagttttcacaccgaagtctggttcacgcgcataatatatcgagacgctcgaaattgaacaacgaatgctctcgagaaat

SEQ ID NO: 211612 - DNA, 424 bp, Glycine max
  unsure (1)..(424): unsure at all n locations
acataaaaagggaagaggttatattgtagccgatgctctttctcggcgtcatgcattactttctatgcttgaaacaaaattgattggtcttgaatgtttgaaaagcatgtatgaaaatgatgaaacttttggagaaatttttaaaaattgtgaaaaattctcagaaaatggtttctttagacatgaaggctttcttttcaaagaaaacaaattgtgtgtgcctaaatgttctactagaaatttgcttgtttgtgaagcacttgaaggaggtttaatggggcattttggggtccaaaagactctagaaacattacaagaacatttttattggcctcgtatganaaaggatgtgcagaaattntgtgaacattgcattgtatgtaaaaaggcanagtctaacgtaaagcctcatggattgtatact

SEQ ID NO: 211613 - DNA, 431 bp, Glycine max
tatgtgcatatttccttacgaacgttcacttgcacaagactttctattaactaagaaaaatgcacccatatacaatcaaggcagcttcattacctagattatttacatgtacttccaaggtgtatttgttatttacatcacacacatctccttggctaaatttacatacatgcatactcaaagcattttggggtaccaaacattgcacatgtgcacatcttggtatttctaatacctatacatacacaaacttcatgatgaatcttgactatctacacaataatgtgctaccgttcatgctctcttaagtttttgctacctaaagtgcatgcaaatcaagtaattttcctttgttgaaaaaattgattcaaattaaaggtatatttttggatgaatgctgtacattacatgcacatttaatattttttgga

SEQ ID NO: 211614 - DNA, 404 bp, Glycine max
  unsure (1)..(404): unsure at all n locations
aagggtaaaacatgaggacgtatgttatgcacctgcaattcaagtttgaaggcgatccaacgattaatgaattcgatatgatggttgcaccacaacaggttttttagtcaaacttgaaatctcacatttacaacataggggaattaaactccacataacctaacattcacaccaagcattcacacacagataattccccaggtctttatactctcccaaaatctagaggtgaatctaggatctctatcatacattataccagatggcacaccatggaattngacaatctcacttatacatagggaggacaacttttttaaagaaaacctactattgatggggatatagtgagctgatttatcaatctgttactatacctaatagaatcaaattttggggtccta

SEQ ID NO: 211615 - DNA, 431 bp, Glycine max
  unsure (1)..(431): unsure at all n locations
tgagatgangaagtgttgaagggtgaaactgcctgcttctattgttgaccacagagtggtacctggagatatgtcgcggnggtcaggagaccttggggacgtcaggtggggtgctattgtccaaaaccaagcttgaccaatcccgacccaacccgggcatagtcggtcagtgagaacctgtgatgtacctaagcaggcgagctccctgcagtcaacagataataggaaaacaataccacacagctaggaggcttgtggtggctggccagctgtgaaacttgattgatatgtgagatatggtctctggtaatcgattaccaagggtgggtaatcgattactacgcttaaaaatgaagacagggggctaacatggtctctgtgaatcgattaccagcggatgtaatcgattaccacgcttgaaaacgaggtca

SEQ ID NO: 211616 - DNA, 310 bp, Glycine max
tgcagacaactactgcagatggaatgcaccctacaatatgaaataagtgctacatttgatgctatagaaatgcggtaacatgaaatagctcgctgaaaatgatgacatatcatcgatttgatcgtgaattacacgatatggaagtgtactgctgacacccttaaagtgttctaagaagaaaagcaggggactacaaatagatgggagctcacctttatcacatattgaaaatgaaaagcccttaaacaggccaagaaacctgctggtgttctcaatgactagagagaaaactgaaacctacactgcagat

SEQ ID NO: 211617 - DNA, 422 bp, Glycine max
  unsure (1)..(422): unsure at all n locations
ctaagctgatttgtgacaatatntcttgagatgtttcgtattcgttataatgaaangaaattgggagtctttttaagatactactaataagtaaataattacataattaagctatcagtgactaaagagcttaagatttggttatattgaattgaatggaagaggaaatcacagaaatgtccttattggggggggcaaatggtaatcttcatctctttggttttcatcataatattagtaaaatgcatattttatttaattaaattgtaatttgatctcttataatcttaaatccataatttcatcttttatttttaagagagtcttaatgttatgttaggataattcacttttactaagcattgataagttcagaatngaactaatctgagtatgaaatccttggatcttaagtgttattc

SEQ ID NO: 211618 - DNA, 456 bp, Glycine max
  unsure (1)..(456): unsure at all n locations
caagctcagctctcaggccaatcttccttctctaaagcngatttcaggcttaaaagggggcttcgttcgtgctcgtgcgcttagtgcaactttgaatcgcttaacgcgcatgctcttctcgctcagtggatggactgaagcggtgcgcttattgagatgaagtggtgcgctcagcgaacttgtacaactcattttcttccagattattcctcgtgcttagccaaagagtgttcacttagcggacgttcgctaagccaatagattggcttagcgagaaggtgagaaatagcactcttcaaagtcgcctaattaacctgaaattgagagaaaatgattattaaacacacaaaatggaagtactaagtatttattgcctatacttaacagaaaggacttataacactatcaaataaccataaactgggggaagttgaacaattacatatgtttatacac

SEQ ID NO: 211619 - DNA, 453 bp, Glycine max
  unsure (1)..(453): unsure at all n locations
tatgtgcatatttccttacgaacgttcacttgcacaagacattctattatctaagaaaaatgcacccatatacaatcaaggcagcttcattacctagattatttacatgtacttccaaggtgtatttgttatttacatcacacacatctccttggctaaatttacatacatgcatactcaaagcattntgtggtaccaaaaattgcacatgtgcacatcttggtatttctaatacctatacatacacaaacttcatgatgaatcttgactatctacacaataaggtgctacgtttcatgctctnttcaagttnttgctacctaaagtcgcatgcaaattcaagtatattttcctttgctgaaaaaattgtattcaaaataaaaaggatattttttcgtaatgtattctctttacataacatgcaacattctatatattctttttgtgagacat

SEQ ID NO: 211620 - DNA, 453 bp, Glycine max
  unsure (1)..(453): unsure at all n locations
tcatacaacatatgcttctacaatgtggttctatttcaattctatgcatagatgcatgttaggagtgatcaacctagcttttatggatttgaattgtgtaaaaacaatttcaaatcctagacctgaatagagattgtgcaaggatttgatgtcaagaatgaatcaaatacttatgtttgtagagattcatttatcaagatctaagtttttacgtctaaatcacctaaggaattagggatttagcttagaactcaaggattaaccactaagaaattaagattagtcattgaagtctggatcttggttgcattgaactaggagattggttaggaaagaatttcatatgaagaattctatagatttcatctcagtaacacttttcattgtttgaatttgttntcgctccaaaaatagtatattttcaccttagcaaactgttcattcgctacaatg

SEQ ID NO: 211621 - DNA, 346 bp, Glycine max
  unsure (1)..(346): unsure at all n locations
agctcnnnccaaagagaggcgagtgcattacattttaaccctttccattggcaacaacaacttttgcgacgacgtgggccatacatttcaccgacacatgtagagccttgttgtggtctctccactcaaccggaatctcttcttcttgcaaacgcaacggagttgttggagggtttatgaataacgaagccttacaaaccctccaccgagatatcaggtgctacatgggcatcgataagaacctgcatcaacagcgcacgaagaagctcggagattatgagccgttcaagcaaggagatccttgctggagtttcacttagttgctcgactaccttaaactcgcttt

SEQ ID NO: 211622 - DNA, 453 bp, Glycine max
actcaagcttcaaaccacaggaacgacaaatctatgtgttcttatcccctctattcatatggggcccaacggttgaaaagtgaaattcataacgaggtaactattaatcaaactctcacctcacaccattccataacgtcaatctaaacttgcccaaactggatttacacctaaaaatccaccgaatcagaaattgactcttcaacacccaattttgctcctacaaaaggctcttaggtaactctggtcatttgtttttctctctagcacaagccaagctttctcataagttctaaatgacatttccagctagtgctaactcactttaaccctcatttaccacataattcaaacttagccttctaccctcaagactaactctttttcactataacaacacatcttcactttctacccctagggagtctactctcagccctacaaacttcataa

SEQ ID NO: 211623 - DNA, 204 bp, Glycine max
agcgtcacccagttgaccaaaagaaaagtcagactcttgcggttatgagctaatcgaatgccaaaatcaatgcaaaggaaactttaagaaaagaagcagttttaattgaaaggaggcctgtgtcctattactttcatcttactacgacgtgctatagcaaaaattgtttaatgtcctcaaggctcaccttaatgatttttgata

SEQ ID NO: 211624 - DNA, 282 bp, Glycine max
gcactcacaaattgaacagagaattactctgactggtgaaaaatggtataccttttgtcttcattattactcgaatacatttagaaagacctattaataattacttatttgagtttatcatatcacatacatacttatttaacgtctgggagagtattgacgaaagaacataaaattgacttaaagttaatactttggttgaaatgtcgtcattgattagaagacaaaagaaatatctgtcataaacaattattagaaattttttggaccttccttttattt

SEQ ID NO: 211625 - DNA, 399 bp, Glycine max
  unsure (1)..(399): unsure at all n locations
ttttttctgcaccggatcactcttactggatgaaatagacttgatcgaatnacgcgaatctgagctgtacttatgtagcaagtctcattgattaaggatagtaccaggagtggcatacagagtactctctgtatgccaaagtggattagagaatacttggtcatgatcaaagaattgataagtggatgccttcacggtttgaagacaaactggacgtagctcaaaaggtgggatgaaccacgataaaaccgttgtcttctttactactcctgtataactcagttctttcctataagatgacttctactctatgtgtacccatggtctgagatctgatttcttaagcctacgtgattttaaccttttggagaaacccgtgttcagtgtatctggtgagaa

SEQ ID NO: 211626 - DNA, 303 bp, Glycine max
aattgacctttcatttgaaatgctgggtgcaccagcactattgctgggtgcacctaacatatcccctattctatgtaccaactgacacaaacctattggactacatagggtccatgcaaactatatgggcttatagggctcgccaggaataataaccccctaagatggtagtttatgttgacatgaagagttgctctattatgcacctccaacatcttgagaagcttcactttatccaaataatgttttgtatatgggcggaagtactaaacaatctgagttatggagtaacaataacagtat

SEQ ID NO: 211627 - DNA, 143 bp, Glycine max
gcaaaacgttaaggggccaccatatgcaccaacccttccggttatctcgcaaaaacataggagagaaggtcacataactcgaccaaaacaaaaaaaggtgagcactctctacaaacaatcgacggatgcaacgttatcataag

SEQ ID NO: 211628 - DNA, 306 bp, Glycine max
  unsure (1)..(306): unsure at all n locations
aacctcagcttagtttanttgatcagaaaacggatcttcatgttatttcactatctatatgaaagtatacgtctacttactaagaaggactgaaaaaaaaaaaaaatattaaacccctacaaattgactttgcggaacttaccccaattaattcttttatgacccgactttgagaaagaaagttaaaaacctgtgttctgaacacatatctggacggtactagccagagatctgtcatgtattcaactcatgattgctttgaaggcgaaggatttcctcattcatgaattggtgacaccccaagat

SEQ ID NO: 211629 - DNA, 463 bp, Glycine max
  unsure (1)..(463): unsure at all n locations
tgctatactctgacatgcgagntatctattagtgagtataactttatctataaaccgaagataaccaaagagatatggagattgttgcctatcacctacgaaggaacataagatgttcaactgagagaagttgccacttttacatgacactataaaagcttttccatgaaagataaggaatatgtggatgacatgtttggaagaactcaagtacttataaatggacttgaagctctaggacacaccttcacaaaagctcacataaacttaaagaccctacatagatttcccaaggtgtgggaaccaacaacaacaaccattcgagaagctagaaacttgaaaattctagcatgggatgaactgttaggcctactaagtgttaattggtggacgatggatgatagaaatatggtgtaccacaatgtttgttgctcggccaataactttatcttttgtactggtc

SEQ ID NO: 211630 - DNA, 447 bp, Glycine max
  unsure (1)..(447): unsure at all n locations
ctggataggtaatgttggtgttccggcgtatgtagaacctgattcatgatgtctttnangctcttgcggtccgtgatgataatgaaggggtacccgaggaggtaatggcgccattttcgaactgccgaggtaatggcatgaagctcgtgaatgtaagtagatgcatgttgaaggcgtgggcagaacatcttactataaaatgcgattggatgtgatctctgttgaagaatggcacccatggcaatagcaaaggcatatgttttgaggacaaaaggcaatgagaaatccgacgaggccaacaccggagcctgagtcattacttccttaagacgaaggaaggagtgggtagcctcttcagaccattagaattgatctttgcatagtaaggcagttaaaggcctggcaatggcggcatactgacgaataatacgccgataaaagcctatg

SEQ ID NO: 211631 - DNA, 379 bp, Glycine max
atcttcagacacaagtcactataagaattgtgactcttgaaaatggatttttcgaaatcagtcatgggtaatctgttaccattaaggggtaatcgattacacatcaacagatgtgactcttcattttaaatcttgaaaattaaaacgtttagaagctttggtaatcgattacaagtgttttgtaatcgattacactagtttaaaatgatttaaaactcgtaaacacaagttataactcttgaaatttgaaatcttaacgtttaaaacactggtaatcgattactatctcctggtaatcgaatactagatagtaaaactctatggtaatgatgttgtgaacacttcttgtgctctcaatgtattggaaactttttaatac

SEQ ID NO: 211632 - DNA, 450 bp, Glycine max
  unsure (1)..(450): unsure at all n locations
ggtgttcaagctagacaacctanagatatttgtctaaattctatacataagggaactcgtttgctggagattatccatagtgatatatatgttagcaatggtattactcaagtagttactccacctcatgctcctctatcttatgacatagctgaaagaaaacatcgtactatgctagacatgataaatgctatgctctctatattgcatgtcatattcttaacattccctatacaaatttagaaaaaaaaacccttatgtattatggatatatagaaaaccatatttgaaatatctcaaagtgtggggtgtcttgcaaaggtgatattcctattattaagaaaaaaattgaaccaaacactattggttgagcatttcttggatattctttgtataggactacttatagatttttagttataatgaggctgagattctaaaagatctttt

SEQ ID NO: 211633 - DNA, 444 bp, Glycine max
  unsure (1)..(444): unsure at all n locations
nntagtttaataacaaacaaagaacagactatcgcattctgtaaaatctcttaatctccctggacttcaaatatttgatgtattcatttgatgtagaagcaacttggtgtatcctacttcacttcgttggtcagcatactcaaagtgtcacctatggcatccttcgtctcataagaagaccttcaagatttcaaagcatctcgaaatgtaactgtagccttagattatctccagctttttctccttaagtaaccaaatgtccatccacactttgtacttgttacacttcaaatctgtcatgctctgttatatcaatatttgaaagggttcgtagttggaaaagtatcaaactcatcgtccaattcatttagctagatagcttctatttgtgaaagcctaacatctatgtggtgttgatggcttgctttgaactagctagtgagt

SEQ ID NO: 211634 - DNA, 460 bp, Glycine max
tcatcaatgattgtgagagttattcttatctatataattatgttaagtactcaaaagacacacatatatattatctaactctagtaagattgtttcatgtaaaagagacatgtgtgattttataccaaataaaatatcaagagatattataagattggctttatgatttatgattaaatgaaaggagatattgtgaatccgaattatctcttattaataaattaataatttagtaaaagaaaaaagaaaagtatgcaaagtttaaaataattcttgaatataaaaaaaattatatatgaataaaagagttgtgtgcaaattcattcacataattaactaattgaggcatacaagaacatattgcgtgtgtggtgttggtttgcaatggtatggcacagccaagtgggtcatgaattgattccatggacttgaaatgataaatcctacttaacactaacac

SEQ ID NO: 211635 - DNA, 427 bp, Glycine max
  unsure (1)..(427): unsure at all n locations
cagctttggagaatgatttctattcataaattattcgtntgaagccactaacgaacttccccagatttacagttttgcttggtctcaatcaaagaaagaacagttcacttgtcctcaaatgacaaagacagtggccaatcaaaagaaaatggtgtttgattcatcaaggacctcaaccatatgaatataatatcatggaatgcttaaatcaattacttctcacaagcatgcagttctatcaaagactagagcacaagtattagagtcatagcttgaatagactagtaagcatgacaaatatcaaggaaggatcatcgaccacaacctcagtcattgtttctctcacactcaggtggttaggcttattccatcataaacaaccaacacaaggtcgacctgtgatgttatctcctatcatacagtaatg

SEQ ID NO: 211636 - DNA, 448 bp, Glycine max
  unsure (1)..(448): unsure at all n locations
tctataagtcagaggtcgatagtgttactgctttatctctttgcaaaaagntggctaacatagcaccttgtggtgacaaggaggctgttgtcgaatcaagtgacaatgttatccactctgtcaaactccatcctacctatgggtttatatgggagagggaggaaattgatgctgttccctctgaagatggagtcattccaccaactgggtggaatatatatgaagattaatatgactgaggccactgcatgggccagaattacggcttatatggccgaaaatagactaaatacggcctttgaggctgagtctcaacaaaatatggcagttgaagccaagatcgaagatcatgataacaaagaaacaaaggatcgaagactggattgcatttatgacgatgagccgctgggttttgagaaaaatcccataagtgaggtgccaaagatgc

SEQ ID NO: 211637 - DNA, 362 bp, Glycine max
ttataacaattcgaagcctaagcgcgtagatgaattgtaaggtgtgcagtgcatagtgtgccccgttatttttcttgaaacgattgttccttcgcgtatgctcgcggataggaacataacacatgctcgctgtcttatttccatttctagggtcatatttattttattgtgcgttgcctactcctttctagaacacaattatattgagcggacaccaaataataaagattaatcattttataatgcttgttttactagacactaaatatcactcgttatgtgccttattatcgttatatatatggcactgacatattaatatgactatgaatccgtgatgacatatactatttttattaaaa

SEQ ID NO: 211638 - DNA, 446 bp, Glycine max
  unsure (1)..(446): unsure at all n locations
tcaagcanagtgcgcagccttgcttggaatntttatattctttatgagtgtgaatgctccatcatcgatctcaactgccaccacttcattaagcaaatgatatccacttcccacggagtacatcccatttgcatcccccttccaaatccatctatcttgttgattaagctgaatcttcaaccccttaatgtcctccataaatatagctactagttccatctccccttccaacatcatcctctgcaactcaaaattccattcccacgattctcccacctgaacgcccatctgctgaatagtgtgatgttgctggtgagatatacagtaaagtctctggtacttttccatcaaagacaaccacccatcctccctccatctaccttcccaaaactttacgctcgacccacaaccaatattccacttcacaccttcaatgagccactcac

SEQ ID NO: 211639 - DNA, 434 bp, Glycine max
  unsure (1)..(434): unsure at all n locations
gcagaaggaactagttccgctccggagtatgatagtcaccgctttangagcgcggtacaccagcagcgcttcgaagccatcaaggggtggtcgtttctccgggagcgacgcgtccagctcagggacgacgagtatactgatttccaggaggaaatatggcgccggcggtgggcaccactggttactcccatggccaagtttgatccagaaatagtccttgggttttatgccaatgcttggccaacagaggagggcgtgcgtgacatgagatcctgngttaggggtcagtggatcccgttcgatgccgacgctatcggccagctcctgngatatccgttggtgttagaagagggccacgagtgcgagtatggccagaggaggaaccggtctgatgggttcgatgaggaggccatcgcccagttgctatgtatacc

SEQ ID NO: 211640 - DNA, 377 bp, Glycine max
attcacccacttcaacaaattgagtgtagacgaactgattgtaggatcaaatgattattcataaagaataatattcgtttaatgtttctcgttagctattggcatgccaacactgttatctctactcatgtgacatatttcactcctgtacctctggtgaccatagaacacatcaacattactcgtttgtactttggtgaattaaagaacacatcttcaacatcttgggccagcatattcacataaacagtatcagttgaaggacatgaactatatcattactctgaatcattaatgttaactgtgactcacgcatctagggagggtaacttgatctctttcacatttattattactttttcccctttaccaacttt

SEQ ID NO: 211641 - DNA, 333 bp, Glycine max
aaaatttgccacagatactttggggacacgaattgatccccattcacatactatttcacgaattaaagcctgctcaagtataaaaagccatagaaaccaagccagcagcactcttgactaagcatccattttgaccatattgccttttgatccaaaggttcatgaaatataacttgtgatctcttgcattgtgcactagttagataaaatcttcttaacctacaatggaaacatcacacactgttttggttattttggcaacagaacaaacatggtatctctttgcctgataatgagctcagtcaaaaaagccgagatctactgacctgcagt

SEQ ID NO: 211642 - DNA, 389 bp, Glycine max
tctggcaacaagaaacgccgcgagcaatgtgttccgtagtgctccctacaaatgtgcaatgagggcacttcaataacaatgctacagcccaaatgaagtgatatttggtcctgattttttgacatcgcaatacgtaaagatatgttactaatcagatgctatagttatgataattatcaacctattacattacaacacaacatgtggtcattcccacatgataatgatgatatcccctgtcctacttatattatagtttaatttacacgcattttcaatgctaaatattttcacacaaacatatcataaataatcacttattgatacatatagtaacgaataaatgaacggaaaatgataaatctactagatgtctacattaataacac

SEQ ID NO: 211643 - DNA, 289 bp, Glycine max
  unsure (1)..(289): unsure at all n locations
tcaccaactaaaaatggatcattntaaagtccaacaccttataaggaccaccttcctagaaaaaagaatcgctcggttcacccttaaaacaaaacccacgaggtctgatctcctcttcaaaggacgccacccacgagcaagagtctcccttgtgtcgacctcacacctcaataagaaataatatggttgaatgcgtacacccacacaatactgatataaggctgttgggctttacgacaaacgtgagaggtgcttataccttcctaaaacgtaaatacaactcccgaat

SEQ ID NO: 211644 - DNA, 455 bp, Glycine max
tgtgactctatgtaaatactgtgacactagtgacttaacatgttttgtcttgtgttaaaatcttcagaaacaagccacgtaaagaattgagacctctggaaatatatcatttgaaattaaacactggtgatcgattaccattaaggcgtgatcgattacacatcaacagatgtgacatttcctttctaattctggaaaaatattaaacatggacatacctctggtcatcaattacaagtattgcgttatcgattacacaaatttaaaatactttaaaactatttgaacataaaatataactcttgtaatttgaaatcttaacgtattaaaacattcggaatggattactactttctcgatatctattacctgagagtataactctttggtattgaccgtggcaaactcctgtgttatccatatttttgaaaactattcagtacttatctgtgacg

SEQ ID NO: 211645 - DNA, 235 bp, Glycine max
  unsure (1)..(235): unsure at all n locations
caaccccaaaataacntcgcactcgtgtgatggctcagtccaacaggcatagntgcttagatccatcgaaaccaaacacacctttcatcatacgcaagcggtcaatacacaacgaggcaggcgaccaatttcacaaaagaaaaaaacaacgtaacggcccggccatcaaaaattaactcaaacacgtcacaacgcttgaagaggagcaactataccactcatgcacaaaactaac

SEQ ID NO: 211646 - DNA, 401 bp, Glycine max
gactcaatcttgaacatcttgaactcattctttgattcttgagatcatcatctatgttatcatgaagtgtgcttgacttttgagcttctctgtcgtcacctttgatatcatcaaaacttctttgaatcaatcttgattcatcatgaagcttgcttctacactctccaacatactatgggcctaccactattcgccccacacaacaaccaaggagactccttttgtcttacatatggaatagatgccatgatccctgtagaagacaaggaacccttgacaagaaggcgtattttccagactcaacataacaaggctaacatgagggtcgaacttgatataatataataagtcccagagattgcagcaatcatggaagaagctaccacgctccatgccttaag

SEQ ID NO: 211647 - DNA, 435 bp, Glycine max
  unsure (1)..(435): unsure at all n locations
ctatctgtctgcaatgttgccaagtaatgtcaccacgtacagtgtttatcaatccacatatatagaactgatttgttgcatttgatnttggattgaatatgtctttaactattgtaatttgataaaattgaaattgatattagtctccgattctaactttaatcaatttaatccttaaattttaaaagactgtnttcgtctaatttcaggaagaatgaaaatcattacttttttgtaaagttcagaaatcgaatcgtccttagtttgaagttcacgaactaaaatcaagtttcattgaaagttcatgaattgaaagcatacttaccctttaaatattgaaaaaatcacttattttagttcttttgaaaatttgctcttgaaacacaaaagttatttgtatatcaacaaaataattaattagttaaaccatacctg

SEQ ID NO: 211648 - DNA, 244 bp, Glycine max
gtcgagagcttccgatctccaattttgactgtctggacttattatatacctgaatcggacatgcgagtgactagctacaaccatttgaatttctcaagagcatttgttgatctatttcgagcgtgttgatatataatgcgcctgaatcggactttatgtgaatgttatgaccatttgaatatctcagagcttgcgctttcgattcagagcattcgattagggtgcgcagaacagacttcggtga

SEQ ID NO: 211649 - DNA, 415 bp, Glycine max
  unsure (1)..(415): unsure at all n locations
tctcgatatattatgggcctanatcggactgtcgatgaaaataattatcatttgaatctgcccagagctttggttgtccaatttcgagcgtctcggtatattatgcacctgaattggacatccgattgacaagttatgaccattggaatttctcgagagcattcgttgttcaatttcgagcttctcgatctattatgcgcctgaatcgaactttcgtgtgacaagttatgaacatttgaatttctcgagaccatacgctgttcaatttcgagcgtctcgatatattatgcgcttgaatcggacttccgtgagacaagatatgaccttctgaatttctcgagagctttcgattttcaatttagagcatctcgatatgtaatgcgcagaatcggtcttccgtgtgacaagttatgac

SEQ ID NO: 211650 - DNA, 289 bp, Glycine max
catcaatggatttcctcattcctatggttcttctggtgccttattttttgaaggatgagaaacctactgatggagtggagacatcacccatggttgcgtttctggtgaagaggaaaccacctcctccacacaagaggtcataatggtgggggtggagctcctcactgcacttattgtatgaagatggggcacaccccacacaattagtattccttgcagggtttccttcaaggtagcacgttttttatctaataaaaagagtctgattttctgttatgagttcatgagt

SEQ ID NO: 211651 - DNA, 423 bp, Glycine max
  unsure (1)..(423): unsure at all n locations
tgagccaaaatcctgactcaccatattctttgacccanggtgagaatgtcaatccttaccctcggaagcgaaaagaatagaagggaaatttccaatcaaagaaaagaaaagaaggaaaattccccaatcaaagagtgggagaaagcaaaaagaaaagaaagaaaattcccaatcaaagaatgggagaaagtaaaaaggaagaagaagaaggaaagaaagctcctgatcagggatcgaaggaaaacagaagaaatgtgcagaaaggtctttggaccggacaatatctgaacaatacagaattgtcaccaaatgaacaaaaagaaggaaaggaaaccacgacctaaaatggtcttctccctttgattaccaaccaaaatcccgtgcgctagcgactttttcgccccgcactatacaaataaacag

SEQ ID NO: 211652 - DNA, 446 bp, Glycine max
  unsure (1)..(446): unsure at all n locations
tgccacccagctcgcccaggcgagctagggagcttcctccataattcaccgccnncnggtagaacttcctggaaggcccaagtgggcctgattactatttgtaccccctgtttactaaatacatccccttgccttttttgctgattctttttccgtaatgttacggaactttacgacatttcgtaagatactatgtttctatccgtaatgttatggaaccttacaaattacctaatcatcccttttttggcttccagaatgttacggaacctcacgaattgtgcaacaatgcttccatttgactttcggcatgttacgaaacctcacagattgtgcaacgatgcttccttttgacttcctcatgttacggaacttcactgattgtcttacgattggttgcatagtcctcaaagtggtcaacgagggtcgcatttcaacaaatggat

SEQ ID NO: 211653 - DNA, 439 bp, Glycine max
  unsure (1)..(439): unsure at all n locations
agctatactcgggtcattcttgttaangcttatatntggaaagntagntgtaccagtgggacattactcttaaagcaaaaatggcataaaacctcctcccataaatacaaacatcaaggtaaatttagagcaagcttatgcgcatatttccttacaaacgttctcttgcacaagacattctattaaccgaaaaaatgcacccatatacaatcaaggcagcttcgttacctagattatttacacgtacttccaaggtgtatttgttacttacatcacacacatctccttggctaaattcacatacatgcatactcaaagcattntggggtaccaaaaattgcacatgtgcacatcttggtatttctaatacctatacatacacaaacttcatgatgaatcttgactatctacacaataaggtgctacatttcatgctctt

SEQ ID NO: 211654 - DNA, 389 bp, Glycine max
tctgttgctgacacactggatgccagaagacatcttggagtgtgtattgatgaacaccctagccctgcgcaatttctacggaagtagacacggcgattgacaaaagaatatcgggtgttgtgagtagcattctgaaagatgcttctgtgcctgatgctgacaaagatgttccaacatcttccaccccacatgtttctgtgcctgatgtcaataaagatgttgcaacatgctgcgctccaaatgctgtagccctcccttcacccagtgaagaggaatcaacagacaaagaggatcatgcctcagaggagaccccttggcctagggcaccagaacctgcttcaggtaacctcattgacttggaagatgtctaatctgatgaataacccatt

SEQ ID NO: 211655 - DNA, 431 bp, Glycine max
  unsure (1)..(431): unsure at all n locations
agcttgccntggccctagaatatgtgaggtatctatgttcaccattattgacaaattccttgggataaaggctgtgttgccatgatttcaaagcccgtactaaggcatacaactccttatcataagttgaataggtaagggtaggaccacttaacttttcactaaaataagcaattggatggccttcttgcataaacacagccccaatcccaacatttgaagcatcacactcaatttcaaaagatttttgaaaggttggcaacgcaagtatgggggcattatgtagcttttgcttaagaacattgaaagcttcttcttgtttctctccccatttgagaccaacatgtttcttgagcacttcattgagaggagctgccaatgtgctaaaatccttcacagatgcgttataaaaactttgctaagccatgaaa

SEQ ID NO: 211656 - DNA, 453 bp, Glycine max
  unsure (1)..(453): unsure at all n locations
ttctcaatagcaacatcaatatatccacgagcatgtgcgacatcatgtacatgttgtgaatgacagttccagtggagattatnttttggagggtgaaatagacatgactgcaaatttatgaaggatatagaaggtctgatcgtccaactgcagcgactagacacctagaattgggagcgagattcaagtggnggatatacaattgggaatgcttatatgatgcttgatagggattcgacaaatgaaaatcaggatggagagtttactacattatggaagttaaaaatcccaagtaaaggcttattctttgcttggagattaatccgggaaggactgccaacaaagagtaacttaagaagcaagaatatggaaatcaacaacgtccaatgaccattatgcagaaatcatgacaaagatgcatgtcacccattttttagctgtgttagaatcatg

SEQ ID NO: 211657 - DNA, 257 bp, Glycine max
tgtatcaggcgatagggatatgacataagcatacttactagttggtctatgatctgactagaatgactggacatgatgactctatttactcagcggtcgggtgggcacggcataggcgacacaaacttactcatcatgatgatgtatggctggagagaatgcacttttatctgagtgacatgaatgacgatcgagagaatatgacagagaatgaggtatcatctttctaacagtgaggaatggctgagagagaacga

SEQ ID NO: 211658 - DNA, 465 bp, Glycine max
  unsure (1)..(465): unsure at all n locations
gcgcagcccaccatcttttcatagtagagtatcgataatgtgtctaccatcacgattatcgngtccctttccatcattgggggtaccacctgngccgccagatccctccaccttttgggcctgttctttgaaagatccgtccccctttttgcaaatgttctgtagttgcatcctatccggaaccatatcaaaattgtactgatactgcctaacaaaggcaaccattaggtccttccaagaatggactcgggaagattccaagttagtgtaccaggtaacagctaccccagtaagactttcttggaaggaatgtatcagcaattcctcatcttttgcgtattcccccatcttctgacaatacatctttagatggttcttatgacaagtaatccccttgtacttgtcaaagtccagcaccttgaacttgggaggggtgatgatattgggttctatgaacaactcttt

SEQ ID NO: 211659 - DNA, 414 bp, Glycine max
  unsure (1)..(414): unsure at all n locations
tctggcttcaattcattcaggggccntccttctgagtccagcatcttgggatgttcccagcctttgatgacagctttccaggntctgctatccagtgattggaggaaggccaccattcttgctttccagtattcatagttgcttccatcaagaattggaggtctgtacactggtcctccttctttctccatgttcatcagaaattatctccccagatctcactctgtgatttcgagtgttggctctgataccaattgaaattctgataccatgggacagatgtcgtacaggatgtcacgacattcacgcttcagaacatgcagtctatgtgtgtccgtatgaaccgattaaacaatgtattacacaagagaattgtttanctagttcggtgcaacctcacctacatcttggggc

SEQ ID NO: 211660 - DNA, 432 bp, Glycine max
  unsure (1)..(432): unsure at all n locations
agcttggacaatggcagtgcaatcttactgtatttctttatgaatatcctataaaaacctgcatgttcaagagaagaacacactttctgcacagaagcagggtaaggtacaaaagtaataaaatctatcttggccttatcgacctctatacctctactcaagaccaaatcccccaagactataccctcatgtaccataaaatgacaattttcatagttaaaaacaatgttagtctcaatgcatcggtcaagaactgtagagaggctgtcttaacatgcattaataagggaaccatacacaacagaatcatatacaaacacctccatgcaactttaataaaacataaaatatactcaccatgctccttcggaaggcgtcaggagcgttgcatacgtcanatggcgctctagcgtaagaaaatgctgccaatgg

SEQ ID NO: 211661 - DNA, 446 bp, Glycine max
  unsure (1)..(446): unsure at all n locations
actcagcttgaggattatggngcacccatcacatgtggtactatgtggtggtcgcgcgatggttcanaacaattctccacatccacagagcacgtataacccaccattccctgttgcacaccttaactgagctcacgtactcccacgtagcccttatactcgttactctcaacgccgggtccccatcaatcctcccaagctttcacaacattcaagtaattcaacatccaagcattatgaactaacacagccaagaaaacagggcagaggcagaaaactctgcccaaaacacaaaccaacatcacaacttttcacactcaaataccccaataatattctcttcgtccaattagtaaccgaggatcgactcgaaatttactggagtctctagacatatattacatatgaccgtgggatctgtagataacgccataacaaatctgact

SEQ ID NO: 211662 - DNA, 348 bp, Glycine max
  unsure (1)..(348): unsure at all n locations
taagtcacctgcggcatcaagctttagccaaggacttaccttgattttctcttgatagcctctttgagccttgtttccctttccttgttttgaagctcactacaagccttagtgaaaatcatgatattaccatatccttaagaatttgggctttgaatgtttgggaaaagatggggggttttgtttattggacaacttgttttgttggctatgcttcatgatgcattntgggccatacttgatgtacattgtatattgtgtaaatgttggacatgctgaatgaaatgttgtttttcacagtctaaaataaaaacaaaaaaacaatattctaaatataattcggaaaga

SEQ ID NO: 211663 - DNA, 467 bp, Glycine max
gcttctaagcaaacaacgttatgtgttctttatcaaaagatggatgtctcgttttacttaaaacaacgttgtattcttttcaaaggtatggatgtttcgttttacttattacgcagtgttaactttagaaagcaaccaatggaaagtttaaaaaaaaaatcactaaaattccaattcacattttcttagttttatatgtttgtgaaaatagaatggattaacacgctttataaaataaagaaataaattaattaaggtataatcacagtcttagaatttacggtgttacaatgtgaatatgtttgtcttggctttaacctttgttattcttcaaaaggaatacctagcctacaatttttattagtcttcaatgaaattgaagactttaagataaaaaaaaactttgtgaacaatctcatagctttcagtaaatctctctatagtaattttgtttgaatgcacataat

SEQ ID NO: 211664 - DNA, 261 bp, Glycine max
gctaaggcataatgacatatgcatacttagtgatttcttatactattggatcagtatgactggacgtgaggactatatttacgtacgctagggcgcttatggctatgaccccctaaacttacttattttgatgatttctgactataggcctgctcttttacctgcgctattacgaatgacattgtacattatatcacattctctgaccctttatctttctaagatcgatgataggcacatatattacgtaagactgttctt

SEQ ID NO: 211665 - DNA, 404 bp, Glycine max
ccatgatctgttgcaacccaacctttttacaagcctagtaaagtccttcagattcacgttgtgtgttcttgactgtatgatatgatatgagatgaagtgaaaagattgagacttatgttggttgttgattgatggataacctacacacttatgctcgagtgaaacagtgaacgtgagggcttgggtgatgatccttccttgatatctgtcattcttactagcttatttcagttgtgtttcttaataatcatgttcatatcttttaaaagctgcatgtcttgtgagaagctgttgattgaagcaatgtatgtcattcatgtcatgtgactgaattttttggaataaaaaccttgtggataaccacagtgattttttacttgatgaaagtgaacattttttctttg

SEQ ID NO: 211666 - DNA, 453 bp, Glycine max
  unsure (1)..(453): unsure at all n locations
agcttaaggggaatcatgaccaaaaacgtgttgcattangttatatcagnnggaatggaaatgaaaaaagcaatttggacagtctggtcaacgccatagctggagtatctgttactattcaacctgaagatacaaaggtcaacaaggccaaacagaggcgagacaaaaaagctcatcaagaagcagaaagggagcagagaatccaagcagagcagagtgacattataagcgatcgtgtgattaagaatgagaaattggaaaacaagtttcaagcctcttggcttgacttgttgtgaaataaagcctggttgtgaaataaagcctcttgacttgtctaagaactgataacagaatcttaagcagcaatgaagaaactactaagtgaatgtaacacgctcaatgccagcatagatgaaaccaaacatactactacttgtttgaatgtcacacact

SEQ ID NO: 211667 - DNA, 459 bp, Glycine max
ttgagccaaaatcctgactcaccataaaccttgacccagggtgagaatgtcaatccttaccctcggaagcaaaaaaaaaaagaagaaaaggaaaatttccaatcaaaggaaaaaatagaggaaaggaaattcccaatcaaagagtgggagaaagcaaaaagaaaagaaagaaaattcccaatcaaagaatgggagaaagaaaaaaagagaaaaggagaagaaggaaagaaagctcctgatcaaggatcgaaagaaaacagaagaaatgtgcagagaggtctttggaccagacaatatctgaacaatacggaattgtcaccaaatgaacaaaagaaagaaaaggaaaccataacctataagtggtcttcttaccaaccaaaattctgtgcgtcggtgacttgttcgcctcgcgtcaaacaaaaacagaaaaggaaaaaagccaacaaaaaatcaaaagcc

SEQ ID NO: 211668 - DNA, 450 bp, Glycine max
acctataaatctcagctttattatgggagggcgggcttctcttaccttcttgtctcaacacgaactttgaccattgttcttccttcccgcgatgcttcttttcatgtccgcctgagtgggcttatagcctaaaccatacttcccacgatttccttgggtatttatcaggctagttatgccggcgttgttttttcctaaacccatcgcgggttcataaccattccccaacataactcgggccatcattaccgctgcatcggacagacaaggctgcccaaagagggagtccacggaggaaatgctgaccacctcaaaagactggaaagcagtttctaacgattcttctgcggcttccacataacgcatggaggatgggcagcttaccaaaatatcttcctcgcctgacacgatgaccacgttcccctccactacgaatttcagctgttggtg

SEQ ID NO: 211669 - DNA, 448 bp, Glycine max
  unsure (1)..(448): unsure at all n locations
ntcacaagttgctgtccnataatcattcacagcagagttcttcatttccacccatcatatctnccaaaaccccttacccacgaaatttaagagagaaagagaaagaagtccacccaaacctggatgttcgaagtcccactcgtagccacgcacttcacgactccgaaaatgctctcctttcgcgatttggagcagaaatgagcaccaaaggttgaagctttgttgggcaacaatggtggatgggagaaaagaagaacaaggctgcgtgagagagagggagctgtctgacattttgtggggctgagtgaagagagagagaaaagctttttggtcttaaaagataggagtttccccgtttccattatattattcaagctctgccacatgtccctatttgattggagcaaaaaggacccactttctctttttgactgtgacccacactcag

SEQ ID NO: 211670 - DNA, 368 bp, Glycine max
  unsure (1)..(368): unsure at all n locations
aatggttttatatnatatacaacaatatcatttactcccactgtcccaaaataagtgttatcttaagttgaattacaccgatcaagggaaattaataaataaatgaaagaaagggggggttttacaagactaatcttattaatagnattaatattagattcaaacactaaagctacatttgttaagggtattgggaaaaaagatcaattaattttacattgtaaagtcaaatgcgacacttattttgagacaatttttttcttcctaatgagacggaggtagtattaaaatggcttagttatagacatcattggcttgtatatgttatttgcatgttcacctttactaacactatattgttatatagt

SEQ ID NO: 211671 - DNA, 453 bp, Glycine max
  unsure (1)..(453): unsure at all n locations
tcacatagaatttaagtaattaagcaataagcgtnggggttattgataagtggtgtgcacatcatcacatagattaattccaagcaccgtgattagtgacaacttggcttggataacaaagagataaagatggccaaccattttagtgtttttttttctttcttcgttacttattcctttccatgacataatggtcactttgctgttgttgatggctatgaaattgacttcctcttcttaatttggtcttttccttcttctttttttcatttccaacgtggaaaaattattcttcccacgtaataatgacctggaaactctggtaatagttatccttttgcttcccattgcttcaacattgtcaagggatacacagtatttgacaaaaacaaacaagaaacgataaaataataggatactttttagtatcagttaataaataaagaaatgaaa

SEQ ID NO: 211672 - DNA, 398 bp, Glycine max
  unsure (1)..(398): unsure at all n locations
agctntaggctgttcaattgcttcagattgttgtacagaagggcaaaggtctgtgtggtggtcggcagaggagcataaaccatagagtctggcgacaggtgtagatttttgattcatggccagttgggttaccaggtttaccaaggcatctagtttaccttcaagcttcttagtctcagctgatgaagatgaattcttggctacttcatgcactcctctaatgacaatagcatcacttctggcactaaattgttgggagtttgaacccatcttctcaattaaatttctggcttcagcaagggtcatgtctccaagggctccaccactggtagcatctatcatacttctctccatgttactgagtcctttcataaaatattcgaggagaagctgctcat

SEQ ID NO: 211673 - DNA, 454 bp, Glycine max
  unsure (1)..(454): unsure at all n locations
tctatataagctgaaccattttatcaataaacacaagttgagttntattcagaanattagagtttatctctnttatcttagtgagagtgattctcctaaattcttgagtgattcaagaacaccctggctgtatcaaaggactttcacaacctttgtgagttgccctcgctggaaagagtgattctttccttcctttcatcttcacccttgttctttcaaaccacaattccagaaaatccacctctgcccagaattatctcgtggccataactcccattttacgcactcaaattaagtgattcttgagcctaaattgactctaaaaacgagacctttcacctcgttttggaatcacctcatttggagccctgtagcttcagttattgccatttctatatttctgtccagccaccacttaacctacattttaccatcccattcatccattttatgg

SEQ ID NO: 211674 - DNA, 426 bp, Glycine max
  unsure (1)..(426): unsure at all n locations
ntgatggtgtaaagaagatatcacatgtttgtcatcatcattataggggagaatgtgaatgtatgtatacatgattttgatgatgtcaaagaagaatctaacaaggctacttcagatgataagcatttgcttcaagaataattcaagattgcttcaacaaacaaagccttgtttcaagattcactaaagaccaagcctttccttaaaacaaagttctttcaagacatgcaaggctctggtaatcgattaccaagaagtgtaatcgattactataagacggngttgagaaatagttgttgaaaaaggttttgaatttgaattttcaacatgtaattgattaccatatgtctgtaatcgattaccagcaacgaaactttggaattcaaattcaaaagtcataactaatgcaatcctatccccacaggg

SEQ ID NO: 211675 - DNA, 443 bp, Glycine max
cgctctgttcaagctcttccaaaatctggatgtattattaagatctctatcatatactatgctagatggcacaccatgttacctgacaacctcacttatatacaaggtggtcaacttttccaaggaaaatctgatattaatgggaaatgaatgagcagacttattcaatctatcaacaataacccagatagaatctaaacctctaggggttctaggtagtcctactacaaaatccatggaaatattgtcccacttccactgtggtatctctaagggttgtaacttccctgaaggtctttgatgttctatcttagccttctgatagactaggcatgcatacacaaactcactaacctctctcttcatgttgggccaccataacatcgtctttaaatcatgatacatcttggtagcaccacgatggatgctcacattactcctat

SEQ ID NO: 211676 - DNA, 437 bp, Glycine max
  unsure (1)..(437): unsure at all n locations
gctataagaacanaatcgccttaatcatttccaaatatgcatgttattaggatgctttatcaagaatcaagccaaggctattgtgcaagcaatcaatggggcaaaacacaccaaatgattataatgatggatggctcaaattctcacaaaggtaaaatcatcactttcaaattgagctntcaaaactatcatgacatgtagagaagaatcaggatttcaagtcacaaaatgtcaagaacttctattttcaaaacaattacccatttcttgaacatatcctataattcaaagaaaaacatgcaaagtcgtacgtgcacacaaaattgacccaaaatattaaactgaatatccgacgaaactaacaacattaacaaattaacacaactaacaaattaacaaaaccaacaaaactagcaaaaccaaagaacactcccccc

SEQ ID NO: 211677 - DNA, 168 bp, Glycine max
  unsure (1)..(168): unsure at all n locations
aaacagnaacgccacaatatttcattttacctgaaggaacctccaatgattgagccatgcacttaagaagtgggtgtacatgtacagatccataaacgcgtttaaataaatctcccgcccctcttccctgtcttaacttgagggaacagattttcatagatgttacaa

SEQ ID NO: 211678 - DNA, 447 bp, Glycine max
  unsure (1)..(447): unsure at all n locations
aagcctgcttanactggttgatgctaatgttgattagttgctgcttattccatgnccagaccttatattgcttattaacgtatgngatacaagattctatataaattatctgcagagataaattatttgatattatttacattggttaaatctaggaagaagattaacaactattctcatcaaagttatattctctcattgggctagaattattgcttttagtggacaaatgatatgctagaccatatccaagcattaaccaccatatctctttctgtaattgacattggaattaacacatgtatagacctatcttggtattttcgaaatcattccaaagatattcttgcatcgccttattaatcaaatcatcgggtgactcaacatctattaatatatactattattttatcagagatctgctttcttatgattctggactccgta

SEQ ID NO: 211679 - DNA, 473 bp, Glycine max
atagaatactaagcttaagctccttcaattgcacaaggctcttaatatatgaagagtattcttgtgttaccttcacccgacgaagacactgacaaaatcttatcttctcctttttggacacagtatggcaggctgagggcaagtaatatttcttcccatcagaccttggatgcaactgtgatcgtatgcccatattagctagatcttgatgggtattcaagccatccttcgtcttgccttgaatgttaaggagcgtcccaatcacactgtcacaaacatttttctccacatgcataacatcaataaaatgtctaacgtcatgatcagaccagttcggaagatcaaagaaaatggacctcttcttccatatgcaactcttacttatatacttcttttgagtcttcccaaatacaagattcacgggttgaacccgctcatatacctgctcaccagtcaacgctatctgcacaata

SEQ ID NO: 211680 - DNA, 427 bp, Glycine max
agcttcaagaataagggcctcatcttactatttatttcctttagggaattcaataaataggcctcctatctttaatggagtgggttaccattactggaaaacccgtatgcaaatttttatagaggcaatagatttaaatgtctgggatgcaatagaagtagggtcttatattctcaccatggttgctggaaatacaacaatagaaaagcctagggaagattggagtgaggaagaaagaagactactactatataacttaaaagccaaaaacatgattacatctaccctaggaatggatgaatactttatggtatcaaactcgtaaagtgaaaaggatatgtgtgataccttacaagtaacacatgatggcacaacataatgttaaatgatctaggataaacacatttactcatgaatataactattt

SEQ ID NO: 211681 - DNA, 452 bp, Glycine max
tcaacttatagtgagtgattcaggcttagtgccactacctgtatctaattcacttccaatgaccttaaaatagaatgatgttggcgcttagcgcatcctttcccattaagcccagcttgaaagctcaacttacagaatgaatctggggcttagcgtaggatagcgcacttagcacagctataataaattttcacagagaggaagtggcgcttagcgcatcatccgtgctaagcccacttgtcataccctaatttcgtccggggacctttgctcgatgacgtgcgaccattctttggtcctcgtgaggtgcttggcacccatcattaggcaatttatgaaattccaggacatgtccgaaaaccaacaaaatattgatgcacaatccgtaagtttccgtgacacatcggaaatcaaatggaagcatcgttgcataattaagtgaggttccgtaa

SEQ ID NO: 211682 - DNA, 433 bp, Glycine max
  unsure (1)..(433): unsure at all n locations
gcttanatgatncatatgtgacantntgattagcaattgaggtattattggataaacaaatcgcaaaantacataagaataaagatgtacgtgaattatatttctcatataacaggtctaataataaatttactaaataaaaattaattcaaacatgcagcattaatatttcaaattgtattactgtatatagatgtataacaattctaatattatattagaaaacctatgaatattaatcaattgttataccatacagtaacttttaattattaatagagatccaataatatatcctaagtcgattttcatatgagtaatcttaaagatgaactataagaagaaaaaatcaaaatcgaatttcaacaaccttatntaacgaatgcaactatgttactagataatatcatactatatgttgtcatcgtattac

SEQ ID NO: 211683 - DNA, 149 bp, Glycine max
atcgaaataagctgtctatggtagacgcttaaccattccttgattatgagaaagcggcctcctcggaaaaaagagcgcttcatcctgaatggataataataccacgtgggccacgctcagcagttgagctaagcgccgatccacccgta

SEQ ID NO: 211684 - DNA, 432 bp, Glycine max
  unsure (1)..(432): unsure at all n locations
tcaagaatcanagagtcattcaatcaagattcatgttaatatttatgagaagactcaagatatgcaagaactctaagataagcatcatgataagtatcaaaatatttttttaaaaataaaagattgaatagcacaattggtccataagaaatcttcaaagaaaaatcttttatcagagtatttactctctggtaattgattaccataaggcagtaatcgattaccacaagcccaaacagttttataactgttttaaaaagtagtaatcaattaccatgggcatgtaattgattaccaatggttttgaacattggatttcaaatttcaagagtcacaacttgtgataaaacatttacaaacttgtgtaatcaattacacaacatttgtaattgattaccagtggttttaaacattggtttctaatctaaaaat

SEQ ID NO: 211685 - DNA, 433 bp, Glycine max
  unsure (1)..(433): unsure at all n locations
agctgcggaagatagtgatgatgtcaccttctatagcagagcttgaaagagcccgggtagtcaaagagaagttcaagtccatagccatcaaagtctgaagagagtatgatgaactaagggacgtcaatatggccaccggtgaagccttggaacgagaaaccatgaatgcccgaaaggaagaacactaccaaaacaaagttttgaggggctttatagggcagcaatagtgagctcaagctccgaagaggtgaaaggaatcatcacgggtcaaaggcatgatctngaaggatgagctataggctcgccttacgtcgaaaagaaaattgtcccaacagttaatcgagactgaagggaatatgtgggccatcatcgatgagtgctaagagaagctaaatctagcagcgactcacgagcaaaggctagaggatgagta

SEQ ID NO: 211686 - DNA, 446 bp, Glycine max
  unsure (1)..(446): unsure at all n locations
ntgatggtgtcgagaagaaatcacatgtttgtcatcatcatttatggagagaatgggaatgtatgtatacatgattntgatgatgtcaaaagaagaatcaaacaaggctcattttgcttcaagattaatacaagattgtttcaacaaacaaagccttgattcaagatttcttcaagatcaagccttgcctcaaaatgaaaagatttcaagtcatccaaggcacatgtaatcgattaccaatacatgtaatcgattaccaagtcacatgaaagtgtgtaatcgattacacttcatatgtaatcgattaccagagactctgaacgttgggaattcaaattttaaatgaagagtcacaactggttcaaaaaataatggtgtaatcgattacactaactctgtaatcaattaccagagaggattttcaaggaatatcgccaacagtcaca

SEQ ID NO: 211687 - DNA, 257 bp, Glycine max
ccttcctagatttacagttttgcttgcctcatcaaataaagaacaactcacttgttctcataggtcaaatactgtggccaattaaaagaaaatggcatctgattcttcaaggatatcaaccatatgaaccgtataccatggattgctttatcgagccatacccaatcaaataacattttagctgcataactatgaagagactctaggttgtttcctaacgaagcatgattaactaaatgttcatatctgatagtacg

SEQ ID NO: 211688 - DNA, 419 bp, Glycine max
  unsure (1)..(419): unsure at all n locations
caattagatgcagcttgtacatactcctcaaaccatcaaggaggaactcaacaggtcaagcgacctaccccaagactggttgacaaaacctttaatcataggcaagtcaaacatactcctataagcatcaggggaaaagctccacaaagcanaagaaagccctaccagatgggtgacaagacctttaaataggttgaaatcaaacctaagataatttcttgtcatctactttttacaagactacaaaggtcctacctctacatcgacaaggtcttgcttcctggactatcaaagattccacactcacgacggcctattcatactaccaaaagtagggagtggtgaataaacaaaggcanacacacaagacatacataaacgatgcanaattcgtcattgaaggaaatcatgtgcattga

SEQ ID NO: 211689 - DNA, 447 bp, Glycine max
  unsure (1)..(447): unsure at all n locations
agcttatttgtgggagcactgtanatcaccaatgaattcgtggattacatacgcgaagtttatataagatgacccgtntntgcaaggcaaggtgttagatgtaatgggggataagggtgtggagtttgataaagacacaaccgggttaattataatcaaggggaggatatgtgtgccctctttagatgatttgaaagttaagatcttggaagaagcacatataagtcgtcttagttttcatccaggaatgactaagatgtaccatgatttgaagagaagtttttggtggcatggcatgaagaaagatgtagctgaatatgttacgagatgtttgacatgtcaaatagcttatgctgatcaccatcgaccatcatgagaattgaagccattgtaaattccggaaaggacatgggagaacatatctatggattttgtttttgtataccc

SEQ ID NO: 211690 - DNA, 435 bp, Glycine max
  unsure (1)..(435): unsure at all n locations
agcttgtaaactatgatagatgtacgagttatgtgtgttntcgctatttcctgagagaaagccctcttgtgaagagaaatatatgagtgggtgtgcgaagtaaacacacatagaccttttgctggtgaaagatcgaacactgactgacaaaatgtgtagctagtgtcgtagcatggctaatagcggccatgcgtgaaaaccaatacggatactggccagttattgaaatacaaaggatcgctagtccaatagtgtctggatagtgtaaggaaaatctcatcgtgaaggatgatgacttgaccgatcctataagtggggcgaataagcataaacaccattgaacgtagcatgatctgctgcctctggatctgatttacactaaagctatgtactaatgtttgctatcagatagcgaaaactgcttgcaaaactcta

SEQ ID NO: 211691 - DNA, 270 bp, Glycine max
accctttttggcgtcgaagctactattcgttgagctatcgacacctactatttacttgtgcaatcccattatgattttttttcctaatcgcatcacaatttttattcttgtcagtactctgttgtttttgtcactctcaatgagctgatatatatatatatatatatgtatgtctacctactgttcttcttgtctgggccggcatgacatccggcattttacggtatgccaatcagcaatattttatggcggattttgggtttcgccatg

SEQ ID NO: 211692 - DNA, 414 bp, Glycine max
  unsure (1)..(414): unsure at all n locations
agcttattccttataaaaacaggacatccttgccttatataggctgaggacaaaacaaaaaaaaaataacagaataatcttccatatggatttaggtcacaacccaacaattcaccaccttgaactaacatccatataggacacaaactgctccctccaaacactcatgatcttaaccccaacaatcaacattgagcaagcttaagcagtgatcaaacttgctctttggaactggctttgtgaacatatcancaggattgtgcacagtgttgatcttatgaactttgattcttctttctgaccgaatgaagtgatatctaacatctatatgctcggttctatcatgatgaacctgatccttggccaagcatatagcactaaggctgtcacagtagatgttagcatattcttgat

SEQ ID NO: 211693 - DNA, 461 bp, Glycine max
gctggtaagtgaggaaagagacattgaagaaggtatacagagatctgtattcccttgttttggttcagattccaagctggtatgccaatgctgaggacataaagcgactctgcattgttgaagctcatcttccgatcgagtcatcgtcgatacaacttccacggtgggatgcatgagttgattgaggctccattattggagctctgtcaagatataccatgccaacaataatgtgaattaaggtaatgtaggtcaggtcggtgatgcactagctagtactaatgaagcatgggcagtttaatttgactggaatccctctccaaggagaaccaattggaagggatctggcagaagtctgttgacagtgttggtgaaacactggtttattaccaatctgtagacattgctcttttctgtatggaaattgaaatagcttcattatgccacacatatatggaaaa

SEQ ID NO: 211694 - DNA, 245 bp, Glycine max
agaacctaagacacggggaggcatgacaaaacagcagacaaccgaccacccggcaagaagcaagagaaccggaagaccaaacagcgaacccgccgcaaagaaaaagaacaaaccacaacacgaggccgggggcggccccggaaatgacgaaggggaacggccggaaacacaccagggagaccaccaagcaaaagaaacagagcaaatgcctggaacacccaaggcgacaaaccacgaaacagcag

SEQ ID NO: 211695 - DNA, 320 bp, Glycine max
ggctactaccaatgagaatacaagcattaaccgctgtttcagggcacattcaggatattcgagaagacctacaggagggaggattgaactttacagatccaaagagtggatctttcattcttctcaccggtggtgatagcaaccttctggagcttgaccattggagcctcgcacactctggcgttctctgtatgaacgacgacgaggtcctcctctattgccttgggcatgacatatgcgctcgacgtcattagtcgcggctgcataccttaatggggaggggagtttgaaacagactttatttggtttttacgtcatct

SEQ ID NO: 211696 - DNA, 365 bp, Glycine max
  unsure (1)..(365): unsure at all n locations
gacctatgatactcaacttggggaagaaactgcgcaaggaaacatattcttctcattgttttaatgataataagcatactatctctagcatatcgaccatgcgttctaagattaanatatttcttcttacttcgttcttagaaagataaatcatggtccatacgttaatggcttgaattagtgcgccatgacaagccttggtaagattgaagacttgtaaacaaaactttatacattgcacacatttttagacccattgtatgtctggttgccagtctctaatacatgctggttatattcttcaaatgggccaactgttctttttccctatcatcttaaacttgctgtctgatctctagagtgaa

SEQ ID NO: 211697 - DNA, 75 bp, Glycine max
aaggaaggtcactacacatcagatgaaaagaagcaagagcataaggaagcttagagccaggtataaaaaaccccc

SEQ ID NO: 211698 - DNA, 455 bp, Glycine max
  unsure (1)..(455): unsure at all n locations
tggccgagaatagacgcattgaagaccctgtgaccgangtctttgtcctacagatnggaggaaccaatattcagttgaaaggataaacctactgttgcatgttgccatagacctataatgctatccanatcacatgatgctgaccttttcattgtatanttatattttgaatttctttatgaatattaattgagctgattgcactggaaattgctgttttgtacgaaaactttttcgtgccacttgcacgaatgtgtgttttctcaaaaacatattctatattttttaattaatattttttttttaaaaaaagtatccatccgggtatgtgttcctgtgtttcgtgcaacctttccttcgtgctagatagctctgctggattgcaattggacattattatttttctatttctttgctattcgctatcggttcagattttagagtggcccacactg

SEQ ID NO: 211699 - DNA, 443 bp, Glycine max
  unsure (1)..(443): unsure at all n locations
nttatcgggaaacaagaactcttatatataaacataaacattgatagagagtggacgtttatcagcaaatgtaaataaaatatactcaatccaacaccttctcataaaataaaaaaatagccaccacatatcaatattaatttgttaactgtgaatataaaatatagataatttaaaaaatatgtgtaaataaatgcatctcctaattacgtggttggattgaagttgaattcacaagaacattgaaaagtaaagaccgaagttttgaataaaagcaaccaaataggtgaacaacaatatgggtgtttatgagaatgggtcatctgcaaattcgaatcgatttaaattgatttaaatagtgtgggttgagtaatttatataattggggtaaaattaaaccgaactgatcaaaattattcatgttcggattcaatcacaagttt

SEQ ID NO: 211700 - DNA, 451 bp, Glycine max
  unsure (1)..(451): unsure at all n locations
nttcttggtgggttgatgtactctatcacataggatagcatgatcactaacagacatattttcaatcaattcagtttcctcttcaggggttttcagctttatcttccctcctgctgaagcatctaacaactgcttggtttgcggtctcagcccatctataaacatgttcaattgaattggctcaaagaatccatgagtgggagtctttcttaacaaaccccgaaatctctccaatgcttcactcaatgactcatcagggaactggtggaatgatgaaataacaacattcccttctgcagtctttgactcgaggaagtatttcttcataaatttctcaacaacttcctcccatgtcttaagactgttgcctttgaatgaatggagccacttcttggcttctcctaccacagaaaatgaanataaactgagtctgatggcatagtctggcact

SEQ ID NO: 211701 - DNA, 283 bp, Glycine max
ttagaccagcacaatcatattcatccaagattgaaagccttcataaaacatgaaaatgattttgtgcatgaaaagatggaaacaacgtggggaacaacaactttctaaacatagcattctagacaatggcattttgagtaacaacattctgagtgcgtgggacaacacaacaacatgtctagtgttgatcatcaatacataatagctaaaatatatatttatttatgtgatgatcttcttaacacgagcaaatgcacattgagcataggttttcataatcata

SEQ ID NO: 211702 - DNA, 412 bp, Glycine max
  unsure (1)..(412): unsure at all n locations
tgtaatcgattacacaaggctngttatttattactcaaaattttgaatgttttaaaacagcctttagaaatttgaatntaaatttcaaagtctgtaatcaattaccatagttaaaattcaaattttaaatgtgaagagtcacaactcttgagaaaacaactgtgtaatcgattacaccattttggtaatcgattaccagtgaggaattttcaaaaataactcccaacagtcacatcttttcaaatgattttgaatggccatcaaaggcctatatataggtgactngggacacgaatttccttagagtttttactaaacaaaaaaagtcttatcctctaaaaattccttggccaaaatacttgcaaattcaataaggaatcattgagtgatcttcattgtattatctttctct

SEQ ID NO: 211703 - DNA, 438 bp, Glycine max
cagctgcgttgagattctgtcttgagacactttcttgagaagcttctttgagatactctcctgagaagtttctttgagaagcttccttgagaagctagagcttagcctcacgcacccttctaatagctaagctcacctgcttgaaaagcttccttgagaagctgctttgagaagactcctagagaagctatagcttagctacatacacctctctaatagctaagctcatctgcttgagatgagaagctagagcttagctacacaccccctatagtagctaagctgacgcccatgccaaagtacatgacaatgcaaagaaagtccctactacaaagactactcataatgtcttgaaatacaaggctaataccctatactactagaatggccaagataaagggcccagaagaatgataaacctattctaatattattaag

SEQ ID NO: 211704 - DNA, 445 bp, Glycine max
  unsure (1)..(445): unsure at all n locations
ntataagtgcgggttcgggagacaaggtcaagcgttctctatatgcgaagatgatattccgagtactgtggatttggtacgaccatgctctcctgatttccagctgggaaattggcgagtggaggaacgccccggcatttacgcaacaagcataatgtaaacctttacggatttaatagctctatagatgggcctaggctttagagttttcattgtgttaaggctttgtgtcttttgtttttgaatttataatacaaggatctttcttcatctgttcctggtctctacccattctcattcatttgcatgtttacttctttttctaaaacggcagattcgatgacgagtcccccgaaggtactaatacctgngacccgtctgtcaacttcgaacaagaaatgaatcaaacggaagatgaatgagatgaggatgtgggacttccttc

SEQ ID NO: 211705 - DNA, 266 bp, Glycine max
cacttgttagacagcagcctcaatatcttaagaaggggggggggggtgtatatacgatcttcccacactgttccccatatgtaaaatctatttctctttatactcaagatatgaatccccttaatgaccatcctcttctatattaactccctccaagctacttcgatatgaatattacgcctaatacactacggaaattactggaagacaaaatgctccctcacctttattctggttcggcctcaccctttagcctgcgaacaatc

SEQ ID NO: 211706 - DNA, 442 bp, Glycine max
  unsure (1)..(442): unsure at all n locations
tccctttcnttggccaatgctggacttgtttggcagtgatttccttggcaatttgatgctcagaaacagcaatatcaactactccatcagttggtctgcccaggtatttgttgatcacagcaggggagaatctaacacactttcctctgacaaatactttntgatactcatcactctttctgtttgttatgtcagagggaatgttgacaataaattccctgactagactctcatagcagtctcccaacttggtgacagtcttcagcagtccagtagccttgatgaggtccatggtctccttacaatccaaggcatctcttcccaattctctttcaaccgcaagtctgcgttgatacacatatttccacttttcaacattgccaattgagtggaaagagatgttgtccagtggtgcatcangaacatttccaggcacctttct

SEQ ID NO: 211707 - DNA, 328 bp, Glycine max
ccagacgtgaacgtagatgggcaacactaatccaacagggttactttcatgcatatgcatatatcagaacattatactcagaggatcctcaacaaaataacccaatcgtattcatttataggtagcttttggactatagtcgaaggatggtactgaggaccagacagagctacttcaactggaatgaaagcaccccgagggccttgttagtatcgacccttatgatactcaccccactgtgatggaagatcttgaggtacatgcctaagattcttcgcacactttttgtgagatgccgcatattgaatgtatgactctgggatgctaa

SEQ ID NO: 211708 - DNA, 465 bp, Glycine max
  unsure (1)..(465): unsure at all n locations
cactcagctatagactntntagtgcccctcatgcaaccacaactgtgttacttgcagaanaagagaaggtttctttattcttttatgtttcattattttatccttggctatggaatttctttctacctaggcaactatgttctggtcacaatattcatattatttatgttttaactattatcagcccagtaagggaacaaagcgcaagcgtgttgtaaaacggggttcatcaagatctgggacaacttcaagacgttctgtgaaggtaatatctctcctttaactgccagaatgtgaaatataatttgtgtatttcaaagttaagtcatgtagaatatcagtcttgcattgttttgactatgctagtttatctcacttttgcttgtttatgctctctgcattgcaagctatcacaaaaatgttcttgtcctantgaatgactaggttgtcttatcccatgtcagt

SEQ ID NO: 211709 - DNA, 332 bp, Glycine max
ctatacattcagaacgagagtgaataatccaaagaacatcatcctctatcatgatgtgcagaaatcttcgcaacatcatatgcattactttcttgcaaaacgagaggaaatgctattagatcttcggcatcataattctgatctccttattgttttggctaataagacaggataagacgttgatattccaaatatgcatgtcaccagcaactctccccacaaaagtataattataagagctatgtacgaatgaagttcaaacctgaagattacgctcatcgtatagggcctatactgtagcaacatttactggagctggcttaccatagcgc

SEQ ID NO: 211710 - DNA, 363 bp, Glycine max
gtctgacacgtctatattcttcctacactactatcctgtgcctatagtaagcaggctgactccttttatatctaatatgcgccacccaaatgccttctttctgcttttgaggaactctatcaaactatttctttttctggtgaatgcctactattgatcaccacaagctttgtcttgttctcttccacgaacatacttcatgtggttaggttagatcttttacttcaccttggatctctcacgtggacttccgcttttcaattcttaatactggtccccctgcaggatattttcttcacatctaagccttccaagcagccattaattcttctctgttcactggtagacattttcacattggtc

SEQ ID NO: 211711 - DNA, 460 bp, Glycine max
cctcagcttctatccaggctcatcttggtggtgaagctccttcttctatggtttattccctattggattacgcctcctctcacttcttctccttcgtcttccactgcatctccatggtgtaaaatcaccattaaaggacctcattgaagctcaaagatccatcctccataagagcctcacaagtaagcttccatcaaggaacccatgttgtgactgtcgttcctacaaggtcaaatctcccaccagctcaacagtgtcattactcagcaatatcgacccaatcattcataaaggacatccctaaatcagccacaaagcctgcctgccgcacatccaatacctaacaccacccttaacacaaaccattacacctaccagagaaagaattttgcacatataagcctgtagaattaccccaattccgtgtcctatgctacttgctcccatattactcataatc

SEQ ID NO: 211712 - DNA, 437 bp, Glycine max
agcttgctctaaattacattgatgtttgtatttatgggaggaggctgtatgccattttttaagagtagtgtcccactagtaaaactaactttccaaatgtttgccttcgcgggaaatggccccgaggaagcttgcctctaagaggtccaggaaggacaaggcagccgaaggaactagtttcgctccggagtatgacagtcaccgctttaggagcgctgtacaccaacagcgcttcgaggccatcaagggatggtcgtttctccgggagcgacgcgtccagctcagggacgacgagtatactgatttccacgaggatatatggcgccggcggtgggcatcactggttactcccatggccaagtttgatccagaaatagtccttgagttttatgccaatgcttggccaacagaggatggcgtgcgtgacatgagatcct

SEQ ID NO: 211713 - DNA, 348 bp, Glycine max
  unsure (1)..(348): unsure at all n locations
cttctatggaggctggatctatgagcttcaatgaggtccttcattggtgantttccaccatggagatgcagcggaagacaaaggagaagagatgagaggaggcgccatccactatggaataagccatggaagaaggagcttcaccaccaagatgagccttggataagatgcttggagaggatgcttcattggaggaaaagaacgagggagagaaagagggagagaaagagagaggggggagcacgatattgaaggaagaaaaagggagagaagttgaaccttgagttgtgtctcacaagactctcatttctcacagntacaacaaggggtatacatgcttctatttat

SEQ ID NO: 211714 - DNA, 287 bp, Glycine max
  unsure (1)..(287): unsure at all n locations
gactaatacatccgttgcccaagattcacggtcatgcaggtgaaaatcctcataagcatcttaaggagtaccatattgcgtgatccaccatgaagccacttgatgtccaggaagatcatatcgttctaacggactgtcctccttcttagaaggagagaacaaagagtggtcgactaccttgctcccagaccctctccaactgggatgaccataagagagcgttctcggaanatccttcctccctcatataccactgcagcaaagacacaatcatgaacctagtgaga

SEQ ID NO: 211715 - DNA, 446 bp, Glycine max
  unsure (1)..(446): unsure at all n locations
tagctcacccaggcaagctgngcggcaagttcctccactattttggctataaaagggcgtgggatgctgacgggaatgagttcaacacccttggcaagcatatttcacttaaaattagtgaaaagaaggagaaaaataaagataatcatggccaaggcgcttccgtgacattttcatgatcaattccatgaacattctttgtcgctcttcatctgtttttcgttcttcattcagttagtgcttgctttaaggatttggattcgatttatggacccttaggggtcccctttattctttgtgcatcttcatctcctttttcggtcatcgttgatcttnttatttgtntaaagtgagttttgatagatcgttcgtgccataatctcgtttattcaccattaaagtaaaattcaatcgatcatttgttgtgtaatctcacttaatcaccg

SEQ ID NO: 211716 - DNA, 457 bp, Glycine max
  unsure (1)..(457): unsure at all n locations
tgcaagcatgcaaggctaacaaaacgcatgcgaagtgtgtggatatcctanatcaattcccttatggtattaaacataaaaagggaaaaggttctattgtagccgatgctctttctcggcgtcatgcactactttctatgcttgaaataaaattgattggtcttgaatgtttaaaaagcatgtatgaaagtgacgaaacttttggtgaaattattaaaaatcgtgaaaaattttcagaaaatggtttctttagacatgaaggctttcttttcaaagaaaacaaattgtgtgtgcctaaatgctctacaagatacttgcttgtttgtgaagcacatgaacaagggttaatggggcattttgcggtccaaaagactctagaaacattacaagaacanttttattggcctcatatgaaaaaagatgtgcagaaattatgtgacattgtatggatgtaaaa

SEQ ID NO: 211717 - DNA, 451 bp, Glycine max
  unsure (1)..(451): unsure at all n locations
ngagtttactagtatgttgtttatgttatcagttctcaaaatctcgtaagtgaatcaaacctgccctaaaaaatctttgtnntctctcttcttctatattcattccattctactcattttttctcttctttccctatcacctacacttgacatggcagtataacaccccaaactttttaaccccatgttatagaatcatcaaatatacatatccaccacagaagtacaaacatagacatcatactcaagcttacttctcattatgtaaccatggatttctttccctaaattaaagcaacccaatcaaatgactgcttgtagagcactagttattgaacatgaattcagcacgtggaaatgagatagaagtggaaaaaggtggattcaacagtcttcttaattaaatagatgacactaagatggctcatgagaagaagagttacagaggatg

SEQ ID NO: 211718 - DNA, 439 bp, Glycine max
aggtttggagggacttcatggaagactatgaagtaactaccttcttcgcacttcacttcttcttcaataacttcattcattcattcatcgtgttgcttgtacgccatggttccatttcatgcattgcaagccttcggtctcgccatctatcccagaaagaaatccgacgatgtctgctgcaccgccatccatgtacttgccgacacccaggtctctgtcttcttatatagtgtttccaatcattgaaatctctaattcaattgatttgcaagatatgaaactgttggagtataagtgtgagatgaagtcccacatcgaatataagtggaaaagttgagtaccatataactgaggagaagacccataaacttgagttttaagaatttaggttaaagtgtgaatgctcatggtttattagtgtaaatctccctacttgttt

SEQ ID NO: 211719 - DNA, 398 bp, Glycine max
  unsure (1)..(398): unsure at all n locations
tcccgtcaatggtattacaagttccatcaagacattaccttatatgattntgaggcaaatgtagttgatgatagtgtataccacaagtttagttggagtaaacactcattcttggtgttatatgtcgatgatatactanttgctagcaatgatataagtttcttacaagagactaattaatttcagacgataaaatttgagttgaaagatcttggggaagcctcttttgtattaagaagcaagatactaagagatcgctttcaaggtatcataaggttgtcacaagaaagttatatcgataaaggcctagatagattcggcatgaaagatagtaaaccaagaaataccccgatagctaaaggagacaaaattagtcttaaacaatgccctaataatga

SEQ ID NO: 211720 - DNA, 335 bp, Glycine max
accaaggtattggaactaaagcccatctattcctcattggagaaatgaacccagtcccctgcacagatgagatattagaaaattctgctaaacttttttgctaacatttacatggagggaatatcttttaagacaattattcctttggcgttaaaggtcattatctgtatgaaggggaaccttatttggaaccttattgagccaagcaacactatatgtcctatgaaaaaattaatggatacactttaggcatactatgggtggaaagaacttagctatccctacacattattgaaaagtgatgtacaaatttaccttggattatagatgagcta

SEQ ID NO: 211721 - DNA, 439 bp, Glycine max
  unsure (1)..(439): unsure at all n locations
ntaggagagaccattatatctaaggtagttgctaaacaaatttctattgaggaagcttcgccaagcatccccattgaanaacctttattcaaacctttcaaagttagtgagaaggctaaacgaaaaattagggaacttagaaaaactaaatccttaattgaaggcgtaggtgacaaccatagtgaattactaaacaagattggtagtttacttaaagtcattccagatactccccaaacctcggaaaatacttccaaaatggtaacaagaagtacctccaaattaattaatgttattaatgaagatagtgaccaaaaatcagataacacaactgagataggatcaatgtcagaaaagaatataaatccaattaattccaaacactggaaaacaccctncaaattatattatcaacgtccgactgcccttgatctcctat

SEQ ID NO: 211722 - DNA, 441 bp, Glycine max
  unsure (1)..(441): unsure at all n locations
tgtgagaagaaatacatgtgttgtatcatcaattatgtggagaatgtgaatgtgtgntacatgattttgttgatgtcaaaagaagaatcaaacaaggctcattgtgcttcaagattaatacaagattgtttcaacaaacaaagccttgattcaagatttcttcaagatcaagccttgcctcacaatgaaaggtttcaagtcattcaaggcacatgtaatcgattaccaatacatgtaatcgattaccaatgtgnnnnnagtgtgtaatcgattacacatcatatgtaatcgattaccagagactctgaacgttgggaattcaaattttaaatgaaaggttacaactgttcaagaaaaacaactgtgtaatcgattacactaattctgtaatcgattaccagagagggatttcaaggaatatcgccaacagtcacatcttat

SEQ ID NO: 211723 - DNA, 407 bp, Glycine max
cttgatgggtgtaagaagatatacatgtctgtttcatcatatagggggagaatgtgaatgtatgtctacatgacttttgatgatgtcaaagaagaatctacaaggctactccagatgataagcatttgcttcaagaataattcaagattgcttcaacaaacaaagccttgtttaagattcactaaagaccaagcccttccttaatacaaagttctttctagacatgcaaggctcttgttatcgattaccaagaagtgttatcgattactataagacggggttgagaaatagtctgtgaaaacacgtgttgaatttgaattttcaacatgtgattgattaccatatgtctgtaatcgttatccagcaccaaactttggaattcaaatctaaagtcataactaatgcat

SEQ ID NO: 211724 - DNA, 463 bp, Glycine max
  unsure (1)..(463): unsure at all n locations
tgtaagaaataaacctttaaaagagaaacaaattatggtctctactatacatggttgtaatagcaagatattagaccaaaagagaaccatataacactgctaaagtctggcagaaaaggtaccacaagataagggatctgagaatggaggactagaattcctttgaaggttgacagttgctggagtaacgtcatcatgatacaatttacaaggctaaggctgagtgagtgctatttccttgacactaattcctaaaagaaaaaggcacagttctgttacagtccattgtctcttattttatatgtttatgtgattctgttatgattttacgggtaaaaggtatgtacccagctattataaagtttaattattgtgatggttgtgcttgcatcctgtntctgcaggtttgatactgtgtacctcgatgacgaccttcgcgttgtaaaggatatcataggagact

SEQ ID NO: 211725 - DNA, 340 bp, Glycine max
tcttggaggccatggataagagtccggtggaagacagagatgaatgatcggagtggaagagaacacatggtattctgctctaaaagatctctgcaaactgaaatttaatttgcaaatgatcagagttctgaaaatgctcacgcatgggctctatttatagcttaagtgtgacacaaatcgggagggaaatttgtatttctattcacatttcactatcatttgaaattgaatttgtgagccaattttggagcaatattgactaattattattgggaatttaactttgggcagccataatcgagatcagtccagatctccatatcggcgttgggcataggct

SEQ ID NO: 211726 - DNA, 274 bp, Glycine max
cactcaagctggcttgtggagcttctatggaagctagatgcttgagctttaatgatgttcttcattgttaattctccaccatggagatgcagcggaagataaacgagaagaggtgagaggagacaccatccactctggaatatgtcatggaagaaggagcttcgccccaaaatggccttggatagaagctggagaggatgcttcaatggaggaatagaaagaacgagagaaatagagaggggggagcacgaaattgaatgaggaaaagaggggg

SEQ ID NO: 211727 - DNA, 347 bp, Glycine max
atcggatccacttccctaactgtactggaagcggttgccatggctttatcctctataggtttatggagttataacaagacccctcagatggaagccattatatcttttaaagccgatatattggcctttatctgttactgcacaccctcttccatattcatttgtctggatccactgttatcggggtgccttggtggtttcttagtcttgaagaaattccgtaagaaatagactacagtgagtatgccacccaaacagggagatgcaaatgaatgatcggagcactatgatccaccccagagtttttatataacgcgataagttcaaacgttctatttattataaga

SEQ ID NO: 211728 - DNA, 355 bp, Glycine max
  unsure (1)..(355): unsure at all n locations
acaaggcggnncgaagaactatttccgctcctgtgtatgacagncaccgctttaggagcgccgtacaccaacagcgcttcgaggccatcaagggatggtcatttcttcgggagcgacgcgtccagctcatggacgacgagtatacggatttccaggaagagatatgtcaccggtggtgggcctcactagataccctcatggccaagttcgatccagaaatagtccttgaattntatgccaatgcttggccaacaaacgagggcgtgcgtgacatgaagtcctgtgtaaagtgtcagtggatcccatttgatgcagatgctatcggccacctcctgcgatattccttggtgctgga

SEQ ID NO: 211729 - DNA, 358 bp, Glycine max
  unsure (1)..(358): unsure at all n locations
tacgcgcctatgaaactgaactattggtgccgtaggattttatgcgctgatattgatttgggctgaatgaacacccatacatttatttgagcacggtcctgcagacaaaaacaataaatntatttaatttgctgacagaggcagatattagtggtatacctgatcccatatccactcaaacatgactgcaagacacagacaacacagatgaaatgcagctctcatgaccattaaatagctgtggactagcattgagaacatgccacacactccatcctgcctgggacagagtttatgagatcccatcataaggaagcttgttctgaggaaaacttgtcctttccgctatgagattcag

SEQ ID NO: 211730 - DNA, 343 bp, Glycine max
  unsure (1)..(343): unsure at all n locations
cttctcgcactcacaaaatctgtcatactgtcattatgagtacgctgacgggcgaaatatcccattgggtatccgtataaacaattctttttgctgtttggaaagacgaacagttatatggcaagcacagactaacattgtcttctactcccttcgtaaatcgcggtcgacatacccgttgacacgcggagatttacgtcatcttccgtgctcataagatctgtcatactgacatttgagtcactctgacggtcagatatactcaatgagtatatccgtacgatatatttctttntcgatgtctagtatgactaatagtctgatatcacgcagagactatcat

SEQ ID NO: 211731 - DNA, 336 bp, Glycine max
aggccgcaagccatgaagagatgcgaccaacagagattgcatcatataaataagataataaaacagcgcaagcatagaattagaaacatacatgtagtcttctaagcctttcattctcctcttctaatcgtgaaactttaatctccagttcttgtgtgtatgcctgttcattgacataaataataccctgcatcaacttttgtgaattttattaaccagagaaacacgactcttcactgtgttataaaaaaaaaacaagcagattcaagagaaataacaccaaacacattcacacacagatgtattatactctgtctgtttgcccgagaccgaaca

SEQ ID NO: 211732 - DNA, 439 bp, Glycine max
  unsure (1)..(439): unsure at all n locations
tgccattgtatacacagaagacgaaggaagaagacgaaccttttttgaaggaaggagaagaacgaaaccaaggaagaagaagcttgcggggaggttgctgggtgcacgggagaagaatgataccacagaagaaaacgttttttgaaatggaagaagaagaccatgttttttttttaaatatattaacttttattttttaaatgaagggcattttaggagagtcattcatttgctgggtgcaccaacaattttgttgggtgcacctagcaatagccgactttgatttacgtgtgtgtgtgtgagaaattcgatatttaagggtgttgttaggtgcacccagcaaattttaaaaatggcaattctgcccctggttgtttttctttaaattggcactcggttgcattattctttatgtgtgaagctgtgcttnttccactct

SEQ ID NO: 211733 - DNA, 455 bp, Glycine max
tgagatgaggaagtgttgaacggagatacttcctgctctctttgttgaccacacagcggtacctggagatatgtcgcgcgggtcacgataccttgtggacgtcaggtggtgtgctattgtccaaaaccaagcttgaccaatcccgacccaacccgtgcatagtcggtcggtgataacctgtgatgtaccttaacaagcgagctccttgcagtcaatcgataaatggaaaacaaagaccacaaatcaatgaggcttgtggtggctgaccagctgtgaatatgtgtgatatgtggagtattgcctctggtaatcgatcaccaagggtggggtatatattacaaggcttaaaaatgaagacacgaggctaagatggtctcttgttatcgattaccacggggtgttatcgattaccatgcttataaacaacaggaggaaacctatggagcctctggtta

SEQ ID NO: 211734 - DNA, 434 bp, Glycine max
  unsure (1)..(434): unsure at all n locations
agctagcttgagaaacttctttgtgttgtttatctttgagtntcaacgaggggcttcaatggtgaatttcactcatggagttgcaatggaagataaaagagaagaggtgagaggaggtgccatccactaatgaataagccatggaagaagaagtttcaccaccaagagagtgtcttggataagaagcttatagaggaagcttcactggaggaagagaatgagaaagagagagagagagagagagagagaaaatgacgtgggaatgaatgatagataaggagagaagttaaactttagaaagtgtgtctcacaagactctaattcatcaaagttatgacaagtgttaaatatgtgtctatttatagtctagcacatgagaaacttccttgagaagctaggaaggtagcttccttgggaagctagaggaagaaaac

SEQ ID NO: 211735 - DNA, 448 bp, Glycine max
  unsure (1)..(448): unsure at all n locations
ntgtggctgannaaaactatataacagcaccattgttctagtttatgagccccctctctccctcgcgggagactctctctctctcctctctctcttctatttttcgtttttagttttagtctctcttctctttctcttttattttcgnttttttttcaattccagttcagacttttagttttatcaataaaatttcattctctatttgattaatggaaggctaagtccgcagcgttgttttcccttgaggatcaagcacagttctctttgaggttctattattactgttaaattctgtttagtttttcctcttcactaattactttgaatttgttgcttttaattcatgcatgcttagtgcttgattaattgtctctgcgcttaatttacgttcatgcttaatgatcgtttatgagtaattggtgtatgtgatgcttaatcacataat

SEQ ID NO: 211736 - DNA, 387 bp, Glycine max
  unsure (1)..(387): unsure at all n locations
ctgcaagcttagggtggcaagccttcananctttttaccttagtcaggagatactggcagagcaagaagctgatagagtgcatggattacctgagcagcctccggtgaagttcaaacaatatgctggttatatcactgtcaatgaaactcatggaagagcactgttctattggtttttcgaggccactcacaaaccataacaaaaacccgttctcttatggctcaatggaggtattttttttttttactaactcagctcttcatgtatatatttatattgcaatcgtttttatttagtgttcactctcatgactaatacatgtatctgggtaaataatgtcataatgcatagttggtatgagtcttatcaattgatcatgtgaatga

SEQ ID NO: 211737 - DNA, 448 bp, Glycine max
  unsure (1)..(448): unsure at all n locations
tcaagttagctagggaacttcctcanataatngaagacaatgttgaaggattctgtgacaaattaatgagtgttgttgggtttgagaacaaggagtacaacaagctgttttgggctgtacatccaggggggccagccatcttgaaccgcattgagaagagacttgatttgttgccagagaagctgagtgcaagtagacgggctctcatggattatggcaatgctagcagtaacaccattgtgtatgtgctggagtttatgatagaggaaagtctcaagattagaaaggatggcagaggagatcttgaatggggcttgatacttgcttttggacccgggattacatttgagggaattctggccaggaacttgtgtgcttgaaccctctcacacacaaatgtggcagaaagcttattgatattattattacaggatgtgtntatgtaata

SEQ ID NO: 211738 - DNA, 450 bp, Glycine max
  unsure (1)..(450): unsure at all n locations
agcttcggaagaaagtgatgatgtncaagctctatatgcagagcttgaaagagcccgggtagtcaaagagaagttcaagtccatagccatcaaagtctgaagagagtatgatgaactaagggacgtcaatatggccaccgctgaagccttggaacgagaaaccatgaaggcccgaaaggaagaacacgaccaaaacaaagttttgaggggctttatagggcagcaatagtgagctcaagctccgaagaggtgaaaggaatcatcactggtcaaaggcatgatcttgaaggatgagctaaaggcttgccttatgtcgaaaagaaatttgtcccaacagttaatcgagactgaagggaatatgtgggccatcatcgatgagtgcaaagagaagctaaatctagcagcgactcacgagcaaaggctagaggatgagtacgccaagatatcagc

SEQ ID NO: 211739 - DNA, 451 bp, Glycine max
  unsure (1)..(451): unsure at all n locations
ntgatggtgtcgagaagaaatcacatgtgtgtcatcatcaaaaagggagagaatgtgaatgtatgtatacatgattntgatgatgtcaaaagaagaatcaaacaaggctcattttgcttcaagattaatacaagattgtttcaacaaacaaagccttgattcaagatttcttcaagatcaagccttgcctcaaaatgaaaagatttcaagtcatccaaggcacatgtaatcgattaccaatacatgtaatcgattaccaagtcacatgaaagtgtgtaatcgattacacttcatatgtaatcgattaccagagactctgaacgttgggaattcaaattttaaatgaagagtcacaactgttcaaaaaaataattgtgtaatcgattacactaactctgtaatcaattaccagagaggattnntcaggaatatcgccaacagtcacatctta

SEQ ID NO: 211740 - DNA, 447 bp, Glycine max
agcttctcgggccattcctgcgaaggcaaactattggaatgttagttttaccagtgggacattactcttaaagcaaaaatggcatagaacctcctcccataaatacaaacatcaaggtaaatttagagcaagcttatgcgcatatttccttacaaacgttctcttgcacaagacattctattaaccgaaaaaatgcacccatatacaatcaaggcagcttcgttacctagattatttacacgtacttccaaggtgtatttgttacttacatcacacacatctccttggctaaattcacatacatgcatactcaaagcattttggggtaccaaaaattgcacatgtgcacatcttggtatttctaatacctatacatacacaaacttcatgatgaatcttgactatctacacaataaggtgctacatttcatgctcttttcaagtttt

SEQ ID NO: 211741 - DNA, 439 bp, Glycine max
  unsure (1)..(439): unsure at all n locations
catgcaagcgtgttcgcacatcgtgcgcgtgtatgacatccactccacattgtntgaagtacaggagaccttcaatcctattatgcaacgaggcggacaaaagtgggcagctaacttgaacggtcattattgtcaatgcggagggtattctgcgcttcactatgcatgttcacatattattgcagcttgtggttacgtgagcctgaactactaccaatatatagatgttgtttatacaagtgagcacatcttaaaagcttactccgcacaatggtggcctcttgggaatgaagcatgtattcctccttgtaatgatgcatggacacttatccctgacccaaccacaattcgtgcgaaaggtcggccaaaatcaacaccgattattaatgaaatggattgggtcgaaccagccgagcaccgaataaatgcagtatatgtg

SEQ ID NO: 211742 - DNA, 436 bp, Glycine max
  unsure (1)..(436): unsure at all n locations
agctngaaggtaaacaagatgccttggttaacctggtaacccaactggtcatgaatcaaaagtctgcacctgtcaccagactctgtggtttatgctcctttgccgaccaccacacagacctttgcccttctatgcaacaatctgaagcaattgaacagcctgaagcttatgctacaaacatctacaacagacctcctcaacctcaacagcaaaatcagccacaacagaacagttatgacctctccagcaataggtacaatcccgggtggaggaatcatcccaaacttagatggtcaaatccttcacaacagcagcaacaacaaccttattttcaaaatgttgctagcccaagtagaccatacgttcctccaccaatccagcaacaacaacagcaacaaccccagaaacagcaaacagttgaggcccctccgcaacc

SEQ ID NO: 211743 - DNA, 309 bp, Glycine max
agatttaaaattttcaatgccaattacattattataagtgatattgaatacctcattaaattatatgtttttaggaacctaaaatatcttattagattcattctaatttatcttcattaataatcattagcttacagtggtcttagctgatggattatttaaattagttctagtgagaatcaagacctacattgttttgttaagttaaaatcattctcaattactatgcgttgaaacctgagaaataagctatttatacattgttatgattcaatttaccacacttatattctatttaaactcgattta

SEQ ID NO: 211744 - DNA, 444 bp, Glycine max
agcttaaagtatgcccgagtcattcatccctatgagatgttgttgaagtattggtgatcagaattgccattccttggattatagggttgaaccaagctcatgcttttacaaaaaggttcatcaagtcaagttgaaatatggaagtaaccgtcttgcaaaattggggcaaaagatgaatcgagtcacatcactgcttcatctactgccaaacatatttaggattgttgatgtccttgttacttccagtttcactttgacaaagatgtcatggaccatgttgaaaatctaaactgattcaaccccatatcctgtgtaaaaattcgcaatacttcaactgtacaccattcgcatacatccatgcttttcattggttgcattgctcattgcattctttcctctgaaaataaaataaaataaaaaatgaacttaatcattgttatcaaa

SEQ ID NO: 211745 - DNA, 469 bp, Glycine max
ctgaaactaagcctggagggatgctcaatggaggaaaagaaagagggagagatttatagttgggggagcaccaacatgaacgaataatagatggagagaagtggcactctgaagtatgtcttacaagactctcatttatcaaagttacaacaagttttacacatgcttctatttatagactaggtagctttcttgagaagctctcttgagaaaacattcttgagaagtttctttgagaaaacttccttgggaagctagagcttagctacacacacccctctcataacaaagcatacctccttgagaaactttccttgtgaagattccttaagaagcttgtgcttagcctcacacaccctcttattatctgagctcacctccttgagatgagaagctagagcttagcttcacacctccgataattagctaactcactcccattaccaaggcatgaaaaacaaaaaattcc

SEQ ID NO: 211746 - DNA, 445 bp, Glycine max
  unsure (1)..(445): unsure at all n locations
agctngattngaacctgacttattattgagttatgtctactacaattgtataaatgactttatgctcgtccaaaagtacttacaaatgtatgtccttgtctgtttttaggtggtactgttaatgagaaacctgtgcatgattntaactagctgagattattagcatcatgtaagtattgatggtctgacctttagattgctataaatatgtagcatgtcatgctaagtaattgcctgccctgtataagcaccattagagttcattttggtaaagcgttatgttggtttttggtctgtaaatatgtagtatgtcatgctgagtaattgcctgaccttttttttaaaaaaaaattgctaaacactaaattatgttgccatactattttcagattccattaggagcgattttagccattgttgatcctgtggtcattgctgtttccaa

SEQ ID NO: 211747 - DNA, 441 bp, Glycine max
  unsure (1)..(441): unsure at all n locations
cagcttgccacgcanaaactgtcttatcaaattgtgttacaacattcttatatataaatgttggattttgcataatagtaataaattcatgattaagcattcatattttgaacattgtgagtgtgtgttaatactcattggacaatangtccttggatgcaacaatggacgacgtatagaagttaattcattcattaacagatattattccatggcaatttcttaacaaaatcaacctttcttcaattaagggttttgtgaaaatgtcagcaagttgatcattagtgaatacaaattgtaaatccattgtcctgttcagagcatgatctcttattaaatgatacttaatttctatatgtttatctctagaacagaatgttggattnttagaaagactaataccagctttattgtcacaatagatggngattntaatctcat

SEQ ID NO: 211748 - DNA, 379 bp, Glycine max
gatcagtacaatgctgatatgggtctccatcgttctctactgcagaatatgtttaagaaagagggtgaaacctttaaagaatatgcgcagcgatggagggatttggcggcacaagtagctcctcccatggttgagagagagatgatcaccatgatggtagacactctgccagtgttctactatgagaagctagtgggttacatgccgtccagctttgcggatctggtgtttgccggggaaagaatcgaggttggattgaatagaggaaagttcgattacgtttcctccacaaacgtgaacgccaaaagaatcggggcaacacgggcaaaaaggaatgaatgagatgcccatgccgtctctttaacacccgcgtgggtca

SEQ ID NO: 211749 - DNA, 368 bp, Glycine max
  unsure (1)..(368): unsure at all n locations
agcttatgccacaattccctctctttcatgctttggtggnggtggagatcgccaccctagttcacggcggatgagccggcatcaatccccttaagcttacctttatgctgagactataccctcctgagagtacaatctccaaacccaatagagatgcagttgaagaagtccctagagaagctattgctgccacacccaatagatctagatctcgaaaccttgcactcaaaagaagaagcatacgcagaagtcatttctcttcctgggactaaaacccctaatgaccaactcctcgtcatcgtcgaccaaggagtggtttcttcatgacgcggtgatggatattttgcgcttgaaaatgatattatggg

SEQ ID NO: 211750 - DNA, 443 bp, Glycine max
  unsure (1)..(443): unsure at all n locations
agcttccacaagggaaagttacatactaatattttacagggtgagagggctgattgggtaatgctacagtggaagttatataaaatttcccccaaagtggcaactcaaatatttgatactccattacaagcaagtaaaactaacagggtctagactaatgcacgggaaaaatacattggttgaattcctccctttttgcacttctgaagcatcacctaaaacatggttgttgtaacagattgaaatcaactaaacagactcttaacttcaatagtatcacatctaaaccagactttggcatctctatcatatcatagcaaggatatattaatattgtaccactactaagaaattcatttttaacgacgttctatgacgattccataaaatcattntaaaatattagactaataattntataaatactaaattntaaaatggag

SEQ ID NO: 211751 - DNA, 442 bp, Glycine max
  unsure (1)..(442): unsure at all n locations
ntgcactgtcatggatcttctcatggcaatatcgttacatcaagactgaaaagacaaaccaatatccatcactacaaagacacgcatttgtaaaatggtggacacaatttgactcatccaaagcggatccagaacaagtgaaactctggttccaatcccatccagaattcctcaaagcagctaatccagaaacttctgtgtttntgaaccaaaagtctcatctggcagcatttttagcaggatcgaaatcaaaggaggtcttagctaaaaatctaaaggaagttctgcaaatgttacagcaggaagaagaaggttcatcctcaaagaaggaagaaacaagttctgctgaagaagaagaagaagaagaccccttttaccaaaacgaagatgattgttttggtatctgtttagataaatttaatntcggcacaaaaccgctgtt

SEQ ID NO: 211752 - DNA, 434 bp, Glycine max
agcttggtaaatgggttttctgatgaatatttatgcgcttcagctgcttctttctacgtggctgtgaagattaactaaagtagttgtgtgctttgtgaaatgggttcaaggtcttttggggctaataaggtttgtggagagagaagatgatcgctgtgctgaacatgattattgatgggtagcagacgtagaacggttaacgttaacactaaggacactaacaaggttctgaacgggatgccaagctacgctcctccattgccttcttctaattccatgtaaatttttctgaggacccttatgttgtttaatgtctatttcggttctatattggtcttatgatagctttctgcgatcttgttctgctctgtatatgactctcatgtgggcagattatttatatggcgccaatatttgctaagctagtataactc

SEQ ID NO: 211753 - DNA, 366 bp, Glycine max
  unsure (1)..(366): unsure at all n locations
cacctgagtgtcaaatgtgacttctttttattaaaaagncaatcttaagccaaatttgggcaagccaagtttgggctttaagtgctcagcttggcttgactcatttacaccgctacttaaaagtatgctattgccaaaaagcaaatcatctacaataaacaagtaatacgctttcctagttttcaaatttcttgacggaagatatcataatcaagggttgtgtgttgatttcaatacaaaaccaaccagntcacacgatgaatactgaaagtagagtctgaggagtcaaaaatttatgctttgaccgctgatgtatccctatagaagaaaacttgcatgccttccaaatgatgacctttttcaaat

SEQ ID NO: 211754 - DNA, 421 bp, Glycine max
  unsure (1)..(421): unsure at all n locations
atcttagtcatatgcacgtctcttaattcatatacaatgttcattgcatagactccatccaaggctgggctcgcgtgccattagagataatgcatctattagaataagctcatttaagttgtgacattatgtttactacaagattcatttgactattaagataacattgattaatacttaggtgttcgtcacatgttgtacttgtgcaataataccttattagaattagtagctaataattagattattgacatgaagagaatagaccctaattagatggattgtaagatttggacggtccaatatgatatatctagacgatataaaatactgatatatttgaggataatcgaaatataaattattgatggacttatgctttatataaagtgaaatanaacatacttggtcaaactcaaat

SEQ ID NO: 211755 - DNA, 174 bp, Glycine max
tccaaacctaatccccctcattaagaactagctcatttcttcctctattgcccttagttgaatacacctttgtttggttctctattttggtcttaaccctctcatgcaacttctttacaaactttgacctagattcccctctcttatgtataaaagaagtgtcaagtgggaggg

SEQ ID NO: 211756 - DNA, 431 bp, Glycine max
  unsure (1)..(431): unsure at all n locations
agcttgcagactataccttcgaccaaacacagtcgtgtttctgtctcgacccggatttaaggcgggctgcagcaccggctccgcttccctaaccgtactggaggcggttgccgnggctttatcctctatagttttttggagttttaacatgacctctgagatggaagccatttgatcttttagagccgatagatcggccttcatctgttcctgcatgccctcttcattatccatttttctggatcgagtgttataggggtgccttggtgttttcttagttatgatgaaattcctaaagagataaacaatggtgagtatgccaccaaaacatgaatatgaaaatgaatgatcggaacacatggatccaccctaagggttttttagataacatgatgagttcagaacttctcattttataaaaagaacaaagc

SEQ ID NO: 211757 - DNA, 365 bp, Glycine max
tatccaactggccatgaatcagaaatctgcacctgtcgccagactctatggtgtatgctcctctaccgacaaccacaaagaccattgcccttatgtgcaacaatctgaagcaattgaacagcctgaagcttatgctgcaaacatctacaatagaccttctcaacctcagcagcaaaatcagccacaacagaataactatgacctattcagcaacaggtacaatcccggatggaggaatcatcccaaccttggatggtcgaatccttaacaacagtagcaacaacaacaaccttattttcaaaatgttgttggcccaaccagaccatacgtttcttcaccaatccaacaacacaacaaccgctaca

SEQ ID NO: 211758 - DNA, 403 bp, Glycine max
agcttatttatatcgatacgctcgaaattaaacatcgaaaactctcgggaaattcaaatagtcataactattcacacggatgtccgattcgggcgcataatatgtcgagaggatcgaaattgaacaacggaagctcttgagaaattcaactggtataacttttcacaccgagggtcgaatcaggcgaatcacatattgagacactcaaaattgaacaacggaagctcttgagaaattcaaatgggcataacatttaactcgaatgtccaatttaggcgcattacatatagcgacactcgaaaatgaacaacggaagctctcgtgaaattcaaatggtcataacttttcacactgaggtgcgattcaggtttataatgtatcgatacactcgaaattaaacatc

SEQ ID NO: 211759 - DNA, 204 bp, Glycine max
ctaaaaaaaataacatcatggctgaatgttactggcattgaggcgaccataaggtgcccacgacagacaacaagtcattcaccatatggtctcccaaaaagctgatgactatgttaccaaatgggcccctattaccacttgtactaacctaacttacgccccttttgtatatttacccaactaatattgttggacatccaactt

SEQ ID NO: 211760 - DNA, 447 bp, Glycine max
  unsure (1)..(447): unsure at all n locations
agatagaacaatgtgagtcaactntgatctttgatcaaattttaaatgttggaattgtttttaaaattataataaaatcaaatatgataaaataaaaataaattctatttctgaaaaaaaaagtcaattctactttaacctattgaataaaattattttaattcaaaattaattntttcactactgctaattcaaacacacacttaccataaacacgcgcgttgcactcgaaaatcaattttctcccgctccagcaaaatcaaattagtaaagcgattgccacataaatttatagtaacaaaaaacaatcatcaatgcctcaaagctaaaccccaaaccatcttcttcaccttttctctctgcacacgaatatggcatcaatttgcgacaaagatatccctcttcgactacacaacatcgacgctttcatcgcttcttacagaaact

SEQ ID NO: 211761 - DNA, 477 bp, Glycine max
ccttgaaactcagcttccgagtttctggtgttaaccttgaaacgtgttttatttttctcttcatctcttctcccttagccaaaaagaattcgccaaggactaaccgcctgaattctttttgcgtctctcttcttccttttccaaaagtacgaaggactaaccgcctgaatttttttatgtctcccttctcccttgtcaaagaattcaaaaccatacagtctgagaattcttttgattcttccctttcccatatacaaaagtgttcaaaggactaaccgcctgagaattcttttgtatccccattcacaaagtatcaaaggtttaaccgcctgagatctttgtcttaacacattggagggtacatactttgtgcgacaagtaaagggtacatctactcgggttgctgactgagaacaagagagagcacatctcttgtggatcagctctggtggaggatacatccactatgttcaatga

SEQ ID NO: 211762 - DNA, 449 bp, Glycine max
  unsure (1)..(449): unsure at all n locations
tacagcgacctgagatgcaacttgctagcataacatagtgggcttatgtggctaagttataaaacaacatatgatntatgataccactagaattggtttgtgtgttcatgacgagcaaggtggattggtttaatcaatgacattgtggaacaaccatgctggacgttaagaaatgaaacatgggtttataatgacttcattttgtagctacaataaatttgaatcatgtagtggttaaatttacactggtaacatgaatagttggtgagataaatactgcatgtggggacagacaaaattgagaaatattgtcgttgaatgtagaaatattttagttgctcattcatcctatggaatatgaattgttaagaagtaagctgctaatggagttgctcatgagttagcaaggatgacttcatttgttcctagcctatactctattaatcatg

SEQ ID NO: 211763 - DNA, 388 bp, Glycine max
  unsure (1)..(388): unsure at all n locations
ttctataatcgggacaaagtacccaaatttcttttttcacacaaacccaacaagccaaggaagttgcttataatttaaataagcattgaagcaacatgaaatctcatcaattttcacgaattattatgctttccatattgactggacttgtcattntcatacatcaaaatatcagaatgaaaacataatgtgtaagaatggatcaaaaataaagctaatagttgcatggtcaaaaatagataatttccagttaaacataattgccaatgaatgcttagaaaaccaccaaacacaaaaatatgaatgattaagttaaaaaataaaattgattaaacacacatttagcatcaaagatataataataatctattaatacccacctttgctg

SEQ ID NO: 211764 - DNA, 447 bp, Glycine max
agcttgaggaaacactaaatcaattcatagatttatccatgttaaactataggagcatagagtcgtccatcaagaacctagagatacaaatgggacaattagctaaacaaataactgaaagacccactaatagctttggagccaacaccgagaagaatcccaaagaagagtgcaaggtatttttcactaggagggaaagtactaagaagaaaaagataattgagaaggatgtgcatgatgaagaaggagaaaaagataagagtaagaaaagtggtgacgaggtctcaaccactaagaccaagagccagttagctcgggagaccataagagaaataccaccagcctcatcaaaggagacactgtaccctttggtgtcatcaaagaaggataaggaacattatttcaagcagttccttgacattctagaagctggagattactatccct

SEQ ID NO: 211765 - DNA, 317 bp, Glycine max
agatgttgaacaaccaccagaaggtgtggatgttacattgagaagatcaacttaaatacagaaacatgccatttctagtgattataagtgtattacaagagtctcaatgactttggagttcaaaatgatcctaaatcgtttttgccagcaattaacaagtataattctaagctatggtatgatgctatgaaacatgaattggaatctatggtaaataataaagtatgggatcttattgagttgcctaatgggataaagcctattcgatgtaaatgggtgttcaaaactaagaaagattcattatgtaacattgacag

SEQ ID NO: 211766 - DNA, 455 bp, Glycine max
  unsure (1)..(455): unsure at all n locations
agcttgagcttaagactgaattctgaaatgattagtaaagattgaaaagattaaaggctcaattaatgtacattgtacattctgtttttttttccaaatactaaatttaggtcgtatgggtgttgatttgtgttactgatctacatatctcaattgcctagtcgcttttgtttggttcatcatggcatgagttaagttggtgaattaaatagatttcctgccttaccgcttttgacaggcagaatatgaggatacagaaggaacatggattaatgccttgctcttggccattttatttcaagatgcaaatgtcattctatctcctgtcacaatgcgcattataccttctatcgctcttctgctaagatctgatgaagtaattgataaatattntgctgcccagtctatggctagtcttgtttgtaatggtaataagggaatagatcttgccattg

SEQ ID NO: 211767 - DNA, 279 bp, Glycine max
  unsure (1)..(279): unsure at all n locations
cctagcatttgatgcttttgtctaactatctaangcanattctatgcatatgtcttatggcatataagatgtaatttttaaacctttgaattatcgcatcaattcataatatgttaaggtcttgatttgtcttatgacaaccaaagcatatgcatgcataaatgacctctgagttgtgcggtgcgatgttgttggccgaaatgtctcgtgccattgatctgactatagaaggaggctgcgcgccacatgagtgattgtggtggtggtgcacgctggcaa

SEQ ID NO: 211768 - DNA, 465 bp, Glycine max
  unsure (1)..(465): unsure at all n locations
gctcaatacacatagggaacatatagtatagggaagggatntgaagtggctaaatttgagccaaattttagaataggttattatgtgtaattttgcatttgggcctttgtagaccgtattacttgacctctttttgtatgtttgagtctttcatgagagaagtttagtaattttaggccatagtataaatagtctatcttgaactttgaaaagactaagtctcattttattgaaagaattataaacttggtgtgtgagaacctctcttggttcttgagtcttgagagcacttctttattcaagcggcgaatccttctttcaactcatcaattcatcatgaattgtagcgctattcttcatttctagacttttcaattttttaaatatttatctttgctttcgaaccatttcgggtttgagaactacatttggggctttacatcaaatttactattgccaaaatgg

SEQ ID NO: 211769 - DNA, 419 bp, Glycine max
  unsure (1)..(419): unsure at all n locations
cagcttagaaccagaggtacgtttgtgcatgattctgcctgaaacgcataaagattattagaatcagcatacagcaacagaagcaacaaccaaactatcaatgcataaactgccaagtaccagccaaagacacagagacatcctcgaggtgctgcccgttgcttaaaccatcatattccttgatgtattgatcaaaagacatattgacagagaatttgtgaggataagggatattcccttctgccttttgaactgcaagatactttaacctattctcaaggtattgctgcaatgaaatcaccccaaaaattacagaaaaatatataaatcaaaattgtaattaatcaaatattccactgaaatgacataagtggagcattacagaanggttcatatcatcttcatcagcaagagcagat

SEQ ID NO: 211770 - DNA, 401 bp, Glycine max
  unsure (1)..(401): unsure at all n locations
ctccaaagttatcgggatgtctaaacctagaanacgtgtgttatttattcttttcatctctgctcccttagccagatagaattcgccatggactagccgcctgaattctttctgcgtctctcttcttccttttccaaaagtacgaaggactaaccgcctgaatttttttatgtctacgttctcccttgtcaaagaattcaaaacgacacagcctgagaatgcatttgattcttccctttcccatatacaaaagtgttcgaaggactaaccgcctgagaattcttttgtatccccattcactcagcatcanaggttaaccgcctgagatctttgtctaacacattgganggtacatactttgtcgtacaagtaaaggggacatctacttgggttgccgactg

SEQ ID NO: 211771 - DNA, 435 bp, Glycine max
  unsure (1)..(435): unsure at all n locations
agctatccgaagcgatgaacaatggttcctgtatgataatatggtgtancaatctatttacacaccccccacttttctaaatacactcccattttcgtgtttttggccggtttctctccgaaacatccaaaacttgacggattccacggcgatgggtgttaaacattttgaagtggtcaaacgaaggtcgcatgccgacaaacaatgattccgggatgaaattagggtatgacaataaggaattatcatctccttggtgatgtcgtctctaatatttggttattagagatagtaattggaatgttttataatcctgtctaccagcgattgaaatttttgactttgaaagtgacaaatgacacacctgaaacactgctccacctttttcttttgcctgtttatccaatgaccgctacatggacaagatggaagagt

SEQ ID NO: 211772 - DNA, 316 bp, Glycine max
  unsure (1)..(316): unsure at all n locations
actcagcttgaagactcgagaagcttcttcacaatagtttctttcatacttcatatnggctngcttcacacatgaaatttatttttacctaaaattagttcttcttttgcttattttaattgctgaaatttgttttgcttatgaggtgtttgacaaaacgtttataatagaatcaaagtctttttttgtttaattttttacgttcagcatttgtatattgntccttttttggtataaggcttcactaaggtgcatttatgtgtttcatctgaacacgatcttattaaacttgaaggacccgagaagcttattcaca

SEQ ID NO: 211773 - DNA, 435 bp, Glycine max
agcttgggaaagatcaaatatactcaacctaatgctcatgagaatgactatcgcaaataacattaagacatttatccccaagaccgaatatgctaaagaatttatcaggttagtggaagagcactcctaaacaactaataagtctcttgctgggacattaatgagtatgttgaccactatgaagtttgatggctcacgtactatgcatgagcatgtcattgagatgacaaacattgtagcaaagcttaagacctcggaaatgactatgaatgagaatttcatggtacaatttattcttaactcattaccatccgagtatgatccatttcaaatgagctataatactatgaaagacaaatggaatgtgatgagttgcacaatatgttggtttaggaggaaacaaggcttaagatcaaggaaatcactcagtccatt

SEQ ID NO: 211774 - DNA, 199 bp, Glycine max
  unsure (1)..(199): unsure at all n locations
tctagccaaatggacttaccttgaattaattcctttgatatcccctttgagcctattntcccatttcttttgtttgaagctcattacaagccttaagtgaaaaaccatgatatcaccttacccttaaggaattttggagctttggaattgttttgggaataagctgggaataagtgtgtggggggggggggggtttatt

SEQ ID NO: 211775 - DNA, 435 bp, Glycine max
agcttctagccaaatggacttaccttgaattaattcctttgatagcccttttgagccttgtttccctttccttgttttgaagctcactacaagccttaagtgaaaaaccatgatattaccatatccttaaggaattttggagctttggaattgttttgggaataagtgtggggggtttttgtttcattggacaacttgttttggtggctatgcttcatgatgtattttgggccatacttgatgtacattgtatattggttaaatgttggacatgctgaatgaaatgttgtttctcaaaggccaaagagtaaaaaaaaaaaaaaaaaaaaaatcgaaaaaaaattcgaaaaaaataataaagaaaagcaataaagtcgagtgaatatgatcttaaatggcacaagaatgatgaaactcttggttctactcttcatg

SEQ ID NO: 211776 - DNA, 404 bp, Glycine max
  unsure (1)..(404): unsure at all n locations
gcattcgngacctataaatctcagctnttctataattctcaagttgtaaaaggtctcanaatatcatatcttgaaaggaaaaaggcagtgtgcttaagttagatattcatttggtagacgataggctttgttgtgtgcaccttaccttcaacaaatctattcgattggttagagtcaaaagtggcttggtagaaaacaatgcttgggtttaaggatggaaaaatgggttggcccttggccgttaggcccgcctcacttttagtcaaccaaaacagcctgctaaaatttagtggtttgaacatcctggcctcgcccaccgcaccaaaaggtgggatggcgagctgacccaacatctttggcgcctcatgagattacgacgtatgatggaaatgggttaatggggc

SEQ ID NO: 211777 - DNA, 444 bp, Glycine max
  unsure (1)..(444): unsure at all n locations
agcttatcagattttcagatccaatgcttntgaaagaactgcgacaccagagttcacggccaagatgttatcattaaaaaccatgagaaaccaatccccttaaccgaaattgaaatggcatacaaaacattatcctggttggcgtaaatgaagggaagcatcaaaaatagtttcagcctcaaaaagcattatgccaaacaattatgatcttggggaccatcacttgtgtcaagcagtaaaatgctgtatacattcaaacgctgcataaacaggtccaacattttaagcatacaaaactttcatagtagctggnttacccacatactcgtccctaataattatttgatcagntaagatgtaatgagtctagaaagaatatttataacttgaatgaatgtatggctattgcttatctcttctatccaaaatatgatcgaagtaaaa

SEQ ID NO: 211778 - DNA, 440 bp, Glycine max
  unsure (1)..(440): unsure at all n locations
tgcacacaacttaatcatgaatataagctggagcaacctattaataatgacaatagcacagcagtaatatacttgcatgtggaaaaacctataaataatgacaatgttacctgtagcattttaaaaaaataaatagtaatntttatgtgattggattcaaggccaacaggaaaagctataatactaaatagcatgcttcatctcaacaataaatacaagttatggttggtgaagaataactacaatatgtaatatccacctgttcaatcgaaacttccattatacttncacacatcatcgcatcttacatttttgaccccattgagggactgacaatggnggatatattctttggtgtttacctttattctcacgagtcaatgagtcatcattattctttgatagtgcaaccaacaactatcatgtggctggcatcatta

SEQ ID NO: 211779 - DNA, 424 bp, Glycine max
  unsure (1)..(424): unsure at all n locations
agcttattggtcagtagcatccaaaaactatattgttggtgttgtacgtacttgattgctactgcaaattatggttagtacttagtatccttntgtttccgaaggatcaattcaactctattaaagatgtcaaattttactctatccttattttaaagtactaccacatacacctcattttataggttccacacctattcatctatttttaaactcatgacatgaatgtggtgaaaataagttgtatattccttttttagcatatttttgtcaaacatcatttgacaccacatgattgaatttgaaacttaaaacacatgcgggaaatcctaaatgtcttgtgattatagtatgatatttccttcgtctcatantaaaaaaaattatcttcaaataattattatnttaatataataataattaa

SEQ ID NO: 211780 - DNA, 217 bp, Glycine max
tataaaatgaagcacttgacatacacgacatttacgtattgtcactaaattatgaagcatgtcattatatatatatatatatatatatatatatatatatagcagactttgggcttacgttacaatggagacggatccaggggacaaagcatttctgaaacacttttctaattgagagataaataatttattttaaaaaaattaatattaacctttt

SEQ ID NO: 211781 - DNA, 436 bp, Glycine max
  unsure (1)..(436): unsure at all n locations
agcttgtaatcgattacacatatactgtaatcgattaccagaggagattntcagaanatattctcaacagtcacatctttttaatttgattctaaaatggccatcaaaggcttatatatatgtgacttgagacacgaatttgccaagagtttttcagaacaaaaaggtcttatcctcttaaaaagcaaaatcgttttatcctcttacaaattccttggccaaaacacttgtgattcaataaggaattatttgagtgctcaaattgttcaatctatctctttcaagagagatttcttcttctcttcttctttattctgaaaagggattaagagaccgagggtctcttgttgtaaaagaattctaaacacaaaggaaggattgtccttgtgtgtttagaacttgtaaaaggaatttacaagatagtggaactcttaag

SEQ ID NO: 211782 - DNA, 382 bp, Glycine max
  unsure (1)..(382): unsure at all n locations
ttgcttctacaaccccaagagatcgttaatggtccaacgccttaacgtttctcttctttcacaaccaagagatcgttaatggtccaattccttaacgtttctctcctttcaaaagaatcaaaagatcgttttatggtccaacgccttaaatgacctctgttcaattaaaatctatcttgcgaaaaaagataaaaacaacttaaccaacatttagttctgaaagaactacgtaggtctgattntctcatcgcaattgaggaatacgtaggagcaagggaaacacctttgtcgaccacaaaaagataaaaatacaaaaagggccataaaaagttaaaaaacataaaaaggggaaaatacataattttgaagtcatatttgcaca

SEQ ID NO: 211783 - DNA, 405 bp, Glycine max
  unsure (1)..(405): unsure at all n locations
gctcctgaaagggataattcacattgattatttttgaaattgggctgaatgatgctgaggagaaacaaatcaccaatctcacaatcaaggaatggctggatgagcttagcatgttgtctttgatgttgatgatttgttggatgaaatcaacaccaatgctttgcgatggaaactagaagccaattatctgagttaatccactagttatcaggtgctgaacttcctttcttctcctttcaactagtttcgaaaaggtatccaattgaaaatgcaagcattgtttcgaagattagaacnaatttccctattgaaagacatccttcaactgaaaaaaggtgtgttcaacagtgtttggagtggaattcctattagtcttgtggtagatgaaaaaatatctatggcaga

SEQ ID NO: 211784 - DNA, 335 bp, Glycine max
  unsure (1)..(335): unsure at all n locations
actcctgaaactaagctttctgatgtgttttcagatatggatcatagcttctcatattgtactattcaagccttaagtaacataagcactactcatganttctagggtgaaatcactggtgctggcagcttgaacatacgaacttgttaacattactgggaattggtcactacaaattttgagcttgaatttttactgaattttctagacatctggaaaaaaatagaaaaacatgaaccaagtgatttggataaatgaaaaaaataagaaacatcatatacgtnggcaggaaaaatcaggtctataattggtgcctattttataccaatcttaat

SEQ ID NO: 211785 - DNA, 447 bp, Glycine max
  unsure (1)..(447): unsure at all n locations
atgcaagcttctaaggaagctacgctagnctataatagtaactnggtttcacttgnnnngaacttgatgaatgagagtcttgtgagacacaactaaaagttcaacttctctccctttntcttccttcaattatgtgctcccccccccccccccgactctctttctctccctctttcttttactccattgaagcatccttttcaagcttnttatccaaggctcatcttggtggtgaagctccttcttccatggcttattccctaggggatggcgcctcctctcacctattctactttgtcttccgctgcatctccatgggggaaaataaccattgaaggacctcattgaagctaanagatccagcctccatagaagccccacaagcaagcttccatcatcatgatatgcacactcgattagaggctgtcgtcccttgtgacggacacg

SEQ ID NO: 211786 - DNA, 376 bp, Glycine max
cgtgagctccaagtgaatgtgggccactggggatggtacgtaattgttgatttgtggaagtgggagaagtgatttgcgccatcgcccggtcgccacctaataccacatatgaccggtcccataatccaacaagcttgatgtgagaaagcgtggaagagtcagtcttcctactttcgtttgtgaccacagagtgatacctggagatatgtcgcgggggtcaagagaccttggggacgtcatgtggggtgctattgcccaaaaccaagcttgatctattccgacccaacccgagcatagtcagtcagtgagaacctgttgacgtcctaaacaagcgagctcttggcagtcaaccaataaagaacacaagtcacatact

SEQ ID NO: 211787 - DNA, 399 bp, Glycine max
  unsure (1)..(399): unsure at all n locations
tgcacccaaattctgactgttgtcgctcttgaccctctggctccaattgaagaaagatgagactatggttgcaacgcattctcttcagtaagaatgattttgtatctattgtgtccaccactccttaccgtggtcaccaattcacttataggtttagacactcttttaccatcacatctcactaggattgcatttatggatgcctcctcttcacatacattttttgcatggttcataattgatacactgaagaggttacaaaggtcttggctctaagcctcttgagctcttaaatccttgagctctaagccccctgagctctaagctctactagttctaatncctctaagctctaagcactcgttggatgcatttaaggacgccttatcttgactaaca

SEQ ID NO: 211788 - DNA, 456 bp, Glycine max
  unsure (1)..(456): unsure at all n locations
agcttgggtcccatgagagtgaactgaagtcatggagacagatatttttgttcttatggctgaatccaagaggcagatcgccatacattggggtccatggctgaggcatttgaaattttagtaattgataagtataaataaagaggatatatgaagcgaaatttgaaaattgctagcggggcaacaggttcccaataggctntataattatcaatcatctgaaatgacaantttttcatattctgaatttaataatacaaaatcagtgattaggaattagagtgatcatgaaagaaacttagttaatgaacagtgacaaaaataaaaagaaagaaaaaatcaatcaagatagcttagaacactttaagaatagagaagacctagaaatgacttcttaggaatggctccacaactgcacagataaattaggtggtttctgaaccttctattgagatt

SEQ ID NO: 211789 - DNA, 373 bp, Glycine max
  unsure (1)..(373): unsure at all n locations
tctaagcttgtaaataacaagaaagatggctgtgctgcttaaaatagatgcacctattttggngtctctatgtatagtgtatagggaatattaaatgatgaggatataatattaaatttgctcaattttttttcttaaaaagaaggttatggataatattttctgtgtcgagtgcccaccaatataatttatataacatgacttttgaccaaatgatgaagtagtcgttcatatatggagtttaccaatatatgtaatttgtacataaatatgaagggaccactcaattaataatgcccttatggcctaacattgtagttgtttaaacagcaggaagcacaagtaaacatagaaagcccttattaaaagagac

SEQ ID NO: 211790 - DNA, 435 bp, Glycine max
  unsure (1)..(435): unsure at all n locations
acctgcggcatgcagctcaaaatgcgtgggccctngagcgttctcttgtttttttaataattcaccncggccatcaagtggaagtgcacgtctctcctctgggctaagtgcattatctcagcccataataatacgtctctgccgagcccagtgtgaaaagtcatctacggactatacatccaatgtggtactgattgatccattagcaagtctagcacccatcgaagacattctatgggctcgtgtccagcgtggtgaatctggtcagaagtttactgttggcactgaaaattctgaatctggaacaacttctgctggggcaggtggttcatctccttcctcttatactcccttcactgcccatcggcattctactagaaccagatcatctgttaatataggagatacacctagaaaagaaacatctcaagacaa

SEQ ID NO: 211791 - DNA, 384 bp, Glycine max
  unsure (1)..(384): unsure at all n locations
agctagcagcttanatactataactgacaattttgtctgaccaanaaanatagatattgttgaggattgaggaatgacacaccttctaatctcagattcgagtcgccttggatcggccatttcaagtgagtccaacagcaacatgcattgtgatctggtagttgattgccagctctcaccaaaaatggcagaggatcaaaaggctccagtgacccctacaacattgggaattcaaagtatgaattccatgaattaacatttgataaataaagaaatttttctttggcaataaaggaaatagagtgcatttaccagcagactatacgaacaataacatacgtttttgagaaaataggttctttttcaatcctagtcaacaccttg

SEQ ID NO: 211792 - DNA, 442 bp, Glycine max
agcttgatgaggttcgttgaataccatggaatgttcgatcttggttatgagcctacacatgccgacaagagaaggatcaccttataaaggaaagaaagaagcctatcccatttacaagggtggggaccacagatggaaagagtccctatctaccacattagcaaaagctttgtcagcgagggatggatgcatgagaatcacgttgctgtgctagacaaagaaaccaaccaagagcagccaagttgggtgcagccatgctccccgggtttcgatttgaagaattggcggatcatggagcgacccgagattttggtgtcaaatccaatgtaatccattagtttgaaccctattgttgggcctaggctttatggtctacttcttttgtgggcatatctctctctttaatgctcccgcaaatataaatatacaaccttttgttgtt

SEQ ID NO: 211793 - DNA, 392 bp, Glycine max
tgctaacgtaagaaggtcgcgtattttgtgatcggtattatatgcatatgttatgcaacagatttttttattactctttccaaaatacattatccaatttagttttttttcaattattggttaaaattcacgtacgacttactaaaaaggtagggtttaatatttatctggcgaggttaaaattattgcgaattttgactaatataatatgttagaactttctgaccttaatatcaatgttgctatttctttcattttaatttaactctctaatcaagattgcatatacattaagaacacttatattttttctattatatggcaacctgaatgtttatttaatcaataatgcatctactctctaattaaaacatttagttaaagaattttat

SEQ ID NO: 211794 - DNA, 442 bp, Glycine max
  unsure (1)..(442): unsure at all n locations
agcttattgggacttgtaggatnttatcgtttgtttatcaagaactatgccaccattgcagctcccctcgtaaaggtgaccactatagatccattccaatggacaactcaagctcagaccgcctttgagcacctcaaagtcgccttatcgacaactccgatgctagctctttcggattatgatggtcctcttacagtggagtctgatgctttaggggtaggcatgggcgcgatcttgtcacagcacgaccaccccatcacattttttagcaagccttttagtcccaagcttttgcgtgcttcaacctatgtcagggagttgtgtgccattacgacggcagtgaagaaattgcgtcaatatctggtgggtagcagcttcacgatcatcaccgatcaccgtagcttgaaagaactgttgactcatgtgattcacacacctgaac

SEQ ID NO: 211795 - DNA, 388 bp, Glycine max
  unsure (1)..(388): unsure at all n locations
taagcttgactgagctcagagaatgaaatgtgccctggttgagnncaatcatctcaatatcttgaatatcttctttcatctttacaacatcatctctaacttctttcataatctttcatatcttttacagaatttctgagcatttctcttattttctgaaagtttttttaacacttcttttccagaaagttctttgtcaaaacttggctatcatcttttcattctttctccttgccaaatacgaagactaccgctaatctttggtctctttctccttcaaagatcaaggactaccgccgaaatttttgattcttccttccttagcaaagattcaaagctacacctggattctttgttcccttcaagatcaaagataccgctgaatctt

SEQ ID NO: 211796 - DNA, 444 bp, Glycine max
  unsure (1)..(444): unsure at all n locations
agcttgagcctccaagttcaaaggaataatatgttgttttcacagagtgactctaatgtttttcatttcactggtgcagcattaactatgggcttaacattctacagggcattcaaaatgagaacaaaaactcaaaaaaatcactggaagcaatttaatattagatgttacaaatataaacctttctccatcatattgtgtggagatattttgcattactactggtatccatctagtttctttaccttgtcatgatttgggcactggggaaaagggtgtttaaaataaatatgacatgaccccccttttccccatttacctgcattttattaatttattntcacggaaagaccttattggtggagggcatttgtaatccctgccttgcttgtgaaaccatccaagcaatgacagaaattatatctggaggttgtgttgggggtg

SEQ ID NO: 211797 - DNA, 331 bp, Glycine max
  unsure (1)..(331): unsure at all n locations
tttcgcctccaagngaacattgaagattcaaccttatctttcagtctaagngcttcatgttcagaacttattttgagacagtcaaaaaggtgatcacgtgagaacttgtctgcaaaatacatataacggtaaattgtgttccctagacttgttcttncactctaatgttatagaagagaaaaattagttgaaacatgaaaacatactactcaatgcgttctatgcaaccaaattatttgtagtgatgagtgatgacctaagcttggttcactttcatggttacacttattctcctgcacaaccttaattttagttcttttgggataaattc

SEQ ID NO: 211798 - DNA, 300 bp, Glycine max
ccggacctaagcacgagctcactgccgaaattcttccttttataagccaagggttgcttttgtatctttacagtattaaggcagcgatcaaatctctggaagtgagtttggaagaattcccatccccccccaatatggaaaaccaatacgcgtatgttacgatgtgggaaatactaaatacaccccttctggaggaatttctttcttgaaagaccggcatctttatggacgaagaaaaggatcatctctgcctttctacttttatataaagtctccaaaggtaaactcacattcctttta

SEQ ID NO: 211799 - DNA, 339 bp, Glycine max
cccccggagaataaggtccatgagaagagatgagctctgttgggactaataataatacctaaatgaatgactaactattatcggatcaaacatgagaagtttgagtaagtattgattataaacggggtaatgtccctacattaaactgggccctcattgacagaaaatttctttctatgctacacaacctgaagacaaaaaattctatagagtgaaattggttcttatcttcataatacagtcattgggataacccatttgaaaagtacatgttatcatattggaaaaatctgccagaccattgtgtcatcctgcaactaggaaccttaaaaatacttt

SEQ ID NO: 211800 - DNA, 429 bp, Glycine max
  unsure (1)..(429): unsure at all n locations
agcttaatctccttcaactgcacaaggctcttaatatttgaagagtatccttgtggaaccttcacctgacgaagacactgacaaaaacttatcttctccttcttggacaaagtatggcaagctgggggcaagtaaattntcttcccatcagaccttggatgcaactatgctcttatacccatatcagctagatcttgacgggtattcaagccatccttcgtcttgccttgaatgttaaggagcatcccaatcacactgtcacaaacatttttctccacatgcataacatcaatataatgtctaacgtcaagatcacaccagtacggaagatcaaagaaaatggacctcttcttccatatgcaactctaactcttatcccttctttgggtattcgcaaatacagtgttcatgtgttgaacccgctgatat

SEQ ID NO: 211801 - DNA, 424 bp, Glycine max
  unsure (1)..(424): unsure at all n locations
tgctaactcctagaagctactaatagtcttctatactnnttgtggtgggccattctcggatggccttgatnttcttagggttcacttggaccccatttctaccaactacaaattctaagaaactatattatctacataaaaggtacacttctctatattagcatagagagtaattttcctaagaactgaaagaactttccttagatgtcctaaatgatcatttaggctcttactgtacactaaaatttcatcaaaataaatgactacgaatcttcctatgaaattccttaagacatgatgcattagcctcataaaggtgctcggtgcattagtgagcccaaaagcatcactagccattcatacaaaacaaacttggtcttgaaagcgaattttgactcatcaccctctttcatactgatttgga

SEQ ID NO: 211802 - DNA, 432 bp, Glycine max
  unsure (1)..(432): unsure at all n locations
agcttatctntaagcaattgagttgaaactgttatgctctaatatgcttctaggatgaaatgctgtcattgttcttaatgttttgataattatattataaaataagatctccatttatattagcaataccaatgcaaaacaagatcattttttagcttggtgaaaatgctttatttttatgtgtctaattgattatttggtatacggaattgcaatgattaaggcttttttaattatgtgattatttatttactattttcattgttgaattctgaccaggatttataatgtaagtctcatacgagacattaggttcaattatatttgaatatatgtattgccactcatgaaaaaaaagcaaaaaatttaaaaaaaatttataattctacatcggctatacagataactgatgtagaatgctctaccatgggg

SEQ ID NO: 211803 - DNA, 452 bp, Glycine max
  unsure (1)..(452): unsure at all n locations
gcttaaatgggctagtaagaacagctgtggtgagttatttatatatgggattntcagtgggttcaaacaatgtggacattaatttcctccaatacgcagatgacacaatattcttcggggaggctaccatgatgaacatcaaagcaatcaaagcaatcttgagggcttttgaacttgtatcgggactcaaaatcaattttgtaaaaagtagttttggagcatttggtatgtcaaaacagtggaaacttgaagcagccaattacctcaattgtagcctactgtcctttccttttacctatctaggcatccctattggagctaatccaagaagaagttgatgtgggatcctctaatcgccaagtgtgagagaaaattatcgagatggaagcaaagacacatttcttttggggggagagtgactctcataaagtctgtcttaacatccattccta

SEQ ID NO: 211804 - DNA, 452 bp, Glycine max
  unsure (1)..(452): unsure at all n locations
ttgaaaagatatgactcttcagaaatataattgtgtaatcgattacaagaaaactgcaatcgattaccaaggagaaaatttcagaanaactttttgaaaagacacatctcttcaaactattttgaaaagacataatgggcctacatatgttgtgtgtgtgtgtgtgtgacttctaaaagtaaaaaaagagagattatttaaagaacttaattgtcaaattctctctaaacaattattgaccaaacttttgcaaattgattaagaatatcttctaggaacttcaattgtatcatctactccaaaggagagaaatctttctgtatatctcatanactcagttgtaataaaaaaactgtttgtctcttggcttgtgagaatcttgaacacaagggtgagggatcgcanggtgtgttcaaagactttaaagggattacagacatagtgaaaaatct

SEQ ID NO: 211805 - DNA, 320 bp, Glycine max
actctcatttgggggatgaaatcattcgaatgtaaaaataaggttattcataacacaccaacacattattttatgttaaatactaagaaaacaatatctgttgtgttggtacatatatgtccaaagcaatgaagatataggaatagtgagaatgctctttgtcaaaacacgaaaagatctttgcgataattctacgacttgtgctcttttataatctaagacttctgaatccaacacaaaccattaatattttggagtcacaacctctctacagacctgagatagtccctctgaatctgttatatattcctgacttgatg

SEQ ID NO: 211806 - DNA, 357 bp, Glycine max
  unsure (1)..(357): unsure at all n locations
actagctatccctagtatgagccgtaaccacaagttgttttttatctngattcttgcataacagctaaaaacttcaagaatagatatggcctcatctaacttttcatttcctgaggtaaattctattaataggcctcttatgttcaatgatgacggttatcattattggaaaacccgaattgcaatctttatagaagccatagaataaaagatttgggaaagccattgaatttgattcacttattcctaccatggtagagagaaatgcgtcttctaaaaaacttgagaacagaatatgttgtgaaggaaagaaagaagattctccttaccccaaagccgatgcgatcatctggccat

SEQ ID NO: 211807 - DNA, 452 bp, Glycine max
gcttgactcggatgtccgattgaggcccgtatcatatcatggcgattaaaagttgaaatggaatgcccatgcatattcggacggccataacgttcgactcggatgcctgatctaagctcataatttgttgagacgcacttaggataaaaatgaagcccatcgcaaatacaaacgaccaaaacctttccaccggatctccgaataaggcaagtaacctatcgcgacgttcaaaatttatcatggaagactcgggtgaattccgacgggcaaaacatttgactaggatgtccgattgaggcccataatatatcatcgccctcgaaagtagaaatggactgaccacgcatattcgaacagccataacatttgtctcagattcgcgattgaagctcataatatatcgagacgctcttagagaaaaaatgaagcccatcgcatatacaaacaaccat

SEQ ID NO: 211808 - DNA, 379 bp, Glycine max
ggtctctgcagttcacggagacctgtaccttcatcagggcatcaaaccccctactaatcgagctttcatcaagaagtactgcgtctccaggcaggcgcaaggcgaaacaccacagcagcctggggatggctggcagcgggcaacaaacgcaccgccatcacctctagagttcacctttgctcatccacaaaaaggtttgagtattgcctacaccacatggccgaccaataggcgaccaagtccaaagccaaaggtaagcaaagtactaggtcagtgaccgacaagtcataaggcgtccagctcaagacgttaaagaagcgctactaggaggcaacctagtaccttttgaatctatgcttgttatttgatcactttttat

SEQ ID NO: 211809 - DNA, 449 bp, Glycine max
  unsure (1)..(449): unsure at all n locations
agcttgaagtgaggaagtgtggaagggtgagacttcctacttttattcgntgaccacagagtggtacctggagatatgtcgcgggggtcaggagaccttggggacgtcaggtggggtgctattgcccaaaaccaagcttgaccaatcccgacccaatccgggcatagtcagtcagtgcgaacctgtgatgtacctaaacaggcgagctcctggcagtcaaccgataaaagaacaaagaccacaaagcaaggaggcttgtgtggtggctggccagctatggatcttgagtgatatttgggatatggcctctggtaatcgattaccaagggtgggtaatcgattacaaggcttaaaagtgaagacaaaaagttaagatggtctctggtaatcgattacaaacgaggtgtaatcgattaccacgcctaaaaatgggacaaggaagtcgagat

SEQ ID NO: 211810 - DNA, 351 bp, Glycine max
gggtgagttagacatacccattctgttttatggtttttgtgatgatgtttgtgatgtttatatgctgaaattgctaatggaaatctgttagagacgaagggtagaactaacccaaggttagaaagtgagaatgtgatgttatgagtggaaaaagagtgagactttgagagttggaaggctaagtcggaattctgtggtaaatggaggttagagtgagtcaatactagcttgaaatgtcatttagaacatgtgagaaaggttaggctgagctagagagaaaaataaatgaccaaagtgaaccaagagccatttctagggcaaaattgggtgttgaagagtcaaattttgatt

SEQ ID NO: 211811 - DNA, 381 bp, Glycine max
  unsure (1)..(381): unsure at all n locations
acactcccaaattgataaataacacaactaagacacctatattgtgtcaattagtaaaacaaaatctttccaacagctcagctgaccctgnctctaggtactaagattatatatagggagagaactacttgaaaaacacattcagatctttatttctcagcgacattacttaaggaacccagaagactaatccctctataccatattatatactggataaccatttcgtgagaaaccattcgtattttacaggtatgctctgcttatactctgtattcatgtggatccccctgccccaccttgagctaccaattggaacctcattcatctcctagaacatataatgaccaacctgccccagatgtcaatatactttactga

SEQ ID NO: 211812 - DNA, 436 bp, Glycine max
  unsure (1)..(436): unsure at all n locations
agcttctntcttacacgccataccttttctttcttgctgcctgccctagaccctagtacgatgaattcatgaacctctcttganaataattgtcgctactttttaatgtaaaatatctgtatattaaaagaaaatatttaaattataagaaaattaatgattcattcaaataaataatatatgcacgtctagacatagaatggtgttaaataattaaaagggtaatttatcgctcataataattctatctaatttgaataaaattatttctttgttaaatacattaataaataaatgggaaaactctataaataagatcttaaacattattagatgcattctataaaaaagatttatggagaattttgtgaggcgttctattattattattgggatttatttaatatatttcatagatattaactgtcgtacaata

SEQ ID NO: 211813 - DNA, 266 bp, Glycine max
  unsure (1)..(266): unsure at all n locations
agaaatgggggtgaacttaaggataattgagacaaattggaattgggatgcctatgttcacacacaaaanaaaaaagaattagtttaagaaattattagaacgaaattaaaggtatagatatttatttgtaaaagaataaagtttgagcatcttttttaacaagtacacttccgtatactgctccttagacaaatcaatacataaggataataattatgagtcattttcgaaaactgtgaagattttccgttatttatattggatt

SEQ ID NO: 211814 - DNA, 431 bp, Glycine max
  unsure (1)..(431): unsure at all n locations
agcttggagcanattcaaacgaagataactttatattcggatgttcgattgagtcccggaatatatcgagaagctccaaattgaaaacggaagcacatatcaaattcanaggacaataactctttactcggatgtccaatagagtcccgtaatatatcgaaacactcaaaattgaaaatggaagctcgtatcaaattcaaacgacaataactttttactcggatctccaatagagtcccgtaatatatcgcgacgctccaaatttaaattggaagctcgtatcaaattcaaacgacattaacttttaacttggatgtccgattgagtcccgtaatatatcgcgacgctccaaattgaaaacagaagctctaagcaaattcaaacgacaataactttttattcggatgtgcgattatgtcccgtaatatatc

SEQ ID NO: 211815 - DNA, 433 bp, Glycine max
  unsure (1)..(433): unsure at all n locations
ttgagccaattcanacgacaataacgttttactcggatgtctgattgagtcccgtcatatatcgagacgctcaaaattaaatattgaagctctaagccaattcaaacgacaataactttttactcggatgtctgattgagtcacgtaatatagcgagacgctcgaaattgaatgttgaagctctgagctaattcaaacgacaataacttttttctaggatgtctgattgagtcccgtaacatatcgagaccctcgaaattgaatgttgaatctctgagccaattcaaacggcaataacttttttcttagatgtatgaatgagtctcgtaacatatcgagacgctcgaaattgaatgttgaagctctaagccaattcaaacgacaataactntttactcggatgtctaatcgagtcctgnaacatatcgagacg

SEQ ID NO: 211816 - DNA, 450 bp, Glycine max
  unsure (1)..(450): unsure at all n locations
ctcanagtcacctgaggcatgcaagcggcaggatcgacattttttcttcnttttcttattgatggccgatcttattcgacacgaagtacccctaaccaattagccttggtgaaaagtctttaccaattcgccagttcaactataaaactagttatctttttatatctaatcacaatgtgagaaatgttggagagactcaccattgatctcggtttgatccttgtgttggacaaacttgtgagcttcatgggcacaacatgagtcggcatgctctatctatatgcattcaccatcgttgccatcatccggcccatcaaaactcctaatgaggacttgttgaatggcagttatgagtgcaggctgagggataattccaatttgttgcagtacacggggacgaagaatttttattaccactctaaatagggccttatacttctcagtgacacc

SEQ ID NO: 211817 - DNA, 390 bp, Glycine max
aaactcgataaccctaagatttacataaggaatatcatgtaattaaataaataagtaagatggctattttagaactcttaacaattaggattcaatttagaaataaaaacaaaacaaattaaggggtcattcctatatttgatctagcccttaatataagacaccatctaaaaacaattgagggtcctttttataaagcatctttcaatcactatgaaacatttaatttatttcattatttacccttctaaatatctatgtttttcttattgatagcgagatgtaatgtccttaaactttaatattttcatatcatccataacacagtaataattattaacatgggcaaaattgatatattgataatatattgttaaaaaacccaataaa

SEQ ID NO: 211818 - DNA, 454 bp, Glycine max
  unsure (1)..(454): unsure at all n locations
gtcacctgcagcatgcatgctttgcctaanacgatattaatctaccgttctagcttgttaattgggtacanttttttctctttcttaagagtttaaatgaccgttttaaaaatttcgtttaatttgaaaaacttattttatatttagacttttttattctttacaagccctaaagaagagtgatcacctacctcgtggcctagcaaactcacgagaatatgttgttcttgataagaattttgtgtgatggaagattaataataatcattttatataaaaataaggtgaacgtcgattataatattaataatttatattatatttttacaatattctctattagtctcctttatatttttttttataaaaaatcaaatacatttaaataatttaatactacaataatgcaaatggttttatactatcatcaactatgatgagaatcttcaccttt

SEQ ID NO: 211819 - DNA, 461 bp, Glycine max
  unsure (1)..(461): unsure at all n locations
ntatttatntatctatcttccaaattcttgtgcatagactttttttataaangcacgaagtatgaattctagatgtttgcaagaatgcatgggtataaaataatcattctatgtctaacaataactttcctatgaaatcctttctttttgttatattagaagttaccttcttccgagcgtctaacccctaaaaccaattaatgcataccttctttaaatcttaattagaagttatattctgccgagcgttttccctaacaaaatataaagatgaataatgcaagataaaaatagaaaagataatagaatagaaaacaccctcttcattgataaataatgactacatcatacatcgcttgacttttaagtctgtcagggcctaactaattgattaaccactcatggccattgagggcttcacaatggatggagtatggatggagtataacaactggaatggg

SEQ ID NO: 211820 - DNA, 433 bp, Glycine max
  unsure (1)..(433): unsure at all n locations
agctntatggaacattcaaactgagtgtatttacccccaagacctattcgaagagtccttcagagtctcttcttcttgattcaagtccaactcataaaacattntagcacgcagactctatctatgaactatacaaaacacataactcctcaatttttcacaaaataattttaactagtcgtgtctcaaagtaattaaactcgtcgagtctccatagtggatcccatgacaatactcatcatgcattaacttatcacccttaaatagtcttacagtcatgtgattgtatggttcataactcacaactcaatgcacacaacatctcaatacatatgtgtgatctcacaatttagcgcatactcaacttgtcacttacacatagttcatcacacttccncaatcccaagacaacatgttatcatgcctcatgcat

SEQ ID NO: 211821 - DNA, 397 bp, Glycine max
cactaaaatcgtggtaatgatgattttttataaagctctgatgataaataatgaaattaattacctggaagaacccatggatcaaacttgtacaaatcaacttcagcaatgattggaagagagaaatgatggccagcaaccttgcggcaaaggtactgaaccaaaagctcctcatctgtggggtaaaacctaaacccaggaggcaaactcaattgtgcaagagggtctctctctggaactcccattttttgctcaatagaataatatcaaagaaccaagatattgaagaagaagaagaagaagaagtgaacaattagttaaaaagttataaaaccaaatttttcttttctctctttttttttttcttctcttggagctcttctctttttttattttc

SEQ ID NO: 211822 - DNA, 435 bp, Glycine max
agctttcttgtcgaatttcaagcatcgcggtatatgttgggtctcaatgagacatccatgtcaaatgttatagcggtttgaatatgctccagctttcgtgtctctcgatatttaagtcaaaagttatttccgttggaatatccctggagctttcgtctttcacctcgggcgtctcgatatgctatgggcctcaatcggaaacttgagtcaaaagttattgtagtttggattttccagtagactccgtgtttaatttcgagcgtctagatatattatggaccgcaatcagaaatcaagtcagaagttatgggcatcttaatttgctcggagcttccatgttcaatttcgggcgtctcaatatattatcggactcaaacagacatccgagtcaaacgttgtacttagtttgaatttttaggagattctatttcaatt

SEQ ID NO: 211823 - DNA, 311 bp, Glycine max
tttcacaaagcttacgggaagatctgggacctatcctttgtttatgtctccacagaggccattgcctccctcgcccaatattatgaccaagccgtgaggtgcttcacctttggggacttccagttatcacccacggtggaagagtttgaagaaatcccaggatgccctctgggaggaaggaaaccatacctcttctagggattctatccctctttagctagaatttctaagatagtccaaaactcgacgcgggaattagaccacagaaagcaagtcaaaaatggggtggttggagtaccaaggaaatgttt

SEQ ID NO: 211824 - DNA, 457 bp, Glycine max
gcttcatgatgatgaaccaagcaattttgatgatgccaaaagcccaagtgattgattcaagacttcaagaatccaatccaagattcaagattcaagagaagaaatcaagaagcaacaagtcaagacttcatataggataagtattaaaagaattttttaaaaaccaaatagcacagttttgttttacaaaagaattttctcaaattttctaagtaaccagagtgattactctctggtaatcgattaccaattatccgtaatcgattaccagtgaccagtttggttttcaaaatgttttcaaatgatttataacgttccaaactgattttcaaatagtgtaatcgattacactatattagtaatcgattataagtgaatctgaacgttggaattcaaatccaattgtgaagagtcacaacttttcataaaacacattgtgtaatcgattacacctttg

SEQ ID NO: 211825 - DNA, 348 bp, Glycine max
  unsure (1)..(348): unsure at all n locations
cctatcctcttctcctttgccttccgctgcatctccatggtgaaaaatcaccattgaaggacctcattgaagctcaaagatccagcctccatagaagctccacaagcaagcttccatcaagtggtaatcagagcacaagagcttcaagtaggtgctccttaaacctccattaattntttttctttaccttctcttccattggtggttcttcattnttctccatgtatctcctcacatgtcttgttctanatgttgttaacatgattctttataagtttccaccgattaaacttgctatagaaactagaattgattttctatggttcaaatttcttgttcttgttcttg

SEQ ID NO: 211826 - DNA, 338 bp, Glycine max
gaccatcataggtcaccctatttctattatatggaataactcctttgaaccaagcaaactagagaatctcattggtttcttattatgtgatcacccaccagcattattctctttcttcttatattacttagaaatcccagtgcatctaacctgtaggtgtcataaaaaagccaaatttatatgtaactttggccaagagtggaattgatatactaactaataaccttctaagctctctagttgcaagctaacgcctattttcaactgaatttgagcttaataattctatttctagattccataccaatttagaggaaaaaaaatattcttctgcttgc

SEQ ID NO: 211827 - DNA, 412 bp, Glycine max
  unsure (1)..(412): unsure at all n locations
aagagagacatttgatgtaatattggagttagtagtaataaaataaatcatgcaattcaccatgtttacaaaggtgagtcaaactaagatcatgaaaagattaatttaattgataatcttagtttgaccattgacgataagtcaatacaaaaatgaagatagattntgctttcttacctaagaatagattcataaggtaaaactcttaaatttgttaaatatgaataaagagttatgttatttagtacaaaacaattgctacgaatataaatacgaacaattaaaataactaatcattcatggtgggtctttgtaaaaatgttnntttcttagtgttcatccttctctcacattgtcaaccaattggttttctcttttttacaaaagttgtcatactaaacaacacttttat

SEQ ID NO: 211828 - DNA, 468 bp, Glycine max
acctgtatgcatgcatagcttgggtctcctcttgacgatttggatttcttaagagtgcaaaacgttattctagagagtgatggtaaaactattgctatgaacatttaatcggtggttgttgacaactcctagttggggagcttcattcaaagttactggatgagtttagtacaaaatccaacttttatagctgcttttattaggagacaagctaatggaataactcatgatcttgctaaggcaactccattataccctagtctctacacttttgtgtgaatgtatgtatacaggttttaatgatgtcaaagaccaagattgcttcaagccttaaatcaagatcgagaaactaagatcaagagttagataaagagtttatttgttaaaagaatctcacattggataataagggttgacctcaaagcttgtgtttcaaatgattatataaagctctagaagatgttttac

SEQ ID NO: 211829 - DNA, 363 bp, Glycine max
  unsure (1)..(363): unsure at all n locations
gttttgggatttaccaagtacanggagatattcatgttatatggtagttaaggatggagtttgcccgaaataacttattgaaatttgtgacactatcccattagtttcttaagatattggtaatcataatcatgatagagttctggtattctcaagtaccagaaatattcatcatgagggtaagcatcttttgttatttattgagttcactaagttacaagttatagacttatagtttgtcagtatgccttcttgtagcttataacaagtcaaaagcctagcactagctcatggactcatatgaaatccaaaaagttctttgcttgtactgtacctatagcactagtggtatcatagaaatga

SEQ ID NO: 211830 - DNA, 365 bp, Glycine max
acattttttctacttttttttactgaacagtcaatgagccaactcatccctactgattgatcatattgcattctcgatctatgttcgtcgtgtctcagtggttggtattggatctcagtgaaacttggcattttatgcttgctaattgactgaatcgccctctgttgaagagcgagatggtggtgaaaactataaaccatgacatgggcaatatatttgagggcttattacacaccttcatgggtgcacctaaacagacttgtggtagattaccatcaactccaccttgaaaaagactgcccattgtcttataagacagctgaggccacaacatgatatatagatcttgacaataatgtcttaca

SEQ ID NO: 211831 - DNA, 277 bp, Glycine max
gacgctgaaagatatgagcaacactcaaacaaacacattatataataaatagaaaactacttattctattataataaacatttcttaacatataactttaagcaaattggaccaataagtgataagtgagacggctttgagatatataataactttatttgagtcaaatagtgttgaaactccaaagtataagatacatgtgttagttgatgtgttggcaactatgactactagtattgaggatgagtttgtgatgtatgtgttgaggcatataact

SEQ ID NO: 211832 - DNA, 434 bp, Glycine max
  unsure (1)..(434): unsure at all n locations
attaactattactanataaaaacaatacggcatgtgactatatctttttaccccaaaagctcttaccgctaattaagattaatgagtaattttattttaacacatataccttttacacacaccttctgcaacatccttctatgcatgaagtatttgacaaacatgcatttaatgcattcatctatgtgcctgtgggcgctgtagacaatcctttntattaattaacatcgatatacgtttattctgtcacaatgtcatttttttataatggatctaatgcatggctttgaacttgattttttatttgctttacacttaacaatctttgtgaatatttggatcgaaataacctgagaaagattgttgaccaactattagaattatattattatataaaaaaggatattgtgattaactttgttgacttacttttt

SEQ ID NO: 211833 - DNA, 305 bp, Glycine max
  unsure (1)..(305): unsure at all n locations
cacatngctgggaagggtgacctcagnttttaaacagcatttgtcttaccctgaaagggggcatgtacttggaaatgattttttcccaatattctcacactctacggaggaaaggtggctccattcctaaagctgagcacattangaatatgttgccatatgaaatgtctaaaatacttattcgtgccatgttataaaaaaacaatcgttttatcaatgttcagggtgaaatgtctaaaatacttattcgtgccatgttatcaaaaaacaattgttgcatcaatgttcacaatcctcaaccacca

SEQ ID NO: 211834 - DNA, 424 bp, Glycine max
  unsure (1)..(424): unsure at all n locations
catgcaagcttggaccaaccatgtactctggaaggggtccatatattgggggtcgnanaaacggccttgggcccaaacccttgtgcataggaatgtttactctggaatgaaaaggtcttttttgatgccaatcgtgatatacatggacaccttgctcttggatatattgttttccattaaaaaaaatgccaacatatgcattgggatctccacgcaccaaatgctgaacatntttgccatcaacagcatgagcatgaggagcaaaagcttgctcgggcgcctgagaaacaggcttcactatagggttttctgcacctggaaaatgtcctggaccatgtgggaaagcataaccaggaacagcaacgtgcggaggcgtgtccatttgatgataaaatggaagaactggttgattattaaggattgg

SEQ ID NO: 211835 - DNA, 254 bp, Glycine max
gagcaactcatgccgggcaatgccgtccaaggggtcctatcaactatagcctagaaccacacaccacacatatatcattgtgacgaacatgtaaacctctctgagaacaagatctatcaaatcctattgctacgcatagatatcctaataccggagcctgatgaaaagatacactctctatatccatgaaagacaatctcatggatttgagggagggaaccatggaatacacaactgaaccaccctctttacat

SEQ ID NO: 211836 - DNA, 451 bp, Glycine max
  unsure (1)..(451): unsure at all n locations
acgcatgcaagcttgagctgctacagtttagtgtgcaatatcatatttgctacgagaaaggactcgaagccatgataatacgacatatgccccatgacactgtactgttttagctctggcttcatttgcaccgacttcaagtaattccactaacatcaacaccgctttattgacataaagagtctcgaagctatggaagacgcctgtgatgggcatatgatacagaaaggccacatcatcgagggtgatggtgacctctcccattggaagatggaaactgttaantatcttatgccacctctccgcaaactttcttccgtgagatgataacttctattcacgatagttctaanaaaattatataattttaacaataataataaatacttattaaaatataatctaatttaaactattaaaatctctccatttcaaacatagtctgcacatg

SEQ ID NO: 211837 - DNA, 406 bp, Glycine max
  unsure (1)..(406): unsure at all n locations
gacattctgtttactcatgatcaaattaatttaattggtgaaatattttataatttacaacaataagtatcttaacattttcaaacaccaaatttgatattatatattaaggctagttcaaaattgtagaaacttcagcaaaattttgaattaatattctcccatttcatgtgtatccacatagtttctaactaataataagcttaataacatatgcatatnatgtgaacaattaaaatgctaaaaataacatgatttatgttttaatatcaatggcttggagttcttgatctctaacaacgaaaagagaatagcactacagccagcacacctgaggaagagtattcatatggtgcaacatcnctataaatgggatagaagtgataaccccatcaaagtcattaaa

SEQ ID NO: 211838 - DNA, 439 bp, Glycine max
agcttgtgataaagaatagccaaagtggtggtatccacattcttcaaagatctttcaattccacgaattctagcctcaagctctctcttgcgcctgaagatattgccaaaaatctctttgttaaagattttttaagcatctttaaccacttccaaggcccccacaacatttctgattctttgagaccaggcatggcccactaaggacctataatcctagtgggtataccaagcaacttcaaaacaaaatggatgagcagcactagcaccagggaaaccaccacatcttatcatcaaggggttatgatcaaaatgacatttcaacaagacttcaataatagcttatagggaaatgcattctcaaataaagatcacacaaacttctgtccagctttttatgaagaggaatactactcgttcctgtgtggtgtcaagtaaac

SEQ ID NO: 211839 - DNA, 361 bp, Glycine max
agcctacattgtcagctcacactatgtactctaccttcataagatggacgatgtctactaactgaaaatgtgtatccggtcatggtataagagaattgctctcattctcatggatcactgagatacactcgtttataaatatgtaataaatggattggccctacctctatttcacaaggatgaattgtgtgatgttttccccaaaggaaaacatgtagatatctctgtctaagctaaaatgtttttctacttctataccattacaacatgtgcatatacatttattttgtccttttagagctgcggcttggtagcaattactatgtcgttatgattatgcatgacttttctatatatacat

SEQ ID NO: 211840 - DNA, 444 bp, Glycine max
  unsure (1)..(444): unsure at all n locations
agcttctatgatgtgttatttgtaaggggttcttaaattgtgggnntatgttaaaagccaacaaaaatcaatagaatgaaggtgtcaaaatactaaaaatagacgttatccttgtaattaacgattgaggggtgaactctgtggttgctagtgttggctgactgtgacatactcatttttcttcaactgcattttgatatgtagcctttgtttaaatgagttttgatatacttggattttgngggtagctactttgcttctcctcttttgcaatgtcagtgtcttttagtcttaaataatttaatggtttttttttttgttttgtattaacactaaacattgactttcaataattctaatggtggtcaatgctcactcgatgagctagaatcagagaatgagttgatcaccagaatgttgataattgcttatggtttattatat

SEQ ID NO: 211841 - DNA, 399 bp, Glycine max
  unsure (1)..(399): unsure at all n locations
cctggcactacttgtgctattggtgagctaatttcaattttattacttngngtataggaataaaatgatcaaacgcttaaattggatattcaatttggtgggtcactagagctcaatgtcttctaagggctcgtgtaacagatcatatggccaacttcatcaacttgaactaagtttccattgatgcaccacaaattgaagaaagatgatgtataacatttttaacaaaattagagaacaaatgccgaatatagataacttaaccaaggtgagttaacatagttaacattaaggaatggtctctgcttttaaaaactacagttaagggagggccaatgcaattttccactaacaattatacttgtggaattaggaaactaagaagttatatctctacat

SEQ ID NO: 211842 - DNA, 443 bp, Glycine max
  unsure (1)..(443): unsure at all n locations
agcgacctgcggcatgcaagcttacctttaacgtcttcgtcggcctttacgtcttcgaagcgaacctaaactacgggcctccagtcatcaccgtcgcaggaatcgtgtgcttctaaaatggtggacagagaccgtcgtagactggccggaggcctatgacgacgtctcattcaaagtcggtcttgcagcgtcgttgaactccgataagcaccgacgttgaacgcgttttttgtagcagagtctatttctcttatgtcaacctctccgcttccacaatacaaatacatgatgaatccgaacataaatagaagaatgattatcacagcactgtggttcagtgtttcgagataaggaattgtcatgaccaccaaccatactttataattntgaagaacaagaaataaacaaaatagaagaatgatccatatcaatacaaaagaatg

SEQ ID NO: 211843 - DNA, 444 bp, Glycine max
gagaagaggatatatcgactataacttcaagaatgagtatttactcctactaaacttatacacaatcatcaactgcatttgcctcaaaaccatatgaggtaatgacttgatggaacttgtaataccattgacgggaagcttgtttcaaaccatagatggatttatttagtttgaaaaccatagactttgagttacctaatacaaagttttctggttgcatcatgtaaattgtttcttcaatgtcaccatttagaaacgcaggcttaacatccatctgatgtagctctaaatcataatgagctaccagtgtcattattgttctaaaaagatcctttgaagatactgggaaaaaaagttctttatagtcaatgccttccttttgggaaatcctttatcgactagacgggccttatatctctcgacattgccttttgatccctttgg

SEQ ID NO: 211844 - DNA, 414 bp, Glycine max
  unsure (1)..(414): unsure at all n locations
agctgggtgatgttgcgcatattggagggtttcgtgggagatttgcggcggcttgacccatgcaggcattgaagtgacgacatgggtatctccttccttcctctttgccctaggtgctccgatcctcctagtgttggcacctgtaacgacccgcctcgtcgctacggtatccacactctaatattcaataatttcaattnttataaaaagaactccattaatttttgcttatgaaaatagaagtgattttgtcacaacataaattcatccaacaacacgccattacttaagtgaatatgcataattacatagaaacaataattcagtatatgtcatacacataacgaaaattaaatatgttcatatatataattaanattccagttttacatctttaaactcacaaaataaaac

SEQ ID NO: 211845 - DNA, 401 bp, Glycine max
  unsure (1)..(401): unsure at all n locations
actcagccttttctctgctttcttttattgaacaccctcttggagaagttcttccatctggacccactcttggtcttccacaccttttgaatctttcttgagatgaaggcaactcatcatactcattcgccttcctccataagaaataactcatagttgcacataaggagactcaacttgttcctctttacctatggtggcccttcatacattatggctagtgtgtcacacattggctttgcacttttgaagctatggaccttggtggattcctcttttgagagagcagagcatttcaagctttagagttgagcataactctctatttttgctctttcatccattggctttnggggatgcccgttagctcagcatcatatggaatgtagtttcattatcta

SEQ ID NO: 211846 - DNA, 459 bp, Glycine max
  unsure (1)..(459): unsure at all n locations
gcaagcttnctcgtggcttctttgagaagctacattcttatctatccacccctctattaactaaattaacttccttaaaaataattacggatgaaaataacgcaacaaataatcaaacatcaaacataattactaataatatatagatatatatatatcagggtgttacaattatcactcagatctngactagttaaactttctgaataaaatgagtttatcccgcgtttttactccaaagatcagtgcgaatcaaatcactcccacattttatctctagcatgcattcatatcatgcatcgcataagcatctcttcatggcatcataatgaacatattattcctgcatttgtctgttatcatattccaacatcacattttgcatgagtcattgcatcatcatgcatatgcgttcaacatacttnttgttctacaaactgcataccttttgttttcatg

SEQ ID NO: 211847 - DNA, 242 bp, Glycine max
gtttcggccttaatctcgcttctgttggttttaaaagaagtcattcaaagttgaaattgtgggaaccggaatcgctgaagaaccgctaactgaatattggggatgagttaagggagaaatctacctgattttcatctctcttcttttattgtgaaggagttccagtttgagactaatcttgtggtcttcttgtagactgatggaaattttttttatcattatgagtttggtgtcctgtcttt

SEQ ID NO: 211848 - DNA, 386 bp, Glycine max
  unsure (1)..(386): unsure at all n locations
ttggataaaggacacatcctacatttttatcatgatacatcatgcaacacataatgattacgaaattttatgccacactggtcatgcatgcccctatgtggacactcaaacatcacacttttatgtgcaagtgatgctacggatcacgattcattttctctactttactcaacccggtgtttccaaaatatgttcttatatcaatttgtgcattcatccgagtctatcttgggtgttcgaaaaatctttcacagcatttacccttcagatgtatacacattttttntcaaaaactggttatgatcagtgaattctttcaaagaaagttggacatatctcttttcacagcatgtgtgtttagctagacaccttttattctattattt

SEQ ID NO: 211849 - DNA, 311 bp, Glycine max
  unsure (1)..(311): unsure at all n locations
tgaattcgtggatcacatactcgaagctcaagaggatgacccgtttttgcaaggcaaggtgttagatgtaatgggggataagggtgtggagtttgagaaggacacaaccgggttaattagattcaaggggaggatatgtgtgccatctttagatgatttgaaagttaagatcttggaagaagcacataaaagtcgtcttagtttccatccaggaatgactaagatgtaccaagatttgaagagaagtttttggtggcatggcatgaagaaagatgtagctgaatatgtagcgagatgnttgacatgtcaaa

SEQ ID NO: 211850 - DNA, 423 bp, Glycine max
ccatgtttgtctcatcataagggggttttgtgaatgtatgatacatgattcgatgtaatatgtgattaatcatttatgaatggctatgcttggctatatatctctcgtatgattcttgcatatatttttccaatattacatgagaattacttgctcaagattcattcataaagtttctcaaaatccattatgttatatttatttatttttataagaattttcatatataaaatattttttttattctgaaaaatgtgttatcaagcatgaacatgataaatatattgagcatgtacgcttcacaccaaattatgattacatgattgactgagttctttgaactttctacagctttaaattatctttaacaaatctgaatgtctgataatgcctgtgatctatatccttcaatccttgtataat

SEQ ID NO: 211851 - DNA, 353 bp, Glycine max
  unsure (1)..(353): unsure at all n locations
atacttacttgtggtatgaacaaagcgcaaacttgtatcaaaaatgccaaaaaggatgaccctcaggctgcaaattcctcaatcccgtgggtattgcttttgaaaaggggggaaatagaagttttgaatgtaaaacccccccccccccttttcgtcatttttataatttggtgcaagggtggcttcgccaggcgagctaacctgcactttttttttttttttttttttttgaggggaacattaaccatgtcccctcccttctcatggattaacatttttgctaacttggacttacttatgttagaattaggcggngaatacctatcttattattactcttctcctttttaaaa

SEQ ID NO: 211852 - DNA, 458 bp, Glycine max
agcttccactccacttaccattcgagtacctatcgggtgtgattttcaaacgttcaaaaccagaatacacaatacccttaagctaactgacaagcgagttttggatgaatattactactagcagcctttcacgtatgcaggtaatcaatttcggttacaatgaatgcaactgaaagatgatgctgatgttaacacaatgttaatgtgtaataatgaattctcgtttggtggtccgattgagttattatgtagcattgctagaaccccaaatggtattttaaacttacttgaaactactatgacccctactcatgatgccctgctatattacaatgggaggtggaacatgtcacgccaaaatgagtttgttggttactcattcacaagaaaaaatcccataaactctgacattcccaccggatgtaccatggatgaactgaaggaattgtcaaacaact

SEQ ID NO: 211853 - DNA, 283 bp, Glycine max
  unsure (1)..(283): unsure at all n locations
ataacaaatttagactattaaagaanatcaatgaagaaaactcaaatacctgaatatcctcccatatcaaatccttctgagcagtaaggacttccttccaggtgtcatatgtcacgtcaaccttatcacgagtgacaatccccaaatatgttcttaatttcttcttgtggggaccgtcggccttgccagtagcaggattgacgttgaccacaagtctttctgccctaagtggtctagtggccaatgatcatagccgtgtcgccttgcgtgtccgcttcaacgt

SEQ ID NO: 211854 - DNA, 485 bp, Glycine max
  unsure (1)..(485): unsure at all n locations
tgcagggcatgccaagctttgaagggtgcnngtagcccaccattttccatagtnagaatacttggtaatgggtgtctactatcattgggtcatcgttnttatcatcaattgaggtgaccacttgagctgccaaggttctccacctttnggccgtattctttgaaagatccgcgcccccttttttgcacatgttttgtaggtgcatcctatccgaagccattataccgaccctgcctaacgaaggcaaccattatgtcctcccagtaatggactcgggaaggttccaagttagtgtaccaggtaacaactaccccagtaagactttcttggaaggaatgtatcaacaattcctcatcttttgcgtatgcccccatcttccgacaatacatctatagatggttcttgtggcaagtaatccccttgtacttgtcaaagtccagcaccttgaacttgagaggggtgatgatattgggtactatgaacaa

SEQ ID NO: 211855 - DNA, 382 bp, Glycine max
  unsure (1)..(382): unsure at all n locations
ctaagcttgtcccatttgctataatagggggagaagtgaagaagataagggttcatcctctaaggcacttctctctttctcgaaattgctgaggaaaattattttcgtgaagaaaatccaagccgaggcgctttcgtaacggttctgtaacgtttccatgagtaattacgcgaagattctcgaccgttcttcaagattcatcgttcgttctgcgttttcttcagtcttcaacgggtaagtacctcaaaccaagcttttcaattcattctatgtacccgcggtgggccacattttggttcatggatttttattctcattntcatttactttttatacccccttttgacgtgcttaagccatttatttaagtcatttctcgctt

SEQ ID NO: 211856 - DNA, 335 bp, Glycine max
  unsure (1)..(335): unsure at all n locations
accataagctaatgttagtcaatgtttatatcttattacaanattccctcttattttctatttcatcagtggttatggagaaacttcttcacacaacgcctaaagaattttgttggtttaagaacagagagttccttaaatgaacataagatttttctcgccacatcaccattatgaagctgaggatacaaaagaaatattattattatatattaatccatatacagcagttgcccacaattcaagtcataggaaacaccatagtgtaacttactggaacatacacacaacaacattcatcttaaatgcgtgttataaaggaaatctgactacct

SEQ ID NO: 211857 - DNA, 465 bp, Glycine max
  unsure (1)..(465): unsure at all n locations
aactcagcttagncatttcttcaatggctttagtcaagttctattatctctataaccactgcacatatgaatntcatgatgagaagtcacgtacgcaaaagaaaatataaatcttgtgaaataaaagtgtcaatatgtgtatgtgtatacattgcggcgtcgaaaatttaaaaaaaaaaagaaatcaccaagattgaaaggccaataaatctggtattaacaaaatcactaccacacaatttttatgctaattataaagaatcccaatttttaagatacacactcaacacaagaacacatcaattttacaaaaaaatcgcattagaacatcaattagcccatcaaacacagtcaatccgcgattgagacatnaaaacataattgaattcataaacaactcaaataacccaaaatcatcttctagaatcctaacatgttcatttattctcnacgtgagaacttatc

SEQ ID NO: 211858 - DNA, 404 bp, Glycine max
atgagagatttcatcctcgccctcggcagaaaacaaaaaagaaaagaaagttctcgaacaatgatcgaaagacaacacatggaaacaacaaggttcccgatcaaagatcggaagaaaacaaaggaaaagagaatatctccaatcaaagatcagaataaaatgaaagaattatacagaatggtcttcggaccatacaaatatccaaacagtacagaatagtctcaaccgaatgagaaaataaaggaaaccacgattgaagcggtcctctgcctttgattgccaaccaaaatcttgtgcgctgacgactttctcgccccgcaataaacagaaatagaataggggataggccgaaacacttatagccaaatatctcaccataacatcattctcgaaaaagtcctatt

SEQ ID NO: 211859 - DNA, 414 bp, Glycine max
  unsure (1)..(414): unsure at all n locations
tctaaactttatacaagaatgaagctgtgagctctcttgttagacatgtggcctcagatatcttaagaaggagggtttgaattaacatatcccatattacttccccaattaacaaattatttcactttctttgcaagttatagattcctttaacaatgaacttcttaaatattaattcaaataaaacaatttgaatatgaatgtaaagcaataataaaccaaggagattaagggaagagaaagtgcaaactcatatttatactgggtcggncacacccttgtgcctacgtccagtccccaagcaacccgcttgagagttccactatcttgtagattccttntacaaggtctaaacacacaaggacaatcattcctttgtatntagaattcatttacaacaagagacccatagtc

SEQ ID NO: 211860 - DNA, 442 bp, Glycine max
  unsure (1)..(442): unsure at all n locations
agcttaataagtccatctatggattgaaacatgcctcccgccaatggtatttaaaatttcatgaggtcatttcttcatttagctttgaagagaatgtcatggatcactgtatatactagaaggtcagtgggagtaagatttgtttccttgtattatacgtagatgatattctgcttgcgactaatgataagggtatgctatatgaggtgaaacaatttctctcaaagaactttgatatgaaggatatgggagaggcatcttatgtcataggcataaagatccatagagaaagatctcgaggcattntaggcttgtctcaagaaacctatatcaacatagttttagagaaatttaatatgaaagattgttcaccaagtgtagctcccattgtgaagggtgacaaagttgctttgagtctatgccccaaaaatgattttgagcg

SEQ ID NO: 211861 - DNA, 444 bp, Glycine max
  unsure (1)..(444): unsure at all n locations
cttgacacaatgtgataacaagacaaacttcaattgcttcttgnttgtggcaactttgttttcatccaaatgatgtacaactaacttggtagaatatagtccagaaattttcccaaattattataaagtgatatcataatatttagaatttttcttgtgaaaatacttgtgtagggcaacaaaggaacaataattatgaaaaatagattcttgtaatttgtttggcttgagaaaaatatatgacatattattaaggttatggaaactccctgcttaaatttatataattcagagctgtctaagtattttntttaaatntaaaaatagcatttcagaacaattttaatgttaaaaattaaattggaaaaaatgtttctataatgattnttggngaaccaaaaatcctttatgatgaaatctttctttatatatgtaaaaacaaac

SEQ ID NO: 211862 - DNA, 422 bp, Glycine max
  unsure (1)..(422): unsure at all n locations
agctgtgcttcactctctatcaagtctaagtttnntgaatattttctatcttaacaaaccacttatcttgaagtactaattcttgtggtacgaacgaaatttgaacctgaggattaatgtgtagtaaattttggaatcatatactttatttcgaaattattactaacaattatttataagcctctctgttcatggtttttctgccatagaaatttaacatgtgacccttcctgtttttggagtataagaattatacgtaaatcatttagtgggagtaataatcttattgctaaatgaagtatgaatgtcgagtttaagtgtactagagcaagaatatagatctattctattttaacattcaccagttattcattttaagtcattatatctctcgctactatataatttaaactgatgttaag

SEQ ID NO: 211863 - DNA, 400 bp, Glycine max
actggcaaataagaaacatagacggatggtgttatgttattcatgagcgaccctacctcacccagtagggttaggcattgttgttgtcactgcatctaatatatatgccaaagatccttatgcacaagtgaaccagtttattaatgaagtgggaataatgttttgaatttattaatatgatgtaacagctatctattatatccatgaagaaaaatcagcaatttgatggcactcaagttccatagcataacaagagttatacacaggaaaacccagttcaaaatcatggagagagttccttcacagatgggaggctgggttgccatcccaaacctctatgatatagactctgctttggaagacgtgcctcataaggcttcttcccttttattcttttctc

SEQ ID NO: 211864 - DNA, 439 bp, Glycine max
  unsure (1)..(439): unsure at all n locations
agcttgtggtcccaaaagtggagtatgtggtccaaacaggtgagtcttctttggtgtgttnttgttgtttattctcctatgttgtcattatatggggggatgcaaatgggatcattgttgatgaataaattaatgtttctttggggggtaattatatttttagggactgtcatacatggctcttactaaagaggttaaccatggggattatttggtttgtgagcccattttaaagtatgttgaaggaggcataactttgttatcaaaaatagacattggcaaatggagcttttttgaatttgttgcgtttctgaagcacgatgttaagattaagggagatctaaattattgtgggagggggttgatgttggacttaaagagttgatgctggattgccatgttgttgaggtgctaaatatttagttggggtaaactctat

SEQ ID NO: 211865 - DNA, 292 bp, Glycine max
  unsure (1)..(292): unsure at all n locations
atgttgggggtattcagaatgtcattgtgacttcactagaggacttgtcggctcttccttcacgtgtttcaagtcccttgtgctatttatttttcttggtggcatttgctttctcaatgttgttagagccattctagtcatctaaaggtgagggtccctctttgtttgctaaaaggtttttggatggatgatgccacatttgcattccttctatgacacattttntgttggagtggatggaagctcattgtggtaatgggttcaatcaaacttcacttgaacatcaaacttt

SEQ ID NO: 211866 - DNA, 370 bp, Glycine max
tcaacacataagatcctactggctggatatcatcagcagaagattacttgtgcatgacggaaacgagttcatatgatgaagagaacctcgcgcagctgtgtatagaatgacccacaatcaacttctttacactctcgacccggaaagactattttgacttgccaacagctcagacgttatttgcttgacatatatggacggatgagtgatggcgacattctcaagcaatttatggctcttcagcacatagggagtgtctatgagatgattatatacaggaatatgaacacacaacaacccaggcgatgcgcttgcctgatgaccaatgttgtggctatttaattcatggactgaatgataatatctatgg

SEQ ID NO: 211867 - DNA, 240 bp, Glycine max
  unsure (1)..(240): unsure at all n locations
nttcagtcagcacctgaatttgtctgtgattntggctatttctgatgttccttccggggcggagttgtttgaaataacggttgaggtatttccctgaattgtgacagacatagatttctccttttaaaaaagcactatcggcatgcacaaaaaaatctttaatcgtatttcttgtgtcattaattgtttgatgttcagattgttttcctcgcgggctggcgcgcctcagaaagtaaagct

SEQ ID NO: 211868 - DNA, 436 bp, Glycine max
  unsure (1)..(436): unsure at all n locations
agctntataaggattacattagccatatctctagttgatgtaagactaaacaacccctcacaccttgcacaatgaaggtgctagaggctacaatgaaggcaacccaaagaggccaaaattaagtggacaaggggtgaccacaattaaagcgactttccaacacacctgaaaataaaatccaagagatatcaaactcttccatagtgaaaacttaaaactgttggtgggagcacagtgcatctctgaaacatgacacaaactggactagtaacaataaatgaagtccccttgtcacaaatcttacaatagcgagggaagcacagagttaaagtatgaaatattgaaatttcatcacttggatgcataatatttgtctatttgaccacaagctgaggaataaataaaaattaattggtttgacataatggacacaaac

SEQ ID NO: 211869 - DNA, 454 bp, Glycine max
  unsure (1)..(454): unsure at all n locations
ggtgtaatccagagagagtatctttntattaatttcctgcaccaaagcaaaaggtaagatcgttgatttcagcagataataaaacacaaaagacttggacttgtgcacccaaataaactcagatagacatgagcttcagcagttaaaaaaggaattgctgtagacatgatttcaaatgcttcaaagaatgaatgttagctactcttgttgtcttttacaagaaaagatgtaaaattaacactggactgggggcaatagtaagttacactcaccaaagaatgtttcctgttgaccatgcatgctattaactaataattaataatatactaaaaaatttcaaaaataagtcaccacccttctctcatgaaaagcacataaacccagggtgaattccatatattnttgatngaatcatgnttaaaccaataaccactttttaagaaataaaaaaaat

SEQ ID NO: 211870 - DNA, 439 bp, Glycine max
  unsure (1)..(439): unsure at all n locations
agaatatcattagggaaaagttaaaatttacatgcctgaaaatgggaanaatgtgcgacagctaagaaagatgccaaaaaggcactaagtgaggcaagacagccagagctaaaccatttgatgcattataccaatccttaggcaccagagaaggaaagagacatttatagcctagataaaagtagagtgtttaactgaataatcatcagcagaaatttctgggcaagcaaattatacacagcatcaactagaatactccaaattcatcaagaaaggtcactggaagttaattgaaaaaattgctgcaaatttcgccagtagagaggtttgctagaataggtcactataaagtttgctggagatgacattgtaaagttcaactagcaataacaactcacggaagaagttgcaggaaaagagtaacagatgaggatgtcag

SEQ ID NO: 211871 - DNA, 420 bp, Glycine max
  unsure (1)..(420): unsure at all n locations
aatagactaaaaaattaattacaaacccttagtcaaacataaactgatgttatgttacaatccatctattggccacacgggacaaacaaatgacactgttatcgtgattgcaattatcaagagaatgaattgaaaatgaaaaatgattttacatatataaactgaattaaaaactctatcttttttgtataaaaagtttgtgttaaaaataagttgtacatatagctaccaaaagttgtaacatattcaacatatatatttacttgaaaagaacgaagtactantagctagaaaatcatgtaaaatattggcatacttcgctacacattcacttctgcgtggagcatattccttattagagctgatggatgagcttccctcactgcttctgaatgagaacctctccattattcttctctt

SEQ ID NO: 211872 - DNA, 451 bp, Glycine max
  unsure (1)..(451): unsure at all n locations
agcttggaaggatctagagaggttaaaccctactgcttggacaagatatgcttttaaggtaaacacaaaatgtgatttgcaagtcaataacatgtgtgaggcattcaacaatgtaataatggagtacagagacaagccaattattactctgctagagggaatccgattntacataagttccaaaattgtaaaattgaggactatcctcgtgaggtatgagggttccatctgtcccaaagttcagtagatcattgaaaaaaataaaaaaaaacatgtgaagcatggcgatcacattggcctagtgatgctgatttgtctttgtttgaggtgatgaagggcatataaaaatttgttgtcgatcttaaagaacagacatgttcttgtagaaagtatgatttaactggaattccatgcactaattcaatagcatgcatgtggatcaatgatgttg

SEQ ID NO: 211873 - DNA, 469 bp, Glycine max
  unsure (1)..(469): unsure at all n locations
atgacagaacattgacaaggaatcaactctcaactctaagaaaaccacaatctagtcggaaaattgaaatatggggaaaaaaatatagaaattagattttcatttaattcaactataaaaattaactcataaaataagtattaccccacttatatattttattttgatattagttaatgtaagactttatttttttcaataaaaacttatgtaaatctaggggatgatcctctccaccaaaaaaaagaatcttctctacacactttataacattggattacccaagggcttttctctaatttctttctactatctctatgttaccaaaacaaaaaacataattatatntgaacacttttaaatcctaaatacttcattaagaaacttaaattctttttatctttnttttttaattatattacatcaacaattaaatcaaaaaattattttttctcttcatatttctctt

SEQ ID NO: 211874 - DNA, 264 bp, Glycine max
agatgtaaggaactatgaagttactaacattaatactctttaattttgtagctgaagagtactatgattctgaccatgagaatgtatgttgacacattatctttgctaactatggaccatatatgattttattgctcaaatttgcatcaacctccctgacctgcctcttgagtttttattgctcaattttcataccaaggggttgtatatatgtgagaattcacatctattcaacattatgggaataatttctgttgttggact

SEQ ID NO: 211875 - DNA, 320 bp, Glycine max
ttcattaatataaatcttcctaatatttacaccctcaattgtactctaagaggataagttgctctatctatctcctaaaataaaagctgaatctattaataatatgggctaacaatttaagacccactcttcaggttgagatctttggcccatttatatagaaagtgccttaccattaactcgtattggattgctgctctccacaccttcatattttacttcttgcacctcattacattacgaaaaaatctatctatgatggtagaatacattatggattgagctctttcttatgctatgaggtaccagaggaaaaacat

SEQ ID NO: 211876 - DNA, 419 bp, Glycine max
  unsure (1)..(419): unsure at all n locations
agctngcattgtaagaatgaggttggaggatgtagctggcgctgttaatgtaaagggagtaagtgatactaagttgataattttccaaatcaacagagaatggtaggccanagatgagctcatgcaaaaatatcttgcacaagccaaggcattaaaggctaaattcagttgtgcgaattcgacatgtgctttgggaaaaagacataaggcgtgatattctatctcgattggtgagtacctacccaacatttggggaacaataaagttgtgatgcaacanactctttgagagcctaattatgtcttgtcggtatcaagccaataaagttggatgacactcatcgtagcatatcttgtggatggaaaagtatctttcgatgacaaagaagtcaggaaactacaattggtagcaacaaaata

SEQ ID NO: 211877 - DNA, 349 bp, Glycine max
acccaaagtttgggtttaggattagaaaagcctgaaaataaggacttggttgtaagaatttgggctgccccatgattggcactttgcacctaagtaacgtgggagatgcttttcaatggggggtagatatgttgtgtaatatatatggcataaaaatatgtatatatgtgaatatatggcatgaaaataccttgccaagtgaatgaatagtacataatgcatttcaaaaatgtatatttgtggataggtagcgtaaaaatacctttacaatatgtatatttgtggataggtagcataagaaagccttcaaaaaaaaatgtcccatgcccaaatggcccagaatgcttcc

SEQ ID NO: 211878 - DNA, 419 bp, Glycine max
  unsure (1)..(419): unsure at all n locations
agcttatcctangtcgatgcccaattanttattatctagtaccaatatatatgtgatataattggtctaaaaaagataacttcaactgtataacaaaaatttaagattctgttagattgtcactgagaacaagaatgttttgttccggtggaaataatggattttaatacgcttacagtagacattattgcattcatccaaggctctaggctagaaaattttatgggtttttacagtactgttttgggtaaaatggatacaagacagaaatttgatgttgacattggttctagttgtaatgttgatattggtggttggatgacaaacaagaagagccatcgaatttacataaagtaattaacttgttggatttgaagataaaacagacagctcttgaatttattagaaaagattgattc

SEQ ID NO: 211879 - DNA, 440 bp, Glycine max
  unsure (1)..(440): unsure at all n locations
ctggaagaagtgttctttctaaagtttccatacgtcttccgaagtctttcgcaaaacctcttccggatactttccggaagaagtagttcttccggaaggattccggaagaagggttcttccggatgaactttgaaatttccggaagagctntccggaagaagttgttctttcggaattgttccggaagaaccacttcttctagaagtgtgtttttttttaaacaaaaattgttttgttttttttttaacaaaaatgaatcattatatttttttattattttggtttttagattctatgaaaaatgaggtttgggttttggatgtgatgttttttttataatataaattgcgtatttttactaaatattaatttgtaaatcatctatttttttgtctataaaagaagttgcgttcgttttgtttattgtctatttttttaa

SEQ ID NO: 211880 - DNA, 436 bp, Glycine max
  unsure (1)..(436): unsure at all n locations
agctgaccaaactntgtttgtctacaaatattctcttntgacataatccttcttctattggtaacactattagaaagcgcattttttacatcgatcgaatagggtattcaacatcggtgcatgacctgttttgaatgtaaggttgttgaaaataaaaactttcaacaacggtccaaaactgaccgttgttgaacgacaataatttctacaacgctgtcttctaatgcacgacatagtaacctgtggttttcacatcggtggctacgctagcatcgatgttataaacatgactttctacatcgtattattgaaaccaccgatgtagttagctgcggtttcaacatctgttcttgtggcaacaccgatgtagtaagcttgggttataacatcgctatccttggcggcaccgatgtgaagaaaccaaacatttcatatt

SEQ ID NO: 211881 - DNA, 409 bp, Glycine max
  unsure (1)..(409): unsure at all n locations
cacttaaatactaagcttatattaatccatcatgaggatgtgattgtgtatcactaatctgctatnataagcttttgacaattaagcgaacacaagtgaaagggattttgtgtcacgtacttttcatgtaacctatgtaaactacatggatattgattagcattgttaatatctctatatgtcccttacccggaatgatatcgatatctacattaagtagaatattgtgcatctatacacaaacataccaaaaatatgaaatattatttcgtttgataataaacattattttctattgctttagtcctctggcacgatatatataggggcccgtcttgtaattttttttcaagtatgtgtgcaactgaaatattctgctatagacctattgattgatgcatgccctgac

SEQ ID NO: 211882 - DNA, 430 bp, Glycine max
  unsure (1)..(430): unsure at all n locations
atcttgtgtntgaattatgtgattcaaaattttaaagaatttgaaatgtctagaatttgaattgctttgattctaattctcttcatctttcaaatgttctgtttggataaattaattcatatttcttccattttaaattctttgtttggataggacaattcaatttccttcatatgcaaaattttaattttatattctaaatagatgaaatttaatattaaactttatagaaaataaacacactctaattttgaaatattaattaaaaaaaattttcaatttttcataatttataaatacaaaatattgataattttaactagggttgttttgtctgaccataaccagtgatgtttttaaatcgacaaccaacgctatnttttgatcaacatccaataagtgtttttctctcaaagtatgtcgtgaatat

SEQ ID NO: 211883 - DNA, 394 bp, Glycine max
agcttctccctcattttcctataaatagggggaggagggaataacaaaaatgttcaaccctcctggtatctgagaatcacttataattagtgagaaaaactgtttccgtgaagaatatccaagccgaggcgcttccgtaacgcttccgagacgtttccgtgggtgatttcgcgaagatattccacccgtcttcgacgttcttcgttcggtcttctgcgctcttcggtcttcaaccggtaggttcccgaaatcgaacttctcaattcattctatgtacccttagtggtccccacttgtttcgcgcgcttttactttcatataatttactttcgcgaccccctttcgacgtgcgttagtcatttatttaagtcattttctcgcctagtcaaaaata

SEQ ID NO: 211884 - DNA, 476 bp, Glycine max
  unsure (1)..(476): unsure at all n locations
tgtctcagcatctatgcgagacagaaaccaacatgttaactatcatcgccaagtaccaagaagagttgggtctagccacggcccacgagcatagaatcgcggatgagtatgcccaagtatatgcggaaaaagaggctagaggaagggtgatcgactctttacaccaagaggcaaccatgtggatggatcggtttgctcttaccttgaacgggagtcaagaacttccccgattgttagccaaagccaaggcgatggcagacacctactccgcccctgaagagattcatgggcttctcggctattgtcagcatatgatagacttaatggcccacataattagaaatcgttaggaaactttgatggtctctcagaccttgactagatatgatttcttttttttgaataaaatgagttggtcccatggttctactncaaaagctngtgcaaatcaaatcactcctacatctcatctctag

SEQ ID NO: 211885 - DNA, 426 bp, Glycine max
  unsure (1)..(426): unsure at all n locations
agcttctatacccaatgtgtttatccanaactaatttgntatggcatcacaacagcaacaagccttggcacaggctcatgcacaaaataaccttgggaattctaattatggtgacatggatcctcgtagactatctggtctctctcgaggtagcttaagtgcaaaggattgtcagtctaccaaaaatgaaggatctatttgctctcaaatgcagtcagattcacctaatggtggactagctttttcaaaataaaaaaaggtcaattataatctagaaatattaatgttcgattaacatgtataacataatatctttaaattcaacgcacatgctcacacacacacatattagttctatgaatcgtgtgagtgaatctccacaacccttgatagttgatacttctatacataaacaaataaatacat

SEQ ID NO: 211886 - DNA, 427 bp, Glycine max
  unsure (1)..(427): unsure at all n locations
tatttcacctgaaaaattcaagctacatttagtttgtttatattgagcaaactatggatcgaagttagctgtggaacttgagcttgcaatcttttgctttctagtggaggaactttgagaggaactagtgctaacatgggccaattttgaagcagccagagaatttagtctaacttgcacgttatttgaataggctagttagccaaaaagcaacccacaaggataagttgggttgggggggagaacctgngtgatatgtagatgatttgtgtatgtaactagcaggaaatggctctaatcacctttatacaaacatatattttcacttaaataaattgatagtacttgtatatactggttatattctgatacataattaaggaaactattccatcactacaatttaagtttctatagttaattttat

SEQ ID NO: 211887 - DNA, 455 bp, Glycine max
  unsure (1)..(455): unsure at all n locations
atctgccgcgtgcactctatatctgactaaggataaaagcgttggatgcttggcgctgctacttcttctaacatggagccatcgaaagtgctcgttataagttgggactttgtagagtgtcagagatgaagtatgttcttaatggcatcgtaacaaaccaacctgccacatggagaagcaagttctttttattntgaatgttaanaccaatgatcaaatagaagagcatgtgcattaattgataattctataaccaccctataatagaagaaatgatgcgttgattaataatcttataatattacatatatacgtgcacatgcaagcttgcctagagtaataatgtgctaatgcatgtctgtgtacacgaaggaagaacatattatacaagacatgacgttttagttatgcatgtgcatgccacaatgcacatgaacaagaatctttgctatata

SEQ ID NO: 211888 - DNA, 459 bp, Glycine max
  unsure (1)..(459): unsure at all n locations
tttataattacaatggtgctttagccattttcatactnttaaaatcttctatgaattttttcatcatcaatattaatttagtgtgtgaaaggtaacgttcttcattaaaataatcaatactaattaaaacactattaatcatgaattttttatatcaagaacatactaaaagaaaaaatctcttaaaagaattatatcatgaaagttttgaaaagatatttgttttacccaactcttgaagtaagtaatttgagtacttcgtaatctttgactcaatagaatatctttgctttcttctttcttctcaatctttgagcaacacattactaccaagagccaagagattgtttatntgtgtgatcttaggaaaagtaattatttatttttatataagcatngtatgtaatttgaaattatatnttttgaaatttgttaacccatttttctttatctcttatt

SEQ ID NO: 211889 - DNA, 416 bp, Glycine max
  unsure (1)..(416): unsure at all n locations
agcttcatactcaaagagatagttgtttaccgtcgttcgttgctgcagtttgcataacaaaccagttggatcttcgtacgttgccgacgcaaatcgcgagtgaagagcatgaagganagctggccacgacgataattggtcgtttcgatgcatccattgaaaccatgccaaagcttgtccttccatgtaaaacgacgcgatcgttaatctctcgtgatctggtgttgtatgatactcaaagaactgcgtgatcttgaagatccagcctatggcatcggaaccgtcgaaccttggaacattaagcttcatccggtgcggtgttgtgtgcattcctgatcccgagaacggtgtcgtttctggttgtattggttgcggagtgcgccgatttgccttgaggtgtgacattcgttctgaaa

SEQ ID NO: 211890 - DNA, 335 bp, Glycine max
gcttctctcgtcaggccaattaatccctctacaacaatgttgaaaagaaataaggctagtggattcccttgtctaagtcctttttgtggaatgaattcaactaaaggagtcccgttaaccaatacagatatggaagctgatttaaggaagccgtcaatccaagtgatccatttggagcaaaagcccagctttcttagcatgtataacagaaagtcccaattgactaagtcatacgccttctcatagtcaactttgaataccatgcagcttttattgcatcatttcacctcctcaaccacttcacttgcaatgagaacattgtgcagcatatgtct

SEQ ID NO: 211891 - DNA, 467 bp, Glycine max
  unsure (1)..(467): unsure at all n locations
ggcatttccttttattagggaatctatccttcctaagatggagccaaacccagtccccctcattaagaactagctcctttcttcctctattgtctttagttgaatacacctttgtttggttctctatttggttcttaaccttctcatgcaacttctttacaaactcttacctagattccccttctttatgtataaaagaagtgtcaagtgggaggggaatgaggtctaagggtgttaggggattgaacccataggcaacctcaaaaggggattgcttggtggttctatgagcccccttgttgtaggcaaattctacatgaggaagatactcatctcaagacttatggttgcctttcagaaaagcccttanaagggtggataaagacctatccactacctctgtttgcccatcattntgtggatgacatgtggtaaagaaaaaaagcttagttcctagcttagcccat

SEQ ID NO: 211892 - DNA, 309 bp, Glycine max
gcaccacacacttatgcacctgccttcttacggtagcccatatgggatactcacttctctgtcttctgtaaatccaaccagttgtcgctcagcgttctatcgtcaaaccgcaacaacaggtactcccttctttttcttcttatcaggttccaaagcctccgtatattcctctttagcttaaggaattccaactgacttctgttatgtgacatatgctaaaagaaacactgatctactcgcatatccactctttcatcagcttcaaaaaaagatcttgacttaagttctcctggcagaagtgctcaccaa

SEQ ID NO: 211893 - DNA, 453 bp, Glycine max
  unsure (1)..(453): unsure at all n locations
ctaagcttgtctagctagtatgcaaagtgtagctgtatcccacttctgtcatgttggagggcatccattgactggttggtcttactcctgaccataagttcccgtatttggacaagtttaggattctcatcatctcacgtcgcggcttcatgcaccaatggtgccagggaggcacgccaccctccatggcggcttcttccattaatggtgccgttgggaagctaggtcatctatgtttgtttcaaccctgatgcctaaatgtgggttgggccgagtcaccctgacccggttncaacccaacccttaaaaacacaaaaacgtgaaaaaaaaaaacaattatttgttatatcgcctctttaatacatgcacctttattatgttttgggccctacccatctttttaaagtatttaataagatggtattgctacttaaaccacgttttcatacatgc

SEQ ID NO: 211894 - DNA, 443 bp, Glycine max
  unsure (1)..(443): unsure at all n locations
ctgcacgcatgcaagcttatttaatctaatggtactcttaaaaaaatgatttaaaatcatnattacttgattaaaaatnttgatttcaacaatgataaaaccatgattaaaatctgtacacctttaccgttctcttatattataaaatattttaaaaatattattctattccaactacctttaaatatgtagctcctagcttatgatcttttagttaacttataaactttgaactagtttatgagctaactttccaaaatatatcattttgaaaactcacatgtaatctaaactgaaaatgtgaatgaaaacagttgactcatataaattttcataataagatataataattatttgattaacacagatcaaaatattgcaataaattacaacgatgaaaaaactataccttaaaagctgctattttatagcattaaaaagct

SEQ ID NO: 211895 - DNA, 242 bp, Glycine max
tattataagggctgctataattgcatcagagaaaatactggagaaatgaatttgggttttgcattcccccaacccctggttatatttattttttaatcccgacacaattttgtatggactttaccttggaccttttgtatatatgtataattatagtagcgaatctcttaatatctcttggtttgtgcactattaaaacaaagctcaacgtgtgatcaataaatagaatatttagtagttta

SEQ ID NO: 211896 - DNA, 373 bp, Glycine max
accctatcatatctaatagtgatcacatttatgtctaattgcccacttactacgatgtagtaaatttcttacgcatccattgcctaataaatctccggcagtaagtaaacataaccgcaacgtgaataatcatcaataatagtgataaagtatcattcctttcaaaaataactaacatcaaaaggtccacatatatcagtatgcacaatttcaagaagccgagtgcctcatggagcgtccttctgtgaatgtcctggctgaatatccctcatacaacccacaccaatatttagaaccatcaaatctacagaagggaaaattccattatatattaatcgtttcatccttctctaaaaattaacaaaccgttatg

SEQ ID NO: 211897 - DNA, 448 bp, Glycine max
  unsure (1)..(448): unsure at all n locations
gacccgcgatccttataaccacctgcagcatgaagcttaattttgacactgttatatactggaccattaagactcgacaattattcctttatatttcaaatggtcaatttattcttgcgaccatacacattacacagggngaataaaagatctatggatatctccctctccatctaaaggctatcttcataaatcatatgagtattcgcgcgaatcacacgagccactattgaattcactttcataatatgtaacgcagcatataatcttattcaagtgataatgaacttttacaagctattctctgtgcaccccataaacctgtgtcttatccaatgttacctagcgtgagaggaaaatatctcaactcatcacactntaaaatctgagacttaccactcttcgatatccatctgtgtgaaatcttcttgtatattcaaaactacca

SEQ ID NO: 211898 - DNA, 256 bp, Glycine max
gctacctccacggccgggccacctgaatctgaatctgactcgatgttccttacactagtacgcattggaactttcattttaagaaagggccgcctatcaatagagacccaaattatccccactaagctttcatcattgtcataaaaaggtgtattagtcgctacaacttaaaacttcttcccttggttattcttgaccggaaattgccctgtccagctctcttccatcataacacgaatcactgtattattgggca

SEQ ID NO: 211899 - DNA, 427 bp, Glycine max
agcttctggaaaggttggtagacacaaacttattattgaatactatatgatcttaacattcagttactgaattccgccattctactctgcttccctgtgcatttgtaaacatcttttgtttacttctttcaggtgcgggctttatttgatgatggtggaaagcgggttgatgaagcttcaccttctatgcctgtacaggtttgtaaattcagtacaaaagagtcatatgatgcattactacttttgcttatcaaaataaagaattcatagtacaaaagaactgggagtgggggaggtgtgaagtacagaggacatcatttctcatcaagcatcataagctcaagtggacaactactctgctacatcagtgttgtgggttccttcaacatttacatggactgaatcactgcatatacacatgtatcaa

SEQ ID NO: 211900 - DNA, 437 bp, Glycine max
  unsure (1)..(437): unsure at all n locations
tgtggagcttatgaaaccacttggntacttatatgttactttttaacttaccgataagactatacactgataacaagacttagttatgacttatgatnttgtctttaagagacttacagttaagttattttgttgtttccaagattaaaattgttacattgaccactgtacatcatttgtatgttgtacttcaagtgattcttcattgttctttgaatcttttgattaaatacaatcttttgattaaatgtacttgttgacttgttctctttccttcatatcccagttccctggtgatacatatgttacttgggatataacaatggtaattntgtattaccataaaagattttttttttcacggatgtggcattggcatgtgaaactgtgatttccagttaacaactctacaatggataagctgcaatttagtggtt

SEQ ID NO: 211901 - DNA, 440 bp, Glycine max
  unsure (1)..(440): unsure at all n locations
ngcttgtaggattatggcgtacccatcacatgtggtactaggtggcgngcgggcgatggtgcacaacaagttttccacattcacaaagcgcgcataaacccaccatccgctgttgcccacctccaactgagctcacgtactcccacgtagcccatatcctcggttctctcaacaccgggtccccatcaattctcccaagcttccccaacatcaaagttatacaacattcaaacaacacaagctatcacagccaagcaaaacagggcaaaggcagaaaactctgtccaaaacaccaaccaaaaatacagcttttcacatacaaataccccagaaacatttccttcgttccatttgtaaccggtggattaactagaaatttttactggaagtctctagtacatgagcctacactttgacgcgtgggatctactagcaaacat

SEQ ID NO: 211902 - DNA, 463 bp, Glycine max
  unsure (1)..(463): unsure at all n locations
tacttatgtntttagtcattggtgttttagtctcgcanataataatttaaaattttttagtcccttaaattcgaaaaacatttttttagtccctttcctcaaataaaaatttaaagtttttagtctctcaaattctgtcgagggaactaaaaagaacatttttttttaatttaagggtctaaaaaatacaaatttttacttggaggactaaaaaatcaaactccctagcttgaggaactaatagaaattaagcttttattaaagatatggatattcagacgaatgtccccacattttgtttttatttgtgagttatacaaaaaattaagggaaagaaaccaaacaattaattgacaaatatctgatagcaactcagtgctagactacttcttcaatcaaaagaatgcatgtccttatcacaaccataggtaagaccttgagtagntactttaaaaatatttag

SEQ ID NO: 211903 - DNA, 439 bp, Glycine max
  unsure (1)..(439): unsure at all n locations
agcttctccccttttgtgctataaatagggggagaagtngaaaaaaagggttcatccccttaggcacttctctctctctcgaaatagctgaggaaaattagttccgtgaagaatatccaagctgaagcgcttccgtaacgtttccgtaacatttccgtgagtaattacgcgaagattctcgaccgttcttcaagattcatcgttcgttcttcgttntcttcagtcttcaacgggtaagtacctcaaaccaagcttttcaattcattctatgtacccgtggtgggccacattttgtttcatgtatttgtattctcgttttcatttactttttatacccccttttgacgtgcttaagccatttattttagtcatttctcacctaatctcaaaataaaataaatttccatcgatcatttgaattggaacatcccgtactttc

SEQ ID NO: 211904 - DNA, 224 bp, Glycine max
  unsure (1)..(224): unsure at all n locations
gctgatgttctccatatgctgaggatacgatattttttggagaagcatctatggcgaatgtcaaaactgtgaaggctattctcaggagtttntgagctggtttctggattgagaattaattttgctaagagcaaatttggagctgttggtcaatctgaggagtggtgtcctcatgctgcaaactatcttaactgtgctttgcttcaatttcctttctcttattt

SEQ ID NO: 211905 - DNA, 444 bp, Glycine max
  unsure (1)..(444): unsure at all n locations
atcttatttgagacacagatttacccatatattaagttttcatntttaacatgggttatggctcgtacatggattccaattggttatctactagcattattatctttgctgatatatatacctttacggtccctggcagtatatgcttcgtaattcacagaaatattgtataatagaggaggtgcaccagaaattccatccaccttattacaagagtacaaantatacatnagtgcactatgtaaccccgaatttatagttcatatgtgaatgcacggaattgtttacaatgaacaacttactcagctaacatagagagatgaatcaaaaggtactgaaaatcattcacaactaacattattgaaaataatgtccctctctgtcttacgtacttcgatgttacccatatgcacatgcgtatgttacaatattactatcatatta

SEQ ID NO: 211906 - DNA, 428 bp, Glycine max
  unsure (1)..(428): unsure at all n locations
tattgccttanggnctttagcagaatgactatgaaccttgtgattattggaaaaacttttattggaggacgtgacattggtattgtcattgaatgaagtaaaagcaatagtatccataagtgattgtgaagtaaaatcaccaacaaactctctttcatgttgaagcacaagagaaaaaagttttaaccaaggaaggcataggttccataagcatgacttgagatatgataggtgcatacacatcattgaggccatgcaaaaaacggatcacatagtcatcttcacattctttcttaagtttggaaatgagcccacaggaaccaggactataacatgtacacaacaagaaacatctataccattctagttcttttcacaaaatctttaaacgagtatagtactcagaaatgcttgagttaccctgctta

SEQ ID NO: 211907 - DNA, 422 bp, Glycine max
  unsure (1)..(422): unsure at all n locations
agcttctttcttttttgttatatatagggggagaagngaagaaaaaaagggttcagccccttatgcacttctctctctctcgaaatagctgaggaaaattagttccgtgaagaaaatccaagctgaagcgcttccgtaacgtttccgtaacatttccgtgagtaattacgcgaagattctcgaccgttcttcaagattcatcgttcgttcttcgttttcttcagtcttcaacgggtaagtacctcaaaccaagcttttcaattcattctatgtacccgtggtggtccacattttggttcatgtatttgtattctcgttttcatttactttttatacccccttttgacgtgcttaagccatttaatttagtcatttctcacctaatctaaaaataaaatacatttccatcgatcatttgaatt

SEQ ID NO: 211908 - DNA, 353 bp, Glycine max
cctgctgatgttctccaatatgctgatgatacgatattttttggagaagcatctatggccaatgtcaaaactgtgaaggttattctcaggagtttttgagctggcttctggattgagaattaattttgctaagagcaaatttggagctgttggtcaatctgaggagtggtgtcttcatgctgcaaactatcttaactgtgctttgcttcaatttcctttctcttatttaggaatttcgattgctgtcaatcccaaaaaaagggttgtgtgggatcctgtaattatgaaatttgaagataggttgaataagtggaataagagaaacatattcatggctggcagactcactctta

SEQ ID NO: 211909 - DNA, 428 bp, Glycine max
agcttataaattcacataatagagcatcttatttaatcgttagtttctcaaccatcacatcaagatttcaatcagcatacaccattagtcaatcaatcataatcaccatgattatcatcagttagtcaatcatcatcacaaagattatcaccagtcaatcaatcatcgtcaccatgatttatccataaaacatcatcatcactagtccatcaatcatcgacaccaaagccatacacgactccatggagatttaaccttttgagcaataaacccaagtacaccctttaacatagtcacaccctgatcatttggggagacttgaattaatcctatagaggaagtgcaattttattgaaaatggataagcgtaggtcctcagtaaggcttccaaagaccttattctatctagggattcccattagccatgc

SEQ ID NO: 211910 - DNA, 440 bp, Glycine max
  unsure (1)..(440): unsure at all n locations
attgcattngggcgtctatttcgactttcctatgctgtctctacatacataaaacagccccaccatcccaattttgcaaaatcatattcatatatcattggggcatttcaccgagcacttgatgggcgcatgtttggacataaattgcaagagatgggggcaatgtggcatgccctattgcttcagaatacaacataggcataaggcgttctcattcaaatcctcaactccacaaaacaagcatggatttcaggtgcaaattgcttcgcgaattttgcaaaaaatgagcaactaaagcaccaaaacacatcaatggagagccaaataaccaggggaaattgcacttacttgtggggagtgaattaaagcgtgaaaagggaagcgaaaactcaacaatggaagcttgggggctgctgttcttgtagttctcatgaagcttg

SEQ ID NO: 211911 - DNA, 419 bp, Glycine max
  unsure (1)..(419): unsure at all n locations
agctntttctggcagttcgaaatcagaacataatcataaagaaatgattcacatatcaaatactaaaaattgcccatctccaacttggctacacggcaatgattgaattgttgaccacatggtcaagaaccgactatctaccaaaagtttaatttgtggggtaaaggcttactaacggctttatatctaacaaaatcattaaaatttaaagaaaaatttaataatttgatccatcaaatattatgtctgagttaacaggccatagcaaaaataatgaaaataaattaaaacaacatattctctattctccccatccaatattctctnttttattcatcttctgaaaaattctaagaatcattactgattntatatggtaaaagccgatataaaagaaaatgagaatgctacaacactct

SEQ ID NO: 211912 - DNA, 452 bp, Glycine max
  unsure (1)..(452): unsure at all n locations
tatgcgcatatttccttacaaacgttctcttgcacaagacattctgttaatcgaaaaaatgcacccatatacaatcaaggcagcttcgttacctagattatntacacgtacttccaaggtgtatttgttacttacatcacacacacctccttggctaaattcacatacatgcatactcaaagcattttggggtaccctaatttcacatgtgcacatcttggcatttctaatacctatacatacgcaaacttcatgatgaatcttgactatctacacaataaggtgctacatttcatgctcttttcaaagttttgctacctaagggccgcatgcaaatcaagtatattttccctttgctgactaaaaattgtattcacattaaaaggtatacatttntttggtaatatatcttctttacataacatgccacatatttatgtatatattttttt

SEQ ID NO: 211913 - DNA, 490 bp, Glycine max
  unsure (1)..(490): unsure at all n locations
ggaccttattactgtgctgcccttaaccagcatcaaatcagttcctacccataattatggattttaaggcttgataaatgaaaatgagaatgggtaatttggggtaaactctcatctcaatcaagtctataacattgatttagacttgctcaaactggttttaaatgaaaaccccagccattcaaaatttgacctctcaacacccaatgtagcctagaaaaggctcttttctttcaccttagtcactcatcttcctcatttgctctgcccaagcttacctacaagtcctaattgacattctaaactagaatcaactcactttagactccaattaccactaaccccaaatttagctgttcaaactcttaaaatctcacactgttccactcacatcactaccattctcacatttaaccctaagttaactctgctcatcatctgtaccagttttctaccaacaatttcagcatacanatatcacaaagcatca

SEQ ID NO: 211914 - DNA, 482 bp, Glycine max
  unsure (1)..(482): unsure at all n locations
cggacttttatgaccgtgcatgccgctttggagtgaacatggaccacttatttatttcaaaaggaagtcatatctagtcaaggtctgagagaccatacaagtttcctaacgatttctaattatgtgggccattaagtctatcatatgctgacaatagccgagaagcccatgaatctcttcgggggcggagtaggtgtctgccatcgccttggccttggctaacaatcggggaagttcttgactcctgttcaaggtaagggcaaaccgatccatccacatggttgcctcttggtgtaaagagtcgatcacccttcctctagcctctntttccgcgtatacttgggcatactcatccgcgaatctatgctcgtgggccgtggctagacctaactcttcttggtacttggcgatgatagctagcatgttggtctccgtctcgcataaacgctgagacaagcttcttttggaccttgacaggcaac

SEQ ID NO: 211915 - DNA, 279 bp, Glycine max
  unsure (1)..(279): unsure at all n locations
ggacttagncaaaatatccgcgggctggtcattagaaccaatgaactcagtgacaatctccttggacagaagcttctctcgaatgaaatgacaatcaatctctatatgcttagtcctttcatgacagactgcgtttgaggcattatgaagagcagtctgattatcacaatacaacttcatttgcaactcttcacaaaacctcaattcttgcagaaattgtttaatccacatgagttcacaagtaaccatagccatcgatcgatattcagcttctgcact

SEQ ID NO: 211916 - DNA, 113 bp, Glycine max
acctggggacttgagaggaaagctaaaaaccccttaaggtcacctctttccttttttttccccattaaagcgtctttcagcttttattcaaggcattctggggggaagccctt

SEQ ID NO: 211917 - DNA, 394 bp, Glycine max
  unsure (1)..(394): unsure at all n locations
cccaacttggacatgtattttcgggctgcttcggctaagttattcaaggtggacacactntttgtttcgcacgcaaagtcatatgtgtcaggtgaggggagtccctatatttgacaattatgtccttttctaaccgttggagaatgcattaaaggcaaacgtttcattttccttttaatgcgggtgagtgcagtgcacacacattactcttgcatatgtgtcactcaaggagtaagcatgtactggagacacgatgcataggttagtggggttgcatcgtggtgcgaactatcagggcttcatttcagctcctgccagttaccgaagattcgcacctccatttaaatgaaatgtacgtttgattcttcatcacctccacttttgaatttctact

SEQ ID NO: 211918 - DNA, 378 bp, Glycine max
  unsure (1)..(378): unsure at all n locations
taaagaagaaagagaaatgtctcataaaatggttaatatgatgaacagagataataaagcataatattattgtatggataatttaacttttattatttatattagtagggattatttctatgatttatacttttttcgtgctacgtgtaaaacaaagctcttttaaaaaagggggttaaatctaaatttgtcatcccttcagaaaagcatagagttctgcttttcgtttcaagtaaattaaaaattatagcagcgcacgtgtaattatgtcaacatacatgtgtttntttaagatagcaacatatatgtaaagagtgtaaaagtcaccacctccattgattgaggatgaaaagtggaattactatcttgcccttttta

SEQ ID NO: 211919 - DNA, 270 bp, Glycine max
cattccatagtcagagattcatgccaaaaatcattactcaatattagttgttctctcacaaataacgatcacactttcaccggggtgtggctaatgagtaccttcacaatcaaatttgtcaactgactaacatttccaatcatgatcctaaatctatgttcctcttttctaatgaatgcatgctcattcaaagcatatgaactacacatttcaattcactcacatgattcaattgagcacttcacaccaatcacctacacttaatttaaa

SEQ ID NO: 211920 - DNA, 323 bp, Glycine max
  unsure (1)..(323): unsure at all n locations
tatttttttgtatttgctaatcaatagtttatattttgaatgaagaacttaagcttctagaatttggtaaaaagattctcctcctaacaaacttaagttattaacttacaatgaatcagaaatctatcatccatcgtatgtaaaatgtacacacataactatcacaaaacacatcttatgttatgggtgtcctacacttactaaacacacataatngtcatcaaaatcattacatttcaaaattctctataagatacatgataattatctacttttgaaaataattacctttatttgctnttttattgcagntactcatactg

SEQ ID NO: 211921 - DNA, 467 bp, Glycine max
  unsure (1)..(467): unsure at all n locations
agcttatgagaattccaagctatataagcaaatagtaataatttatcatgacaaaaagctatcagaaaggaattttccacctggtcaatacgtattgttatttaattctcgattaagattgtttccaggtaagatgaaatccaagtggtttggaccattcatcatcaaagaatttatgccacatgaagcagtgatactagaggatccaaccaccaaaaggacatggactatgaatggtagtaggatcaaacactacctaggtggagattttgagaggataatcattgttgtccatctacaagagacttgaaccacaacaaagatgttcagctagaaagacgttaaagaagcgctcctacgaggcaacctagtatttctaaaccttactttgtaattttctttttggctaaattcatatctgcggtatttaaatatttnnttgttaaacatatcgtctaaattatttt

SEQ ID NO: 211922 - DNA, 261 bp, Glycine max
  unsure (1)..(261): unsure at all n locations
gatggggacccggtgcttatatgttttangataanggctacgtangagtacgtgagctctattgaaggtacgcaactggggatggtgggttcatgtttgatttgaggaatgggagagttatttgcccatcgccaatcgccacctagtaccacatatgacgggtgccccataatccaacaagcttgatgtgataaagcgtggaagagtcagtcttcctacttttgtttgttgaccacagagtggtacctggagatatgtcgc

SEQ ID NO: 211923 - DNA, 390 bp, Glycine max
  unsure (1)..(390): unsure at all n locations
gaccttcatgattctcttctatgtaaccatgattttaagcttgctccttggtagcttaagcttatctttgcatcttttctgactntggaaccatcattgtacgttttacgcttccttcgaaaaaacttatagaaaaagactttgtaaaagttatctttttatgaaatggatgttattttcgtgaccttcactgaactctggtcacattggcatgatcgaaatttcaaaatgatattccttttcgtaaaatccgaaacaaccctcatccctttcatgtagtgacatgagtatttgactcacagtattgttggtaactctatttctgaaatccatagtaatgtccttcgttatggcgtaatagagactcgcgttggaccgacaagcgtgaac

SEQ ID NO: 211924 - DNA, 359 bp, Glycine max
  unsure (1)..(359): unsure at all n locations
gctgaagncctctgtctgatatggtcttcaaaaatcgccacacaactgccttaaacacgttaagttctgcaaaacctcaatcttcatgaaagaagcagttcaatctaggctttgtttgaataaacttccccataaacacttataagagaaaaaaaaaatacgaagaaaaaatagattaagtttctttcacaagttaaaattaacttaccacctccacttttcgggaagttaaataggagaacttctataaagttgaagatttaacccatggaacaaactcaatatgttgtaccttattttcttctcttatcagggcttatggganagtacatcaaacatggctgctatcccagcttaca

SEQ ID NO: 211925 - DNA, 288 bp, Glycine max
agagtgtgggaaagtggttgagggcctctgtttaagagaacctataattggtttggtaagttttggtttgattcagatgaagcggtggatgggctataatagatgcggttagcttttaactatgaaaccacagcagattggatatagaaacttggattcccactggtattattattataatagtagtctgtattattatggtacgggtttcatgaaacggagctcttgaccttgatgctaatatgcttaccatctatccaattttgcccattaatatttaattattac

SEQ ID NO: 211926 - DNA, 448 bp, Glycine max
  unsure (1)..(448): unsure at all n locations
agaattatggaaaggttaggaattataatccataggcttaagaaaaccttttcttaaagtaaaatatatttttttttacgggaagtatataaagttttttattttagttcatacttttaagtaacaatattaattaatgtagtaataatattgataatttattaacttgttatgtcataaaaaatttaacaaataatcatgtataattgtttaataaattatatttttaaatttcttgtcaaataatttaatgttatcaattcaatagatggctgtccaatcaaattatatttttttaaatatggcttattaaaatagaatacgggtggattttttattattggtntatgacatgataagttaatatgctcctagctcatcctcattggtttgatgtttattctactgacctgggttcaaatatggttgcaagatcctaagaaaattg

SEQ ID NO: 211927 - DNA, 289 bp, Glycine max
tgtctcggtggcttatgtgaaccagaataaccctacgtgacttatcttatttgccatctcttttgtgcttcaaactgacttaggggtcccagttgatttttgtatttgaagaattttgtttgttttacaagatttgggtctaccgttagaacccattcgcaaaaatcaatatttgttgttacgtgctttatcatcatgcaataacgtttatgttcaaagaaaaaagtttttacaaatttctaaaatcaaaatccaaccaccccgcttttgatatttgcctttataattc

SEQ ID NO: 211928 - DNA, 389 bp, Glycine max
agcttgagatgaggaagtgtagattgtttattcttcctgcttttattcgctaaccacagagtggtacctggagatatgtcgcgggggtcaggagaccttggggacgtcaggtggggtgctattgcccaaaaccaagcttgaccaatcccgacccaacccgggcatagtcggtcagtgagaacctgtgatgtacctaaacaggtgagctcctggcagtcaacagataaaaggaacaaagaccacaaagcaaagaggcttgtggtggctggccagctgtgaattttgtgtgatatatgggttgtggcctctggtaatcgattaccaagggtgggtaatcgattacaaggcttacaaatgaagacatgaggctatgatggtctctggtaatc

SEQ ID NO: 211929 - DNA, 298 bp, Glycine max
  unsure (1)..(298): unsure at all n locations
tcttcagttggttgtgatgaaaaccccatggatcaatgcatctaccaccagggtcatgggaagaaaatatgttttccttgttttatatggagatgatatttacttgccgccaacgatcggggttggctacatgaagtgaaacaattcttctctaagaattntgacatgaaagatatgggtgatgcatcttatgtcatcggcattatagatacatagagatagatctcgatgtatttttgggtctatcataggaaacatatattaacacaattctatagagaattcggatgaaagattg

SEQ ID NO: 211930 - DNA, 399 bp, Glycine max
  unsure (1)..(399): unsure at all n locations
acgtgggggttcatgtaacttataacaagaaacatataacctattttattgttttcaaaatcacgtgaanagcattntaaaagtaaggtaagaaccaactcaacccaaatttatcccaacatgtttcgcttccaaatttgtattttaaaacaaataactganactagcaatcactagaaatggagcctaaattaacccactttcttaaagggtggtaaataatttaaaaattcttataattaggaacaaagatagtatatcttttagaatattattaaaatcaagttattcaattattgcaacaaaatatatcattntagaatacatgtctattttttatgcaatatatatttacaattttggatacttatatataggtgaccctttaaaatcaacctt

SEQ ID NO: 211931 - DNA, 509 bp, Glycine max
  unsure (1)..(509): unsure at all n locations
atcctctgagtcacctgcngctgcagcttagaccaggcaattcanaatctaggtatccaatacccatcaatttagtggattttcaaggcttgataagtgaaaatgagaattgggtaattttggggtaaactctcatctcaatcaagtctataacattgatttagacttgctcaaactggttttaaggtgaaaaccccagccattcaaaatttgacctctcaacacccaatgtagcctagaaaaggctcttttctttcaccttagtcactcatcttcctcatttgctctgcccaagcttacctacaagtcctaattgacattctaaactagaatcaactcactttagactccaattaccactaaccccaaatgtagcttttcaaaccctcaaaatctcacacttttccactcacatcactaccattctcacatttaaccctaagttaactcgtcccatcatctntaccaggtttctaccaacaatttcagcatacaaatatcacaaagca

SEQ ID NO: 211932 - DNA, 403 bp, Glycine max
tctactacactctagtttctacatgcactccgttacatataaccaagatctggtgagcacaactctactagctggatggacaaaactaaagagttttatgggctcactggaaattatcaggtgatattgacccactttggacagattgttttcctcctcaccattctcaaaagcagccataaactaaaagcttaccctaaatgacactccttataccaccaagtttctagctcggtcacttttgaaatcccgctaactgagtacaaagtgacttgcagcagtttggtgagtaattaagcactcttctatatgtcaaattctacaatcatctacatatcagatatgaatttcatgatgtttcgagtaccatatacttgattatgaaagctacaagactcaccca

SEQ ID NO: 211933 - DNA, 370 bp, Glycine max
  unsure (1)..(370): unsure at all n locations
gcttctataatgtctcattagtcacagagatgacatgtttcatattccccatcaaagcactcacaagtgcacgtatagaatgggaattatactaacccttgcaggtggtatcatcaccttacccccacataaatcaattaccccttatcatgctnttcaacagaacaagaattctacacaaacgaaagtaacaactcattttctactttgcanaccgtaataggaaactgaaatattggatcaagcatgctgcatgtccattattagtctcatgtggagtgcctttggctttgagtgtgagatgatgaaaaaactacagggaaatttctggctgatcaattacctcccaaattaattttatttatttatg

SEQ ID NO: 211934 - DNA, 411 bp, Glycine max
  unsure (1)..(411): unsure at all n locations
gcttcatggaggaatttttctttttagtgatcgacgtcgnacttgaatcaaataaacatgaaaatgcagcaactatgaagtgatcctatgtcgtttcccaacgagcagtgacaaatcaaatgttcataatatacttgcagtaacagtaacgatagtggggggtttgtttgttctgtgattaaagagcataacaagtaaactggaatacgaaactactaatattaaaaacgggttntttcctctgatttagaagccattcttttatcctgcgttatggagaattcgtccctaacagtcaaccacttaatccaacaatatttcaatttactaagcgagaatcaactntgggttttaatacgtgattacgcaccacatacaccagttagcccttcgtccattaagcatgaacat

SEQ ID NO: 211935 - DNA, 338 bp, Glycine max
  unsure (1)..(338): unsure at all n locations
taagatggagccaaacccaatcctctacactaagaactagctcctttcctcctctatgtcctttagntgcatacacctttgtttggttctctatttggttcctaaccctctcatgcaacttctttacaaactctgacctaaattcccttcttatgtataatgttgatcaagtggcctcggaataattaagacggggggttgaattaattattactagacctttaataattaaaaataacccttctaaggcttttactataagtgtaacaaaataaagaccagagattgaaccttacccaaaattaaaaccaataataaaggtgcccaccggaatttaa

SEQ ID NO: 211936 - DNA, 303 bp, Glycine max
  unsure (1)..(303): unsure at all n locations
ttcacatgaaaggtctantttgcagtatgtgtatacaacaacaaaactccaaaatctgtctaacaagtaacattaccaattaccaaaacctttaaggcttattttcatagaggtgctgccatatatcaagttaacaagtctcagctatatacaacgagatacggagttcaaataatataacaagcattatgaacttattattgtcttatctttgatggccaactatacatggattattaccacagaactttaccaaccataactatacacagtaactcagatagatatcaatactctagttta

SEQ ID NO: 211937 - DNA, 394 bp, Glycine max
  unsure (1)..(394): unsure at all n locations
atttatattatacaacctttaaatacatagtgtacttttctcttgcctaactttactctgtgatttgtttaacaaaatgttcattgcgagcttntatgtatggaggagtcatcactcgtctggtgtatactcctagcataccggtgtcaacttatatgtaatactacttttcatggagaaaaatgtctgcattttttgcctaaagttgtgtatcttgtatatagtgctgaagttatggcacaaagattatgtntaanatggttgagattttcactttttatgaacaagttgttcctttacacaagtgctggtgtcttgatgggtaatgacacttctctcgtgatacctataggaggcagtcaagaagacattactgacaattttgtctgtatct

SEQ ID NO: 211938 - DNA, 387 bp, Glycine max
  unsure (1)..(387): unsure at all n locations
agcttctccagaccaggagccgatgtgagtatcnnttttccatgatcagggtcatacaaatcccttttctcagttgggtggcccataccagtcggatcacgaccaacaatatagaagtttgcacctgcatctatccgcgccttggcatgccactgtacttcagttggaccaacataatgcataggtgatggaaatatggcaacgatggtagtctcaagatcaagaactccatcttctaggacctaagaagaagcaaagaacttggtagaataaaattccatggattgtgcaactacaaaatgagtagattgctaaatttgagtgatagttcaatcacttttcaaggtcatttttttaacatctattgttgagcacatgcacattatg

SEQ ID NO: 211939 - DNA, 443 bp, Glycine max
  unsure (1)..(443): unsure at all n locations
agctttctagcttttcataggagtattntgtatctcctttggtgctctaaattgtgggagtgtgctcaaatatatggggcaattntggtttgttttcttgcttgattaggttgaattaggggtgtgtatgggatggccctaggcctataatgcattttggaacaatgggacatgcgacattgtccccgttctcctgctattgacgcctaaacgcgcgcccaccaagtgttcggtgaaatgcctcaatggcattagcgcgtgacttttgtaaggaaacaacccatggggcattttggtttgtacacattttctatttttggaatatgtattcattcccggaaaaggctagagtaattgccccgcatatatcctagacctaggaactaaaattntatgcanaaagaacacaagaggaggtgcatattgggtaaaagtaccctttt

SEQ ID NO: 211940 - DNA, 298 bp, Glycine max
  unsure (1)..(298): unsure at all n locations
gaatgatttcaagattgagtcaacaagttcaagatcaagattaatttccagtttcatgagaagaaatcaagaagattcccgattcaagagaagtttgatttccagactcaagagaaagataatgcacgattcaagagaagaaatcaagaagacttcgaaaggggaagtattcaaaagattnttcaaaaaccaaacatagcacaattttggttttcaaaagagtttttctcanaattttctaagttaccaaagtatttactctctggtaatcgattaccaattacctggaatcgattac

SEQ ID NO: 211941 - DNA, 481 bp, Glycine max
  unsure (1)..(481): unsure at all n locations
agcttacctcgaactcaacactgacaatggcagcgagactcaacttttcaatggcagagacaatgggtctcacaggtcacgacgagttccccaatccttgcaccagaaaccaaaaaaggtccttaagtaaccgaaggttccagaaatagacctagctattcaatggaacaacacagctagacaaaatgacacgaacctgtcacgaaagtcttcagatgttaatggagaagaagagagcaccggagaatacacagagaagaagagagtgccagagaatacaccaggaagaagagagcgctagataataatacacgacgaagaagagagcgcgagcaacataggtcgcgtcaaagataattaaaaattaatttcaacataggttctcaacaaanaactgatcgtaacaaagtgatgttaacgttaacatcgttnttgataaacaaaccgatgttaactgatctaacgtaacatcggttttctc

SEQ ID NO: 211942 - DNA, 480 bp, Glycine max
  unsure (1)..(480): unsure at all n locations
agcttcctcctagtagaaaaatacgtcgcctatgttgttttttattgaatccccaacttgttctttcgtttgtatgattgtgcgcctgttgcaatatggatttcagctgttcttgagttttcaagtttgtgctttgcctcttcttaagtggggttctgacacattttgtcgtaagaccaatctttatttcaaagagtcactgtnttctcacaagtgttcttccacttgtgaaaaattttcaggatatggaaaaatatatagacaacataatgatactgttattcttcggaaattatttcttttactatattgaacatgactacttatagaacctaacctctggatgtaatgcctaaagaataacatgtgatacgagataacatgtgagtgactactatcgcttcntatagttatacacggtcagagaacttttggcactcattttgacggtattatgtgaaagtgtgcactagcattaac

SEQ ID NO: 211943 - DNA, 420 bp, Glycine max
  unsure (1)..(420): unsure at all n locations
agctaccacattggaagtacctgttagatactgtgggatacttggtgaattatgcccaaaggtcacttcatatggggaaacaccagtagctgaatgattgaaatgttgtaagaccattggcccacatcaagaacttgccctaggaagttggtttggtgtgcacggaggctcgcaagtactggtcaatgactctnttcaagacttcaatctgttcatctgattggagtggtaagtctaacttatccgcaactttattccacttaaatgaaacatcgtttgccagagcctgctaacaaataanaagtctctatcttatacaagactctgatgcattcatgatacttccaacaatttcatgaagataatgtatagtaatagctgtgtaatggatgacacatgcctagatgaactctttgaaat

SEQ ID NO: 211944 - DNA, 370 bp, Glycine max
  unsure (1)..(370): unsure at all n locations
tcttgattcttgattcttgaatatcaatttcctcttgaaccttgtaatgttcttgattcaatcttgaacatcttgaactcattctttgattcttgagatcatcatctttgttatcatgaagtgttcttgacctttgagncttttgtcatcacctttgttatcatcaaaacttctttgaatcaatcttgattcatcataaagcttgcttntacagacttctattaggcctacaacatcaatcatgagaaaaaatggcactgaagttcagaaaagaactctccagttgaaagacatgtctggccgaagtgttgagtaactctatgggggaaattttgcattgtagaaggacaaaggttgcaaactatttgtg

SEQ ID NO: 211945 - DNA, 367 bp, Glycine max
agtgggtctgagaagacgcaaatttgattatcctgctttgatgaataaaaagcttgaggaaaatggagagaataagaaggacggaggaacctatgttgtgactgtcgttcctacatggccaaaattcccactaactcaacaatatcaatactcagccaatatcagcccttctgattacccaccaccctatcagccaagaacacccaatcatccacaaaggccacccctaaatcagccacaaaacctgcctattgcacatccgataccaaacaccacccttgacatgaaccaaaacaccaaccagggaaggatatttcagaaaagaagcctgtagattcatcccaattcaatgcatatcctgactact

SEQ ID NO: 211946 - DNA, 496 bp, Glycine max
  unsure (1)..(496): unsure at all n locations
ggatcttaagtcacctgcagcatgcaagcttacaagcaagcttccatcacatgttgtataattcttcttaatcccattacactacagatgctcttgtatggcgtccaatatttgtcgtctcccgttcaaacaatttatacaaggacaaaaaaaattttgtccccaactggttgacttctttcgaaagcaaattgtgagagctcttcgaaaccttcctcatatgcaaggctcatgcaactttcattcatccaacttcgatccatctaaataataactctgtgatactcgcaaaattatttgatgcatgaaaatctcactttttcattataggtgtggccctatcccattcaggaagacattntttatggtagcttcatacgtcaaggttaagtctattntgttaaatttgacaaaatttcggaacatttcgattgatctccagtaccaacatgaaaggggagattaatgccaacaatcagtatgcctcagagacact

SEQ ID NO: 211947 - DNA, 298 bp, Glycine max
  unsure (1)..(298): unsure at all n locations
atatcgagacgctcngaaatgaacaacggaagctcttgagaaattgaaatggtcataactattcactcagatgtccgatttacacgcataatatatcgagacgctcgaaattgaactactgaagctctctagaaatctaaatgattataacttctccactccgatgtccaattgaggaacatcagatatcgagacgctcgaaattcaacaacggaacctttcaagaaattcaaatggtcataaattttcaaacggaaatccgattctagcacaccacatatggagacgcctcaaattg

SEQ ID NO: 211948 - DNA, 434 bp, Glycine max
  unsure (1)..(434): unsure at all n locations
gctntagcttctataagaatcttcttaatgtatcttctcaaggaggtgagcttagttatgagaggggtatgtgtagctaagctctagcttctcgagaaagctttctctaagaagcttctcaaggaagttttctcaagaaagcttctcaaggaaggtacctagtctataaatagaagcatgtgtaacacttattgtaactttgatgaataagagtcttgtgagacacaactcaaagttcaacttctttcccttnttcttccttcaagtttgngctcccccctctctctttctctccctctttttttcctccattgaagcatcctctccaagcttcttatccaaggcttatcttggtgggaagctccttcttcatggcttattctctagtggatggcgccttctttcacctcttttccttttgcttctgctgcatc

SEQ ID NO: 211949 - DNA, 461 bp, Glycine max
  unsure (1)..(461): unsure at all n locations
agcttccatcagaaggagcacgatttttagtttctctaaagaagtctgaacttttaagtttaattctcaaatgatcaaagttgaaaaaatgcacacacatgacctctatttatagcctaagtttcacacaaaattggagggaaatttaaatttctattcaaatttcacttgaatttgaaattgaatttgtggagccaaattttggagccaaaatttcactaattatgattagtgaattttagctatggctcagcccactaatccaagatcaagtccaagattctccactaagtgtgtttggtgtcatgagacatgtaaagcatgaaggatatgcaaaaagtgtgactatatgatgtgtcaatggtgtgtaagaagcaaatgtccacctcccnnctctaaaattaattggattgggcttcttccaattcaattacatttatttctcaacacacacattaaat

SEQ ID NO: 211950 - DNA, 333 bp, Glycine max
  unsure (1)..(333): unsure at all n locations
ctacctcatgcactcctctaatgactatggcatcatttctggcgctaaactgctgggagttggaggccctcttctcaattaaatttctaacttcaacaaaaagtatgtcttcaagggctccaccactggcagcatctatcatacttctctccatattactgagtccttcataaaaatattggagaagaaattgttctgaaatctgatggtgggggcaactggcacatagtttcttaaatctcttccagtactcatacaggctctctncactgangtgtctaatacctgagatatcctttctgatggttgtggtcctgaagcaaggaaaagttt

SEQ ID NO: 211951 - DNA, 288 bp, Glycine max
taccatgaaaaattcaaaccaagctaaaagatactgaatctctcattatcacacatcagctcatcatatcaaataccatgaattgagtttacatatggatttattccaaatcaattgtgcctttaacatatctaagattcttttgctgctgaaatgattctactacacagtcatgtccttgtacaagctactgcatgcaaatgcaggccttgtgcactaatacataagcacctataggctctatcagtttcatcacttttcagctcatttcttgaaaattctctttga

SEQ ID NO: 211952 - DNA, 396 bp, Glycine max
  unsure (1)..(396): unsure at all n locations
agcttgggttcctaagcttagaatngcatttgggcactcatttcaaatcctttatgatgttcctatgtatacaaaacagtcccacaatcccaatcttacaaaatcatattcatatgtcattgaggcatttcaccgagcacttggtgggcgcatatttaggcatgaatagaaagagagtgggggcaatgtggcatgccccattgcttcaggatgcgacatangcctaaggccatcccttacaacccctcaattcaaacaaatcaagcatgaaaacaacccaatattgccccacaaatntgagcacattctcacaatttagagcaccaaaagatgaacaagatgcaccaatggaaagctaaaaactcaaggattaaatacttacttgttggagtgagt

SEQ ID NO: 211953 - DNA, 342 bp, Glycine max
  unsure (1)..(342): unsure at all n locations
attcaagtgatgaatgtggtgctagtgtttcctgtcaattaagatggtgacatagctaacaaccaatgtgtacatggtgaattaattgaagtatgttatgattacttcaacttaaaggaaaacttaaacctaccaagtgaagtacagagtgatgcacatntcaggccggtggacaaggctggtggtggtaagaaggctactagtggaggtaacaagttcgttggtggaggtaagaagcttgctagtaagggtaagaagcctgctggtaggaataacaaggcatgtaatagaggtaagacgcttactttgtagagaacaatcgtacagtgatgattcagatga

SEQ ID NO: 211954 - DNA, 362 bp, Glycine max
tcgtatctagtcaaggtctgagagaccatacaagtttcctaacgatttctaattatgtgggccattaagtctatcatatgctgacaatagccgagaagtccatgaatctcttcggggcggagtaagtgtctgccatcgccttggccttggctaacaatcggcgaagttcttgactcccgttcaaggtaagagcaaaccgatccatccacatggttgcctcttggtgtaaagagtcgatcacccttcctctagcctctttttccgcgtatacttgggcatattcgtccgcaatcctatgctcgtgggcagcggctagacctaactcttcttggtacttggcgatgatagctagcatgttggtc

SEQ ID NO: 211955 - DNA, 438 bp, Glycine max
  unsure (1)..(438): unsure at all n locations
atccttaagtcacctgcggcatgcaagcttgagatgaggaagtgtagaagggtgaatcttcctgcttttattggtgaccacagagtggtacctggagatatgtcgcgggggtcaggagaccttgaggacgtcaggtggggtgctattgcccaaaaccaagcttgaccaatcccgacccaacccgggcatagtcggtcagtgagaacctgtgatgtacctaaacagacgagctcctggcagtcaacagataaaaggaacaaagaccacaaagcaagaaggcttgtggtggctggccagctgtgaattttgtgtgatatgtggattatggcctctggtaatcgattaccaagggtgagtaatcaattacaaggcttaaaaatgaagacaggaggctaagatggtctctggntaatcgataccacggnngtgtaatcgata

SEQ ID NO: 211956 - DNA, 423 bp, Glycine max
  unsure (1)..(423): unsure at all n locations
agctntataagtgcgggtctgagagacgaatgtctaattttctcgatatgtgaagatgatgttccaagtacttcggatttggtccgaccatgccctcctgatttccagctgggaaattggcgagtggaggaacgccccggcatttacgcaacaagcataatgtaaacctttacggttttaaaagctctatagttgggcctgggctttagagttctcattttgttaaggctttgtgtcttttgtttttgaatttataatacaaggatctttcttcatctgttcctggtctctacccattctcattcatttgcatgtttactcctttttctaaaacggcagattcgatgacgagtcccccgaaggtactaatacctgggacccgtctatcaacttcgagcaagaaatgaatcatacggaagatga

SEQ ID NO: 211957 - DNA, 411 bp, Glycine max
  unsure (1)..(411): unsure at all n locations
gcgagttgatctgaccaaatttatattgatagagtccatcgtatgcccttctaattataccatgtatttgatgctataccataaaatatcaccttatcctgacaccttgcgggtcccaaaatgtgctccttattttcaaaagaataggataattttgatgcatatatcagatcatcatgataacaaccttgttaggcatgcttaatggtgtgtctctgtgaatttggaccagctgaaggtcttctactagtcatcaactaataactgattccacccaatgaaccacaaatcaaagaccattccttatcaatactcatctattggtgacgaaaactcatagactacatangtcatatatctcaaaccatgttaagagggagtagtaccacgcccatatatatcacattattg

SEQ ID NO: 211958 - DNA, 438 bp, Glycine max
  unsure (1)..(438): unsure at all n locations
aatagaatacaattatagaattctgaaaatggaaactgtaattaatatttcgtctgtgaacaggaacatggcaatgaaaaattcactcagcattgactgataatttcaatgtaaactaagttcaagttattttgcatcatgatttcagccacaaattatatcaataataatcaaatatagcataccaaaaaaaaaaaaaacaaagtcttatcccactagatgatatcggctacatggatcacaagatgtcatttggcacggttaaaatcaaagttccaaaaatattgagcatataacaatacaaaatgcataattttcccatgctagcgaacaagaaaattgtcaagaaacttctgaagttgaactaacactttaaaananaacagaagtgagatacgaaactatatcgagcacataataggcaggatacttgttgac

SEQ ID NO: 211959 - DNA, 357 bp, Glycine max
agcttgtgtgtatatatacatatttttctttatgttaaactagttatcactcccgacattgcctgagacaaaatatataaaccacgagtccaacaaaagttaacttctgactgtaacatatacaaagaaaaaaaaaaaaaagaaaccttgatagaaaaacaacccttttgatcaatcaaaattatgttcataaacatgaagttggactttttatgtgtatcgggtaccttccacctgcgaagacccttcaccataatggtaaatttttcagaaccagatacaatattgttgacatgagaacgaaaattcatctttttgggagacaaagaagaaaacctaggcctcaatgaaactcaa

SEQ ID NO: 211960 - DNA, 429 bp, Glycine max
  unsure (1)..(429): unsure at all n locations
ttatagagaaaatagttataatcttctgtaatcgactaaatagtcaatggtatccgatggttcaaagaagtaatgaattattttatcatttcaattgattaaagtgttcttcccaacatctagaacactttcaagaacaaagtaatcaattagattcttgatgtaatcngataaaagtgttcttgatcacttttgggaacactnttaagaacaaagtaatcgattactatcacctggtaatcgattaaagcactaatcaatcatatgcaagaacctttctcgagtgaatgagtgtcttcttgaacttaagagaaattcacaacttatttttcaccatgagatctttnaaaacgattaaatttggtggttttctgcacctaatctcttctcttcttcattcatgctcaccattttgcttctagtcataat

SEQ ID NO: 211961 - DNA, 461 bp, Glycine max
tcgtctctcacagtctttatatttgttgaccaatccaatccttgggtccggactctcagccacttatgatagccgccgatgatcccattactgcttcccctaagctctctgtcctttcttcacaccgcatcacatgccttgcgaactccttggagtacctttgcattggggtcactgaaaccccgtggtgaggacaggattataattcatacaaccccttgttcccattaagggaacatttggaaatccttcggatgaagatagaatcctgattcttccttccttctagcgagggaaccaattaacagacgcccctctatgctagccaagagttggtcccaattcgtctttctttttttcgacgcacgagcggtgaccttgtagcggatagacgagcctaccttcttggagaaaacggtgcgaaaccagccacacatagagagccggtgtcaacaaacaat

SEQ ID NO: 211962 - DNA, 439 bp, Glycine max
  unsure (1)..(439): unsure at all n locations
tcctctcactcataccactttttatctgcgtcgagcttcatcgcttggttgctctccttgcttcctttcatgctttgatttcacaacccaagtaagntttctttgctttccttttctatttttattttcaaagtttgaacttcaggttagatgacttactctactatttaaagcttcaaattttgttgatgatagactgtngtaagttagttgttagtaggtatattgttaggggttttgattcacatgcaatgtacattgttttggcatgttttggttaggatctgaacgcctgataggggcctatgttgaggcgctgaanagcctcaaatttctanaaatctcgatgatctcgttaagcgcgcttgtgcgctaagcgagtttatagtttctgtgaattgtgggtttcagatgaactcctaagcgagtcatcatttta

SEQ ID NO: 211963 - DNA, 414 bp, Glycine max
agcttagttacggagctcgaaacaccccaaatatcatctccaaaacggaaaagtttgtttcttctaccagaagtctttattttgccatggaatacatggcggaactcgaggcttttgataagaagagacaaagattgaagacggtgggagccactaattacaacagcaaccccaaacaaaacatggaatacttgaacgagcagatagcgtatcatagaaaacaagtgcagcagtacaaggaagtttcgctatggagccaaacattggacaaaaccgttgggatcatggctaagcttgtttgcattgtatacgctagaatatgttctggttttggaggctacatttctaattgcaactgctatgaaatcaatgatgttgacaacaacaacaacaattgttgttgctcttggaaca

SEQ ID NO: 211964 - DNA, 354 bp, Glycine max
  unsure (1)..(354): unsure at all n locations
caaaatatgaaaaggagataatactgcatcttatgaaagggaaattctaactctgatgaaagactaacacttaaaagtagtacttaaaaatctgtacataagtttattgaaattatgaacttttttcttctcacgaataatggttgacatgggttacgtaggtagaatccccatatatatatatataaacatcaattaagttattgttaggtagggctaaaatctggtctgagtcatactctttccctttctgctagacattataaaaactgagtcatcattttcacatanagaaagganaggaaggtcatctctcaaattggtccttggtcggtggtacgcggcaacttctca

SEQ ID NO: 211965 - DNA, 290 bp, Glycine max
caatttgaaaaaccacatcacctagacatgttctaccatctatgcttctcccaatccaaggatgtgtctatagttgtaagattatctgatgagggtcaagaatctagtgaagggacctctgttgttaattggtgatatgaatgagatcttaagcgcttcaaaagtcatgggtggaaacttttcaactactcgagccttgctttatattaatacctctgatcatttaacatgactgacatatagactggtggaagtttctttacttggccacaacctaagggagaaatata

SEQ ID NO: 211966 - DNA, 378 bp, Glycine max
  unsure (1)..(378): unsure at all n locations
gaaattctataaatagaccttccatctttaatggagtgggttaccactactggaaaacccgcatgcgaatctttatagaggcaatagatttaaatatttgggaagccatacaacaaggaccttatgttccctttataatagccggaagtgcaacaatagaaaaacctagagcagactggactgaggaagaaagaagaatagtacaatataatttagaggccaaaaatattattacatttgccctaggaatagatgaatactttaggagttcaaaatgtaaaagtgctaaggatatgtgggatacactacaagtaacacatgaaggcacaacagatgttaaaagatctangattaacactttaactcgtgaatatgaac

SEQ ID NO: 211967 - DNA, 374 bp, Glycine max
agcttgaatcgatacaacagttgtgtaatttattaccagacataaaaatttatatttcaagtctcaagagtcacaactcttcagaaactaattgtgtaatcgactaccacatttatgtaatcgattaccaataaggaattttcgaacagtacacccaagagtcacaattgttcaagaagtttttgaatggccatcaaaggcctataaataggtgacttgcgatacgaaattctttagagttttttctgaacaacattgtcttatcctctcaaaaccaaattgtcttatcactctcaaaatattccttggccaaaacacttgcaaattcaataaggaatcttgatcgatcttcaattgtaatatccttctcttaa

SEQ ID NO: 211968 - DNA, 420 bp, Glycine max
  unsure (1)..(420): unsure at all n locations
agcttcttctgaaagatgtccattttcttctttaagaaggttcttccggaagttagttnttttaaaaaatatattttattttgtaataatttacttttaatggataaactaaattgtaaaataattaatattattatacataaataattaaataattagtgaacgtaatcatgactaatatttataatttgtttnttacgcgcatgtaaaatattaatttgtgtgacaatttagtataatttaaaccataaaaattaattaattcgtaaattttattaaaaatataaattatttattatgataacatttaatttctattacaaaagttaatatataataaaaaaatgattattattttataacaaaatgaagaaaaaagaattctcattttataataataagtaaaataaataatattta

SEQ ID NO: 211969 - DNA, 284 bp, Glycine max
  unsure (1)..(284): unsure at all n locations
ttttatatgatatatanttaattttttcaatacttatatataagtggcttgatgtattattttgtgcaggaacctcaaaatgtcaagatccatcctgagattgtttaagctacaaaagcattgtgcctaatttaatatgaaataatgatagcacaaaagttagtctgtgtgagcatgcacggaatgtgacttgttgtattatantattaaaagatctggatcgtatatagaagatcatatgttctaaatttagtgtgattattgacactaaaaagttatgagaa

SEQ ID NO: 211970 - DNA, 400 bp, Glycine max
  unsure (1)..(400): unsure at all n locations
agccctttgataatatgtatgtatgtaaatatgtagcatgaaatgccttgcaaaatgttgaatgaaatgccttgcaaaatgttgaataaaatgccttgcaaaatgttgaataaaatgccttgcaaaatatgaatatatatagcatgaaaatgccttgcataatatgaatatatatagcatgaagtgccttacaaagtgttagaatgggtagcgtagaagtgtttttcaaaatatgtgcatttatgagtaggtaggaaaagaagccttccaaaaaaatgtgtgtatatatataggatgtagcatgaaaaggtttgtcaacaaaatatatgtgtacatggatgtctgttgtaaagtgcctttcaccaaatttttatgtgtgcanatgcatatgtgtcataaa

SEQ ID NO: 211971 - DNA, 390 bp, Glycine max
ggctaatgggtagcaaataccaaatttggctaataaagaaaatcaagtaaaaaaactaaaatacctgaatatcctcccatatcaaatccttctgagcagcagggacttgcttccaggtctcgtatgtcacgtcaaccttatcatgagcgacaatccccaaatatgttcttaatttcttcttgtggggactgtcggccttgtcggtcgcaggatcaacgtggaccactggtctctctgatgtcagaccagtccaaggatcgtagccatgtggctttgtgtgtccgcttcaaggtagacggagacgctgatgtcagaccagtacaaaagatcaaagaaaatggacctcttcttccatatgcaagtcttacttttatccttcttttgggtctt

SEQ ID NO: 211972 - DNA, 318 bp, Glycine max
  unsure (1)..(318): unsure at all n locations
cttttactgctgaccacagagtgtgtcctggagatatgtcgcgggggtcaagagaccttggggacgtcacgtggggtgctattgcccaaaaccaagcttgaccaatcccgacccaacccgggcatagtcggtcagtgagaacctgtgatgtacctaaacaggcgagctcctggcagtcaacagataaaaggaaaacaagaccacaaagcaaggaggcttgtggtggctggccagctgtgaattntgtgtaatatgtggatggtggcctctggtaatcgattaccaagggtgggtaatcgattacaaggcttaaaaatg

SEQ ID NO: 211973 - DNA, 470 bp, Glycine max
  unsure (1)..(470): unsure at all n locations
agcttaaacaatgccaacatggcattcaattgccatattgaaggatggtgactaatttaaacaaataataacaacaaaacaatgaaatcagtgagtgaagaactgagttgatactagaggagctggtctggtaaacttaatggtaatttcaccctgttcaaaaagatttctcaccatacaattttcaaaggagatcaaagtaaaacagaatttgtcaaaagtcaaaaccacttcttatgtgtttttgtgcagtcttctggtttactattgctgaagggcaattctacctagaacagaggagaaaaacactcaccaccttgccttnttaatgtgacctatgccacgcaccatggacaccacagctatgggagcgcaactgtgccattgtcaatagtatgcaaaagaagttntagagaaagtgatcctcaacacacccagtatggaagcacataantttaacaacattgtca

SEQ ID NO: 211974 - DNA, 429 bp, Glycine max
  unsure (1)..(429): unsure at all n locations
gcttgtcaagtgtctttctggtgattaaagttttatttgangcgnctgcgttaaccagtagatatctgaagctcctagaaaacttaccctgatcgaaggtggtcatcaagtccacgtatcctctagtctcgactctctcgctngcaaaaccgaggagtggaccaacgtgagggtagatagtgtcgggtgagaccttgagtctctagaaggttctccaatacagaatattagtgaaactcccttggtcgataaggaccctggaaaccataaagtttgcaatgatgacggagacaaccacagggtcatcttggttgacagggttgatgcccttgaagtccctatccatgaaggtgatagaaaggagatttcatcgtaagggtgtgtcaaaaaagttaatgtcgatgtctctgaaggtgtgcatatgacact

SEQ ID NO: 211975 - DNA, 461 bp, Glycine max
  unsure (1)..(461): unsure at all n locations
gcttctagatgatgcgtagggtgacgatgatggtgttgtcagtgatgacatataactctgccagcaacaccgtggttctagccaccaattgggccctcaatctgaaaaaactacatttaaaatttaactaaaagatgtcacttaggttcaaatgcattcaagcttaactcttgacanaaaaataacatatttgaatttttttaatatatataccagtttactaatgtatatatacttgtttttttttaatatgaatacgttagcaagttatacctagatattgtcttanaatacaccaataatatacctagatattttaattaatatataattagagttatattattattattattaatattaataatattattattattattattattaccaaacactccaatatttctatgataaaagcaaattcactttgacaattaanaaagtacctttcttataaa

SEQ ID NO: 211976 - DNA, 402 bp, Glycine max
agcttgctataagacagtatattgttttctttagtatgcacaccatgtgttcatttccttcaactgagaaccccattggttggtccatacaaacattctcttctaaatctccattcagaaagacgatattcacatctatctgatgtagctccaagtcataatgggctactaatgtcatgataatcctgaaggaatcctttcgtgagaccagtaaaatgtctcttcataatcaatgtcatctttctgagtaaattccttagcaacaagtctagccttgtaacgttcaaggttgccatgagagtcacgtttagtcttgaagacccacttacaaccaactctcttacaaccctgtggtaattctacaaggtcctaaacaccattatgttccatgggaattatctc

SEQ ID NO: 211977 - DNA, 408 bp, Glycine max
  unsure (1)..(408): unsure at all n locations
gcaagcttataatgaatgaagattaggttgtcatattgtgatggtcganaaataataatttaacagagtctaagaattacagagcttgtctttagtcactgcttgttatagataatggcactgtgttgcgttcttgtttcatgttaataaactattttttattatcaataaaagtgaatctctgtgtccctactaaaatttaacaaagctaatctttggggatcttttccttatttctttcttttgaagtacaattgtctttcttatctggcagcaatcagtattggtattaacttcagattaaattgttccatgacaatcgtgctgctaatgctgacagggcaagctacaagcaacacacaacctggtcctcaagtcctcaaatcacctttatctatccaaacaatg

SEQ ID NO: 211978 - DNA, 324 bp, Glycine max
  unsure (1)..(324): unsure at all n locations
ttcttgtttacacgcggagatntacgtcaatttttgtgctcacaagaattgtcatactgacatttgagtcacgctgacgggcggagataccctagtgggtattcagataaacattcatttttgcttgctgtaaaacgaaaagcctagatagcatgcagaaactaacgtcgggttctggctcatgggcaataggtgcgacagcccggtgacacgcagagatttacgtcattttccgcgctcacaagatctgtcatactgacatttgagacatgctgacggaccgaaataccccagaggatttccgataacattcttttttctttc

SEQ ID NO: 211979 - DNA, 412 bp, Glycine max
  unsure (1)..(412): unsure at all n locations
tacacatccacgatgcgcgcataaactcactcgtccctgatgcccacctccaactgagctcacgtactccacgtaaaccatctactcggttgtctcaacaccgggtccccatcaatactatgaagcttccagaacatgcaagctaaacaacgttcaaacagcacaagctatcacagccaagcaaaacagatcacaggcagaaaactctgctcaacacatcaaccaaaatcacagctattctcacgtagagaccacagtaacaattccttcgatccaattcgataaccgttggagcgactccaaaaatttactggaagtctatagtgtataagcctgcatttngaccggtgggatatactaacaaacatccagaactcattctgcactagactttncacaagcgaacacacac

SEQ ID NO: 211980 - DNA, 367 bp, Glycine max
  unsure (1)..(367): unsure at all n locations
agaaatacaagaattgaatacaatacagcatcccttcgagacagcttaattggataagatacatgcattgtaggcttaattatactttttatcactcaactataattattctgtgaattctatcgtcccattgtttgtgtacttttcaccatcatattcttcaattgttacatattttatccatccattaaatgagtaatggcattcttacgtgtctttaaaaaattaaaaaataaaaaacaaaacgatgttgtttgataacaaaatcacgccgtttcatgacagatgataacaaanaatgttaaagacttaaatatacttttgatccctatatantaatttgctattatgcaatttggtccataaa

SEQ ID NO: 211981 - DNA, 437 bp, Glycine max
  unsure (1)..(437): unsure at all n locations
gaagagtttcttatccatactcaaaggtatattcaatcctttaactgatttctctattgtaattcgatcttggatagggtntgcaagagattgagttgatagggtttcaactcttgaggttcttgtcataaggttcaacaaggttttgtgattctcgcttgtacggttcaagttggaaaggtgttcttgaatttctttacatgtgcataatgttcatattgcattgaaattcatagtggaaatatctaactggagttgttgggtatgactagatgtaggttctcttgagggaagaaccagtatgaatcttggctgtgattctctctttctctatccctagatttgcaaccaatcttgatattggaattggtatttgcttttgatctaaactctgattctactatgatttgaataaatcgcttttcatgttaataaac

SEQ ID NO: 211982 - DNA, 302 bp, Glycine max
  unsure (1)..(302): unsure at all n locations
tatcttgtctaaatattttccaacatgatagttgtagaactaggatatctatggtatgtcaatgttgaaaaactctttataacgctaatgtcgatacgttaacatcaatntttcataaaattgatgtgaacgaaaacgcggttgcatattcataaataaaaggaattcactaacatcaaatntccaaaaatcaatgttaacaaactgatgttaacaaagttatgttgacattagttttnggaaaatcgatgntaactaagtgatattaacatttgatttaagaaaaccgatgccaacatgac

SEQ ID NO: 211983 - DNA, 374 bp, Glycine max
  unsure (1)..(374): unsure at all n locations
agctagaaagagcccgggtagtcaaagagaagttcaagtccatagccatcaaagtctgaagagagtatgatgaactaagggacgttaatatggccaccgatgaagccttggaatgagaaaccaagaaggcccgagaggaagaacacgaccaaaacaagttttgaggggctntatagggcagcaatagtgagctcaagctccgaagaggtgaaaggaatcatcacgggtcaaaggcatgatcttgaaggacgagctaaaggtttgccttaagtcgaaaagaaatttgtcccaacagttaagcgagactgaagggaatatgtgggccatcatcgataagtgcaaagagaagctaaatctagcggagactcacgagc

SEQ ID NO: 211984 - DNA, 463 bp, Glycine max
  unsure (1)..(463): unsure at all n locations
ctgcagcttgatacaattgggacttgtttgttctgtgtaaaaattagtttctttataaatgtttagttatgcgtggttatgtaaacaactaagcatcatttgttcttttaattatantttatactgcatatggagatattgttaacttttatagggcattgcttggggggtttagatttacattcttaggaatgttgaaatgggtatgtcacattcttaggtttgttttaagctttgtaaaaacatttccatctaaaacttgtacctagagcatttgagtgttattctcaccaatattgggtggctatagtgcgcagtgggagaaaaaaagaanactgtattcttttagggtatctntatcttactaatacatatttctgggacactcttttaatgatgtaagaatgataatatatcttcagaagtatcattcctgggtattgtatccccaataatgtaacat

SEQ ID NO: 211985 - DNA, 346 bp, Glycine max
  unsure (1)..(346): unsure at all n locations
aatgctccatttatgaanaatagttagtttccaaatgttgttctctgattaatagaatctttggtatatggcatgtattagttcttaatagaagttaatagtgtgaaggtgagaatgagggccgatgaaaatagttagtttaataacattgttttatgacaattgcaggaggtcctcccccaacaaagcaaaactttaaagcaataatatctctgcctattattggtcagaatgtaagggctcacccttcttatgattctaattttagggatcatgtttttgttgatagaggtggtattcaatcatatttataggagaaaactgataacattgttaatgctcttat

SEQ ID NO: 211986 - DNA, 406 bp, Glycine max
  unsure (1)..(406): unsure at all n locations
agcttctcaactaaagagttaattaatttgttctgtagtatgattntaaggcttttcacatattttaatatagatagagtatatataaattctttaggctagattgaataggaagaaaagattaatcagttgttgttgacttgacctttctagctagtttccttccaacaggagctttcttaattcgttgtcctcttccttctatttagttcaacaaggagaagctattctacttgacgcgattagcgtgagacattaattaacatccagcgtgtgttgttaattctctcacaattcatttggaattcttgtgtggaaacaatgcttctagaggtatggaaaaaanaaatgttctgagttttaagtttcattgtagcatttgacgaaaggctgatacttgcatcat

SEQ ID NO: 211987 - DNA, 184 bp, Glycine max
  unsure (1)..(184): unsure at all n locations
acaccatggagatgcagcggaaggccaaggagaaaaggagagaggaggctccatccactagggaataagccaaggaagaaggagcttcaccaccaagaatngcctttgataagaagcttgaagaggatgctttaatggaggaaaagaaagagagaaggggggagcacgaaattgaaggaataaa

SEQ ID NO: 211988 - DNA, 426 bp, Glycine max
gcttgtattgtatagacaaagataaatttgttaaatgcactttccagagtgaaaatccttttatgaggagagatctatatttgtgcaatccaaaaacacaaaaacctctttattgttaaaggccagcaatggctagcaaaggttgtaactaagtggtgttggtgatctagttgaggctaggtgtgaagtccattgcgagtgttgtcagggtattgaaatctagtaatttcttgtccaactatgacgggctatgtttgtgaaatctcatcttatagagtaagaactagacgtagtccaagggtaggatgaaccaatataaaaatcattatacatcattcttcctttctctctctctccaatgagttattggtttgatttgtttaatattgatgttaagcattaaaaacataaacatttacaaatact

SEQ ID NO: 211989 - DNA, 485 bp, Glycine max
  unsure (1)..(485): unsure at all n locations
cgcattgaacctgagaagagcaagattntccggattatcatggtctacctgcagtgagattacacacacttcaccagatttcacccaagcattattccaaaaacatatcaaagatatgatgtctaccattgtgaaatcaagatcggacactatcattagattggcagaaccattgagtcggtccataagttcttttcttttacaccactggaaatccccaaaacttaacctggtaagaatcttcacgagtaggcacctgcaaattctccactagcttaggttcaacataatgtagttcaggcttcagagtcctaagctntgctgttctagaatccggaacatacccagttctaaattctaatccaagtataagaacaaagactcacaaagaactgtcacaaaaacagtacagttacattccccagatcgttgcacatacacaggcttcatacacccctaattctcactaatgatctaggtcagta

SEQ ID NO: 211990 - DNA, 464 bp, Glycine max
  unsure (1)..(464): unsure at all n locations
agcaagcttctcattgttaaactatagacaagcatactttttttcctcgcaggttatagatttataaaaagagattgtctccatagggacttgaattactcaattcctccggataaaagtaaatagttcaatagttatgtacaatttcaatcgaaatgtcatgggtttgtctaactaacgaaagataactaaagtaacaatataaggcaatctacagaaataacaaaatttagtgcgtcggaaatatgtaaaattatggaacaatagtaatgaatttaattaattaaagaaaaatgtaagattggatttcatcgttcataccctcaatatcttaataagattaacatacatgaatcagtttctaacattactgatgtacacattaaatngaaaaaagatgatggaactcaataaaccaatacaggggtgaatttgtttgaaaacaaatgtatgtttataaaaag

SEQ ID NO: 211991 - DNA, 365 bp, Glycine max
  unsure (1)..(365): unsure at all n locations
ctaagcttntaattcattatatgtacccgtggtggtccacatattgtttcatgtattctcattctcgntttcatttactttttatacccccttttgacgtgcttaagccatttatttaagtcatttctcgcttaatctaaaaataaaataaatttccaccgatcgtttgaattgtatcatccgttaatttcggttagaatgaattccgactgtgcggtcgtgccgtaacagcgttggaaatcaaaaaaagaggtaaaataataatataataataataaaaaataccttttagtaaagtaaagcgaanaatcaatcggacgctntctctttgggatttctcgttcttaatggaatngactaataac

SEQ ID NO: 211992 - DNA, 474 bp, Glycine max
  unsure (1)..(474): unsure at all n locations
agctntccggaagaaggttcttccggtaacactaatttttcttccgaaagaaggttcttccggaaagcgaaaaaagaaattattttttttaatgcaagggcaattttgcccattcatctaattgctgggtgcaccagcaatgttgctgggtacacctagcatgtcccaagaaacaaagtaagatgcaacttcatatgggcccatcaaaaccatcgtgggcttacaaaagtccaactggccctacacttctctcacccgatcacacccccaacagttgagaatacatacacccctttctctcaatacatcacattcatggttagataaatggatgaatgaggatattacaattataaaagtaatttattattactaattgatctttagtttttgttggatatatcattaatattataagagatatcagctganaaaaataattaatattacattaacacattanaatgacaatta

SEQ ID NO: 211993 - DNA, 368 bp, Glycine max
  unsure (1)..(368): unsure at all n locations
ntaggcccagtccttactgattacacagcacttacgatgaaattcatctacaatgaccaattgattgagttagtgggagatcgcgactcatcttttcagatgatatcaccctcccagttacgcaggttggtggacacaggtaacaccagtaccttcttccacattaaaatggaaccttccttggagacgccaatgactataacccacctaataccggcagtccaaaaactccttttcaaacacgctntcctcttccaacctctttcaactctacccccatctcgagccacagatcacagcattacccttcttcctaactcagccccagtcaatgtaaaaccttaccgttaccttcacttccaaaaaca

SEQ ID NO: 211994 - DNA, 455 bp, Glycine max
  unsure (1)..(455): unsure at all n locations
agcttcacaagcaagcttccatcacaaggagtgcagttatattcgcccaggcgagcttgagctcgctcatgcgagtttcttgctcagggttgacgttacattntagcccaagccagttggatgctagcctaggcaaatttagggtcagaaagcttaaggaaaagaccattttgccctttcttttggctttgtttctagatctaacaaacaagcatcaaaacctataaaatcattgatgaatctttcatatttaaacaaaaatattagtaaatgtacaatatatataaacaactagaattaagggtagtttataagaaagctattacaatcaaaggataagtgctaacaatttaatcccaaanaatcattgaaatttgatgatataaacactcacattcccttctggattgataatataaacactaacaatatanatactcacattcncttctgga

SEQ ID NO: 211995 - DNA, 428 bp, Glycine max
  unsure (1)..(428): unsure at all n locations
tctatggaggctggatctttgagcttcaatgaggttcttcaatgttgattttccaccatggagatgcagcggaagataaaggagaagaggttagaggaggtaccatccactangaaataagccatggaaggagaagcttcaccactaagagagtgccttggataagaagcttagagagaaagctttaatggaagaaaagaatgagagagagagagggggcgggaggcacgaaattgaaggagaaaaagagggagagaagttgaactttgaagtgtttctcacaagtttctcattcatcanagttatgacaagtgttacacatgtttctatttatagcctaggtcactaactaaatgaaagctttcttgagaaactttcttcagaagctagagcttagntacacacacccttctaatagcttagctcac

SEQ ID NO: 211996 - DNA, 469 bp, Glycine max
  unsure (1)..(469): unsure at all n locations
agcttgcatgaattacatctccctctttctcaagcttattcttcttganatcatcaaaatcttcatgatttacacattgctcattgcattctttccttgaaaaaaatgaacttaatcattgttatcaaaaagaaaagagcacgctntacagcgcccttaacgaacccgtgctagagctagagtaatgggtgaagtagaggaggtgcaagagcagatgaaggccaacatggaggccatgaaagagcatatggccacaatgatggaggccatgatgagcatgaaaaagataatggaagccaatgcggttgcagttgccgctaccagcgctattgctaaggtgaacctgatgcccccatctagccttaaccaagtgaatcatccaacctcagatatggtaggcaaagattcnggaagtacgagcggcccccattatgtgcatattcaaaacaagcacgctcttccgcatatg

SEQ ID NO: 211997 - DNA, 209 bp, Glycine max
  unsure (1)..(209): unsure at all n locations
agtctcctgctggacaatgaaaaattnggcaaatgaagagggtgagaaagagggagaaacccatgctgtgactgccattctatacggcaagttcccacaccaacatgtcttataccatacaactctcttccccaccgtatcacaagcatcctaataaccaagctggtacgacttcaagcaaacactttctaaccaaacccacaaaggat

SEQ ID NO: 211998 - DNA, 479 bp, Glycine max
  unsure (1)..(479): unsure at all n locations
agcttcgtaaatagcaatggctataaatatatctctaaacattcataatagtcttagtanttagatggaaatttatatattattagcaacattngttttatcttttcctttttggttcaatacctgcattactttatccacatacactgatccttatatgtttccaataacagtgaactntgattccatacataaaatctgaaaaccattcattattattatttatgttacgtagctaaaattagttatatgtaattaccaattgagtaacaggaatcacatggcatgatgagatatggcagaacaatcaatcacagcaaccacaaagtgtgttaaacgttgtaaggaaaaaattacttttcaaaattaaggaataatttgagaataataagtgtgtngtataagaatttgataaactctcatactatagaaataaagataagattaatatanaataatatacgcttatttgcatttat

SEQ ID NO: 211999 - DNA, 368 bp, Glycine max
  unsure (1)..(368): unsure at all n locations
tgctcanacacanacactagcaacagcccttcttctttctcttgtgtggaacacgaaggcagcaacaaaagcttcttcttttctgcgttctttttccgcgtgaatggtctacggnggaggggggatttaagcacctcaagcaactgaaatcgctgctggngatgacgcttttgcccaaccaacttgccattgagtctggtgacaccctgcaacctctgcgcgttgcggactacaccctcggaaatggcctctgctgcctgcaaccctcggaactcccctaccctcaactcgctagtttgactgacgagtccaacctgcctgaaagagctaacaccactggcgagaccagtgccaagtgtcacctcgtc

SEQ ID NO: 212000 - DNA, 425 bp, Glycine max
agcttggagtatgatgtacgaactcctggaattgattgctgcctatgaggacgcaactgaaccattacccaattgcaaatcttgaattgcacttctcgtcttttagtgttagcaaaatgtttcatattcagttgtgccttttccaacttctttctcagctatgcaaaaatagtttccctattgctcaaaaactcatcaactacatcaatctttgaagttcctgtaatcgtattgtggaatactaagaggcttcttgccaaaggtgattgcatagggtgaaacacccacgcctaaatgtttagatgtgttttaagaccattccgccgaaataaaaaattttccctgcgaagatggtttctggtgaatgaatgcgtggagataattgttgataacctgattgatcatcttaccttggcccgtatctg

SEQ ID NO: 212001 - DNA, 485 bp, Glycine max
  unsure (1)..(485): unsure at all n locations
tgtgatttcttcttgacaccatcaaagcttgcatgatttacatatattgtttttagaatttatatcttgttttattttataaagaaaattattattnttatcattgtttgatataatttggtctctatttataaatcaagacatctagtttccttattttccaaaataagcaattttagtcctatcagttgaccatccaaagtcaaatgttgacttctatgtgacatattggtgctgatatggagcttatgtaggcaaatgacatgacacttatgtgaaaaaaaattaaatgaagtgaaaaataaaaaaacatcttaatatgaattaaacttgtgaccctttattcatagacaatgtaataaactactaatatanctcgatttgttagntaaatatattaatattattntctatgtatcaatagtcaagagttatattttntttcaaattatcaaaatttattaaataaaaatattaatatataa

SEQ ID NO: 212002 - DNA, 450 bp, Glycine max
  unsure (1)..(450): unsure at all n locations
agcttgaggttataaggggatatggatgacaattgtcttatttataacatagnttgataactattgtgtatcaatggagccaacattgccaatccccaaatacatgcgtgagaatgagggaatgtgatacattataatcgtgaaccgtgtgtgaggaatggttatttgaaattataagagactaaattataaaatgttatattaaataagcgttttaaagaaaattcaatggcaactgtcaatctttccagtgggcaggatgataacgtaggaggacaatgcttgcccatcatctcttactcacagctaccacactttctttcaagggtacctagaacaagttaactttatgtcgtgtgtaacagggaggtgtacctcancaagctaaaaagataaatatacatatcaaacaacttctatcattaccgatcatagcaccatggtttgatt

SEQ ID NO: 212003 - DNA, 442 bp, Glycine max
  unsure (1)..(442): unsure at all n locations
acacaagaaactaagcctctaaattgaatanaacgttaataactgcggaatcgattatatatatngtgaancgancacacaangcaaattttgaatccaaattttaatagctgcctgtaatcatttttggccactggtaatcgattacatcctctggtaatcgattaccaaagagtaaatctcttgaaaaagactttctaacttaaatntcttggccaaaccttgtgctacttcagtagactctagacactgtcttgatcatccatcttgaatatctttaatttctctgtcttgaataaagctttgagaagcatgtgatcctttggcatcatcaaaacattcagcttgatcctttgtctataatctccctctttttgatgatgacaatccctgaaatcaagaccagctatatacaagatgatagcacgttcacacaaccctt

SEQ ID NO: 212004 - DNA, 453 bp, Glycine max
  unsure (1)..(453): unsure at all n locations
agcttggttcgaggtacttacccgttgaatatctttaacgataaagaacgaatgaagaacgtcgaagaacggttgaaacctttgcgagattcctcacggaaaacgttacggaaacgtttcggaagcgcctcggcttagattttcttcacggaaacaatttttccaagcaaattcgaaagagagagaagtgcctaaggggctgggatcccttccttcttcatttcctcccctatttatagcaaaataggggaggtggttgccgcccagctcgcccaggcgagcagggttgcttcctccagaagcaaccgccttctggagggcccaagtgggcctgggtgctatttgcacccccattnttactaagtacacccccctctgctggttttttggtgattcttttttncgaaagttacggaaacttacgaatntcgtaacgatacttgttttctttcc

SEQ ID NO: 212005 - DNA, 354 bp, Glycine max
  unsure (1)..(354): unsure at all n locations
ntcacaatatccaaacagttcgatctcattgttcatgatactaccttaaacaaagaanaacagagtggaggcagaaatctttgcacaagattcattcaaattccccagagtttttcctacccacatacctcaataacatcctcttcgttccgatttgttaaccattggatcaccttaaaaatttaactaagggttcctaatacangaaatctaagtttgaccgttgggatctactagannatgtctagaacacgagatgtactacctttcctgtgactagcactgcacaaccatttttctgcataaattggcagttttgctgcacaatttaacagctttttctggataattttg

SEQ ID NO: 212006 - DNA, 421 bp, Glycine max
  unsure (1)..(421): unsure at all n locations
gatcctctaagcaccgcngctgcaactttactatgggcatttggtcttccttcactttcttggctccaacgcgagctctgaccactgttcttccttcccgcgatgcttctttacatgtccgcctgagtgggcttatagcctaaaccatacttcccacgatttccttgggtttttatcaggctagttatgccgccattgtctttgcctaaacccatcccgggttcataacccgtccccaacataactcgggccatcattaccgccgcatcggacagacaaggttgcccaaagagggagtccacggaggaaatgctgaccacctcanaagactggaaagcggtttctaacgattcttctgcggcttccacatagtgcatggaggatgggcagcttaccaagatatcttcctcgctgacacgat

SEQ ID NO: 212007 - DNA, 348 bp, Glycine max
  unsure (1)..(348): unsure at all n locations
agatgatgcgctccatgagagggtggatcaaatggagaatagagatcataatgaagaagaaaggaggagaagagggaatgatggtgttcctagacaaaaccaaattgatggtattaaactcaacattcctccatttaaaggaaagaatgatccggaggcctacttggagtgggagatgaanatagagcatgttttctcatgcaacaactatgaggaagaccaaaaggtgaagcttgccgccacggagttntccgactatgctcttgtgtggtggaacaagctacaaaaggagagagcangaaatgaagagccaatggttgatacatggacggagatgaaaagatcatg

SEQ ID NO: 212008 - DNA, 419 bp, Glycine max
  unsure (1)..(419): unsure at all n locations
agcttgaagganaacttgatgccttggtcaatctagtaactcagcttgccatgaatcagaaatctacacctgttgcaagagtttgtggtctatgttcttctgcagatcaccatttagatctttgtccttctttgcagcaatctggagtcaatgagaaacctgaagcttatgctacaaacatttataatagacctccacagcagcaaaaccaacaacagcaaaataattatgaccttttaagcaacagatacaatccaggttggaggaatcatctaaatctaaaatggacaagccctccacaacaacaatagtctatccctccttttcagaatgttgctggtccaagcaagccatatgttcctcctccaatgcagcaacaacaacaacagcagcagcaacaacaaagacaacaagcaact

SEQ ID NO: 212009 - DNA, 347 bp, Glycine max
  unsure (1)..(347): unsure at all n locations
ntggcattgcctacttcatnntttttggtaagattctatcatttgtaggatgaaaactgtacatcgtatgtcttggacaacatcttatagaaatacacgagacttctaatagggtagtttagtttgtccatgttaggtgtaacaatctgggttctaggtttattaatttgtttctgtttattttaggggatggtgggattctaatgtgcggctggggcaaggcaaaattgtagattatgctgcactgaatcagttggctttgtaacctggagtcagttgcccaagatgccatttctataaagatggctgccataatctctgtcccttgatggaatcttcattctact

SEQ ID NO: 212010 - DNA, 218 bp, Glycine max
acatcttagcgacgatcccaaagagtggagaggaatgcatgtgggataacatcaagatgatcgtgtactgataatcgtgacaattatataactggatgctcgaaggaagagcctgactgaaagggtctaggacgagagcattgaaatactgggtggatatgggatcctgcaggtaagggaaatatgtaggccatattacccatcctttgtagaactcg

SEQ ID NO: 212011 - DNA, 197 bp, Glycine max
gaattctcttatacctgtgcccatatgaattcgccaatgactaaccgtctgaattacattggactctcgattctgccttgtacgagagaacagaggagtatgcgacataattcttgtgcgtataccttggagcttggcacagaatgcgtgacgacacagactgagaattctttcgatgcttacctttgcctaataca

SEQ ID NO: 212012 - DNA, 279 bp, Glycine max
ctagagcatcatggaatacaacatactgactgcgatcatgaatggccatcgttcacaccaataataagtataatcttcatttagagaacacaagcaacaagtggacagctatgtttgaactaacggtaacacaggggtgtggttgcactcccttcactcaatcaaggtagcaccaattacaaacaattagggtgggccaaccctattacccatgaccaaagtcgtaccaacgacaaagataatatgattctctcttacctctaaagaagctttcttaca

SEQ ID NO: 212013 - DNA, 477 bp, Glycine max
  unsure (1)..(477): unsure at all n locations
agctntagtagacactgggtggtcctttactttcatatgcaaaagtgtcgnacctcaacataattgctttagaagtaatataataaccaagactagaactatgtcaggagatataataaccaatgatacagaacccagaaatttcactatacaattatctacaaattgtgacatctttgtcaaaaagatgtttataaataagggagacatagtagaattgcaacctgctaaagaacaaatgatcctaggactttattttattacacatgataatagatcaattactattataaaatattatttattaatctctaccaactcacaaatgtcaccaatgatagacgaactcacatcagagttacgaacaaagcgtggtgatacccctaccaaccctatatctaccctcaattcccaatgtccttgtgacatacctggtagtggtaagataaaagactcacaaaagtattgtagtatata

SEQ ID NO: 212014 - DNA, 359 bp, Glycine max
gtcgatctagtcaaggtcttagagaccatacaagtttcctaacgatttctaattatgtgggccattaagtctatcatatgctgacaatagccgagaagcccatgaatctcttcgggggcggagtaggtgtctgccatcaccttggccttggctaacaatcggggaagttcttgactcccgttcaaggtaagagcaaaccgatccatccacatggttgcctcttggtgtaaagagtcgatcacccttcctctagcctctttgtccgcgtatactggagcatattcgtccgcaatcctatgctcgtgggtcgcgggtagacctaactcttcttggtacttggcgatgatagctaagcatgt

SEQ ID NO: 212015 - DNA, 453 bp, Glycine max
  unsure (1)..(453): unsure at all n locations
agctngggngatgntgcgcgtactgatgggttctattatgtgttagctggggatagacccatgcgggcgttgaagagactgcatgggcatctccttccttcctgtttgaccctgttgccccgattcttttggcgttcacgtttgaggaggaaacgtaatcaaactttcctctcttcaatcccacctcgattctttccccggcagacaccaaatccgcaaagctggacggcatgtaacccactagcttctcatagtagaacactggcagagtgtctaccatcatggtgatcatctctctctcaaccatgggaggagctacttgtgccgccatatccctccatcgctgcgcatattctttagaggtttcaccctctatcttgaacatattctgcagtagagtacggtccggagccatatcataattgactgatactgcttaggaaggcggaatca

SEQ ID NO: 212016 - DNA, 388 bp, Glycine max
  unsure (1)..(388): unsure at all n locations
aagctgctgttatgttcaaaagatttttggttattaatttatctcagcctcatttgtcacaagatagtgacatggagttgatggtaaatatttgtcacaacaaagtagttttatctcaacctaatttgttgcagcactccatntttatatattacaattattcatgtttggcatttgcatgtaggtccctgcaactattgctccaccaatagcaaggaataagctaaccataacaagagccaaacaaaggaaggttgctgataaagataatgtagttaaagaaaactgaagacccattttttgttgcatttttgaaagttgttgagttttgaacgttgctgatgaagaacactgaagaagcattttttgttgcattttataataggat

SEQ ID NO: 212017 - DNA, 448 bp, Glycine max
  unsure (1)..(448): unsure at all n locations
acctgaggcatgcaagcttttgagttctcatgttctgtaaaggccttatttatatatccatnatcgaaancgaatcgctggccatttttaaaatattaaaagtaaatttgcatataaaaattgacattcagaaaaatacgtgttcacatgaactgtttccacaaatatatatccaaataggttatatgctgatatgtgcaatttcgaaggcctaaacatatatatatatatatacagagagagagagagagagagagagaaatggtgaacttataataaaccagatttgtcaattgcaggatataaccaggaaagataagtaaaacagcaacaatggaaatggcatcatcaaacaccaaaaccataataagtgcatcgacataagatagataacgcacctaaaccttctttcagtagcattcccactggccaatacttttactctggc

SEQ ID NO: 212018 - DNA, 425 bp, Glycine max
  unsure (1)..(425): unsure at all n locations
tgttcgtctggaatcatngatatgtggtgttagatttaaagattattgattgaagttaaaatactaatttatagatgagaaaagctaagaaggaaatgcacataataattnttagaggggtaaattgctctgtagttaatgtacctgtcatgtgagaaaatagatgttcaaactctgatctacgttcttcattgttgtagttgagtttagctaatataaggctattgtctacgtaagctagacaattcgcatcctctggatatggcattgaaggatagtaagcgatctttgatttgcttgcagcagttcttcaattttaagcaagaccaaattntgaagagttatatcatcaagttgtaatgctaatacacaaaagggaaaaaaagtcaaattatgtgtcgtatcaatattgatttgtcttgatg

SEQ ID NO: 212019 - DNA, 439 bp, Glycine max
  unsure (1)..(439): unsure at all n locations
ctgcagcttattaagggcggcgcggctattcttttcaacnccactcgacacacaacgaatatgatacattcattcttcttccgtatcaataagagacagtggcatgaaggaattttaaaataattagaagtcgcatctctaaattttattttattcatacagttgtttcttatattaaaatcttatacgtcacatgaaaacctcttaaaaaactaatgaaggacgtttttggaatctaaaataaatgaaaaatttaatacacgtattatctctttatataataaatataaataagtcatatattagtattttagcagatgacatgcgtattcgcatcttttaattattatatatttaacaatcaaatagaaagttcgttcgcctgatacacgacctaatacattttaanagacaataaaccttagcatatttaattgat

SEQ ID NO: 212020 - DNA, 484 bp, Glycine max
  unsure (1)..(484): unsure at all n locations
cattacggacactataaaactaagctggaatangcttaatgaggaaagaaagaggttatattatagaggcgcgggggggcggaaatgatggaaacaaagggagagaattgaactttgagttgtgtctcacaagactctcattcatcaaagttacaacaagtgttacacatgcttctatttatagactaggtagcttccttgagaagcttctttgagaaaacttccttgagaaactagagcttagctacacatacccgtctaataactaagctcacctccttgagaagcttccttgagaagattcctaaataagctagagcttagctacacacacctctctaatagctaagctcacctccttgagatgagaagctagaacttagctacacaccccctataatagctaagctcacccccatgacaaaatacatgataatacaaanaagtccctattaccaagactactcaaaatgcctcgaaatac

SEQ ID NO: 212021 - DNA, 477 bp, Glycine max
  unsure (1)..(477): unsure at all n locations
caagcttgaactagatgctagtgtcctataacatatgtttcgcaaagggcattgaaagctggactgcagcaatctcaaatatagatatttggtctacctgtccgaccttcctttgttaagcctgtccagccaaaggtatgtaatattcttatagccattacttgaatttattcgcaaatttacttacaattctggaattggaatacaacatgatgtgctatatatattattcccaaacaaatgtcagtggattgtttgaatttatgctgtacgatgaactaaggagagaattaggaatggatgaggatcttcctgctgtattattgatggggggaggtgaaggtatggngcccattgaggctactgctcgggcacttggagattcattatatgacgagaatattggggctcccgtaggtcacatccttgtgatctgtggtcgtaataagaaactcgctaataaactgagttctatta

SEQ ID NO: 212022 - DNA, 419 bp, Glycine max
  unsure (1)..(419): unsure at all n locations
accttgaaactcagctcgtgtaaggatcctgaatctaaacttctctgattacaagtttatgactgggacaagggtttccaacgactttctttctagttacttgttgatcttgacagaaaaaattaacataccaatcttagctatagtagttatcattgactaagctcttaaggtagtcatgtttgaaagcaagttcatcattcttccttngaaaattttacgtacggtcaacctatgtggtctaaatgcccatttcttttatagtttcatcaacaaatctaacataacaggtatgttgcaagcaatgactatgaaaatcatttgaaaaaattaattatgcatacattaaagggaagcagtgaacgacagggtacacagaatattaaagaaactcatagccttcaactgggattcttctc

SEQ ID NO: 212023 - DNA, 416 bp, Glycine max
agcttgtccttagaacaactagacatgtatttttccgaacttggggatactcgtctaactccgatctaacttttaacggcaaaaacctgttttgattgggttcaggattttcccaagttgccaaagtagggatggggacaagtttggggatgtaattatttgcgtgcactcacacacacccatactatatgttaaagaggaagaaacagaggcattgtttgactgaaaccgtgagtttcaaatacaccacggatgattctgaccataggagtttctgaccataaaaactctacatctgtttttatcaaaataataaaagaaaatgtattgataagaggcaacttcataatgctctctccttgatgcaatttataatggttgatgtgatttagaacactgatttaccattagttctt

SEQ ID NO: 212024 - DNA, 444 bp, Glycine max
  unsure (1)..(444): unsure at all n locations
ctcagcttctgtgatgaatcagatgattcagttgtntgttgatgttacaaagatgatgacaaaaagcccaagagaatgagttcaagaatgagtcaagaacacttcaagaatcaagagaaatttgatttcaagattcaagaatcaagtttcaagattcaattttcaagaatcaagaataaagaataatcaagttgaagattcaagaatcaagatcagactcaatcaagataagtactanaaagttgttcaaaacattgagtagcacatgagattttcacaaaatcttttaccaaagagtttttactctctggtaatcgattaccagtttattggtaatcgataccagtagcaaagattggtttcanaaagctttcaactgaatttacaacgttccaattgatttcataatgggtgtatcgaataccagatattggtaatcgatta

SEQ ID NO: 212025 - DNA, 422 bp, Glycine max
  unsure (1)..(422): unsure at all n locations
agcttatacaatggagggtacaaactacatttactgtatggaaaagcaattccaagaacacggaacactacccatatgaagatctactttagttgacctaatgcaagattggatgttgtactctntttcctacttaattcttttgtccctgtcagaccctaattttgtccggggactatcatttgctaacgtttngattcttgctaaccgaattgagctgcttgacaccagttgctacgcaatatgaaaggtttttcgatgtttcggtaaagaatgtagaaaatactcaaatgggagggcaaaagggtcattttggagtttntctgacccctggctcgcccaggatagcctttggctcgcctgggcccccaaatagcttaggggtgaagtaaccagctcacctaaccgagcaatgttacttt

SEQ ID NO: 212026 - DNA, 375 bp, Glycine max
  unsure (1)..(375): unsure at all n locations
ntagcttctcatctcaaggaggtgagcttagctattataggtgtgtgtgtatctaagctctagcttctctagaaatcttctcaagggagcttctcaaggaggtgagcttagttattagaggggtgtgtgtagctaagctctagcttctcaaggaagcttttcaaagaagcttctcaaggaagtttctcaaggaagctacctangctataaatagaaacatgtgtaacacttgttgtaactctgatgaatgagagtcttgtgagacacaatttaaatttcaacttctctccctcttttcctccttcaatttcgtgctccccctccncccctctctctctttcttttcctccattgaagatacctctctaagcttct

SEQ ID NO: 212027 - DNA, 444 bp, Glycine max
  unsure (1)..(444): unsure at all n locations
agctngaaaggctgcatagacaaattgatccgttatctggaaggcatcatcaatgaacacaaacaggcaaattcaaaaggctacagtgaagcgaaggaagatttggtggatgttctcctaaaattccaggatggtaatgatagtaaccaggacatttgtctatctattaacaatatcaaggctataatcctggtaaagtttacctcactcctttctctagaacttagacgaatgtttaatacttgcaccagaatattcacacatgaacccttcaaaattgtgaactatgctccaatttccatgatgtattattggatgccatctgcatatacctttttgaattcaatgccttcaaagttgttcttattaacgtgaaattcaatcgttgaaatattntaactgcataggttgttatatatgcgataattggtaggaaaatctaca

SEQ ID NO: 212028 - DNA, 198 bp, Glycine max
  unsure (1)..(198): unsure at all n locations
tgttcncncactactctccatccagacaactggtttcnctttctctctcttattcaagcggtgtgtttttcatattttctttgtgtgcaatcggttatgttatgctcttgatctttttgatttggggttgtttgtgaggattgcaaggaaaaaaggctttctgggtctttgccactcttttctgactccacttttcac

SEQ ID NO: 212029 - DNA, 460 bp, Glycine max
  unsure (1)..(460): unsure at all n locations
agcttgagacttcaagattggatcctttgttttctttntcatnacanggaagcttcattaanaggaaggggagtctttcacttcttgaaccctaaccttgttgcctttggaagctaggcttctttgcatgttgttttcatgtttaaaatttcgtgtctgcagccatgactagaactgcacaatatgatgtttttatggaagtttaaaggttaaaaatgagttctttgggtattaaagcataggattagccttaaatttcacttaaataagagtttcctagtaaaagttatgaataagacaagctttatgatattttattagataaaatctgtcacgaaaatgaactaactagtatatttgtatggactggttttcttataatttgacctcacaaatgagtctgttacgtgtgaaaangtacggtagcatataacatcttgaaaacttgattccggaatac

SEQ ID NO: 212030 - DNA, 390 bp, Glycine max
agcttgaacaaatgaaatggcaccttgcagcataacgtaaaacatcatcacaaaatacctatattacctttcactcacccttgcctcaattttggtgtggtatcgaccatcactcaaaatgactctctattcatcctccaattcgcaggtcgacaggatgcaaatgcatgcatgcttatgaattagatgtttaaacgcaacaattaaacaagcgatatcgtgttcaattttacttaaacgcttacggcaccccgttaattgagccaaatggcttcgaattcagtgggtaagaatagaagagtatgttcttaagaagttaaagacacaacctacgaagtctagatgccaataattaattccatatttattaatgctgcgatcatggtttac

SEQ ID NO: 212031 - DNA, 445 bp, Glycine max
  unsure (1)..(445): unsure at all n locations
agcttctgctccaaatattcatatctttcattatacaaaacgtcggnggcagtgttctatatttggatcacctgtgcctntctccgcacatcctgcanaaataaaacaataacgtttcaaattccaacaatgaattataacaagttaatgttttttgaaaaacaacttaaatggcaaggtacatacctcccaagaagggtctctgtgagtctggcataactgggcccatttttccttgcttatgtcgtatctctcacagacagtgtcgtctacaccgtcctaatcggctgcaaggacccatttcctcgtgagatcttgattaaactgcctccatctctcgccgacagtctgaagtaacttctttttcgtcctactgtcagaagccttagtgatttcaaattccgcctgacaataacaaataagggttattcgttacaataatgta

SEQ ID NO: 212032 - DNA, 382 bp, Glycine max
tagatgtcgaagacactggggaaatgtctgaacctcttcttttgtctcttgtatggcctcttcatcgggaaagtgttcttcagatgaacttctctgactcgatccctgaggactgctgggtccaataccttgaccttcaccctgttcctcaacattcactgcatccgtctcaggagcaggagaggttcgagcacatgagggtatttcttctacagaaacattttgttgtacctgattcgaattgtcatgaaaaaggttaacaaatagtttcgtattagctatgattaaaatcatattaagaatggtacctcgacggtagggtgttcttgtggtaagtccggttgttcgacaagggtgcccatctcagcaatagagggagtag

SEQ ID NO: 212033 - DNA, 481 bp, Glycine max
  unsure (1)..(481): unsure at all n locations
agcttanggatgaagtaaccagctcgcctatgttatttgctgttcaacctacacccctcatttcctataaataggcatgagggggttgaaggaagggtccaacacctgaaatcaacaagattttagtgaaattagtgagaagaaggagaaagaagaagaaaaatcaaggccgaggcacttctgtaacgcttccataatgtttccgtgattgttcttcatccttcttcatctgttcttcatctttcttcattcttcaaccggttagtttttatttttgaagctntgaattcattctatgcacccttaggggtccatccttgcttcgcatgtcttcatcttcattcttctaccattggtgatctttttctttgtttaaagcgagtttcgaccgattagttgtgttgtaatctcacttaatcactgttaaaatgaatntcaactgatcgtttgtgtcgtaatctcgtttaatcactttgtaaat

SEQ ID NO: 212034 - DNA, 405 bp, Glycine max
  unsure (1)..(405): unsure at all n locations
gttctctntgctnttatcggntaacatgagccattcaaaagcataaaatcaacacataaactttaccgcttcgcaagaactacgtangtctgagttcttcaccacaaatcgaggatacgtaggagcaaaaaccccacttttgtcgaccaccccttttaataaaaaaacaagagaacgttaatggtccaatgccttaacatttttcttctttcacaaccaagagatcgttaatggtccaaatgccttaatgtttctctcctttcaaaagaatcaaaatattgtttaatgatccaacgtctgaaacgacatttgttcggttaaaatcgatcttgcagaanaagatcanaacaacttaaccaaacgtcgtttcttactcatagaactatgtaggtctgattttctcat

SEQ ID NO: 212035 - DNA, 431 bp, Glycine max
  unsure (1)..(431): unsure at all n locations
ctatcaataagaccttcaatctttagatggagaagggttactcactactggataaacccgaatgcaaatttntatcgaggcaatagatctaaatatctgggaagccattgaaatatggccttatatacccaccacagtaaaaagagtttcaatagatggtcgttcaccaagtgaaagcataaccattgaaaaacctagagatagatggtctgaagaggatagaaaacgagtacaatacaacctataagccaaaaacataataacatctgccctaggaatggatgaatnattcagagtttcacattgcaagagtgctaacgaaatgtgggacactcttcgattaacacatgaaggaactacagatgttanaagatctacgataaatgcactaactcatgagtatgaattattacaatgaatacaaatgaaaa

SEQ ID NO: 212036 - DNA, 434 bp, Glycine max
  unsure (1)..(434): unsure at all n locations
ntcacctttaagtttataggtganacaaacattagagaacttttctattttaattatttaatcacgccnttgttagcaaagacgaatctttgataaagctgatatatattttacatcaaaatggttaataaaatgaccgctacgactaaaaaaatagcattttagttcaatttttaattctaaagataatcttttaaaagctaccaaaataaacgaatgatcttaatttcataatttgaatacctatccatttaatatctatgtaaaattataaaaaaagagcatgattaatatataattacatatttactttattatatttaattcagactttatattttaacttctcatcaacaacttgcttaacctcaaattcatttatttttatcaactttatctaagtgcataattattcattctttgggcaaaatgta

SEQ ID NO: 212037 - DNA, 468 bp, Glycine max
  unsure (1)..(468): unsure at all n locations
agctngagaagttcttcccatgagagcttttttttgcatggaaaacttaaagcattanttatttttatgtctacttttcaggaggagagagaatgaataggcgtatttttttgcctaagaagtactaatactctttgaaaactttgtctgctttttctgcttatacccactttagtcttctctctgtactaaaccttgaaatgcatctgtgctttcaatcaaaggttacacttatactcagagaatattacttttcattaaatacttgaaattaatgctagagcatattcagaaaatagaggaaatataagacatataagagcagtttaaaaccttagcatccagaagcgtagaatagagagttcatcatatgtgcaccttggatgaagaaaacttatgtgacaatataaatcagagtgtaagttctcttaaacgagtcgaatgacatcaatgtggtggatgttggat

SEQ ID NO: 212038 - DNA, 432 bp, Glycine max
  unsure (1)..(432): unsure at all n locations
ntctcgagcgtntcaagctgaaacaacgtcttcatttgacgcttgtgtcttgttatcactcactcgaatntcccaatttgttgttactttcattgttgctgntggtgttgttatcattgttgtttttttccttcttcacgtcattggtctctgcctcggcctccatcgatcgagatcgaacctctttccaccttcaaaccctaggaatccacaacgaagccacataaagaaacctaaccacgcagcacagagaagaaaagggagacaagcaattgtaaggcacaatggagatatgaaaacttaagcttacctttcacttttaccttgtctagaggtactggcctcaaatcanatttttcttttcgatttntatatcaaatacacagcatcatcaatagtatacaataataccttaacgctgaanaatgagtg

SEQ ID NO: 212039 - DNA, 466 bp, Glycine max
  unsure (1)..(466): unsure at all n locations
cacctgccgctgcaagcttcacatattgaagcttaacttcttcatttgttttggctcaccggctacctttaaacttgcgcaatctatgacgccggttcggaaaataaccgtcttcgtattgaatggttcgcatactcttatttacaaaaaatgccaccggtcattttgtaaggatggttttagtacaaccgtccttattcacgcgtcataaaaagcttttaatttagtagtgattgtaatgttatttcaaagaagaatgaaagaacctagagttttcatcaccctcaccaatccatcccaccctagatttttgggtcatntcttcaaagatctccaaaattctttagaaagaatcaacctncctccttctacatcttcaaccctcttacacaaccttatgttcaccacttatagctcctccacttttggaattatattagcacccaaaccattcaatacctccaca

SEQ ID NO: 212040 - DNA, 480 bp, Glycine max
  unsure (1)..(480): unsure at all n locations
gacacttaaaactaagctattgtgtaacactctttggaaaaaacaacaatatcaacaatatgacgttccgtgctatgttagttttagttttaggtattntaagntattagttttgtatgttaaattagttttagttgtaggtattgtaagttattgtttaaatatatctaaattttgctatgttatttaaattctgtatgctacgttagtgatatggtatgttagtttgtattaattctgtatatatattgttttttttttgccgcacatataaatattatcttatatatttaaatttatatttgcatgtaatttaatttatttgtagaatatatttaatttttggtatttggataatatatcttgctattgaaatattcgaatttaaaaaaatataattagctatttatttaaagttgctgttgctgtatttaatttattgagagatattaaatttatattggtatatatttgtattat

SEQ ID NO: 212041 - DNA, 435 bp, Glycine max
  unsure (1)..(435): unsure at all n locations
agctngnngatctctattgagtcgatacatgtatattttgtgtttagctagaagactctctttatctatacactgatatactctgattntatacttgtcagaaagcatatgatatagacagcttgatagcaatggctacaagaggcatgtttttgtgtacgattctgcttactgaatgatctattcatgtttatatcataaaataagggtttaaatttcttacaatatcttcttggatgttgtctaatcatcatcataccctccttggagagaattcgatctcgaattcaactctgtgttacctacatgaaacgagaacacaagtattagttttcgtgtaagcataatattacttctatggagacttgaattccttaaaaagaanaaggaaaatgctctcttatttatgtgcttacctatccatccgtccatatc

SEQ ID NO: 212042 - DNA, 440 bp, Glycine max
  unsure (1)..(440): unsure at all n locations
ctaagctcgaggtgttgatggngacccggngctgagaggaacgaggatattggctacgtatgagcgcgtgagctcaagttaaaggtgggcaactgcggatggtatgcttgtgtctgacttgttgaaatgagagagttgatttgagccattgcccgatcgccacctactaccacatatgatgggtgccccataatccactaagcttgatgtgagaaagcgtggaagagtcaatctttctactttttgttgttgaccacagagtggtacctgaagatatgtcgcacgggtcaggagaccttggggacgtcaggtggggtgctattgcccaaaaccaagcttgactaatcccgacccaacccgggcatagtcagtcaatgagaacctgtgacgtacctaagtatgcgagccctggcagtcaccaatacaagaacaaagccaca

SEQ ID NO: 212043 - DNA, 425 bp, Glycine max
  unsure (1)..(425): unsure at all n locations
ttaagtcacctgcggcatgcagcttcaagggaagagagagaccaatctcttttctttatcatggncttgaaagagtagntagctgcttgctcaaggtccaaaataaacttggctcaatggttatgcgaaacagataccaacatgctatccatcgtcagcaggtaccaaaaagaactaattctagccacggcccacgagcatagagtggcagacgagtatgcccaagtgcacacagaaaatgaggctagaggaacggtgatcgacgcgttacatcaagaggcaacaatgtggatggaccggtttgctcttaccttgaatgggagtcaagagcttacccgattgctagccaaggccaaagcaatggcggacacctactccgtccccgaggagatccacagactcntcagctattgtcagcatatgat

SEQ ID NO: 212044 - DNA, 226 bp, Glycine max
  unsure (1)..(226): unsure at all n locations
acaatataaccactatcataaaattgacttatgctaagtagattatacttcagacctttaacatataagacgttgtctatagagactacagaaggaataccaattttacctaaaccagagatctctcccttaccaatgtctctgaaggaaacttctccnccttgtgtggtttaggtctaggaacatagacctttcccccgtcattgtccaagtactagcttaaacc

SEQ ID NO: 212045 - DNA, 355 bp, Glycine max
actacttccgcttctgagtatgacagtcactgttataggagctgcggaacactcagcagctgctttgaggctcataatggatggtcgtttctccgggagcgacgcgtccagctcaggtatgacgagtattctgatttccacgaggaaatagggcgccggcgggtggacatcactggttactcccatggccaagttcgatccagatatagtccttgagttttatgccaatgcttggccaacagatgagggcgcgcgtgacatgacgtcctgtgtaaggggtcagtggatcccgttcgatgcacatgctatcggtcagctcctgagattcccgtactgctggaatacgtccatgagt

SEQ ID NO: 212046 - DNA, 346 bp, Glycine max
gaggagggaagacatgttgggtgtacatgtcatgacagtgaattttatacaaggagagaaaaacacctcaagaaccagcaatgaaattgttagcactcgaggaaatctaactaacctgtgtagatatttcttgggagggtacaaggaataaaagagaaggcccgggataggacaacccttctttctctattctgacgaaagtatcagctgcaccagaaaccatccatgcaatttgctcagcagtagcagaggttccactggcttctatcagatctttccctgtagaataacacttcacagattctaatccccatggattcaaaaagaaagagttaccctcttcatc

SEQ ID NO: 212047 - DNA, 412 bp, Glycine max
  unsure (1)..(412): unsure at all n locations
agctngaagcttaaggctgaagcttgttgattttttggctntnacatgcctaactcgtttgagtggtatttgcattggctattaactacattngcgcatcttagtacatttgatatctattttgcattgtacatcatcatagggtgagagaagaaaattttctaagttataaaaatttcttcaaagacaaaaactctatgtattaatcgattacggagttgttgtaatcgattacaacaagttgtctgaagcttgacgagttaagcctcatatcggtttaatcgattactctgttgtttgagacaatgactgatttttcacgagtccctgctctaatcaattaccaggtggattaattgaatacttctctcttgttcaagttgttcagaggtgaacaagaacacttttatac

SEQ ID NO: 212048 - DNA, 451 bp, Glycine max
  unsure (1)..(451): unsure at all n locations
cgcttgtggngctnttatggaggctggatctttgagcttcaattatgtcctttaatggggactttccaccatggagatgcagcggaagacaaaggagaagaggtgagaggaggcgccatccactatggaataagccatggaagaaggagcttcaccaccaagatgagccttggataagaagcttggagaggatgcttcaatggaggaaaagaaagagggagagaaagagagaggggggagcacgaaattgaaggaagacaaagggagagaagttgaactntgagttgtgtctcataagactctcattcatcaaagttgcaacaagtgttacacatgcttctatttatagactangtagcttccttgagaagctctcttgagaaaactttcttgagaagcttctttgagaaaactttctttggcagctagagcttagctacacacacccctc

SEQ ID NO: 212049 - DNA, 441 bp, Glycine max
  unsure (1)..(441): unsure at all n locations
agctnnggccaaagcgaagttgtgtcttctattgatatttagcaacatttaacctcttcttaagctacattggtattatttaaggtaatagaaattaataatcataatagaataataattagatatacttgatagtacaattaggatttcaaacaatttaaaagttttttttttaagtttcgaagtatttaataaaaaaatttatataataaataaattttgttgtttcaattaagactaagaaatttaataagatttgttcggatttaattaagattgtttacaattntaaaaaagttggattcaaaagtcacaaatttgatggaatcttttaagatgaatttaatgaatttatgacacttttagtaaaaatcatataaacaacttattcaacctttagattcatgatattttttttcttatttcctacgatgacttatt

SEQ ID NO: 212050 - DNA, 338 bp, Glycine max
  unsure (1)..(338): unsure at all n locations
taactggtgtgatgagaattgattctagtcgactctcttcacttttaactctctctgcgncagnacctaccatcaaaattaaccgttaaatatattaattaanaattcaatggtctagattgaagtctggctactctaaaaagtgtagtggtagtaggtgtcttgtcgtcttttgaagacaatgttcttggttggatgcttcttgatcgtggaatctgggggaagtacctaccatcaaaattcatcgcagatatattgattaaaaattcaatggcttagattgaagtctggttaaataaaagctgtattatatctgtttcgattacctcttactgttc

SEQ ID NO: 212051 - DNA, 404 bp, Glycine max
agcttagaagggccgaaagggatgagttattttggaaagtatggtattagaggagtttgaccaaacaactgagtagaacagaagagaacatgttgtcaatcattgaccaatataaagaaaagctaaacctagctgctagccatgggcagtgactagagaatgagcatgcgaaggtgtcggctctacaagtggaaatggaagcaagagagagggtgatagaatcattgcatggggaagctgtgaaatggatagatagatttgctttccctctaaatgggagtcaagagcttccaaggttgttagccagagccaaggcaatggcggatgtatacccagctcccgataaagttcatggccttttcaattatttccaacacatgatcgagttgatgtcccacataatt

SEQ ID NO: 212052 - DNA, 408 bp, Glycine max
tctagacaatgggtttgtaaactctcaacaacattaattgcttatggtttctctcaatcaaagaatgactattctctttttaccattgacaaaggtgcttccctggttgttctgttggtctatgtagatgacattctgcttgctggcccaagtgctacatgtgttcattctattcaggccaagcttcaagctttgttcatactaaagatccttggttccttacaatattttctgggcctagaagttgcaaagtctagaaagggcgttgtcttgactcagtgaaaatatgccctttctctgttagaggatactggttttctttgctgcaaaccatcctcccttccaatggatccaaatttaaagctcaacatgcttagtggtgatttactgcccgatccctcaatgtac

SEQ ID NO: 212053 - DNA, 440 bp, Glycine max
ggatccttaagcacctgggctgcagcttggctaattccattgaaatgatttcccttccaaagacaacccgattaggagacattcctatgggtgctttgtaggcagtccgatgcgcccagagagcatcatcaagcctggtactccaatcttttctgcttggctgcacaatcttctctaaaattcgcttgatttctcggttagaaatttctgcctgtccattggtctgggagtggcatggtgtggataccctgtgtaccaccccgtactttttaagcagggcatgcattgtcctgttgcaaaaatgggttccttgatcactaacaattgctttaggtactccaaaccttgcaaacagaatagacctgactaagtctgcaacaacattagcatcattagttctagtgggcttggcttccactccatttgaaacatagtcaact

SEQ ID NO: 212054 - DNA, 385 bp, Glycine max
  unsure (1)..(385): unsure at all n locations
gggggtggtgtgcgcgtactgatgggtaccatgaggtgtnttttgtgtttgacccatgcgggtgttgaagagacggcatgggcatctccttccttcctttntgcccctgttgccccgattcttttggcgttcacatttgtggaggaaacgtaatcaaactttcctctcttcaatcccacctcgattctttccccggcaaacaccagatccgcaaagctggacggcatgtaacccactagcttctcatagtagaacactggcagagtgtctaccatcatggtgatcatctctctctcgaccatgggaggagctacttgtgccgccaaatccctccatcgctgcgcatattctttaaaggtttcaccctctttcttaaacatattct

SEQ ID NO: 212055 - DNA, 436 bp, Glycine max
  unsure (1)..(436): unsure at all n locations
agctnngaactatcggactctcaagatacttttgttnacaagggaaacagcatgtgctctatcttttcaaaacagaccctttatttggttcctcctcgtccatggccatctaaaagacaccaccacaaccacaggcaccttcggttgggcatgctcaacaggaactgtcctatatagtcttgtaaatttctagctaccatagtcttttgtgctatttctcacagctagagtggttgtgttctgtgtgtgttgtaaacattggcttgtagaatgatgatgatgcataaggagggcacacttgaaagaagcaagacaaaggataagtgattgtgtggtgaaatcatagactcatatgaagaacttgaaactgtcattggaaaccaaccatcataaggatatgagatgtgaggaaacaatcctgctttgacaaaagaat

SEQ ID NO: 212056 - DNA, 481 bp, Glycine max
  unsure (1)..(481): unsure at all n locations
agcttacccttatggtttgcctccggacttattcctcttaccgctccagacgatttgagccaagcccctaccttcgaggggcagctccctcctcatgccgactatcctctgcaagaagatgatgaaggagatgcccatttaggccctctacttcccctcaaggatccgaccccccatgagttaccccaaccaaacatagtctgccacgtcccgtctccatccgcacccgttaaggaactcgttccctttgcctcaacgaagcccacgtagcacacaacatctcagtcgagggttttgaaggcattattaatcatataactaccaataactattatcgcgttgcggaagaagagattcccgttgaggggagagggcacaacanagctctacatgtgtcaattagatgcatggaccatgtcgttgctaaggtactcatcgacaatggttcaagcttaaatgtgatgccaaagaccaccttgcg

SEQ ID NO: 212057 - DNA, 443 bp, Glycine max
  unsure (1)..(443): unsure at all n locations
tctagttntcataagcctttatcttcaagtattcattatctcacaatggattaatttcttcacttaagntnttgtctgatgattgtggcctttggagcttttaataattgcattaaatgcatgccctttcttatgcagtgaaccactctgattgttntcgtgtagaacacttcatcaaaaaaccacttccattggtcagagcaggtctgcaaaccagagcacatcttttgatgaagatggtgactnttaaatcttgaacttcatttattcttcatagatctccacaaatcatagaagaatgtctctacaaaacaaatctcaaacataaagtattaaacgaagtcttaaatgttatattagatcatgggtttagcttatcatcatctaatgctacaaactcagacttgcaaggatgcttgatatatatagatgcacttttaaca

SEQ ID NO: 212058 - DNA, 490 bp, Glycine max
  unsure (1)..(490): unsure at all n locations
tcagagtcacctgcggcatgcaagctngctactaattagattattaaaaataatatattgataggagcaaaataattgtcatcgatagtgacgtgggagtgattgtagactgttaacaggtatggataacctttaaatctaaactattcaaatcaatttgattaggttaatttaattttgagaattctaagtgaaattcgatccaatttatttaacctgtattccaacacaaccttgacatttgacatctaattaaatttattatatatatatatatatatatatatattaaactattcaataaataatattataatattataattttctaaaatagttttattgtattattattaacataaactacctttttttcattttataactatttttttcttgaattgatttatgttgtctcatatgctaatggtatactttgttttttctctanaatatanatattatatcaatatcgagatcattcttacta

SEQ ID NO: 212059 - DNA, 360 bp, Glycine max
cgcggagacaagtgtgcctcatccctgtttctcttcgtgaccgaagacgatgagcctttccaagataccggccaacctaccctttccccatttcccgacgacgaaacgccttccgacacctcctccgctcagataagcctccatgccctgtcgggtcacttagctcccgagaccttacgagtcaatggctttattggtaatcgcggtgtgtgcatattgattgatggaggaagcacacacaacttcctccaccaagctttggttacatcccttgggttggctacgacggctactactctgctggtgaaaacgtggtatggggacgagcttcactgtcatcagctatgttcggcagtcacc

SEQ ID NO: 212060 - DNA, 412 bp, Glycine max
  unsure (1)..(412): unsure at all n locations
ttatggcactccctaaagacaatagcatcatgtcctgcactgaattgttgggaagtggacgccattttctcaatcaaattccctacctcaacaagaacctatcacttaaagccccaccactgtgaggatcaaatatactcctttctatgttgctaaatccttcataaaatattgcaaaatgagttgctcaaaaatctggtggtgaagatagcttgcacacaatttcatgaatcttttccaatactcatacaagctctctccactaagttgcctgatgcctgaaatgtattttctgatagcagccgtcctatatgcacggaagatntcaccaagaacactcttttaaggtcatctcatgctggagatggatctgggaaccaggtantacatccaattctttgtcacttcctct

SEQ ID NO: 212061 - DNA, 336 bp, Glycine max
ctaatataattaaatcggaagctcaacatcagttttcaatacaaagcccatgttaacaaattcatgttaatgttaacatcggtcttattcataaaccgatgtaactgatcatacttaacatcgggtttaaaaactgatgtatcaaactaggttaacatcggtttctgaaaagcgatgttactattaatgtaacattggtttcccagaaccatgtaaagcacttcttacatcggtttcttaaaccgatgtaacgtatcccaatattacattatgcacgactttactaacatggttttaaaaaccagttaatagcttgtattacatttgcccacgttt

SEQ ID NO: 212062 - DNA, 474 bp, Glycine max
  unsure (1)..(474): unsure at all n locations
agctngttcgcacatcgttcgcgtgtatgatatcctctcgacaaggntngaagtaaaggagaccttcaatcctataacgcaacgtggcggacaaaaatgggcagttaacttgaatggccattattgtcaatgcggaaggtattctgtgcttcactatccatgttcacacattattgcagcttgtggttacgtgagcatgaactactaccaatatatagatgttgtttacaccaatgagcacatcttaaaagcatactccacatagtgatggcctcttgggaatcaagcggcaattcttccttctgatgaggcatggacactaatccctaacccaactacaattcgtgcgaaaggtcggccaaaatcaacaaggataaggaatgagatggatngggtcgaaccatctgaccatccgacaanatgtattagatgtggagctgaagggcacaatatgcgccgatgtccaatgcaatc

SEQ ID NO: 212063 - DNA, 393 bp, Glycine max
  unsure (1)..(393): unsure at all n locations
actcagcttataagcgcgggtttgggagacgaaggtcaagtggtcgcgatatacgttgatgatgttccgagtacatttggattggtacgaccatgccctcctgatttccagctgggaaattggcgagtggaggaacgccccggcatttacgcaacgagcataatgtaaacctttacggttntaaaagctctatagttgggcctaggctntagagtttttccttttggtaaggctttgtgtcttttggttttgaattcataatacaaggatctttcttcatctgttcctacgtctctacccattctcattcatttgcatgtttacttctttatttctgaaacggcagatccgatgacgagtcccccgaaggtactaatacctgggacccgctta

SEQ ID NO: 212064 - DNA, 453 bp, Glycine max
  unsure (1)..(453): unsure at all n locations
agcttgccttgccccttgatatatncgaggtttctttggtcactatgaatgacaaattccttgggataaaggtagtgttgccatgttttcaaagcccgtactaaggcatagaactccttatcataacttgaatagttaagggtgggaccacttaacttttcactaaaataagcaattggatggccttcttgcatcaacacagccccaatcccaacatttgaagcatcacactcaatttcaaaagattttngaaagtttggcaacgcaagtatgggggcattagttagcttttgcttaagaacattgaaagcttcttcttgtttctctccccatttgaaaccaacattnttcttgagcacttcattgagaggtgctgccaatgtgctaatatccttcacaaatcgtctataaaaacttgctaagccatgaaaactcctcacctcggtcacggac

SEQ ID NO: 212065 - DNA, 393 bp, Glycine max
  unsure (1)..(393): unsure at all n locations
tttcgattcattctatgtacccgtagtggtccacattgggtttcgtgcacttttattctcgttntgnttactctntataccccctgttgacgtgcttaagccattntacttaagtcatttctcgcttaacttaaaaataaaataaatttccaccgaacgtttgaattgtattatccattaacttcggttaaaataaattccgaccgttcggtcgtgccgtaaccaccgtggaaatcaaaaagagggaaaaaataatataataatcaaaaagacatcttttagtagaataaagcggagaatcaatcggacgttttctctttgggatttctcattcttaatcgaattgattaataactaaagtgaaactaaaggctaaaatcaattcgcctagtc

SEQ ID NO: 212066 - DNA, 454 bp, Glycine max
  unsure (1)..(454): unsure at all n locations
ctgcagctntngagacccattaaactattgtttttctattactaaatcaatggaagaagcttcgccaagtatccccattgaacaacctttattcaaacctttcatagttagtgagaagggttaacgaaaaattatggaacttagaaaaactaaatccttaattgaaggcgtaggtgacaatcattgtgaattactaaacaagattggtagtttacttaaggtcattccagatactccccaagcctcgaaaaatacttccaaaatggtaataagaagtacctccaaattaattaatgttattaatgaagatagtgaccataactcagataacacaactgagatagaatcagtgtcagaaaagaatataaatccaattaatctcagacactggaaaacaccctccaaattatattattnacgttcgactgcccctgaccttctattagaagagaga

SEQ ID NO: 212067 - DNA, 456 bp, Glycine max
  unsure (1)..(456): unsure at all n locations
ctcagcgtgctaattacctaaaagtgagagaacatgattattaaacatttaatttggaagcactaagcatttattacctatgcttaacagaagatacttattacactacaaaataaccatagattgggagagtttgatacaatttacacaagttntatacacaaaagttagtcgtattcatcgactaacaactcccacaaatttacagttttgcttgtcctcaagcaagaaaagaatagttcacttgtccttgagtgacgataacatgcagtgactatggacaaaggtggatgcaacaaaagttactgattgcatgataagagaatgaagcattatgtactcatcacttgtctttcacaaaatatgtagttattcnaagacaagaatacgatgtangctatactattagatgaaataatcataacgcagatattaatggagagagcttaaaccaca

SEQ ID NO: 212068 - DNA, 341 bp, Glycine max
gagatatgctgccaactagaaatacttgcaaagaatacagaatcaactcacaaagtcctttgtcctctgtgcagaacccaacaggaggatgcttgccatcttgtctttacctgcagcctagcgtaacccttacggtgggataccatgtcatggctgcaagttgacggtgtcttgacattaaggccacaggagcactctcttcatcattggggcgttcaacctgctggtgcaagaaataatagatggcagtcgtggcggctagctttaacctggcccatttggaagcgtaggaacagccatatcctctctaatgcaaatatcgatgctaatgagctgtacga

SEQ ID NO: 212069 - DNA, 365 bp, Glycine max
  unsure (1)..(365): unsure at all n locations
tagtagtagcaatggcacccaaataataagcatactagcacgtacggcacacgtatagctaatagcgtggggctaattttattnttcattcatatatttttgtacaagggtatatgaaataaagagatgggatcaatatgatgatgtgatccaactaataaaaaattatgttctttaaacatgtgattcgaattcacaagtttgatttcatattctgtatatgacagaatatcaattaggaaagattaatttcttacataaacttttgtacctcgataaattaatgcttgatgttcactcaaaagatacctaatacaaagaataaagtaatcatgctcctaaatatgtatgtataacggcttcac

SEQ ID NO: 212070 - DNA, 425 bp, Glycine max
  unsure (1)..(425): unsure at all n locations
agcttccatcaggatgtctcctccacctctttatatctcaccatcactcacatactcatctcatgctctcaggatggcttcctcttctcgctcagttctctgccagtcttctcacgacaaaagctctcaaaactctctgagaactggacctttctctctctagaaatctctaaacatgcaaaagctttgagaattgcccaaactcccactccatttatgattttaggcttaaataggtggccttgttggtgcttgcgcgccattagtgaatttggcttagcgcgcgtctttttgctcagttaatggactcaagcggtgcgcttagcgggattagcccttgctcaacgaacatgcacagcttatccttcttccagattcttccttgcactcaatcgcaagagtggtgcgctcangggatggctcgc

SEQ ID NO: 212071 - DNA, 386 bp, Glycine max
  unsure (1)..(386): unsure at all n locations
ntgaatcccagtccaaactcnccctctaaaatctgatttcatgcttaaataggcggccttgggtgtgctcgtgcgcttagcgcaattatggaccgcttagcgcacattagtgaattttggcttatcgcgtgcctttctcgcttagcggatggactgaagcgctgcacttagcaaacctgtacaactcatcttcttccagagtcttcctcgtgcttagcccatgagtggtgcgcttagcggacactcgctaagccaacagaatggcttagcgagaaggtgaaaaacaacacttttcaaagcttgcctaattaacctgaaactgagagaaaatgattattaaacacacancatggaagtactangtatttattacctatacttaacag

SEQ ID NO: 212072 - DNA, 458 bp, Glycine max
  unsure (1)..(458): unsure at all n locations
agcttctttgagaaaacttccttgagaagctttagcttagctacacacacccctctaataactaagcccacctccttgagaagcttccttgagaagattcctaaagaagctagagcttagctacacacacacctcactaatagctaagttcacctccttgagatgagaagctagagcttagctacacatccnctataatagctaagctcacccccattccaaaaatacatgaaaatacaaaaaaaaagcctctactacaaagattactcaaaatgctttgaaatactaggctaaaaccttatattactagaatggccaaaatactaggcccaaaagaaggaaaaacctattctaatatttacaaagaagagtgaatccaaccttgacccatgggctcagaaatccaccctatgttcatgagaaccctagggccttcttagtagctctagcccaatcct

SEQ ID NO: 212073 - DNA, 419 bp, Glycine max
  unsure (1)..(419): unsure at all n locations
aagagacttctttgagaagctaacgttntaactactattactctnttaataactaaactcacctccttgaaaataattacggataaaataacacaacaaatataatcaaacatcaaacataattactaataatatatagatgtatatcagggtgttacacccaatgtcacacttatcagagcatgtccctatcacggactaagtctctccatctctagcgtggaattcatcatgtgatgactcacctgaacaaaatggcaatcagcccaaacacaaatacacatcgagaatgagttatcacattcatatataataaaatattagagcatgtaaaacatacaatacttaaagttgaatttatataaataacatcatttcataaaatcacacattattcacattcattcaagttcacacac

SEQ ID NO: 212074 - DNA, 464 bp, Glycine max
  unsure (1)..(464): unsure at all n locations
agcttgctcacgttgcttgctccatatatcttgtgcacattggcgaacttctgaggctcttctggagggaaatacggggagaaaatgcaatccggcatgcattttcttctcaagaacttgcaggcagcacagggagagttagagtagctagatgaggccatgatcttctctgcaattataccaattatgaatcaaacacgtacaataaaacaatttactctcaaatgttggaataagtgcttatgattgattataggaacagtcgactgatgcacaccacaaacggattgatcttctttaatatttatatcagcaataaggagataattcattgaagagatcgagtacgaatggtactctaactcatgagtacaacgtntaagctaacattaaaatcaaaatacagtacaatataattgactatattctgaatcttgtaaaaagagaatactgtagatattatg

SEQ ID NO: 212075 - DNA, 393 bp, Glycine max
  unsure (1)..(393): unsure at all n locations
tgagatgaggaagtgtagaagggtgaaacttcctgcttttatttattgaccacagagtggtacctggagatatgtcgcggtggttaggagaccttggggacgtcaagtggggtgctattgcccanaaccaagcttgaccaatcccgacccaacccgggcatagtcggtcagtgagaacctgtgatgtacctaaacaggcgagctcctggcagtcaacagataataggaacanagaccacaaagcaaggaggcttgtggtggctggccagctgtgaaacttgattgatatgtgagatatggtctctggtaatcgattaccaagggtgggtaatcgattactaggcttataaatgaagacaggaggctaagatggtctctggtaatcgattacca

SEQ ID NO: 212076 - DNA, 436 bp, Glycine max
  unsure (1)..(436): unsure at all n locations
agcttgatccataagaaatatagctgatttatacttgctagagtgcaactngtgaactaatgaagtgatacattaccaaagatgcaaattacactccttagcatccttatttccatccctaatttactaggtagtactttttttcaacctcaatttcaccttgctcgagatcaacaaaatggaaaaacaaaagaaatactgaatcacttggccttaacttgcctgaaacctctaaaacatttttttagatacacggatcataattagcatttgtctttggatgtcaactgtattttcactttttggaaatgttaacattaataattattacgtggttatgtatgaatatggtgaaattatcatgcttttatttttgagcactttctgaagaaataggaactaattgctcttgctttcatgccagagcctattatat

SEQ ID NO: 212077 - DNA, 467 bp, Glycine max
  unsure (1)..(467): unsure at all n locations
tatttcagtagcttaattttattctcaattgtattctcaattttattttattcttttattcaatttaaaagccttcttatttttttttactatttggaaaaattttcttatctaatttatcattcttacacgcacatgacagttaactcgtcaatattcatcaccacatagttccttaaggttattaattatttgaattaaatcaactttataattatttgctgaattatgggtattatattttttaatatagacctaatttaaattgaatttcaaatatatatggttagttttaaatataatatatgatttgtataatccaaattattcttgtataaatagaanaaaatgtttaataaaattatanagtattntaaattatattttttaaacaatatannatctaataagttatttcattaattctaatagagtaaatcaccaatctttacatttttatatacaaa

SEQ ID NO: 212078 - DNA, 447 bp, Glycine max
  unsure (1)..(447): unsure at all n locations
agctgcactgcaactacaacagatgacgttgtcttaaactataataatttggatacatatagcatatttttatcacccgtcaattaaagaaatcttctttcatgctattggaattatatggaaagcataaaaacagagtaatatacttgttccgatttagcatattnttagaatgtgattaataatgttttttggtaaaataaattacagttttttaagattaaattatagtcaatttagttactaatttttattataaattcataacatttttaatagaatgtaaaacccatgacttaacatttccattttaaaattctaacaaataaatatttaattcatcttaatatacacatattttatatggttagccctcctctgggcatcttcctctgtcttgtctctgtttctgtgtataagatttaatcttcttatataacacgtata

SEQ ID NO: 212079 - DNA, 500 bp, Glycine max
  unsure (1)..(500): unsure at all n locations
gcttctgcatgcaatgctggtagtgtttcgtccctaggcaaagtatttaatgtctnggtatgtaccatattgtaatccaaacattacctcttaacggcgagaagggaaaataaaaggaacctcattaactgtacagctttcacatggttgttgtgaagaacaccatatcatgcaattatgcatggcttgcatgcgctatatagaagaaacaaccattgttatttntgttgtaaagaaggtcctgctgagtttattgctatttntggtgtaacaaatgtcctgcagaaattgtcaattgctactgcatttggcattgtgatattctaaatctaaatgaatggtgcactttatattggtgcagaatggtaaaaatcaaaggactgggctcttacatatatacattattaattatttatacgtactcgtaagctatanaaatttgaccattgatcgtccattggtgggtccagaagtaccaaatcaagattattaagctgaat

SEQ ID NO: 212080 - DNA, 478 bp, Glycine max
  unsure (1)..(478): unsure at all n locations
tcctcagagacacctgatgcatgcaagcttatctcatgttagacacactaggatcattcttttcattcattccacntactcggggccaacttaaagtggaaataaacaacgaatatacttaaagcgcatacaaaggtaaattatgctcaaaaatcagcaatcctagcttaaatcttacccttcccttaatgtcacccaaagtcgacaagtacagcttatagaattcctctctgaatgcaaccacaaacctaaataaagtttagaaaccaacaagaataagacaattagaatctgtgtgatttgtataaatttaagggacaacaacatacatgtactatattatagtatcttcacttttaaaggactaaagatgaattatagaccataattgatatattacgatttgtatatcactaactcgctcttacttagtatgtctctcaacttgcaattacaagatcattggcactcagcattt

SEQ ID NO: 212081 - DNA, 319 bp, Glycine max
  unsure (1)..(319): unsure at all n locations
cacttcaggactggaactcttacattttcttgtggngtctatgccagttgaaagcgctggatgaaagacgtatgcctatgttcgctgcggatgatctctccagatttacctgggtcaactttatcagagagaaatcagacacctttgaagtattcaaagagttgagtctaagacttcaaagagaacaagactgtgtcatcaagagaattacgagtgaccatggccgggagtttgaaaacagcaagtttactgaattctgcacatctgaaggcatcactcatgagttctctgcagcccttacaccacatcaaaatggcat

SEQ ID NO: 212082 - DNA, 385 bp, Glycine max
  unsure (1)..(385): unsure at all n locations
gatgcgaaaacacagttacctatgggaatnttgcggtctgctccgagtcaactacactattttggcactaggcttgatgacatgtctacgagttacttacaaaaatgatccaacaattgaatcacctcggctaaggggtttggtttccgattcaaccagccgagccgagccgagatgaacaacaccgattgggaagcgtccttacttagtaatgaaaatcttgctttcaatttgataggaagtaagaaaagtcttcttcatggagtatgtctcattaatattctcncgcatttcacaaatggaggtagaaaacatacatttacagcttatttcttgaatcatagtgccataaccagggttatgattagagcattcttattatccc

SEQ ID NO: 212083 - DNA, 459 bp, Glycine max
  unsure (1)..(459): unsure at all n locations
tatacagatgttgactatgcaggatcaataactcataggagatctactttcagatattgtacctttctaggaagaaacttggtaacttggagaagtaaaaaacacaatgttgtagcgcgatctagagctgaagctaaattgcgggctatggcacaaggtatttgtgaattgctttggttaaaaatcatcttagaagacttgaagattaaatgggatgaacctatgaagctctactgtgataataagtcagcaatcagcatagcccataatcctgtacagcatgatcaaacaaaacacattgaagtggatagacactttatcgaggaaaagttggatagtggtttgatttgcattccatatgtgccttcacaaggtcaaanagcangtattctcactaaacgagttgtgcactcaaatcttgatagaataatatgcaagctgggaatggataacatctat

SEQ ID NO: 212084 - DNA, 426 bp, Glycine max
cagaaatctcttgtactctctctcttttcattcccttcttccacttatgattgtgagtataaatatggtatgtctattatcgcgcacgctactgaaattggaggcattcttggagagcttggatgaagacttcacaaagagttggtgatctattaaaggctatctataacccttaagtattgcgtttgtccacttactcaaacattataagaatcaacttataagcgttagatcaattaaaggcgatccataaccattaaagcttaaatgacaaccaacattataagaataaacttatttaacgacaagactaatgacttgtattattcatccgagcaggactgctttgaacacaagtatcataactgactatcatatattgtggttgtccactaactcaaatttgcatcagcgtacatggttaac

SEQ ID NO: 212085 - DNA, 410 bp, Glycine max
  unsure (1)..(410): unsure at all n locations
gcttatcctatanaatatctatngacaatgaaccttgcttgaaattttattttgttaccatanacagcacagcaagacanatgtcatgccaagcaatctactgatcaaataccctctaaaatctgcatattaattcttataaagttgtattccaatgaagaatctcaagggacaaagattcatgctatcatgtcccatattggctagaaatatggccaaaatacatcttaaggcttgggcaaacctcccgccataagttaacttttgggatttaggcttggaccatttctaatatgattccagagcctacgtgaccaagtggtctagagtttgatccttgctgcctcactctcttaatacaaattaaatctcagcatacgaaatacgaaagcctatgaattactcacact

SEQ ID NO: 212086 - DNA, 420 bp, Glycine max
cacacaaatggaagtactaagtctttattacctatactttacggataatacttataacaatacgaaataactcataaattggaagagtttgatacaacttacaccagttttatacacaaaagttagttgtttgcaccgactgacagtaattctgcctcttttaaagactacaatgtcgttcgatcaagactattaaagtcttctctgccatcacagagacaatcaagttcgttggcacgcagagacaaattatggtcatctgcctctattcgaagacttcaatgcctgtcaatcaagactattaaagtcttctttgccttccaaagacagacaagtcttgttggcaagcggagacaatcagggttatccattttcttgtattcagactatgacagtgtccgtagcttctagagacaatca

SEQ ID NO: 212087 - DNA, 466 bp, Glycine max
  unsure (1)..(466): unsure at all n locations
ctcagctggatttcgnctgacagggatcgaaggctagtttctttgctcagcatagaacacacgaacatgatggattagagaaatatatntatatgcattagcactgttggtagaaagacccaacatttctacctactgctgtcattttatttactctgcattttatagtttttagcataaaagtttactttaaatgctatttgaaattatcacttatacatgttctcttaacaatgctttaatcctgaacttaattcacgctaacattagttccctgtgttcgatactcagattcatccgtttaattttaaatacttgacgattcggtgcactatccggtaacccccattgaaatttcttggatcatgttgatgttgacatgatatgagatgaaatgtgatggcgtgaaaatgcgctggatgatgtatgtatgtatgacatggggcgagtgacctgttgatatcct

SEQ ID NO: 212088 - DNA, 466 bp, Glycine max
  unsure (1)..(466): unsure at all n locations
agcttanataagagagatagtggaaaggtgatttaatttgaatgatttcattagatataagaatatggcttgaggaggataaactgctatcttctttttattttgtgcaagaattcgatgctttaatgagttaattctcgataaagacaatctaattaattttatttagaaaatatttgtagttaaacatgagaatttgaggcttttagagctaaattcttttaattttaaaaattgagagattcaattaaatacgaaaaggttgagcaatcaaaatcacacatagtccaaataaagaacaaaaaatgtaattaattttgaagagacaaatcattccttcatccttcatattataaataatttaaataaaatgtttacattgtaccatttattcttcaatataacttatctcattaaatctctccaatatatatatatatatatatgcccttagcatgctaagact

SEQ ID NO: 212089 - DNA, 367 bp, Glycine max
aatcagggaaatacaatataccaacacaatctgtatctgttctatggcaattatgacaatacactcatgagaaaatccatattcataatccaacactcgcaaggtatccatacttgtaatccttaaaaaagaataacttttggccaccactgatggatgtccaaaaggcacaggctacatgaggagaagactgataccagaaatataggcaaaaacacaaaagaatttaagatcaatgtctggtcaatagacacaatttacagtagaaaatttggtccatcctaatgaatgcacaagtaagcccccgcaatttacagctctcttcagtgtcgtactatgaagcaactatgtgttgacatggatccta

SEQ ID NO: 212090 - DNA, 345 bp, Glycine max
agcctgaaatatttattggataattccctgtttactaggctctcgagtcttagaggttacttcctcgttgacatctcttgtcttgaatggaattgccatgacaggtttattgctactctcttagatatttggcacttgatattgtgttgcacgacgtaattccgattggattaactcgccatccttaactcgccaattagttatgacattcgttgttagatcacctatgatgtcttgattccaagggtaatctatatcctttctgatggcataagcatgaaaccaatcaaagaaacggatattaattttgactcgttcgacaaattcatagaacttgacttggat

SEQ ID NO: 212091 - DNA, 325 bp, Glycine max
tctatatgatctctgatgtctacatcaacatgctcagtgtgagacgttgttgaattgtttgacaattcaccatgacatatgcaatctttataactttgaatgatcccctcatgtatgagatgtgatcttatgtcattgactgacaatcattctcccttcccacatttagcacagggacgaaaatattttccatcataattggcgcattcgtcagtaaatccaagattgttaaccccatttatactccccatgtgatgagctttatccactctattatgtgcctctttgtctaccctaagctactccaatcatgagactcactttt

SEQ ID NO: 212092 - DNA, 377 bp, Glycine max
  unsure (1)..(377): unsure at all n locations
ccgggaccttaagcaccgcagctgcagctgactatgatggaagttgaggctagttgattnggtcctttgntggtactaatgttttttcttatggtatagttgagatcaaaagcgactccaaaaacaagagcttcaaggtcaacggacaccaacttaagccattcctcacaaacccttctttagtggacgtagtggtggaagagacttccttactccaccatactcttcctccaccatgacttagggactttttcttttcctatctccttctttacttttattacatttgtccgattctatttgatggtttaattacttttaatcttttaattgtgctacattgaggacaatgtattgtttaagtatggtgggggggg

SEQ ID NO: 212093 - DNA, 427 bp, Glycine max
  unsure (1)..(427): unsure at all n locations
tctaaactntatacaagaatgaagctctgataccacttgttagacaagtgttcacaaatatcttaagaaggggggttgaattaagatattgcaaactatttccccaattaaaattttattttaattttaatgcaagttacaagttcccttaaaaatgaactcttaaataatgattcaaataaaacaatctgaatataaatgcaaaacaataataaataaaagattttaagggaagagaaagtgaaaactcagatttatactggttcggccacaccattgtgcctatgtctagttcctaagcaacccgcttgagagtttcactatcttgtaaaatccctttacaagttttgaacacacaaggacaatccttcctttgtgtttagatttctttacaacaagagactctcngtctcttcaatccctttga

SEQ ID NO: 212094 - DNA, 439 bp, Glycine max
  unsure (1)..(439): unsure at all n locations
agcttctcaaggagttgagcttagttattagttgtttatgtgnagctaagctctagcttctcaaggaagcttcttaaaagaagtttcttaaggaagtctctcaaggaagcttctcatggaagctacctaggctataaatagaaccatgtgtaacacttgttgtaactttgatgaatgagaaacttgtgagaaacactccaaaggtcaacttctctccccctttntctccatcaatttcgtgctccgcctcccctctctctctcattcttttcctccattgaagcttcctctctaggcttcttatccaaggcactcttttggtggtgaaactcctccttccattggcttatcctgagtggatggcgccttctctcacctcttctcctttatcttccgctgcatctccatggtggaacatcactattgaaggaccttattg

SEQ ID NO: 212095 - DNA, 492 bp, Glycine max
  unsure (1)..(492): unsure at all n locations
tcaagaataatggcctcaacaaactttgtcgcagaatgaaatttaatatatatgcctcctatntataatggagagggttaccactactggaaaactcgaatgaaaatcttcattgaggcaatagacttaaacatttgggaagccatataaataggaccttatgtacccaccatggtggttggaaatacaacaagagaaaagcctacggaaaattggagtgacgaagacagaagacgagttcattatatcttacaagccaaaaacataattacatctgccctgngaatggatgaatattctatgagttcaaattgtaagagtgctaaggatatgtgggacactctacaatttacacatgaaggcactactgatggtacaagatctaggataaatactttaactcatgcatatgaattgcttacgatgaatactaatgaaagtatactagatatgcagaatagatngacacatatagttgatcatcttgcatca

SEQ ID NO: 212096 - DNA, 188 bp, Glycine max
  unsure (1)..(188): unsure at all n locations
ttatccaaaaaacactttaagaaaagattactttatatgcaatctttaaatcacttttttttttgctttntgggcaacaaacctggctaaattaaagcagaaatctccaattaactacttacccgctaacaaagcactacccattattcaaaggattctattggttaagcagacaacaacacatgcac

SEQ ID NO: 212097 - DNA, 428 bp, Glycine max
  unsure (1)..(428): unsure at all n locations
actaagctgatatttgggaaacatttcttagagactaaaacatttgttttagagataaaaatagaatcgagaaagaaaattgacagttttaagaattaattatttaacaaaatatcatgtgacggatgtggcatcatttatttactgtataagttaacggctagaattaaaaataaaataaataaatatttggaagatcagaaccgatcagaataatttttgagagactaanagcaaaaattcatatacgaggggaaaacttaattaaccctgaataaatttctatcgtctatttttctttattaaaaggtaattatgataaacacaagcatagggttagggtttatatcattggctatgattatatggnctttctatttaagtagtactatgctgatggcattgcaattaattagacggagtatact

SEQ ID NO: 212098 - DNA, 440 bp, Glycine max
  unsure (1)..(440): unsure at all n locations
agctntacaaataatctgactggtttttctttactaaacatgcttttaagagaggcacatttcgacagtacttcaattgccaaatcatgacaacatgttaacttacatcaactctatgatccttttcctgagatgaaacctgcaagtcacagataagtctcagtttcaaggaagatagaataagagacacacatgctagataagaagtgtgctaagaaattacaatctttagaaagttaaaacaagtctttcttcataattaaactcttcaataaaaatggcacttttctcaccatagtcttatctatgcctccaagggtgggacgattgtagtggacaatgtattcagcatccacaacaccaactttntntgttcgatcaccctgtatccaacagaaataaggtcagatggaacttgaaagcanaaaataaaggagatt

SEQ ID NO: 212099 - DNA, 463 bp, Glycine max
  unsure (1)..(463): unsure at all n locations
acctatgaaactcaagctgtatgctggttggtcagtctctcatttcctgcatgttggttaanatagcgggcttgtttatgtgcgtgcatggatatatataaatatgttagatgtaattgtagtttttttttaagcgagatgaatcgaacctacctttctcatcctcccttcttctttagcaccaaaccaagctataactcatttcatatgtgtatgatgttgtgacaggtgagaaccttggcttggagcctactctgccgtatttgagtcctctgcttgtcggagagaggctcctagttggtgcaaattttgcgtccgcagggattggaattctcaatgatatcgggtttcagtttgtaagttcaattacttataatataagggtggtaaaaaggttcaatatacgtgaccgaaagaatagtggcttatgtaatngtttggcagctgcacatcatcacattac

SEQ ID NO: 212100 - DNA, 482 bp, Glycine max
  unsure (1)..(482): unsure at all n locations
ttaagtcacctgaggctgcaacttgagaggtgcttaatggggaaatttttaggatagaagagagagggggagcagaaattgaggaataaagagggagagaagtggaactttgaagtatgtctcataaaactcttattcatcaaagttacaaacaagtgtacacatgcttctatttatagactaggtagcttccttgagaagctttcttgagaaaaccttccttgagaagcttctttgagaaaacttccttgagaagctagagcttagctacacacacccctctcataactaagctcacctccttgagaagcttccttaagaagattcctaaagaagctagagcttagctacacatacctctctaatagctaagctcacctccttgagatgagaaactagagcttagctacacaccccctataatagctaagctcacccngatgacaaanaacatganaatacaanaaaaaagtccttactac

SEQ ID NO: 212101 - DNA, 416 bp, Glycine max
  unsure (1)..(416): unsure at all n locations
acccggtgttgagagaaacgaggatatgggctacgtgttattacgtgagctcagttggaggtgggcaacaggggatggtgggtctatgcgcacattgtggatgtggaaaacttgttgtgcaccatcgcccgaccgccacctagtaccacatgtgatgggtaccccataatcctacaagcttgcgatgaggaagtgttgaagggtgaaactttctgcttttattgttgaccacatagtggtacctggagatatgtcgcggnggtcaggagaccttgnggacgtcaggtggtgtgctattgcccaaaaccaagcttgaccaatcccgacccaacccgggcatagtcgatcagtgagaacctgtgatgtacctaagcaggccgagctctggcagtcaacagataaatggaaacaacacc

SEQ ID NO: 212102 - DNA, 466 bp, Glycine max
  unsure (1)..(466): unsure at all n locations
ttaagtcacctgacgcatgcaagcttcgggttanaaactactggttgagacttttatcgacgaaaatgacgaaaaggcgaagaacttccatgaaatcgctcacggaaacgtcatggaagcgttacagaagcacctcggctcggacttttatccttctttctcttctcctcactaatttcaagtgaaagcctagtgcaaaaattgttggatccttaaactcagcccccttcccctatttataggaaaaaaggggacgtggtcgccgttgagaagcttcttgaggaatatttctgagcgcacccaaaattgataagctcaccccctctccaaaggcttcctgaggaagtttcttgagggcatcccgtaatcgaaagttcaccctccttctataatgctcacgatgaagttttctgagcgcaccctccaatttgatgagtacaccctcttctacgttgcttagtgatga

SEQ ID NO: 212103 - DNA, 281 bp, Glycine max
  unsure (1)..(281): unsure at all n locations
ccccgactttcgaggggcaactcccaccttatgaagactatcccgggcaagacgatggggaaggagatacccatcttggccccctgctccaccttaaagatctgttcccgcatgaactaccccaaccgaacatangtcgtcataccccggtctcaccacacccgtaaaagaatctgttccctttgccgaagataatggaaagattgacgcgcttcgaagagaggttgagagcagtcgatggcttcggcaaatacccattcttggattaagcggattatgtc

SEQ ID NO: 212104 - DNA, 397 bp, Glycine max
  unsure (1)..(397): unsure at all n locations
attgcttanaggcaacaatgataatgtaatttttgaatgaaacaatgaataaaaaataagagccggattatcttaagaaaataatctctgagtttcaaatttttaaagaacaataagttcaaattaggacatactcctgaacatatgctttataagattcggcgactcatatactcaggtattaggagccctttgttttcctcaatgaanaatcaaccagtcttatcaaatcttaccatatttggatgatcgaagttactaagataactaatctcagcccttcatacacgaaatggtgaagataatcattctctttatctaacaagatatatatagtaagtgatatacatcttaacactgtgtactcaaatataagtgaagaaatacactaacacat

SEQ ID NO: 212105 - DNA, 496 bp, Glycine max
  unsure (1)..(496): unsure at all n locations
ttaagtcacctgcggcatgcaagcttatgctgcanacatttataatagaccttatcttcaactaaaccaacaacaacagaataattatgacctttcaagcaacagatacaatccaggttggaggaatcatccaaatctgagatggacaagtcctccacaacaacaacaacctgtccatcctttccagaatgatgttggtccaagcaagccatatgttcctcctccaatgcaacaacagcagcagcagtcacaacaatgacaacaagcaactgaggctcatcctcaaccttccttagaagagttagtgaggcaaatgaccatccagaatatgcaatttcagcaagagacaagagcctccattcagagtctgacaaatcagatggggcagatggctactcaaatgaaccaagctcagtcccaaaattctgacanatcgccttcacaaactgtgcagaatccgaataatgtgagtgccatcaccttgaggtctgcaagc

SEQ ID NO: 212106 - DNA, 460 bp, Glycine max
  unsure (1)..(460): unsure at all n locations
aaactaagctcttaccccataattcctccaaattgngcaaatttgctgtgaactcaaatcttcttttatgaatgaggctctcctacaacctaagacaaggtagaaggagataaactgtacaggatcaaggttcaatcaaacaatcatactttcagctcaaaatgggtgcaagggataaatcaatcatgcacaaggtaagctttttagctaagtggctctcttcaatcaaaatatggccttcatcatcttcaatttcacgcattcattccatactcaaagattcatgcaaaaatcattactcaatgttagtcgttctctcataattaaagatcacactctcaccacgttgtggcttatgagtaccttcacaatcaaactgtcaaactgactaacattttcagtcatgatcctaatcaatgttctttctcttctaatgactgcacactcattcaaaacatat

SEQ ID NO: 212107 - DNA, 375 bp, Glycine max
  unsure (1)..(375): unsure at all n locations
gacaancggacaacgactacccatattgtgatatatccatgcgaagcaggtaaatgtgtaaaaaaaaaaatcaatgtttatgtattccgaaacccctttaggttgaggtaaagaatacaaacatcccaattttaattatggtgtgtatagttctattgataagtgctacacaatatgataaaagctttaacctctctacctatcctcgaccagtagaaggacacattgatgcaggctaaactgggttggaattcataatgatcctcactggatgtgttgcggtactcttggaggagtaattatgccaattggaatgtgtatggatgaagatgcaatccttggcaaataaaagtccatgacaaaacttgaacaact

SEQ ID NO: 212108 - DNA, 476 bp, Glycine max
  unsure (1)..(476): unsure at all n locations
ctaagcttatctaccagatatacaaggtgttaagaagaaccttctatttcnttttatatgggccatcaaatctatcatgtgctgacagtaattgagtagcccatggatctcctcgggggcaggacacactttggccatggctntagctttggctaacagacgcgggaggtcttgactttcatttaaggtcaaggcgaacctatccatccacatagtcgcttcttgatgcaacgcatcaatcaccctcgctcttgcttatttttcggcatacacttgtgcaaaatcctccactagcttgtgttcatgggccatggactggctcaattcttccttgtatttccctatgatagctagcatgctgtgctccgtggcttcaagagttgaccaaactcctttggacctccgcaagcactaactctgtttaatatcatgcctgcacccggatgaacttctctttttcgacttgactcatgtac

SEQ ID NO: 212109 - DNA, 296 bp, Glycine max
  unsure (1)..(296): unsure at all n locations
ctcgataacaatgactttggaggaaaccacataccagaatcttacggcaacatctcagaattgtcaaaattgaaagcgcatcttgtgattccactgttgggatgcatgatgccaataacaagtagtggagcttacgtgcctgagcctttatattaactgatggcgagaaataccagtctacatgcgatcttcgtatatagatctctcaatcggagaaaaacattcgaaggagacttaanaatatggtcaaaacatctaagacctttataaacaccgctcttataaatgactctaaa

SEQ ID NO: 212110 - DNA, 504 bp, Glycine max
  unsure (1)..(504): unsure at all n locations
ttctcntagttattatcataagagcgcacaagagagctttcattgtgatccctacaaatttctctaaaccctgcctaagatggtttntccaaaagtcgacttagaatctatagaatttaagataatttttctaattacaatcttagaatttaaaaaaaattaacaaaacctacagtaatattcttttatcaaataataactcaccataattgactatagaatttacaaatcatatttgataaacatcgtctctcttcccaacatgatgatattttgttactcaataaaaataattttaaattcatgattgatttggtgaanaaaatcttaaaacttaacagacagtcacattcttcccctaattatgccatgcaataatattancaaattcaaatgacattttaaattaaattatatatgaagaattatttaatctctgatggatacgctatcttaattattttactttaccagaaccttttaatatcaaatatagataatatt

SEQ ID NO: 212111 - DNA, 435 bp, Glycine max
  unsure (1)..(435): unsure at all n locations
agctngatacgctggcgagcaatctatgcattatgtttctagncccaagaagaatgaatagctcgctcgcgttactcttgtcttatttcattcaatgaaaagtagataaagtggataacttttcttttaagaggaaaggtaacattcacattcacaatgatcaatgaatgaaagaaagaaaatatgtataaatgaaagaaactaaaacgaataaacgagcatgtctccaaagttgacagcacgcatcattgatcttcttctgtctgggaaagaaaaggagagccagttaaaccaattagagaagatgacctttaactgaaaagttgatgagcctttattatggctctaacttattgttctactagtttcgttctttgccgcgctttgcatgtctgttatatcattagcataaataaaaaagctgcacgtgatctc

SEQ ID NO: 212112 - DNA, 332 bp, Glycine max
  unsure (1)..(332): unsure at all n locations
ataatgaacatggtatgttaaacttgacattaaatntaacaaccaacggatttgcttttggacaaattaatattgtcttagcgcttctaccaactagcataatcaatcaacttgatatcattacaaacaggggttggatgtgaatgtgacgtggcttttggtgtcactttggcaaaacattaactcctcttctgaccaaccaacaactttcccttttcatttcacacgcttctgtattaatttctcttccctggcgagagaggtagacagagacaggtccagcaccataaaaattgaaaaagtaatgtaaatactataccgtggaatgcttg

SEQ ID NO: 212113 - DNA, 425 bp, Glycine max
  unsure (1)..(425): unsure at all n locations
agcttgaggatcattgtgcttgaattgtttatattaaaangaaacagtaaatctgtcaatataatggaaaatgctggaggatagacaggggttggggatattatgcacaatgtaaaattacaatcgaaaatatttgactttcttgaggacaatgttggaagatagacagcagatcttgcatctatttgtttctcctatcttttaggaatttgagcatgcaaaaatccgaggagccaaaatctatgcagaggtccgtggctatgggatgtcaggtagtttgtctaattgcaggatatgtaggattttcttctagccttagtctatatgtggctgacatatatcatgtggattttgactacgtgatgcatatcatattactctacctcctagtgatgggaaaggagccaatttggacatgactcgtg

SEQ ID NO: 212114 - DNA, 426 bp, Glycine max
tgagggccctatgggctgtttgttgagctaattttctatgcaatccccaaattaaggacttatcataactcgaaatccttatgctctcttagaaccctaaaacaaggtaaaggatatcaaaattacgctcaggggtttattcaaacaaattattattgtttttggcttaacaggggtgcaaggtataaattcatcacacgttggctttttggctgagtggctaaaataaacagaaacatggccttgatcatatccaccttatgtaaataatctaacagtctaaggatgatgttaaattatgaatttaaaaacaaacgttctcttataattaaagtcacacaactcactgcgacaatataaagttatcggcttatccgaccatgatctctttacatcaagctaaccctttctctctttatgaatcat

SEQ ID NO: 212115 - DNA, 305 bp, Glycine max
atgatatttctacagaaagctcaatctttatggctatcgaaccactagtatattattcttatttagagctattcaataaattatattaaaaataaaaatatcaatttattattaccgattcaattatgagctacctaagattaagatcgaactattaaaccttaaataagtgtaattagtgcagtcacctatcacatttttaaaaccttgatcctaacataaaaggcggcaatgtgagaattggtgttcttgatgcattattaatgctgctcatagcccttaaaattctacttgccattggagtt

SEQ ID NO: 212116 - DNA, 370 bp, Glycine max
tcaacatcgggtaataaccgatgttgaaagtaatatcgttaacatcggcttttcaaaaccgatgttaattaataaatacatcatcggttattaaatagccgatattatatgataagaattatgaaaaaagaaagtataaatctacataccaacatcggtctttaaaaaccgatgttaactggcactaacaacatcagttctctaaaaaatcgacgttgttttagaatatttttttaatatgctggctgtcttttcaataaatccagaattaacttgcagattttagaactgggcacacaacatataattgtcattctatcttgaactactttaccaacattacatggaaattactattactttgataaaa

SEQ ID NO: 212117 - DNA, 339 bp, Glycine max
agaactgacggaggtggtgaatacacctccaaagaactcctagaactttgtgatgaagcatgaattgtacatgagttctcaccaccctacactccacaacacaatggggcagcagaatggaacaatagaacaattatgaacattgggaagagcatgctcaaatgcaaagatcttcacaaaacttgtggagtgaaagtgctttcactgttgtgtatgtgctgaataaaacgtctacaaacagactaaatggtgtgactccagaataagcttggtcaggcatcaaacccaatgtgaaacatttgagaattattgtgctatctgctacaaacacatttctga

SEQ ID NO: 212118 - DNA, 255 bp, Glycine max
cctcgcccggcttttatcagctattgacggcatcaccttctgggatttccatctatcacccatggttgacgaaatagaagagatcctaggatgccctgtagggggaaggagaccatacctctgctcagggttctatcctccattagctacaatatctaggatagtccatatctcaccgcttgaattataccacagaaagcaagccgaatacggggcaggtggaatactgagaaaatattcggaggcaaaagcaag

SEQ ID NO: 212119 - DNA, 359 bp, Glycine max
  unsure (1)..(359): unsure at all n locations
agctnttgagcctgacattgatcatctttattactcgnacgacgcnaccatttcccttttgctatgtccaccgngatggaccgatcaaatactatgntttgttagactcaccgtaatgatttctaccaaaatgaatagctagcttctcaagacaagggctgattttcttcttcttttcttccttacatatttcgtaattgatactttgttacacatattatgaaataaaaatttaattaattatgtaactcctatattttgacaacactctatgttttagttacttcacattatagtcagataccataacttcttttattagatgttagttcctgatgatatacaaccatcacatatcg

SEQ ID NO: 212120 - DNA, 439 bp, Glycine max
  unsure (1)..(439): unsure at all n locations
ttacttcatggcttattatgaatcttctgcanattctttatggtcaagaatagaaactaactctgctcattatttctcaattgattcacaatttcattgaactgtcattttctcttgatgngttcttatataccctaatcttttcttcttttttttttaaatagtttttgggaagatgcatccgctttacctggctttcagcttttctaaagaccaatcagaagttntgctctatactctatagtgctaaaaaaatggagtatttcgcatttggaattttggattgttctctgaaatatcaaccctgtaatacagtttactggttgctctagtgaatagactgtgcagtgcaaaacaatgggtagaaagtcttttcttctatataaataaatggagactgatatttcgacagatatcattttagtatgctctgagcttt

SEQ ID NO: 212121 - DNA, 410 bp, Glycine max
  unsure (1)..(410): unsure at all n locations
agctngcctaattaacctgaaattgatagattatgattattaaacacacaaaatgaanatactaagtatttattacctatacttaatagaaaacacttataacattacaaaataaccataaattgggagagtntgatacaatttatacaagttttatacacaaaagttagtcattttcaccgactaacaactcccccaaatttacagttttgcttgtcctcaaacaaaaagagaacaactcacttgtcctcaagtgacaatgacatgcagtgactatgtacaaaggtgtatgctacaaagttactgattgcatgataagagaatggagtaaaatgccctcatcacttgtctttcacaaagtatgtagttatccaaagagaagaataaaatgtatcttgaacagatagatg

SEQ ID NO: 212122 - DNA, 455 bp, Glycine max
  unsure (1)..(455): unsure at all n locations
ntgctgatttagtttctgctgacgaaaggatctaagtgggtctaanaacaggaaaatttaattatcctgcttggacgaatgagaaanatggggcaaatgaagagagtgagaatgaaggagaaacctatactgcgactgtcattcctacatggccaaacttcccaccagcccaacaatgtcattactcagccaatatcagctcctctcattacccaccacccagtcatctagaaaggccatccctaaatcaaccacaaagcctgtctaccgcacttccaatgacaaacaccacctttagcacaaaccaaaacaccaactaagaaatgaattntgcagcgaanaagcctacagaattcaccccaattctggtgtcctatgcaattcaatggtagccataacccccaccaaggttcatcaacctccatttcttcgaggatacgactcgaacacaacat

SEQ ID NO: 212123 - DNA, 502 bp, Glycine max
  unsure (1)..(502): unsure at all n locations
atccttgagtcacctgcggcatgcaagcttggatntgggcaatagcaccccacctgacgtttccaatgtctcctgacccccgcgacatatctccaggtaccactctgtggtcaacgaataaaagcaggaagtttcacccttctacactttctcatctcaagcttgtaggattatggggtacccatcacatgtggtactaggtggcggtcgggcgatggtgcacaacaagttttcacatccacaaatcgcgcataaacccaccatcccctgttgcccacctccaactgagctcacgtactcccacgtagctcatatcctcatttctctcaacaccgggtccccatcaatccttccaagcttccccaacatccaagtaatacaacattcaaacagcacaaactatcacagccaagaaaacagagcaaaggcagaatactctgccgaaacaccaaccanaatcacatcttttctcactgnaaaaccccagtaacaattcctttgt

SEQ ID NO: 212124 - DNA, 372 bp, Glycine max
  unsure (1)..(372): unsure at all n locations
tataacannaattaatccccataacacanatggtctcatatatttctaaaaatgagaaattgatttccagcagctcataacctttgtaaggtagaaaatacctttgtgtgttttttacttttaatattatgcatcatgatgatgaagtccctacattatatgcacttatcatatattttttgtatcattctgattttcaatcaatttcactctattagttttcttaattctgtttgttctcttgggcacaaaaacaaggaaaaaaaaagctagtaataagatattgaaattcaaaaacaactacatatgggtggaagtctgtgaaattcaaggacttgcacgccttgttagagtttatttcactttgaatat

SEQ ID NO: 212125 - DNA, 464 bp, Glycine max
ttaagccacctgaggatgcagcttagtaagtaacttctgacatattttattttgctaacggctgtacatatacattatcttaacattactattagcttgccaaataatgaatcacttagttctttatgactgaagttaaagcataactattgaacctaattagccttgtgcattactttcctctacaatctataagaataattaagttggacatataaccacaaaattgcacaatgacatgttgcaggcgcaaacctatactgataagattgagaaggccaatcacaataaacaaaatacatacaagaacctgtctatgctgaataaatacatccaacaactatataccattaatcttgtacagaatatttataatctgatcgttcaatatgtcacattacattattagtctattacaacaaactacattgtctcactaaagaaagcacacataatgtctttct

SEQ ID NO: 212126 - DNA, 371 bp, Glycine max
  unsure (1)..(371): unsure at all n locations
ggtcacctgcatgccttgaggaatatccatgtacaccttttcattcaagncaccatgtaagaaagcattgttcacattcaattgcttaagataccattgattgatagtagctaaggccaacataagtctcactgtggttaacttcgtcactagagaaaataatgtctagatagtcctatccttccacctgagtgtagcccttggctattagccttgccttatatctttctattgaaccattggatttgtgcttgatcttatacacccacttacaaccaatagcattcttatgttcaggaagatcaataagaacccaagtatcattaagttctaatgcttcaatatcttgcattcatgtcctcaatccaaat

SEQ ID NO: 212127 - DNA, 403 bp, Glycine max
ggaatgtgcactatgcctagagtgcacgctaagccagcagttcacttcttccacctttcttcaggcttttctcccaatttttgcattcatttccctttcaatcacttgaattcttcttcttttgacttatgccattcaaaaatcgcaaagatgttaatttcttcattatttcattaaaaacaatagtaaagggaagaaattgcaatcattattagccaaaattgactatcaaattaactcagatttcgcagttatcatttacataattaatggaagataggaatgaagaatatggggaagatgaacatgaagaatctaccttgctttccatcttacaagatgatatacaagaggctgaagatgcaagtgcaataatcaatgagtatgcaatgacatatctatg

SEQ ID NO: 212128 - DNA, 452 bp, Glycine max
  unsure (1)..(452): unsure at all n locations
aaattctccttcggttgtcgaacaatcagcttaccctatgtgattctctgaacacctcgacttagaaaattgatgccctgttgaaccgtgtcacccccatcgtttccccatcatcatccccttcctcaccagcacctgcaactcaacattgtatgaaattagaagtaccttgtttcgatgatactgaaccccttggttggattttttaaataaaccagttctttgagtatcatggcactcctgagcatgagaggcttaccattgcttcattntatatggaaggacgtgcactttcctggttctagtggatgactggaaatggtcagtttacctcatggtcgattttcctgcaagccctgcaaacaagattcgcaccatcacagtccgaagattcaacaggcgcattntcaagcttacccaacggtgttcagtagaacaatacctgtcngact

SEQ ID NO: 212129 - DNA, 415 bp, Glycine max
  unsure (1)..(415): unsure at all n locations
ttaagtcacctgangcatgcaagcttgctctaaattacatggatggtngatttattttatgaggntatatgccattnttgctttaagagtagtgtcccactggtaaaattaactttccaaatgtttgccttcgcaggaatggccccgatgaagcttgcctcaaagaggtccaggaaggacaaggcggccgaaggaactatttccgctccggagtacgacagtcaccgctttaggagcgctgtacaccatcagcgcttcaaagccatcaagggatggtcgtttctccgggagcgacgcgtccagctcagggacgacgagtatactgattttcaggaggaaatatggcgccggcggtgggcaccactggttactcctatggccaagtttgatccagaaatagtccttgagttttatg

SEQ ID NO: 212130 - DNA, 354 bp, Glycine max
aataaaaaatcttggcggataaaaatcgtaacaaattgtgaaatcgtaaactcaatgaacaaagagggactaatagtaactcttcgaaaatttgagggactaataaaaataattttttttgagaactaaaaaatacttaccgaaatttgaaagattaaaaatatatttaagccttaaatcaatcttataaaatcagcttgtaagatgaaagatgtcccacacttatatacactaatttgactatatctctagacaatgtgatctcgaacacaacctctcatgtcaaagataggatatctcgtgcgtgaagtttgcaggattggaagctatgggtagtgtgatagatgtccggta

SEQ ID NO: 212131 - DNA, 468 bp, Glycine max
  unsure (1)..(468): unsure at all n locations
agcttcanaaatatagagaagatagtgttattgtatccgcttccaatacaggtagggtagcggaaccggagctacagaccgcaataaacttgggccgagacagatacgcgacgggttataatcggaggtatagtcctcaagcctacccttatggttagccgccatacttccctccccgtaccgatccagacgatttgagccaagcctctaccttcgaggggcagctccctcctcatgccgactatcctatgcaagaagatgatgaaggagatgcccatttatgccctctacttcccctcaaggaaccagccccccatgagttgccccaaccatacatagtccgtcacgtctcgtctccatccgcacccgtatggaactcgttacctatgacaagacaatggacagattgatctactctgacagaggctgagagcggtataatgcctcaacaactttacgacctcatat

SEQ ID NO: 212132 - DNA, 375 bp, Glycine max
  unsure (1)..(375): unsure at all n locations
gctccggagtacgacagtcaccgctntatgagcgctgtacaccagcagcgcttcgaagccatcaagggatggtcgtttcttcgggagcgacgcgtccagctcanggacgacgagtatactgattttcaggaggaaatatggcgccggcagtgggcaccactggttactcctatgaccaagtttgatccagaaatagtccttgagttntatgccaatgcttggccaacagaggagggcgtgcgtgacatgagatcctgngttaggggtcagtggatcccgttcgatgccgacgctatcagccagctcctgtgatatccgatgngtgtggaagagggccaggaatgccagtatggccagaggaggaacccgtctgat

SEQ ID NO: 212133 - DNA, 467 bp, Glycine max
  unsure (1)..(467): unsure at all n locations
agcttngaggaagagatgcagtagaaatgtatttttattgtgataganncatctgccactagcaacgacatattattgatcttaattcatgtggcttacgtactcaaactacaattaaatatattcaagtcgtacatacatcattcctcctcatttattagtaagactcgtaatctagcagagtgtatatccttgcaacgtcgctatnagcatcgacgaatgttattaatactgcattcactctactttttaaaattaaggcttgatgtgatgatcagaacactcacaactgacgatagtacaacattttgatatggatttatagcacagtattcttattcttggatgagggatcactaaaatcctgtttacccggaacccacgcgcgcgcttgtcacgctttcaatgggttgtctattcactcgatgaacatgtccttccattaatggtgggcatgttatatacta

SEQ ID NO: 212134 - DNA, 269 bp, Glycine max
tgcggatgcgcaacagtggatgcagaatagtggaatggacaaagtggctaagctggatgccaaatctaacgataaagctcgtcataaaaaggcagcatgtagatattccttgattttccaatgcttctttagcctatgatgggtcattggtggaatagtgtgttatgtttaatacttcatttgaactgactcgatgcgacttgctgagcttggttgagctgtttcttaccaactcctttttaatctgctgtgatccgttgctacccttt

SEQ ID NO: 212135 - DNA, 311 bp, Glycine max
agcgtgcactgagctagagagagaatttattactctcgggaacaccgagccatatctagagcaatattgtgtgttgtggacctaacctctgattcgtaggaatcttacgtagaaattccatgcgagcaagtttatactgacggtatggacttgtgtgaggtgacagtatgtttcatacttacctcataacttaatgtcacctcttaaaacctagaaaacccatcgaattgaggggtgcagacacctacattctgcgaagctgcgctgcaagcttgattatgggtcagacattattgattcatgatttggga

SEQ ID NO: 212136 - DNA, 478 bp, Glycine max
agcttgaaggcgcatacgccaccatgtttttttatatttatatacactgcggcatcgcgccatacatatgtattgctgatatatctcttttctcggtcacttataggtgccacttgagctgccatgtctctccacctttgggcgtattctttggaagattcatgctctcttttagcacatgttctatagttgcatcctttccggacccatatcagatttttactgatactgcctaacgaaggcaaccattaggtccttccaagaatcaactcgggaaggttccaagttagtgtaccaggcaacagctaccccaatatgactttttcggaagagatatatcaacagttcctcatcttttgcgtatgcccctatctttcgacaatacatctttagatggttctagaggcaagagtcccctcgtacttgcaaagtctggcccttgcacttggagacggatgattctggtactaggacaaat

SEQ ID NO: 212137 - DNA, 432 bp, Glycine max
  unsure (1)..(432): unsure at all n locations
actaagcttagcttctcaggaagntatctcaaagaagcttctcaagggattttctcttattaaagcttcacaaggaagctacctagtctataaatagaagcatgtgtaacacttgttgtaactgtgatgaatgagagtcttgtgagacatacttcaaagttccacttctctctctcttttattccttcaatttcgcgctcccccctctctatctctccctctttcttttcctccatgaagcatccttccagcttttatacaacgttatcttgtggtgaagctcctcttcatggttattcccagtggatggcgcctccttacctcttctctttgtttcactgctctcatggtgaaaacacattaaggactcattgagctcaagatcagcctcataaagctcacagcaactccaaattctcctctttctaggat

SEQ ID NO: 212138 - DNA, 399 bp, Glycine max
  unsure (1)..(399): unsure at all n locations
agctntgaagactgaagtagttggtcttgctatttattgcttactcttctccttcaacaagactttttgtatattcttgtaggttagaaaaagctctcaaaacaccttgaaaaccctaagagaatacgactaagtgctaagttttttacgcgtctgtaagaaaattgtgtgttagtctttaagcaatccctaaccaaaaatcttgtctgacttgttcagagccaataatggcttggtagaacaaagaatactaaatgttgatcgaacttgcggttgactttgatttgtaagtgccaaaagtggttgtaacataatacttgtaacttgtgaaaagttagtggaacttgatgtgttaccaagaattggacgtagctgcagtggaatggacaaacctgtata

SEQ ID NO: 212139 - DNA, 465 bp, Glycine max
  unsure (1)..(465): unsure at all n locations
aaacaagaataccatcggatgatacttatctacttgctttcaagaaaaaaaaattgaatatactcggagatcgtgtaaaacaaaggaagaattaattatacaagctccttccaatttcgtgcgtagttccattttcgtaactactctcaagtactggcaaagattaaccacaattaaagcttaacaaacagaggaagggtttggaggaataaggacaaatgactcanagtaacgtaggttgaagctaattgtagaagacaatactttgcgaattattatacttacaggagctatacaagtcatccatattnttttttactaaactcatccatatcttaatatatcttatgttcgatggaaacaatgagcaaggtcgagttgatcttcacttcattttctcgcaatnagagttgttagggttctgtcagaaaatcaactcancgatctcttaaggtaaagaattaa

SEQ ID NO: 212140 - DNA, 423 bp, Glycine max
agctggcgggatacctgaggtcccactatgaatccaaaggccctaatgagaatggttgaataaaaacaaaactaaagtgattatcaaaattcgtgatgaagcacggctccacaatttagtatttatctgctctaaagtgaaatcatagttgaaattttgcttgcatccccatgatctcatatgcacagttttgtatcatcttaccaagcaatagccaaaaaaataaagaataacagaatgaccaacttccccgctattttccatccatttttctcacatcagtattgaagcggaagataaaaatcagataagaccatgatgtgaagtgatgcacctgaagaaaagaccatgcgaggttgaaaagcgtaacgagccagagaagggcataataggaaacgactacatatgagcctcgacgacaga

SEQ ID NO: 212141 - DNA, 388 bp, Glycine max
  unsure (1)..(388): unsure at all n locations
taagacatgattatgaattttataaaatatgtagcaacttttttttaatcaaatagtacaaacagaatattntagtggaggttgaagacagggacctgagagtagaaacataaacaagcatgtccaaagccacactttttgattccatacatgcaacagagaagaaaaacacaacaaattggagacgacaaaagaagaagaaaagagaaggtttttacctcatgatattgacatggaggtgagctctgagctcgatgaagaggtcgtgcatctgacccgagtcagcggcattaccgtgagagtacacgaaggtgaacctggcaaaagggtgtttccagaaggtggcgaggatcttgttgccacctttggtgtggagaatgtgagcgtc

SEQ ID NO: 212142 - DNA, 431 bp, Glycine max
  unsure (1)..(431): unsure at all n locations
agcttncaacattcaatttgagcgtctcgtttattacgggactcaatcagacatccgagtaaaaatttattggtcgttggattggctcagagattcaacattcaatttcgagcgtctccatatattacgggactcattcagacatccgagtaaaaagttattgtagtttgaattagcttagagcttcaacaatcaatttcgagcgtctcgttatatcacgagactcaatcagacatccgagtaaaaagttattgtncgttgaattggctcagagcttccacattcaatttcgagcgtgtcgatatattacgggcgtcaatcagacatccgagtaaaaagttattgtcgtttgaatttgctcagagcttcaacattcaatntcgagcgtctcgatatattacgagactctatcagacatccgagtaaaaagt

SEQ ID NO: 212143 - DNA, 413 bp, Glycine max
  unsure (1)..(413): unsure at all n locations
cgacaataactntntactcgtatgtctgatttgagcctcgaatataacgagacgctcgaaattgaatgttgaacctctgagcaaattcaaatgacaataacttttttctcggatgtctgattgagtcctgtcatatatcgagacgctcgaaattgaatgttgaagctctgagccaattcaaacgacaataactttttacacggatgtctgnatgagtcccgtcatatatcgagacgctcgaaattgaatgttgaatatctgagccaatccaaacgacaataacttnttactcggatgtctgattgagtcccgtcatatatcgagacgctcaaaattgaatgttgaagctctgaggaaattcaaacgacaataactttttactcggatgtctgattgaggcctgtcatatatcg

SEQ ID NO: 212144 - DNA, 444 bp, Glycine max
  unsure (1)..(444): unsure at all n locations
agcttatgactcntggcatttctttataactagtcacttaaaaagttgtgacttttgaaaaaatcttcataaacaagtcactcgaagaattgtgacttttggaaatgtatttctcgacatcagtcactggtaatcaattaccattaaggtgtaatcgattacacatcaacagatgtgactgttcattctgaattgtgaagattaaaacgttcagaagctctgcgaatcgattacaagtgttgcgtaattgatcacacaagtttaaaatgatttataactgtcaaacacaagttgtaactcttgaaattagaaatcttaaccgtttaaaacactggtaattgattactaccttctgctaatcgattaccagagtgtaaaactctttggaatgattttgaaaaactctttgtgctactcaatatatgaaaactgtttatacttatg

SEQ ID NO: 212145 - DNA, 480 bp, Glycine max
  unsure (1)..(480): unsure at all n locations
atcctgactcaccatanaccttgacccagggtgataatgctcatccttaccctcggaagcaaaaaaaaaaagagaagagaaggaaaatttccaatcaaaggaaataagagaaggaaaatttccaatcaaaggaaaaaggaaaggaaattcccaatcaaagagtgggagaaagcaaaaataaaagaaagaaaattcccaatcaaagaatgggagaaagataacaagagagaagtataagagaagaaagctcctggtcagagaaaccaaaagaaatgtgccgagaggtccttggaccagacaatatctgaacaatacagaattgtcacccaatgaataaaatagaaggaaagganaccacgacctataatggtctccccctttaattgccaccaaaatctttgcgccccgcactaccaaaacagatatggaaagccaccaaaatcaaagcaaaaccccaaagccaataaaaaaaaaaacccc

SEQ ID NO: 212146 - DNA, 449 bp, Glycine max
  unsure (1)..(449): unsure at all n locations
ttaagtcacctgcggcatgcaagctntctaaacttcagtttcaaaactttgtttttctgcatgtgaaaattctgcagaaaactaaagtgtgctatcttttcttccttctttctcttgccaaagatcaaaagactaactgcctgagaattcttttgattctttctttctcctcttgccaaaagattcaaaggactaaccgcctgagaattcttttgattcttcctcttccctttgaacaaaagatttcaaaggactaaccgcctgagatatcttttgtttccccttacaaagattcaagggactaaccgcctaagaattctttgtcttaacacattggagcatacatcctctgtggtacaagtaaagcgtacatctacttgggttgtaatactgagaacaagagatggtacatcttttgtggatcagttcaagtggagcgtatatccact

SEQ ID NO: 212147 - DNA, 399 bp, Glycine max
  unsure (1)..(399): unsure at all n locations
gtggctaaagtcagaatagttctgattgttataggtttcacaactggggaaaatgtttctttgaaatcaaaatcaggttgttgatggaagcgctttgctacaagacgtgccttgtacttactgacaggcccatctgaattatgcttgactctaaaaccccacttgcaaccaattggtttgctagtaggaggcttaggaaccagttcccatgtattggttttgagtaatgcagccatttcttcatccatagcatctttccacttangatctttaagtgctgttttgacagttctaggcacagcatgagttagaaagcacgggtggtggagtctaggcttgacaatttcattttttgatctaagtgtcatanggatgaatgtacgaggtatgactggattg

SEQ ID NO: 212148 - DNA, 470 bp, Glycine max
agcttctgtccctgagagactggttcccagattacttcatgtagtgaagattgctgaaaaccctagccttgcaacaagttctatggaagtagacacggagatggacaaaaaaatccgcagtatggtgagtagcattttgaaagaagcctctgtgcctgaagctgatgaagatgttccaacatcttccaccccgaatggttctatgcctgatgttgagaaagatgttccaacatcttccggcccaaatgatgaagtactctcttcccccagcaaagagagatcaacagaggaagatgatcaagccgcagaggagacccctgcaccaagggcaccagaacctgctccaggtgacctcattgacttagaagaagtcgaatctgatgaagaacccattgccaacaggttggcacctggcattgcagataggttacatagccgatagggaaaaactcccatcaagaggtctggac

SEQ ID NO: 212149 - DNA, 498 bp, Glycine max
  unsure (1)..(498): unsure at all n locations
ctctatataacactcaagctcgccttgaatngattactatggttatgatgaccaacaagttatttgaattattnnttttctcttctataaattgaatnttaatttaagctatataaattgaagcattctggatggaaggggtctttattccaattgttgaaacttgaaagtttgagtaagctaactattatgttataacctcaacatttaatggatgaatcatagagaattgagtgaagagcaactgaaaagatatacctctttgcattctacttcattggatgaaagctcgagaattgtaaaggactacttaatagcatgaaattcgtcttagaagggaggattttctaagacagctatgatgatganaccatcttaaaataactctcattctaagagggttatctaatcaaaatcatcgttgaaaaggactcattctacgctctctgtgtttggttcttttatgtttagactagtatggcttagatgggactttct

SEQ ID NO: 212150 - DNA, 388 bp, Glycine max
  unsure (1)..(388): unsure at all n locations
atatatattacttctatttataaaataaaatatttatattaagatttntcttaaagaatttgttttaatgagtcaactagtttgtattgttgttgtgacaactggaggttggttttccaacggccatatttctaacggtcatattttgttgttgcaaaatgcctatatatatctctctcctcttttctagaaatgatagactgagagctctggtttctttctgccaacaatttatctctttcttttctatcaaaacttaatttttggagagcaagagcattggtgttcataaggctcggggatcctttctgtgcacacgatcggaaccaacgggtttgcgtatcttgggagaggagcgcaatcataatttcttactcgtgcagtgggg

SEQ ID NO: 212151 - DNA, 313 bp, Glycine max
  unsure (1)..(313): unsure at all n locations
tgtgcacttgtgtgcaatacacaatactcggtacaccactttataacgatgtatcagaaaggcataatagaactctaatggatatggtcaggagtatgttaatcaattagactttacccgtatctctgtggatgtatgctctgaacaccgccatgtattacttaaatatggttcctagtaaggcacctccaaagacaccttntgaactgtggacacataggacacctagtataacgcacctgcatgtttggggttgcccgacagaaataaggatttataatctggaagaaagaaaatcggatgcaagaacaat

SEQ ID NO: 212152 - DNA, 450 bp, Glycine max
agcttgacatgatcatatcttgctctactatctataagcacagactcctttctgataaaatgtgcatatctgtcataacgagacaaacaatagaaaattatcagagaaatctaaataattatcaattaattaatagggtctgcagcaaagaagagtttgcatcaccaacattatttggaggatctttccagtcatgagaaaattcacaatgctcccctttcagacaggctccatgagcaaaaaacttgcaaagaaccctacatgattcataagataagaaattacaaaaattaaaataatcttcaagatgcattagaaaatagagaacatattaacagagaaagaataggaccacacaacacttgtccaaagaatcaaaaaccaaggttcccaactataaacctttatccagaattccacataccaaaacaaatggctcaattcaaatga

SEQ ID NO: 212153 - DNA, 428 bp, Glycine max
  unsure (1)..(428): unsure at all n locations
ctatccaaatcccttagtaaaacaccncattccttcaattccttataataacaacaacaataacaaacaccccattttcaaattcatttaataaacaaaaacccaaatgcacttcttcaataaatttttcttgaccaccataattggggccttcggctcctttgctgacactccgaggtataccataagtttcagtattttgaccgactatgaaactaatcttcggttcaagactacaacacacttaaagctcttcacctcgccagctaccgctacccaaagatgtgcttaaaaatcaataaaatnttaatcaattggtttcttcccacaagccacacccattggattctccaataaaattcaatccaacacaagaaaaaancttacaacagcgaattatgaaaacaaaagttaaaaagctccaaagg

SEQ ID NO: 212154 - DNA, 430 bp, Glycine max
  unsure (1)..(430): unsure at all n locations
agcttgcgaagaaagaagacggcggnttgtttgttatgaacancaacaagctttccatcaagacgtgcctgatgaagtgcttcatcaagttggtttcgcgcgaagaccaccaccacacgatgatcatgttgaaggacatgccgcctgagccaaactggtaccaaagtaaagtggaggagggcaaggcacatatgggaacaatgaggagctcaaaggagagaattataacaactacatgggagttcaaagaaacagaaccattgccttatcatggcctttggatgggaatggaagaataattcatgatatgatggtgaacaacaacaaggtgatgaaactctctggtcttcttgagggacaataatggtggtacaatgagaagagaatgtgatgcaaatgcaataaagcccatgatgggcgctctacttct

SEQ ID NO: 212155 - DNA, 371 bp, Glycine max
  unsure (1)..(371): unsure at all n locations
actacacacaacttacaccttcatattctcttttctcaaaccaacagaaacacattaaaatcatgagatgaacactttttgatcttccaanggctcataagggaaaatgaaagagaaactaagaagggagaatgagagttcttaccactaactagtcttaaacttgaaaaatcactgctacatgcccttgatcaagaaattcacgtctacacttctattgtgggttgcttggaagaaaaagaaaggaaatgagagagttgtgttttggttagatttactagggttgtgaaagttatgactctcttgttcttttaccccacattactaaccaccaatgatcaactacccaacggatcataagactcacagat

SEQ ID NO: 212156 - DNA, 472 bp, Glycine max
  unsure (1)..(472): unsure at all n locations
agctngtaggttacagtggcaacgattgttctgttatataatatgataaacaaagtaccagtgggtttgtgtttntcacggtgaatacaactcttcagctgggatgtcaaaaaaacaacccatagtcactctttctacttgtgaggcataacatgtacaagctacttcatgtgtttgtcatagtctggcttacgaatctgataaaagatttaggcatgtcacaagaagagccgaccaagttctttgtggataataatataaccattactttagcaaatcatttagtgttccatgatcgaaaaaacatattgatacctattatcactacataaaggagngcatggacagaaagaatgtacatgcataatatgtgaagtctcaaaaccaagtagctgacttcttcaccaagccgctcaagcatgaagactttatcaagctaagaagcctacttggaatggtaattcaagtttaa

SEQ ID NO: 212157 - DNA, 409 bp, Glycine max
  unsure (1)..(409): unsure at all n locations
ctcagcttctggtgtacaagtgtggacatgctcatgtcaacatcattatataaagaacttgngaggttatgggtcattccactcctangtactttcctcatcaaaagtaacatccctgctggtcacaatattctttgtcaaatggattgaataattgtatgcttttgatacatcacttagaccaaggaagatgcacttttcagctttttcatcaagtttcttctttttctgatgtagtatgtgagcataaccaatacaaccaanaatctggaagtagtctacaaccgatttccttccaccccaagcctcctcggttgtcatgttttgaaccacaaaagttggacttttatttaaaacatgaacactccaatttacatatattgtgtgtgttttatgtactaaacataaa

SEQ ID NO: 212158 - DNA, 470 bp, Glycine max
  unsure (1)..(470): unsure at all n locations
agcttgcctcatagagatccaggaatgtactttcggttgaaggaaccagttccgctcccgaatatgacagccatcgttttaggaccgctgagcaccagtagcgctttaaggccatcaaaggatggtcattcctccgggagagacgtgtccagctcagggacgacgagtatactgacttcaaggaagagatagttcgccggtggtgggcatcgctggttacccccatggccaagttcgacctagacgtagtcctcgagttttatgccaatgcttggcctacagaggagggtgtgcgagatatgcgatcttgggtgaggggtcagtggatccctttcgatgcagatgccctcagccagntcctgggataccctctagtgctggaggagggacagaagtgtgagtatggccagaggaggaaccatgccgatggggtcgatgaggacgctatcgcacaattactgtgtataccg

SEQ ID NO: 212159 - DNA, 364 bp, Glycine max
  unsure (1)..(364): unsure at all n locations
taaactcagctcgaatgaggaagtttggaagggtgagacttcctacttttaattgttgaccacagagtgatacctggagatatgtcgcggnggccaggagaccttgnggacgtcaggtggggtgctattgcccaaaaccaagcttgaccaatcccgacccaacccgggcatagtcagtcagtgagaacctgtgatgtacctaaacaggcgagctcctggtagtcaaacgataaaagaacaaacaccacacagcanggaggcttgtgtggtggctggccagctatgaatcttgagtgatatctgtgatatggcctctggtaatcgattaccaagggtgggtaatcgattacaaggcttaaaaagt

SEQ ID NO: 212160 - DNA, 448 bp, Glycine max
  unsure (1)..(448): unsure at all n locations
tcagagtcacctgaggcatgcatgcttaatcaattgaggcacaatgacttgatttattcngaaaataattgagactttgaaaacaattgagtagtcgtgcgtatcgcatagattataggtagagtctgtgtgttaaaatattttacgggttggacctgaatcaggagggaaagaccctcacgaacttctcagagtctaggccttgggagtaaatacactcaattgtaatgttcctttaagcatgtactagtccagcatgattggagcattctcgcatagagggtgaccctgactagtctccctataatttcactcaatgagagtgacctgacttgcccgttgtgagacatgtcttgacatgtactcttaggcgcccgatgaggtttttcactcaaaatgtgaccacattgcatgtaagcttgagtctagtgtatttgttgcatacgct

SEQ ID NO: 212161 - DNA, 414 bp, Glycine max
cgcctatccgatgcagcagtaatgatgacccgattatgttttggatctgttcgaacccggaatgggtttaggcaaagataacggcggcataactggcctgataaatgccaaaggaaatcgtgggaagtatgggttagactataagcccactcacgcagatataaagagaagcatcgcgggaaggaagaacggtagtcaaagctcgcggttgagacaagaaggtgaaggaagcccgccctgccacataagtagaagctttataagcgcgggtctgggggacgaaggtcaagtggtcgcgatatacgaagatgatgttccgagtacattggatttggtacgaccatgccctcctgatttccagctgggaaattggcgagtggaggaacgcctcgacatttacgcaacgagcataat

SEQ ID NO: 212162 - DNA, 473 bp, Glycine max
  unsure (1)..(473): unsure at all n locations
tgttanaccanntttttagttagacaaattgcaccttataaatataatttggccttgcctaatcaccataagggtcaatatcatcaaagatggataagtataccttgtttgcccatgaacaactctctacatcatcacacatagattcattcccttcaatgtaatctttaccatgcttggttatgttacagtgtatctacatgagtgggttatttactagtgtctttatccttccatgcattgcattgcttctaaatctatctttcaagaagcttcttgtttatggttaaagttagattccaaaactcgagaactatgactntagatcaaataaaagattatctgtaaactccaaaacatgaatggcaccacctaaattaatcctcacaagatattntacattcattccaaaatagtgaaaaatgttacanattaatctcgtaagcaacataactaatcacataacattagtc

SEQ ID NO: 212163 - DNA, 352 bp, Glycine max
  unsure (1)..(352): unsure at all n locations
agcttgagggtgcgcagcccaccatcttttcatagtagagtaccgataatgtgtctaccatcacgattatcgtctccctttccattattgggggtaccacctgngccgccagatccctccaccttttgggcgtgttctttgaatgatccgcccccctttttgcacatgttctgtagttgcatcctatccggaaccatatcaaaattgtactgatactgcctaacaaaggcaaccattatgtccttcaagaatggactcgggaaggttccaagttagtgtaccaggtaacagctaccccagtaagacttttttggaaagaatgatcaagcaattcttatttttggcgtattcc

SEQ ID NO: 212164 - DNA, 334 bp, Glycine max
  unsure (1)..(334): unsure at all n locations
tgaaagaagcccggtagtcaaagagaagtctagttttttcctatanagtctgaagagagtatgatgaactaanggacgtcaatatggccaccgatgaagccttggaatgagaaaccaagaaggcccgaaaggaagaacacgaccaaaacaagttntgaggggctttatagggcagcaatagtgagctcaagctccgaagaggtgaaaggaatcatcacgggtcaaaggcatgatctggaaggatgagctaaaggcttgccttatgtcgaaaagaaatttgtcctaacagttaaagtgagactgaagggaatatgtgggccatcatcgatgagtg

SEQ ID NO: 212165 - DNA, 420 bp, Glycine max
ctgcagcttgagaagataaaatttctttgatgttgttatttacaaatttgaattgagggaagaattattagagaacaattcatatttgaaaataaatagagcctgtgaaaatctaaggagatcttttttaagaatttattatgtttcaaatctttaagagttcatttagatgtaaatattttattaatctattttatcttattttaaggatttgcttctttttttaatattaaaatatgttaatatttgagtattatattattatttagctttatatataaaatcaataaataaaatttttacattgcgttccatttaagatattccgaacaagtgaataattttgttatgcatgtgaagtaattttgtatgtgttcaacaaattccaacaaactaaatacccaatataaatatttgact

SEQ ID NO: 212166 - DNA, 426 bp, Glycine max
  unsure (1)..(426): unsure at all n locations
cttagacatntaagttcatttggttgtgtgtagtttgttcttttttctactgcaacgttntttgaaatattaactnttaaatctttatctctcatatatttatttatttattcttcttgctaccttcttaaaataaattatgattttattattcttctgttattttatatttttcaactacttcaataattaatttcatccaacactcctaatttaataaattaaacttttaaccttctaagactattaattaattctgtgaaacgcaaccttattaattgagatcttaattattagcatggtccatatattccaagttaaggagtaaaatatcatttattccaccacgtcgtaggtgttctccctaatctcttgcaaaagattaataagttaacacccgcgttgatttattttttctataatcat

SEQ ID NO: 212167 - DNA, 388 bp, Glycine max
acaaagatgatgacaaaaagcccaagagaatgacttccagatggagtcaagaacaattcaagaatcaagattcaagtttcaaggttcaagaatcacgaatcaagaaccaagaataatcaagatcaagattcaagactcaagaattaagaatcaagaaaagactcaatcaagataagctctaaattttttttcaaacattgagtagcacatgaagttttacaaaagcttttccaaagagttccactctctgggatcgattgcagttactgtatcaataccagttgcaaagttgtttcaaagctctcaatgaattacaacttccaattatttcaaatggtctatcattacagatttggtatgattccaagcgttgaacgtgaaatcaatc

SEQ ID NO: 212168 - DNA, 412 bp, Glycine max
accccgagcatcagccaaggacctcaatgagagatttccccatgatatacccgagagccgcaggcttcctatgatcagttcacccaaaaacttttacatgcgacttttccatgaacataccaactcatgatactcattgctctcaaaaatctaactcggcgggttcccatagtgtatcccatcacaatacctgtcgtacattaacttgtcactcttagagggtcttaccgtcgagtgattgtatgactcatagctcacaactcaatggacacaacatctcaatacacgtgcgatctcacatataacacatactcaacttggcacttacacacaggtcatcccactttcataatcctaagacaatacgttatcacggcttatgcattatatatctattcacagtataacacat

SEQ ID NO: 212169 - DNA, 443 bp, Glycine max
  unsure (1)..(443): unsure at all n locations
gctgcttctaccaatttcgcttagtaatttaatttagggttggattaaaaggctgaactgacaaacgattaactctcgtaaccttaagataacgagaacttgctctgtgtaatcatagggggaaagcacacgtcgtttntaattcctgatattttctaattcaattttactcgctgtttaatttacaaaaaaaaaaaaaacaaaccccccccccccccaattcattactattttcctactatctgttatgaacgtttggttgatcattgctcgttgggagacgacctaagatcacttcctaattactgcattttaatgattatttaattaggggacgacctctatcaaagagtgtaaagtagttagtgtggcattaattgctcagcatggaagggttcaagacttattgtcttacataagtaggtgaccttaacgattaatga

SEQ ID NO: 212170 - DNA, 447 bp, Glycine max
catgcaagcttatgctgcaaatatttacaatagaccttttatacctctacagttaaatcaaccacagcaaagcaattatgacctgttcagcaccagatacaaccctggatggaggaatcaccctaacctcagatggtccagccctcagcaacaacaacagcagcctgctccttccttcaaaatgctgctggcccaagcaaaccatacattcctccaccaatccaacaacagcaacaaccccagaaacagccaacagttgaggcccctccacaaccttccctcgaagaacttgtgaggcaaatgactatgcagaacatgctagttcagcaagagaccagagcctccattcagagcttaaccaatcagatgggacaattagctacccaattgaatcaacaacagtcccagaattctgacaagctgccttctcaagctgtccaaaatccc

SEQ ID NO: 212171 - DNA, 455 bp, Glycine max
  unsure (1)..(455): unsure at all n locations
tctagccaaatggacttaccttgacttaattcctttgatagctcctttgagccttgtttccctttcctttttttgaagctcactacaagccttaagtgaaaaaccatgatatcaccatatccttaaggaattttggagctttggaattgttttgggaataagtgtgggggtttttgtttcattggataacatgttttgttggtcatgcttcatgatatattttgagccatacttgatgtaaattgcatattggttaaatgttggacatgctgaatatgatgttgtttctcanaggctacagagtaaaaaaaatattataaaaaatcgaaaaagaaaaagataagcagtatagctgagtgaataagatcatatatgacaaaagaatgatgagactcttggttctactctctatgtttaaaatatatcnttacttcttcttatgttcttatgtgttc

SEQ ID NO: 212172 - DNA, 429 bp, Glycine max
agcttgagacacacagaaggcacacttgcacacactcaagaactcacaaactcactgatgagctatttggttctgacttgtgtgtggtagtggatgacatacttcaaaatcggagcggtcttcttataggccccaaaagaaaaaaaatttaaagaggccccggttttcacagtaccacatggcactaattctctcactacaattttcattcccacagatttccttatccattaagaaaaaaattaaagaaacatattccgagcatagttactagaataatattatatatatgtataatagaaccaaaaagaaaaaaagttaagggaattatgttgtttgtatatctagaaaacgaataattcatgtggtctcttactatgatctatatatatctatattcttttgggcttggctaccggaggggggata

SEQ ID NO: 212173 - DNA, 287 bp, Glycine max
actaatgtgtagtccagcagatctaatcacacaataatttgtgactattgtctaatcttatataaaaagatttcacatagtattgtcaaaagcatacttatgcgcgcaagtgtgtagaaatatgctcaagagaatataagttaaataacacagatcaaagtataaacacttggttataatggttcactcaacctaagtacgtccagtctccttataatctgtaagggttccactaataaacgtgttataacaaatttttacttacaccctacggaaaggtttttatg

SEQ ID NO: 212174 - DNA, 377 bp, Glycine max
  unsure (1)..(377): unsure at all n locations
agcttactaaggcacctgttctagctctttctgactnttctaaaactcttgagctagaatgtgatgcctctagagtgggagttggagttgttttggtacaaggtgggcaccctattgcttattttagtgaaaaacttcatggtgccaccctcaactaccccatctatgataaagagctttattctttaataagagccctccgaacttgggaacattaccttgtttccaaggaatttgtcattcatagtgatcatcaatcacttatgtacattanggggcaaagcgagttaaataaaaggcatgcaaaatgggtagagtacctaaaacaattcctatatgttatcaaatacaaaaagggaaaaaaatgtggagctgat

SEQ ID NO: 212175 - DNA, 251 bp, Glycine max
  unsure (1)..(251): unsure at all n locations
tcatatttaccttctccaaaaagttatatttaacttatgcgtaagcgtaaattaacttacacggtgaaattatatcatatattccttcttagtttcttctcctatgtgtgtgaggtgtcaatataaacatttcggtagtgcactgtacaattaccttagacaatagtcccttttttttcatatatagatttcatgatnctaaactacctacaaagaaacgtaaaaaaactgaattacttcccatcaacttc

SEQ ID NO: 212176 - DNA, 448 bp, Glycine max
tgaaggtgtgtaacccaccatcttttcatagtagaatactagttatgtgtctactatcattggcatcatatttttctccgtcattgaggtgccacttgagctgccaggtctctccacctttgggcgtattcttttgaaagattcgtgccccctttttgcacatgttttgtagttgcatcctatccgaagacattatactgacactgcttaaggaaggcaaccactaagtccttccaagaatggactcgggaaggttccaagttagtgtaccaggtaacagctaccacagtaagactctcttggaaggaatgtatcaacaatacctcatcttttgcgttgcccacatcttccgatatacatctttagatggttcttggtgcaagtagtcaccttgtacttgtcaaagtccaacaccttgaacttgcgaggggtgatgatatttggttct

SEQ ID NO: 212177 - DNA, 253 bp, Glycine max
tgccagcttggtcaaaaccatcacctttattgtccttcccacaaccaaaaccaatggtgtgaacggaaaccttgttcttatacttcccaaaagtgaaagtctctgtagccaaaacgccttgtgtgattgaataatcaccgcatgaataaacatactcacacccatcactgcatgttgaagaaagcaaagcactggccaagctactaccgcatgaaaccttggaaaaaaaagaagacttcttgggatcaaaaat

SEQ ID NO: 212178 - DNA, 471 bp, Glycine max
  unsure (1)..(471): unsure at all n locations
ngatngctatcatctaanatgccatttgtgatgtatcttctagnttgcatcatcatcatctagttntgcattattttccccctcttgtattcctttccccaattgtattttttgtggtctatccccccttcccccttcctttgatttatctctgaacattgagaaatctaatctatgtatattgatcgatgtaactntagtttaatagaaggatgtggatatgtatatgtatggatatctataatattctacttctacaactggattcatctttgcttggagaccattaatgttctgaagcacaacaaaactactctggcttanattgattggcgctacattatatcaataattattaataaaaataattactcttatttgatgatataattttttaatcattttagcctctaactaattctaaacaccaatttttagtcaaacaaataatagaanaaataattcctcgaa

SEQ ID NO: 212179 - DNA, 317 bp, Glycine max
ctatcatctgtatggtgatctgcagaagaacatagaccacagagtcttgctacatgtgcagatttctgattcatggcaagctgagttactaggttgaccaacgcatcaatgtttccctcaagatatttattttcagtggatgaagatgaatccattgccacctcatggactcctctatggacaatatggatgcaatcctaccccgcacaggcattggatgaaacactacaagtaaattggccagaaatcccaggaaggccttcgggtctccgaccttatgataatttttcgccttggtaaaaggggacacttctttt

SEQ ID NO: 212180 - DNA, 423 bp, Glycine max
  unsure (1)..(423): unsure at all n locations
agcttccacaatattcaagcataacaacattctcacagcacaagctatcacagccaagcaaaacagagcaaaggcagaaaactctggcaaaacaccaaccaaaaatcacagcttttcccactcaaagaccccagtaacaattccttcgatccaattcgtaaaccgttggatcgactccaaaattttactggaagtctatagtgcataagcctacattttgaccgttgggatctactagcaaacatccagaactcattctacattactctttccacaaccagcaaatacatggatttttctgcacttgtgcagaaatctgctgcacaattttacagcaaaatctgcacaaagagcatatttcgaaaaccacacttncccttatncaaatttggccaaatcaatttctacaaggcccaaatcatg

SEQ ID NO: 212181 - DNA, 394 bp, Glycine max
  unsure (1)..(394): unsure at all n locations
agtaccacagtcaccgctttatgagcgttgtacaccaacagcgcttctaagccatcaagggatggtcgtttcttccggagcgacgcgtccagctcagggaccacgagtatactgatttccaagaggaaatagggcgccggcggtgggcaccactggttactcccatggccaaagttgatccagaaatagtccttgagttntatgccaatgcttggccaacagaggatggcgtgcgtgacatgagatcctgngttaggggtcagtggatcctgttcgatgccgacgctatcagccagctcctgggatatccgatggtattggaagagggccaggaatgctagtatggccagaggaggaacctgtctgatgggttcgatgaggaggccatcgccca

SEQ ID NO: 212182 - DNA, 392 bp, Glycine max
gcttggagaggatgcttcaatggaggaaaagatagagggtgagaaagagagaggggggaacacgaaattgaaggaagaaaaaaaggaagagaagttgaactttgagttgtgtctcacaagactctcattcatcaaagttacaacaagtgttacacatgcttctatttatagactatgtagcttccttgagaagctttcttaagaaaacttccttgagaagcttctttgagaaaatttccttgagaagctagagcttagctacacacacccatctaaaaactaagctcacctccttgacaaaattcatgaaaatacaaaaaaaaaagtccctactacgaagactaccaaaaatacccttcaatacaagggtaaaaccctatactacaagaatg

SEQ ID NO: 212183 - DNA, 486 bp, Glycine max
  unsure (1)..(486): unsure at all n locations
agcttacttgctagaatatacaggaaaataccttcatctgacttagcatcagatcttcctaagtgatcttttccattattcaatacagaacatttacaaccaaagatatgaagatgtgagatgttcggttatctgccattgaacaattcatatggagatgtctttaaaatgggtcttattaaagccctatttgaaatgtagcatgcagtgttaacggcttcaacccaaaagtattttggaagaggagtatcatttaataaatttctagcaatctctgtcaaagatctatttatcctttcaacaacaccattntgttgaggggttcttggtgcataaaagttgtgctcaatcccatgcttatcacaaaataattcaaattctgtattgtccaactcaccctcatgatcactcctaatatatataatcttgagattctcttattttaatgatgttgcaagattctaaatgctgaaatgcatattctat

SEQ ID NO: 212184 - DNA, 433 bp, Glycine max
  unsure (1)..(433): unsure at all n locations
gcttatgagaattccaagctttataagcaaaaagtaaatatttatcatgacaaaaagctatcaaaaaggaattntccacctggtcaataggtattgttatttaattctcgattaagattgtttccaggtaagatgaaatccaagtggtttggaccattcatcatcaaagaatttatgccacatgatgcagtgatactagaggatccaaccaccaaaaggacatggactatgaatggtagtaggatcaaacactacctaggtggagattttgagaggataatcattgttgtccatctacaagagacttgaaccacaacaaagatgttcagctagaaagacgttaaagaagcgctcctaggaggcaacctantatttctaaaccttactttntaattttctttttgtaaatctcatatttgcggtatttaaatat

SEQ ID NO: 212185 - DNA, 448 bp, Glycine max
caatcaacccagtgttttcaaacaatgcactttcatcaagttatgcacacatccgagtccatttaggccttcgggaaaaatctttcattgcattcgtggtcgaagccggtaagtgcaccggatcgtgcaagtagtataaaacggtaagaaccgagtgtcgaactcttgggaaacttgtgttacttggtaaagctatattcagtgaataggtgtctagtatgaaaagatatgtgtggactatgaacaagtatgtaaactaactattaaaaaggaaaatcacgtgagtaatgatgtgtaaagacaagtagacaacgcgttggtcttcctattacgtgcttgatgttataaggatattctttatttaacaatgctcatgtgttctatagtgtctccttaaatgctaaaccccaatccctcgtgatagtctagcctaatcctgatcaagcat

SEQ ID NO: 212186 - DNA, 368 bp, Glycine max
aatgtttttatttattcctattaaaaaacttagtacactacttataaggtataagtcatacactaaaaaattactatcaagctttggattattttcagaaccttattggctcctagggttgtcattatccatttaccattggctgttttcaataagtaggcctgctattgaattgaattgaatacttaaaaatctaggcattggaatcgattaccagagacagaatacttagaggtttttcacaaagaagttcgaaatttgaattttaaatactgtaatcgattaccatttaacctgtaatcgattcccagtaacggaaaattgtagaaaatctgaaatgtaaaagacctcgaccccttccatggata

SEQ ID NO: 212187 - DNA, 262 bp, Glycine max
  unsure (1)..(262): unsure at all n locations
atctgactcacatanaccttgactcagtgttataatgtcaatccttatctccggaagctaaangaatagaacggaaatttccaacccaagtaaatggaagaatgaagatttcctatccatgagaaagcaaaacaagaaaagaatgaaaatttccaatcacagagtgggagaaagccaaatgaatataatgaaaattcccaaatccaagaatgggagaaagaaaaaagaaaaaacgatgaaagaaagctcctgatcaacgatc

SEQ ID NO: 212188 - DNA, 441 bp, Glycine max
  unsure (1)..(441): unsure at all n locations
agcttgctaacccatggaagctcctaatatctcccacactttttgtgggngggccattcttggatggccttgattntctcagggtccacttggaccccatttctaccaactacaaaacctaagaaaactatattatctacacaaaaggtacacttctctatatttgcatagaagggtgttttcctaaggactgaaagaacttgtctgagatgtcctaagtgatcatctaggctcctactatacactaaaatatcatcaaaataaacaactacaaatctacctatgaaatcccttaagacatgatgcataagcctcataaaggtgcttggtgcattagtgagcccaaaaggcatcactagccattcatacaaaccaaacttggtcttgaaagcangtttccactcatcaccctttttcatcctgatttggtgataaccactt

SEQ ID NO: 212189 - DNA, 450 bp, Glycine max
  unsure (1)..(450): unsure at all n locations
ttgatccctacaagttaatcaatggtacaaacactctattcataaaacaaaaaggttaggtgatatcggatcaccttgtctaacacctttgtatggcttgaacctctcaagagcttccccgttccataaaatttgttcccgtgatgatgagatactataatgaattagatggataaatttctcatggaaaacgatgtccttcaaagtatctgtcacaaatctccacttcaatctgtcataaactttttccaagtctacttttatagccatccatccactattgcctttcttatgcttcatcgaatgaatcacttcttgcgcaatgattacattatcccccattcttctgnttggaataaagctactcaggcaggggttaaccaattcctccatttcccttctaagtctcaatgtaattatctttgacaaaatgttataagatacattaca

SEQ ID NO: 212190 - DNA, 414 bp, Glycine max
  unsure (1)..(414): unsure at all n locations
agcgcgcctaannaacctaaaattgagagattatgattattgaactctcacaatggaaggactaaggatttattacctattcttaacggaatatacttataacactacaaaataaccataaattggaagagtgtgatacaatntacaccagttttagacacaaaagttagtttgtttcaccgactaacagtcatctgcctcttttcaaagactttaatgtctttcgatcaagactattaaagtcttctttgccttccagagacaatcaagttctgtggcacgcatagacaaattatggtcgtctgcctctattcgaagacttcaatgactttcaatcgagactattaaaatcttctttgccctacagagacaatcaagttcgttggcatgcggagacaatcatggtcatccatt

SEQ ID NO: 212191 - DNA, 415 bp, Glycine max
  unsure (1)..(415): unsure at all n locations
gctaaactttcataagctacttgagcttattctagtcttacatgatggatcatgcggacgaaactcagtttaagttagtctaaatctaatatggttgtctaaatcacgcctagtcttacatgagggatctgcggacgaagcttggatattcggtctgacgagggatcgaatgtttagtaatctacgctacagcatagaacacacgaacatgagtgattagagaaatatatttatatgcattagcatgtttgttagaaagacccaacatttctacctactgctggcattttatgtactttgcattttatagttnttagcataccagttcagtttaaattctattngagattatcacttatacatgttctctcaacaatggcttaattctgaacttaattcacgctaacactaaatt

SEQ ID NO: 212192 - DNA, 309 bp, Glycine max
attaatatatatgggaggagtagagggtgtcatactcttccctttttcaaccaatttttgaatatacctctacggccatcaagccccacaacctcatctttctcataaagaaaggatcccattctaagtttctgccatgtgatatcttgatttcctctagaactggtttgtctttgctctaaaagaaaatggctttggaaaccatctctttcagcacgaacaagggagttaacatcctgaatcttatacgcactttgaaggagaatgatttgaattttgatgaacgcaccgcctcacatattaaaactg

SEQ ID NO: 212193 - DNA, 364 bp, Glycine max
  unsure (1)..(364): unsure at all n locations
acactataaatactcacgctattgttgttgcggaagctanattatgattctatttaatgttgttgatgccgacgtgctattattattattattaatattactatgctggctctactcgaatgctcttttattatattgtgatgacaggagttgtaagcttctctctggtcaataatatttttcaaacccaaattctctgctcgtaaaaagtgattgtttaccccatgtctggtttctctcactttgccttatgggctaattatggcttggcggatatcttctatgtctttgatcatttaatgcatttcaatatgaatatgggtacttgagagatatctcacgcagtcaatgaaaaatatcaaac

SEQ ID NO: 212194 - DNA, 336 bp, Glycine max
agcttgtatgagtactgagaaagattcatgatattgtttcaagctgcccttaccaccagatttatgagcaacttcttcttcaatatttctatgagggacttagcaacattgagaggagtatgattgatgctgctagtggtggagctcttggtgatatgacccctgctgaggctaagaatttgattgagaagatgacttccaactcccaacaattcagtgcaagaaatgatgttattgttcttagaggagtccatgaggtggccatagattcatcttcatctactgaaaataaaaagcttaaaagaaaacttgatgccttggtcaacctagtaactc

SEQ ID NO: 212195 - DNA, 425 bp, Glycine max
  unsure (1)..(425): unsure at all n locations
gagagagctctcttggataataagaaagaaacaaggtgcatcttttgtggtcggttcaaattattaataatagatttttacatcttattttgtgagcaaatatcttaaattcttctttagaatttttgttaataattgtagtttttgttaataaattgtataaaatagttttggaaacttcaaaagattgtttttgatttatatttttttttgcaattttaatgttacaagagtagattntgatcaatgaagaattggagagtgtcaaagaacacctcatcatagcgaaatatgttttcttcacaaagaaacaagacacttgattagttggaattgatagagaattctccttagcgaagatgcactttgccttaacaaaatctacatttagaattatgagaaatccaccattgtgagttgatcat

SEQ ID NO: 212196 - DNA, 337 bp, Glycine max
atcttttaactagtactctattaaaactcaattatctaatttcgtttttggtgggttgcggcgcttctccgaagtgcttcaattgaatggctcttcaagcttcaccacttcctggccgtgccatgcccttcaacttaagcgtgtgctcccttcctgcacgaaaatctagcacctttgccactctgtcacaaccccgaagcgactgggttgaagccactaacagtttcttcgaccaagacaaacgacccatcatgttatttgacggtaattagccctcactcatccttttttcttcgtacaaatgctactgttggttgaaaaatcttgcttgtgacac

SEQ ID NO: 212197 - DNA, 444 bp, Glycine max
  unsure (1)..(444): unsure at all n locations
tacggacacttgaaactaagcatgggcttgagcatagtttcaataatcaataaagttactatattgagattcacaatcgtaaatcaccaagctacattttaaaccatgaatcataagatttagagactataagacaataacttcaaatatatcatatagaagatacagtgttcaatgtaatatatttatactagaaatatataaaacttagccataaacttctctggctttctctcactaggcttcaaatagctcccgggtgtccaccaatcattgttgtacatagaaatagctgatatacaccaatttgtttcctaaaagaaggattctaataaggtacaactttatagaacanatcttttaaaataccactaatntactctgtatcacacacaagtggtgtacacnaattttttttagtgaatgcgtganaggaagatggca

SEQ ID NO: 212198 - DNA, 384 bp, Glycine max
ctacacacactcctctaataactaagctcaccttcttgagaagcttcctttgaaagaattctaaagaagctagagcttagctaacacacctctctaatagctaagctcacctccttgagatgagaagcttgaacttagctacacaccccctataatagctaagctcacccccatgacaaaatacatgagaatacaaaaaaaaagtccctactacaaagactactcgaaatgcctcgaaatacaaggctaaaaccctatactactataatggccaaaatacaaggcctaaacgaaggaaaaaacctattctaatatttacaaagataagcgggctcatacttagcccatgggcctcaaatcaacccttaggctcatgagaaccct

SEQ ID NO: 212199 - DNA, 467 bp, Glycine max
  unsure (1)..(467): unsure at all n locations
tgctgctcgagccatcaaaggtgtattccttggatattccatattacagaaatgttaccgatgttactctcctgctcacaatcgntattatatctctgcagatgtaatatttcttgaagaaaaaccataatttgctccctccatggttgagtccaatactcttcaagaatttttttctattccctatcttggtccatcaccttcttttgaggaatcagagtcaactatagaatctaccatagatattcctgacaatcctccacttgagcagactcatagatcacccattatatcgatgtcgtcctcgaattcctgacgcagaacttgaatgtattgaaagaccatgtgaatcatgtcctactccaactgacaacccgatcatggagctacctatagagaatcttgacttgcccattgctctcagtctacacataatccttatcctatttataacttcttaagtatca

SEQ ID NO: 212200 - DNA, 447 bp, Glycine max
  unsure (1)..(447): unsure at all n locations
tagaattcagagcttatctagaatatggagaaataatgtcagataaggctacaaaaggaaataagagtgtcaggtggcttgtgtcccacaagcttgtatgtgatgaattttttgtgcatcagctttagtcctgcatacttaacatgataaagattggcataagtagcttactgccggtattagtagcggnggcttaagcatctcagtcctttgatttggacttgttcaagctacaatactacattgttaagtgatagttggggtgttaccaaatggtattagggcatgattttatcatgatatgtgcagggttttaaatagcacgctatagtggcatagcagtgcagagcgacccccacctgctgcaggggatgccatatcaaagtggttggtagtggttgtagcagaccacatagctggatgaatagtgtcactatgttgattcca

SEQ ID NO: 212201 - DNA, 416 bp, Glycine max
  unsure (1)..(416): unsure at all n locations
agctttgacttatttatatntgttattcatttattggngagaatttgggggtgatggaagaaacccactctttgttaccctttagtatgctatgtacctaaaccatgacatatatgtattaatgtgctataatttaacaaggttttgcagcataacaaaacagagaaccaggcatccaccatagcagcagagctaggatctggaaacaagttggatgatataaggaatttatgaactggacttgaagatggtggaacgttcaatcaacaaagcctttctgagcattgaatgcctgatttataaatttttatcattagaagctattgtgccagcagaattatctgtcataaagatgtatttatctggatggagaaaaattaagttttaattctactctcaacgatcttatataattt

SEQ ID NO: 212202 - DNA, 437 bp, Glycine max
  unsure (1)..(437): unsure at all n locations
tagaattcaaagcttatctatgaaatggaataataatgtctgtataggctacaaaaggaaataagagtgtcaggtggcttgtgtcccacaggcttgtatgtgatgaattttntgtgcatcagctttagtcctgcatacttaacatgataaagattggcataagtagcttactgccggtattagtagcgggggcttaagcatctcagtcctttgatttggacttgttcaagctacaatactacattgttaagtgatagttggggtgttaccaaatggtattatggcatgattttatcatgatatgtgcacggttntaaatagcacgctatagtggcatagcagtgcagagcgacccccacctgctgcaggggatgccatancagagtggttggtagtggttgtagcagaccaaatagctggatgaatagtgtcactat

SEQ ID NO: 212203 - DNA, 389 bp, Glycine max
tagcttgaaggagtctcatgcatctttgtactttctcactttaagagcgggtcccaattggcttcctaattttcaacttacctctttggatgtgagatcctggcagtaggtgccaattttccatcatggattcagtcacaaaacaaacttcaagatgatggactgtctaacacggggattctagattctattcccatacggatgtgagaaacactttctcaggttttgtatttaaacctctctcacaatcatatccatggtgagcttgggactacattaaagaatccattatctatccatactagtgaactaagctcacatcacttatgtggaaaatatcctatctttcaacgatgtgtttcggttatatctttcacgcaagtcattct

SEQ ID NO: 212204 - DNA, 455 bp, Glycine max
  unsure (1)..(455): unsure at all n locations
tgtaagaaatctaagatcattntccttgacaactctttgaattagatngccatgaatatgaagagatgacaatttagagatattcatgagatgacaatttagagagtgatcaaagactttcaaatcgatttccactgaatttatcaatagacagatcaagatatcttaatgttgaaagttttccaaatcatctagaaagggcaccaccaattgagttgttgtaaaaatctagcatgtcaatatttttaanaactccaatttaatccgtcaaattgggttattttatcatctagggacaaattntttctgtttttttttctcatgtgggtacttttcaaatcatgccccanaagtgaataagtggtattataatatttaagttacaagtcgtaatatgactcttcnntttttttaacttaaatccgtaaattatttatcgcctctttcntttatta

SEQ ID NO: 212205 - DNA, 435 bp, Glycine max
gcgctgatgatttggagtgttagggcttatgtgttgaaatgttgtttagtgcaaaaattaataatctgaagagattgagagatcttgaggaagtacgatgatgttgactctatagtgaaattcaagatgcttaaggattagctagtggagcttctggtaaaagatgacatttattgaatgcaaagagcgaaaattgagtggctacaagaaggagattctaactccaaattctttcattacatggccttctcttgtagaaagagcaacaatatttcttagcttcacaatgattctggaatgttattaacgactcaacacgatcttaatcaagtagcaaagaaatattgtgggaaccttttcaattcatattcagattcttttgatgaggtgctagaagttattcatccaagtgtttcagatattgattataacatg

SEQ ID NO: 212206 - DNA, 469 bp, Glycine max
  unsure (1)..(469): unsure at all n locations
ttgcacacttgtgcacgttccanaacttgctaaattctgaagttgcataagttgcaagaaatccgcacatccgtgttcaacaatctctaattttcattntgtttacttttgggctcaaaacttctatcgcctactagtttatgtagactttntagactctattttagagttctgaacttcgttttagacagcttagtggggaacaaattgagaggcttgattactctntcacttgcggttagaatcttttctattgattgtttttgtttcatggatacttgcgaacagtctttatttctaagattaggcataaccttatgctgtttgaatgaattaatttcctctatccttgttcccttgatttctttntatcgcttctcttttgtgttgaatatattggccaacgcttaacattaatttacggggtttggtgatatattgagaagtggacctataattctataaacaa

SEQ ID NO: 212207 - DNA, 413 bp, Glycine max
  unsure (1)..(413): unsure at all n locations
agcttcatgggttagctggattcaccaactctaccaacttantttcctcattcgacgaccttngtcaattccccattgatgtcaatcaatcaatatcaatatcaatattaattctatgcaaacaattgttaaaaaacttttcttacttccgattcatctggcaatgccccatttatattccaacattttgtttcctccctcataaaaaattacatgtttacaacttcaataagaaaagcgatgatcataaatgttcacatgacagagaatttgcaaacctaacattttagagcagcaaatcattcgtgctgcactaaaccattgagtatgaaatttaatgccgtttgaatataaatttttctattggtttatactattctgctttttctattgcaaatacatatccctttact

SEQ ID NO: 212208 - DNA, 402 bp, Glycine max
  unsure (1)..(402): unsure at all n locations
catttggctgacaggtcagtggacaaaggaggcagtgcangtgcatatngtagctatatactctccatgtgatgtgcaaaacaaaagaatcttgtggaatgccattaaacagctgaaatcatcaatccaaggcgggctatggtgcattttgggggatttcaataacattagacatccttcggagagagtcggagtcagccaaagaggattggacgaacgaagtatacaagaattcaatgagtggatatgtgaattataagtggaagaagctccatggataggtaaaaaatttacgtggtttatgcccaacggaactgcaaaaagtaagctggacagatctctaatctctccagaatggctcgcanaatggccgggaagctcacaacagccattggatagaaa

SEQ ID NO: 212209 - DNA, 407 bp, Glycine max
attaaacacaaacacatcatctttgttcaacagattgctgagtggcttggcaaatttttgagaaatctttgatgaatcgcctgtagaacccaacgtgtcctaaaaagattctcactcccttgacatttattggaggaggaagtttctcaataacattaatcttagccttgttcacctcaatccccctcactgaaattttatgtcctaacactatgccttcttggaccataaagtgacattcttcccaattaagcaccagattagactcttcaaatctttgtaatactctgtctaaattcgatagacaacaattaatagatgagccaaagacaaagaaatcattcatgaaaacttcgattcatttatccaccatatcagaaaaaatttgcatcattgccctctgaaat

SEQ ID NO: 212210 - DNA, 391 bp, Glycine max
ctctccatgaagagggctataagagacgccacaggagaaggatccagtgctgtcccaaagtatgatagtcatcgttttcggagtgtcgaccaccagcagcgcttcgaggccatcaggggatggttgttccatatggagaggtgtgtccagctcacggaggatgagtatacggactctcacgaggagatagctcgcagatgttggacatcgctagtgactcccatggccaagttcaaccctgagatagtcctagagttctatgctaatgcttggcccatgaaggagggagttcgggacatgcactcgtgggtaggggtcagtggattcccttgatgcaatgctctcaccaattctaggcgagccactattttgaggaagcgacagtgtgagt

SEQ ID NO: 212211 - DNA, 429 bp, Glycine max
  unsure (1)..(429): unsure at all n locations
gcttttatgtgaaaggatgcgactcttcacatttgaatttgaatttcaacgntcaaaggcactggtaatctattaccaaaacattgtaatcgattacagctttttgaaatcaattggaacattgtaaattcatttgaaaactttttcaaattcattttgctactggtaatcgattacaacaatctggtaatcgattaccagagcgtaaaaactctttggtaaacatggttttgagaaaaatccatgtgctactcagtttttgaaaaaaccttttcatacttatcttgattaagtcttctcttgattcttgaatcttgatcttgattcttgaagcttgatccttgaatcttaattcttgaattcacatttcctcttgaatcttgaagtgttcttcattctatcttgaacatcttgaactcattctttgat

SEQ ID NO: 212212 - DNA, 407 bp, Glycine max
  unsure (1)..(407): unsure at all n locations
aagcccaaagaatgatttcaagattaaatcaagaacaaattcaagaatcaagagaagtttgatttcaagattcaagaaaagatgaattcaagttctaagtgaagaaatcaagaagacttcacaagggaagtattgaaaagatttttcaaaaaacaaacatagcacagttttgtttttcaaaagagttttcacaaacttttctaagttaccagagtttttactctctggtaatcgattaccagtttcatgtaatcgattactagtggcaaagttggatttcaaaagctnttaacttaatttacaatgttccaattgattcaaaatggtgaatcgatacaagatatggtatcgataccagtcatctgaacgtggaatcaaatcaattggaacagccatctttataaagc

SEQ ID NO: 212213 - DNA, 415 bp, Glycine max
  unsure (1)..(415): unsure at all n locations
ctcccttccaaaatctgattttaggcttaaataggcgactttgtttatgctagtgtgcttaacgcagctatggatcgctcagtgcgcattatggatgtcgacttaacgcgtgcttttctcgctcaggggatggactgaagcggtgcgcttagcggcatgacactttgctcaacacaaatgcacaactcatccttcttctagattcttcctcgngctcagccgaggtgtgttgcgctcagcggatgggtcactaagtcggcagattggcttagcgagtggatgaaaatcagcacttcacaaactcgcctaattaacctgaaattgagaggaaatgattattaaacacacaaaatgggagtactaagtatttattacctatctttaacaaaaagtatttacaacactacaaaataac

SEQ ID NO: 212214 - DNA, 439 bp, Glycine max
  unsure (1)..(439): unsure at all n locations
tatgttngagtgtccacatggatgtgtgccatgancagttttgcatgagattctaattattattatcatatgcgcgncattgaaatgaatttgggcattcccttattcctgaaccacttgctaaacaaatatcccgacatacatcatgtgttgtcattcgtaggccttttgagccaaacctcaacattttagccataaccatgacctatgatggaaatttccaaccttacccttggaagaaagaacaaaaagatcttcccaaaagaagcttcttttacccttgggttataaatgtgcttcanaagaaaagaaaagaaaaaggaaaggaagaaattctaacaatcaaagattggagaatagcgcaaagaataaaaatataaaagatagaaagagaatatactaaaaggttcttttgaccagacaatgtctgaacaatgtg

SEQ ID NO: 212215 - DNA, 429 bp, Glycine max
  unsure (1)..(429): unsure at all n locations
agctttctcactntgactatgacttttgatcttcatcttccgagtcttactccttgtcattattttcatggaatctctttttgtaaggtcaaagttacaaattaattaagaaaattaaacatatacctaacatatatgcagatagactaaatttatgtcatatgcaaaatttatctttagtaataaaagaacaactagttcttccacgcatcatctcctccgatttttggcattattttattgcttccgcttgcaaaacccacgttcttcctctgcttcttcattccacccattcccagttttttttaaatttcaatttgaatntccaaaacccaagctacgtgcggctagcttccaaacctgttagttcatgtcactaagctatgttcagttgttgacgctataacataaatttgagccagtatgttg

SEQ ID NO: 212216 - DNA, 461 bp, Glycine max
  unsure (1)..(461): unsure at all n locations
nntatagtgctggtctgggagactatggtcaagtggtcgctatatgtgaagatgatgttccaagaactctggatttggtccgaccatgccctcctgnattccagctgggaaattggcgagtggaggaacgccccggcatttacgcaacgagcataatgtaaacctttacggttntaaaagctctatagttgggcctaggctctagagtattcatnttgttaaggctttgtgtcttttgtttttgaatttataatacaaggatctttcttcatctgttcctagtctctacccattctcattcatttgcatgtgtacttctttttctaaaacggcagattctatgacgagtcctccgaaggtactaatacctgngacccgtctatcaacttcgagcaagaaatgaaccaaacggaagatgaaggagatgaggatgtgggactttcttctgagctagaaagaat

SEQ ID NO: 212217 - DNA, 373 bp, Glycine max
  unsure (1)..(373): unsure at all n locations
agcttacctcanagaggtccatgaatgacatggcantctaaggaactagttccgctccggagtatgacagtcaccgctttaggagcgctgtacaccagcagcgcttcgaggccatcaagggatggttgtttctccgggagcgacgcgtccagctcatggacaacgagtatactgatttccaggaagaaatagggcgccgacggtgggcatcactggttactcccatggccaagttcgatccagaaatagtccttgagttttatgccaatgcttggccaacagaggagggcgtgcgtgacatgagatcctgagtaaggggtcagtggatcccgtttgatgccgacgctatccgccaacttctatgatattttgt

SEQ ID NO: 212218 - DNA, 385 bp, Glycine max
  unsure (1)..(385): unsure at all n locations
ntgtccgcanagatcacttgaaaccgtgttaaggtccaattctttaaacggttctctttgcttntatcggntaacatggaccattcaaaagcataaaatcaacatgtaactttaccacttctgcaagaaatacgtaagtttgattttctcattgcaattaaggatatgtatgagcaaaagccccacttttgtcgaccaccccaagagatcgttaatggtccaacgccttaacgtgatggaagcttgcttgtggggcttctatggaggctggatctttgagcttcaatggggtcctttaatggtgattttccaccatggagatgcagcggaagacaaaggaaaagaggtgagaggaggcaccatccattaaggaataagccatgga

SEQ ID NO: 212219 - DNA, 429 bp, Glycine max
  unsure (1)..(429): unsure at all n locations
agcttctgtccccagagtttcaatcttctattgagcagctgattcattttcttcctacaactcgtcaaatcttgatgttttcagcaacatttcctgttactgtaaaggatttcaaggataggtatcttcaaaatttatagtggaaatatgaagagcttgacttgttgcctttgcttgttgaataaaagtaaaatagaaatatattcttatttcctcattgatagtatttaagtatggctactggttattcttttcatggaacagaaattttttgaagcccgttgaaggcatgggatttgaggatctctctaaatataggtcataacacatattggaagaatattntagtgattatgtaaggaattcaaaattatcccaacaccatatttaaatgttgaactcgacaccgcattcaaagacggttattac

SEQ ID NO: 212220 - DNA, 471 bp, Glycine max
  unsure (1)..(471): unsure at all n locations
ngcgaatcatctatctcaactatggttcatatatagcttctgcggatcaacanaaacctatacagatcacgtcatagcatacgcagatcaagctaaatgagctgggtgcacaaaaatatttttaaaaatacacgggtgtatttttgccttttcacataaagtgttgggtgcaccaacaataatcctgtgtgcacctagcaacacctatcaaattacaaaagcaaacaatggaaagaaaaatgatgccccccatcaagctaacgtgtttcanaatgtcatgttatgttaaaagggctattgggcttcagttaagtgaaaacaaaagggcccgcataagtatgtattgatattntacatgatggttatcgtcgtcttcaaccttcagccgagtcattttgactcgattgcagcctgcggacttctacagaaaatctaacnggttctccattttcaacaccgaactcattgttt

SEQ ID NO: 212221 - DNA, 421 bp, Glycine max
  unsure (1)..(421): unsure at all n locations
agcttcacttgtattgggaatggtgggaaattatntattgccccacgaccttacgaataaggagtgtgcatgttacagttaagcgcaatttagcattttcccccctttgttaagattttttatttatattctttctaattaataattcgtacctctcctttgtcggtctctccgtatcaaagaaagaaacgacgactaccaccaccaccgcatcattgccaccgtaatcgccacgaccaaaacgccgtcgttaataacagcgcgtggagattcattgtggcatgcgattcaattccacgcactcgtgctagtagcgccagattcacatttcacgcaccttaaataccttcattttctccaattgaagattcggtgcgattttaggggggaaatttcccgattgtacctgctacagtttcaa

SEQ ID NO: 212222 - DNA, 442 bp, Glycine max
  unsure (1)..(442): unsure at all n locations
taaccctgttaactattgantaattattgatttatgggcccgtcattaacactctattccagaacttgggtccatcatcgcatctagtctagccttatataaatgtagtcttgatcccaacgttacattattaaatctttgtagtttatggaattattaaaggcttaagctttatggctacaaatcacaagatggaacatctaacttgcctgaagcacttgggttggggtaggaatagaaatgaacccgattatgtactattggatcctcacgtaccacgcctactgatatcacagagggcacagcagtgccattggcgagctgaagtgaaaatatcaaatatatgaccagngacaacattgcttcttcttcttcttcttttttttattactgaagaggcaacatcgtcttaatgctgggttgatgtggtagtggcatccat

SEQ ID NO: 212223 - DNA, 397 bp, Glycine max
agctttatataactaggaggcttcattgttttataataaaccaatgagactatctgatcctccacacccaattctaacttgcctttccccatatctactatatagttggccatgaaaattgtagggtcctcctctatattcataaccacgaaatctgcaggaaatacaagctgcttgacttgaataaacacatcctcaatcactccatacggtctagtaatggagcgatcaaccaactggagggttatacatgtgggcattatctctatctctccaagtcgccagcacatggatagaggcattaaattgatactatctcccaagtctatgagagctttacctacaacaacctcaccaatataacacaggttagggacacttccgggatcattatgct

SEQ ID NO: 212224 - DNA, 425 bp, Glycine max
tcaagcacctgccgctgcagctagaaggcttctatcctactcctttgctaagcgcgtattgcaaaacattatatgtgttgcgaaaagcgcctatcatagcctgctgggcttagccccagatgctgactggaccttacaacttcaaggtgggcttagcatgatgcttggctaaccgcttggggtttaaactcaaacgtcacatgggcacactgtgcgcagctgtgcgctaagcgcaccattcgatagtcagtgattaaaaaaaccaaaggttgaggcacttgggtgttacccatataccttgagcttctgcctttgcgaaccttgagcaaatgttttatctgctgcgtgtgatccacttgtctgtcttctctggcttcatttcagaaaacacctagccagagggaccatatcattttatttctcct

SEQ ID NO: 212225 - DNA, 454 bp, Glycine max
  unsure (1)..(454): unsure at all n locations
ngcccagagaatgagtccacggaggaaatgcttaccaccttttattattggaaagcggactctaatgactcctctgctgcttccacataatgcatataggatgggcagctcaccaagatatcttcctcgcctgatacgactaccagatgccctttcactacgaatttcaactcttggtggagtgatgatggaacaactactactgagtggatccacgggcgccccaacagacagatgtacggaggggtaatatccattatttggagagaaacttgacaggcgtgagggcctatctgtactgggagatcgatcttttccctaacctttcggcatgtgccgttctatgcactaaccactattaaatcatttttaatgtgacgaattgaatggtaattactccaagtgctcttctgcatcacttttaactggaaccattattatgaacacttcgcta

SEQ ID NO: 212226 - DNA, 305 bp, Glycine max
taccttgttggaaacttgcaataaccccctatgaggctacctgcactacaggaaaattacaacctttgaatatgctagcttcatatcgttatatgcgctcctcattatacaatttaagctgaacaactagcaattttcttagcatgtcttcatagaaccccacatcctactcccatctaatccccatgagcagaaccatcctaattgagaggttagccaccttgagatagatggtgcgccgcaatttaagcgcgagctttgggaaaacttcttgggacaataaactttagcattccctaattgat

SEQ ID NO: 212227 - DNA, 417 bp, Glycine max
  unsure (1)..(417): unsure at all n locations
ggacanngacattcatagacacagacgcagaagccttatcttataacccatttccagaatcagccaaattcaagatctttgagggttttttctcaaatgggcgactatgaagccatataaccgatgtcttgctacagcagcagagtttgagtcgcaagccatagagacaaaagagttctgatgatgtcatggcataacacttccttcgcaggaaaggtatgctatgtctgaatgttgcaaatgctgttggaagacacttcatatatgtggacattgctgaggctatagcacttataacttgattgagagtgcctttcctcctcttttccggatcggttcaaagaatcttgtcatttaaccaattattttcctgaacggcttttcttaatttgcttaatagacataaagaatgaaaac

SEQ ID NO: 212228 - DNA, 429 bp, Glycine max
cctcatcgtccctcacagtctttagatttgggagccaatccaatccttgtggtcggactctcagccacttatgatagccgccgatgatcccattactgcttcccctaagctctctgtcctttcttcacgccgcatcccatgccttgcgaactccttggagtaccctcgcggtgtggtcactgaaaccccgtgcgatgaaaggcgtgatgctttcgtctaatggcgctcctctcatgcggtagccaagctgtcttatggcgagaacgggattataattaatacaaccccttgttcccatcaagggaacatttggacatccttcgcatgaagatagaatcttgattcttccttccttctagcgagggaaccaattaacagacgccccccccatgctagccaagagttggtcccaattcgcctttccttttt

SEQ ID NO: 212229 - DNA, 461 bp, Glycine max
  unsure (1)..(461): unsure at all n locations
gctagagctgacccatcaactgccctatctctnttagactggtgatccctaggctcttgaccttgacttgatagaacctctttntaagcgaaggcgtttgacttgatcccatgttttactatagtgaaacaaaatctagtgcgaatcaaaactccgacatctatcatgggtggaatggattaatgcatgaagaaatgcatatgatacagatgcaatttatgaatacgggagcccgggaaattgtctccttcttagatacaacgtcttggggtagcacagtgcccgacgtatgtatttaaggtgacatggaccctccgttggtttgccaaagagaggggatcaagacagaacccgtgaacgatgcatatgtgaaaggcacaatacgtggatgtacatagtacggaaatattcacaagcaaatataagaaaaagggtacatgacacttatgcatggcagtgtg

SEQ ID NO: 212230 - DNA, 446 bp, Glycine max
  unsure (1)..(446): unsure at all n locations
gtcacctgcagcattgcagcttgtgaggaatctggtttattatgacctgatggtgtttaagaactacggntaaacaatgaaactcctttgtatcctgtgtgtataacatgcataaaacagtaaggaaatgtttgatttgattatttcttattttcatttttactgaaaaccaaaaatggtgataaaaatgtgtttggttgaatttctgaaaatattttcagtgaaaataacaacagaaaataatcagaaaatgataacagaaacctcatttttgataaaataaaattacggtaacaatgaatgttattntaaacaaatcttaaaatacaaaaagacaagaaagtaatatatcatacattttcagtatttttatttcatgagaacaaaaaacaagaagttaaaccaaacatgttttcagaattctttcttttgaaatgaaaacaatt

SEQ ID NO: 212231 - DNA, 482 bp, Glycine max
  unsure (1)..(482): unsure at all n locations
ctacgctgagcctagacttaagccgaccatgtgagttcattggtgtgttaacttcttgtttatatataggagcagtagaaaaagcaagggattattntgcactgatgatggataagtatgagatcgagccattgataaaacactatacttgcatggttgaagtgctaggtcaagctgggctcctagaagaggcagaagaactaataaatggtatgcctataagagcagattttattatatggggatctttgctctcatcttgtaggaagcatgggaatgtagaaattgcgaaacgagctgcacaaagagtttgtgagttaaatccgagtgatgtgccagtggttatntacttatgtctaatgttcaggctgcttccaaccaatttgaagaggcaatggagcatagaatcttgatgagacatagattggcagagaaggaaccaggatgcagttcaatataactatatgaagaggttcatgagt

SEQ ID NO: 212232 - DNA, 441 bp, Glycine max
  unsure (1)..(441): unsure at all n locations
gcaagctntatctgcaagagcatcaacacagtgattagcttctcgatagatatgaaccaaattaaaagtccattgcattgctaaaagatgtctaatagcaaaaacgagtctcacccctaagacacacccttgcttaccttcttgaatacttgcaataaccacctatgagtcaacctgcactacaaaaaatttacaaccttatgaaaatgctagcttcaaatcttcataggcactccacaatttcacaataaaagttgaacaactagcaattttcttagcaagtcttcatagaaccccacatcctactcccatctaatccccatgagcagaaccatccaaattgagagtaagccaccttgagatagatggctgccagcaaattaaagccagagctttgggataccttcttgggacaatagactntgtcataccctaatttca

SEQ ID NO: 212233 - DNA, 385 bp, Glycine max
  unsure (1)..(385): unsure at all n locations
tgtctgctgatggattcaaatttaacattccactatgactccaattcgtttttcttcataaaaagcacttagcttctcgaaaaattggcaaggaaattaaatcatgtatttctcatacaaaattatattcttatttttcctatgcacttggggtgcaaaagctgaggaccctttagggcgattctgcaatgaaaacaccatcattggcagtggaggaaaattatcagccaatattgataaaatattgactgaaatagccctcaaaactccctccactggttttgttgccaccacatatggcaaagaccaagacanagtgtacgcactcgctcaatgtaggggagatgttagcacccaggattgctccaattgcatccaagatgca

SEQ ID NO: 212234 - DNA, 440 bp, Glycine max
  unsure (1)..(440): unsure at all n locations
agctngaaaaccaaacaacaacgttaaaactttattcaatataaaagaanacataagcatattaaaccagaagaaagcttgaagatgatgggtggatcaaatacaaatacatacctgacactagaagggtagacacaagtaccgccagagcctgctcatcaaaaaaagagaaacagataaaagggtcagctacgattattgttccaaggaataaatgctaagagagaaaaaaagaaaaagaaaagagagattgaaggatttactggggtcagatgcagtaacaatggctgttcccgcaaagtcgcaagacccttgagcttgaccctttctttggaaatagctggtcacggcgtaattacagtgggccctaacggtgttgtgctggaaacaacgcccgttttggtggagaggattacagtcagcaccagcttcacaagcat

SEQ ID NO: 212235 - DNA, 485 bp, Glycine max
  unsure (1)..(485): unsure at all n locations
aactagctagactgtatgatttataaaatgtgcactttttttttatcaatagtacaaacagaatnatttaatggaggttgaagacagggacctgagagtagaaacataaacaagcatgtccaaagccacactttttgattccatacatgcaacagagaagaaaaacacaacaaattggagacgacaaaagaagaagaaaagagaaggtttttacctcatgatattgacatggaggtgagctctgagctcgatgaagaggtcgtgcatctgacccgagtcagcggcattaccgtgagagtacacgaaggtgaacctggcaaaagggtgtttccagaaggtggcgaggatcttngtgccacctttggtgtggagaatgtgagcgtcgacgtttttgtcggcggtgacacccgacactgttgggttacaagtgtgaggtgaaatctcacatcgggtagaagtgaagaaagtgagcaccatataagtga

SEQ ID NO: 212236 - DNA, 337 bp, Glycine max
taatttttttgggatcaaaatcatgaattggccaagtcttaattggacatccatatgtctggcgattgagtaaagctgaaaaaacacttattggtgatatgacaaagtctatgggcaaaaccaaaaaacatttctgctgactctgaaagagcacaatgtcaatagttgtaccatcatcaaacaaatatacaatgccagaagtgcataccattcttccataagaagaagtgatactgaaatgaacacctaatgaagcttcttgaacaggatcaatataattcttggcattaattaaaagatgaagacgtggtacctgatattttttggtgcaccctga

SEQ ID NO: 212237 - DNA, 405 bp, Glycine max
  unsure (1)..(405): unsure at all n locations
ttaagaaacttctagaaaccctagtgatggtctttatacagaaccaaacccaaaccacccaagttgaccctgacttcaagaacaacccatcatccgcttcatctgaggatggttcctctagtgacacgattgtcagacctacactagtgtccaacattgctgcagaagtcaccttgaaggacaaagagcccacatttcatatcaaacactttttcgatattgaattgttggagaatgttggatacgttatcaaggcccaccttatgttgtgtagcatccaccatttcttcaaggaccccaaggtggtggtgcctgaactcattcacgagttctcgaggactactaaagactatcataatagtcattagaggatatttngttggcgaaattcttggcattactgtg

SEQ ID NO: 212238 - DNA, 410 bp, Glycine max
tcgattcattctatgttctcgttgtggtccacattgggtttcgcgcattattattctcgttttgattactttgtataccccctgttgacgtgcttaagccattttacttaagtcggttctcgcttaacttaaaaataaaataaatttccaccgaacgtttgaattgtattatccattaacttcggttaaaataaattccgaccgttcggtcgtgccgtaaccacattggaaatcaaaaagaggttaaaaaataatataaaaatcaaaaagacatcttttagtaaaataaagcggaaaatcgatcggacgttttctctttgggatttctcattcttaatcgaattgattaataactaaagtgaaactaaaggctaaaatcaattcgcctagtccagctcatccataaaaat

SEQ ID NO: 212239 - DNA, 497 bp, Glycine max
  unsure (1)..(497): unsure at all n locations
ttacggacctatgaaactcagctggtgtcgaacctacccttcggtgggatggcgacgcgtgactctcgggatgcgtgttccacgaaaggaatacgcgcggagtcgccaccaacgtttattcgaggaaaacgtcggaaaaaccggaaaagacgcgatctacgaacttttaagtganaggttcgggagttgtatttacgcacggtgaaggtattagcaccccacacgtccgccctaagggacggcagcctttaatcgaatgtgcaaacatgactttgattntntatgttccctttttatgtctctatatcctttataccctctttatattttctctttttgtggtcgacaagggtgtttccctttgctcctacgtattcctcaatttgtgatgagaaaatcagacctacgtagttcttttntatcaagtgattcttttntactttaagaggtgatcattttaaggcgttggaccttaaaaatgatccattttacttagt

SEQ ID NO: 212240 - DNA, 428 bp, Glycine max
agcttgtacgcacatcagtcacgtgtatgatatccactccacaagggttgaagtagaggagagcttcaaccctataatgcaacgtggcggacaaaagtgggcagtaaacttgaatggtcgtcattgtcaatgcggaaggtattctgcgcttcactatccatgttcacacattattgcagcttgtggttacgtgagcatgaactactaccaatatatagatgttgtttatacaaacgagcacatcttagaagcttactccgcacaatggtggcctcttgggaatgaagcggctattcctccttctgatgacgcatggacacttatccctgacccaactacaattcgtgcgaaaggtcgcccaaaatcaacaaggataaaaaatgagatggattgtgtcgaaccatctgagcaccgaacaaaatgcagta

SEQ ID NO: 212241 - DNA, 408 bp, Glycine max
  unsure (1)..(408): unsure at all n locations
ntagtgagtgtgtgcaaccacaaattttacattgagtgttcttattgatatgttctgtagttggntttgcatgaatttctaattgtcataacatatgattcatggatatgatctacgcattctttctttttttacattttaattcactggccaaatagctatcccaatgtatgttattttaccatttgcaagccttttaagccaaacacttgatattttgttggaacactaacctaggataaaagtttcctaccttagcttaggttacgagagcaagggtgttntgatagggatttctatcatttggtggctaatgtaatgtaaatattctatttttaatatgactattaagggaaaacaaaaaagaatagaacaaatatggaaaagaaaattaaagagaaaagaaaa

SEQ ID NO: 212242 - DNA, 428 bp, Glycine max
  unsure (1)..(428): unsure at all n locations
agccttgatcactctaatgagtttataaactataatngangangactgaagntcacattctgctcaataacaatacacttctctcaaccatggataagaatccattccagacagggatattgagtaaggcccatgagtcctctatgctaaacggatctaacatccttagtcgagttatcaccattcttcattgccttaggttcctctaaaccattcgaaccatcccctagtgtacccactgtaagtcatctgttggttctaatcatcccttagtgtgtggaagactatgcctttaccgagtatacataaatccttttccttaggcacattcatctctcccaccccgcaatacatcaatttcctcattccttatcccttcctttcatcttcctatgtagcatatgctgccctcattgagtcgccgactt

SEQ ID NO: 212243 - DNA, 430 bp, Glycine max
  unsure (1)..(430): unsure at all n locations
tcaagtcaatcagtagctccaacatcacagaatctgcacaattgttcttcttttacaaacatggagggccagctntctgcactcttacccctatatattcttttactggtgtcttgttcctgttaaccaccctccttatgtacacaccactgtcactgtctcggtatgcccaaatgcaagtgtcttaatcttaaggttccatccatttgacgatttccttgatcactagaaccccacaacattacattgtgcatggtctctttccatatcagtgaaaatgttgtaacttctcctaatggcttgtacccttaataataaacgtcaaaagacatcaagaaattctatgtttgaacaagatatgtatgtgaattattataaactgataatacataatatttaatttttacggataacagaacatcaaaacgtg

SEQ ID NO: 212244 - DNA, 417 bp, Glycine max
agcttcggaagaaagtgatgaggtaaaagctctaaatgttgagcttgaaagagcccgggtagtcgaagagaagttcaagtccatagccatcaaagtttgaaaagagtatgatgaactaagggacgtcagtatggccacagctgaagccttggaatgaagaggtgaaaggaatcatcacgggtcaaaggcatgatctccgaagaggtgaaaggaatcatcacgggtcaaaggcatgatcttgaaggatgagccaaaggtttgccttatgtcaaaaagaaatttgtcccaacagttaagcgagactgaagggaatatgtgggccatcattgataagtgcaaagagaagctaaatctagcggcgactcacgagcaaaagctagaggatgagtacccccaaatatcatcaaaagggaagca

SEQ ID NO: 212245 - DNA, 415 bp, Glycine max
  unsure (1)..(415): unsure at all n locations
ctggttggaggtacttacccgttgaatactgaagannacgattaactaacgatgaatcttgaagaacggtcgagaatcttcgcgtaattactcacggaaacgttacggaagcgcctcggcttggattttcttcacggaaataattatcctcagcaatttcgagagagagagaagtgccttagaggctgaacccttttcttcttcacttctcccnctatttatagcaaaatgggggagaagcttgccacccagctcgcccaggcgagcaaggttgcttcctccagaagcaacagccttctggaggaatcttctggagggcccaagtgggcctgggtgctatttgcacccccatctttactaaatacacccctgcccttctttggtgattctnttttcgtaaagttaccggaaatta

SEQ ID NO: 212246 - DNA, 416 bp, Glycine max
  unsure (1)..(416): unsure at all n locations
agcttcttatccaaagcaattcttggtggtgaagcttcttcttccttggcttattccctagtggatggggcctcccctctcctcttctcctttgccttctgctgcatctctatggtgtaaaatcaccattgaaggacctcattgaagctcaaagatccaacctccatagaagctccacaagcaagctttcatcagttacgttgctaggaatagagcataatgttttgattgcaaaaatcacgaggatataattgtaatgttggggtatttactgcatatgcgagggattaatacttagtaaatattcttaggctccaagtgtgagggattagcttaggataacttaatgtgtgcatcagtaatattggaaaatgattcatanaaagtaatcttattacgatactaagggtatgaac

SEQ ID NO: 212247 - DNA, 425 bp, Glycine max
ggcttgtggagcttctatggaggctggatctttgagcttattgatgtccttcaatggtgaattttcaccatggagatgcagcggaaggcaaaggagaagaggacaggggagacaccatccactatggaataagccaaggaagaaggagcttcaccaccaagaattgccttggataagaagcttgaagaggatgctttaatgaaggaaaagaaagagagaaaggtggaacacgaaattgaaggaataaaagagggaaagaagtggaactttgaagtgtatctcataagactttcattcatcaaagttacaataagtgttacacatgcttctatttatagactaggtaacttcctttagaagctttcttgagaaaacttccttgagaagctagagcgtaactacacatcataactaatctcacctcc

SEQ ID NO: 212248 - DNA, 421 bp, Glycine max
  unsure (1)..(421): unsure at all n locations
agctttgccaaatgtcaaacttattancatttgtgcgtgggtccttgtccaagaatgagggacagtttgtgttagtgagcttagcttgagtgggctttntgttccgaagtgccttggcagtactttggactcatgccccttttgcttatataccccttaacttgtttctaacccaccaatttggaacttgttctccagggctcaccttcaagtctgtgagattgtgtcttgatattgtatttattagtagttattctatttcttattaatcagtaattgatttattttgtaatcgatactgattccttttccatattataaataaacatgaggtgtggtctactctgaaacacaacattacagtanaacactgttataaagtctgactgacttggtctagttgtgacctatcttcaattac

SEQ ID NO: 212249 - DNA, 441 bp, Glycine max
gtttggttcataactgctgtcgaagatggctagtaagaaaatattttgtcaaaaacgggtcatgatcacttgatgatatttagtgagtccatagaaatttctaagttatgtccatccgaccagtagagttaggctcacgatcttggttgtacgtaacaaagtgcatattgttattattgtctaacagatgtcaaatatgttctagttcatccttccatcttatagcaaatgatctactgacttcatcctaaggctacatttaacaagcaaactaatacaagcgaatgtattatatcacatcatgtgtatttgagaatagtcttgaaatttataactcgatccataatatgaattctattgaaagattcctctattctttgtgtaatcttcatcattatttagtcatttctttcagttggtgacttcatcatcgttctaact

SEQ ID NO: 212250 - DNA, 304 bp, Glycine max
ggacctataaactagctggcagtcatcatgtccagccctgtaacctatgtttaacccatttccagaatcagccaaatttcagatctttgtggtgtttttctcaaatgggcaactacgaagccatacaacacgacggctttgctacagcatgcagaagttgagttgctaagccagagtagacaataagaagttcttgatgaatcgtaatggcataacatcttcctatcgcagtgaaagttattgttatgtcatgaaatgttgcaacatgctgttcggaaaagacacattcatattcatcgtgtac

SEQ ID NO: 212251 - DNA, 424 bp, Glycine max
  unsure (1)..(424): unsure at all n locations
gcttgatgttatccgcccatcacatgattcttatgatgntttacgttctttcaaagatccaagaaagctaataatccttatatctcaagagtagtcatattggtgtcaggggcaaaagttctatgaccaaaagatggagatatcaattcaaaaaaatttcacaaatcagcaagtgttggaaagccacaaatataatttcttctctcactcatgaggatggaactttggtccataacctcaaggatctgcctgatgtaactacttatttcaataatttgtttcaagctaagaatcaattaccaagtaatcaattacaaattgttagtacaaggaaaaaaattcacttttcttgaaatttggcaagaattatcacatgaatcgattacccatttaattaatcaattacataagctagaatgaagtc

SEQ ID NO: 212252 - DNA, 445 bp, Glycine max
  unsure (1)..(445): unsure at all n locations
cttctttctttggctttgttgatctaatatcaagaagattgatttcttctttctttggctctgttcatctaatatcaataatattatgatccataatcaatttccattcaatcatatagcgtactgaataaaaactaacccgataaaagcctaacatgtgtagcctttcttgacatgcctttcttgaaagcctgacagctcgcgcgacttttagacaatgaaatttgtgttacaccaatgaaatntgagtgaatgaaatgggtgattgaatatgcgtcactcgtttgcagatcatggttaggaccacaggattaagatgtgccttatgtcacgttactggcagaggtatcggcagaggagatcgtgatgattacgatgatgctccacagcgttgacggcctactgcattcgcacggaggcagcgagtcgctgtgattgcggatca

SEQ ID NO: 212253 - DNA, 403 bp, Glycine max
agctataagaacgaaatgccagagattttttattttcttcgtgaataagaagcatcaacaataataagccaagctattgtgcaagcaatcaatggggtaaaacacaacaaaactaacaaaattaaactaatttaacacgacttacaaaaccaaatccaaagaacacactccccccatactaaacaacacattgtcctcaatgtggcacaattaaaagattaaaagcaattaaaccatcaaatacaatcagaaaaatgtaataaaagtaaagaaggagataagaaagaaaaactccctaagtcatggtagaagaagagtatggttgagtaatgaaatctctttcaccactacgtccactaaagaagggtttgtgaagaatagcttatagtcggtgctcattgac

SEQ ID NO: 212254 - DNA, 255 bp, Glycine max
  unsure (1)..(255): unsure at all n locations
acctttttattgagactatcgcgactgaattttatgtgatataatccctatggaagcagggcacattttgatgggtatatgatgtatctacatgtggagccttgacgccttggatctttttcatcaatggaatcctttgcttctntaatatcaatggtatacgaatggataagatagaaagatgattggagatgccacttcaatgagaagatgagtcaagaagatgctcaccaccatagcaagccattgataaga

SEQ ID NO: 212255 - DNA, 420 bp, Glycine max
  unsure (1)..(420): unsure at all n locations
cttaaccacacacacaaattatgtattcaaacccctttatttaatggactttcaaggtttgagaagtgaaattgagaatgaggtaaatttgaagcaaactctcacctcacacaagtctataacatcaatttaaacttgttcaaactggattgacacctataatttcaccgaattcaaaantgactcctcaacacccaaatttaccctagaaatggctgtttgttcactttggtcatttgtttttctctctagcacaacccaacctttctcataagtcctaaatggcatctcaagctaggattaactcactctaacctctaaatactaccaattctagatttggccttccagctctcaaaaattcactctttttccactcataacattatattctcaccttctaaccctaggttaaatcta

SEQ ID NO: 212256 - DNA, 425 bp, Glycine max
  unsure (1)..(425): unsure at all n locations
gacaaacaatatctaatcttccaatccactcaaaacatacaattgcttattcaaatcattctcaaacattcatttcatgcaaaacaatccactgcatatcattttcaatcaatttcactattcaaacacgctntatgtacaagcaaacaactcaaagtgctgaaatttaaataactgaaattaaaataactgaaatatgacaacgaaatcagctggaaatataaggtgtttaaccttcaccaaaacatcttcaatgactccatatggccttgtgatggagcggtcaactaactggagggtcatgcgtgtgggcattatctctatctctncaagtcgctggcacatggaaagaggcattaaatcgatactagcttccaagtctatgagagctttgcctacaacaacctcaccaatataacacggta

SEQ ID NO: 212257 - DNA, 438 bp, Glycine max
  unsure (1)..(438): unsure at all n locations
agcttgaccatcttcccaggtctcggatatgtatatttcttcntctacaattcataattgaactaataagaaattaaaaaaatgatattaaatataatttctcagttttcaatcgtgttctatagcacagttgcattgcattgcggctattggccgctcttgtgaagcccgtggtgttgcaaatcactgtcacatgtggagcagtgagaattacaaccgcatttgtggctattcatggaattagtgggcgcaactgattaatggttggaagccactgtgtatccccacaccctttcattttcctgcagtaaacactctcacacaggtctttcatgatttaaatccagttctctgtttattgccagcatatgaatgtctctaattttgggtaatttatataagtctatatataagttattgaaccttgaaacttaaatt

SEQ ID NO: 212258 - DNA, 269 bp, Glycine max
  unsure (1)..(269): unsure at all n locations
ttataacctcatttatacgttttatacctacatctcgattacaaccaaaacttcgctattanaactggccatcttcttgagaatctactcgctatcaacttccttttttatgttgaactattcactgatgagacactctagacacaacgagactaaaaaatggtagcaaattctgaatttcctatatgtgcccctcaagactaaaccttgcatgagagtgacacatgaattcagccgaagttgcagaatatattatcaaacaaaacatt

SEQ ID NO: 212259 - DNA, 441 bp, Glycine max
  unsure (1)..(441): unsure at all n locations
agctcttaaagttgaattcaaatttctaatttctgttatatatagtctcaacttctggtaatcgattacataccttatgtaatcgattacaggcttttgaattcaaattcgaaatttgtaaaaactgtttcacaaatcaatttggccactggtaattgattacattctctggtaatcgattaccagagagtaaatattatattctgaaatcttaaaaagctttttggaaaatatactttggcctaacctatgcgtcatcaattaagaaactcttccttagattctaggaacaaagctcatcaattatcttgaatttttggattcttgacttggatcaaacgtgagaagcgcttttctctggcataaacaaaacttcatatcatanttgcttctacattcctcaggatcatcaacatcaggttcaaacaaaacttaattatc

SEQ ID NO: 212260 - DNA, 435 bp, Glycine max
  unsure (1)..(435): unsure at all n locations
cttgtcngaaatgccatggttgggtgagttagacatacccattttttgtagtggttttgttatgatgtttgcgatgtttatatgctgaaattgcttatggaaatctgttagagacgaagggtagaactaacccaaggttagaaagtgagaatgtgatgttatgagtggaaaaaagagtgagacttgagagttggaaggctaagtctgaattctgtggtaaatggaggttagagtgagttaatactagcttgaaatgtcatttataacatgtgagaaaggttaggctgagctagagagaanaacaaatgatcaaagtgaacaaagagccattgctagggcaaatttgggtgttgaagagtcaaatattgattctgtgagaatttangtgtaaatccagcttgaacaagtctaaatggatgttatggactggtgtga

SEQ ID NO: 212261 - DNA, 322 bp, Glycine max
gaaaacatagctgttcttttcctactctccattccagcccggaaaatggaaatagaataatccgcaaaggttacttacttgaattaaaatacaatatacgactctctatggctgataatcgatgaactggccgggatgagtattaaaaggaacctttatatatgcttcaatctaacacaaaagcaaatctctctaaaaattaagatctactcaactaaatatgtaattgcggaagatcccgattcatgaaaaacctgaagaaaaaaaacggccaaataatacacggcaagacacttctttttgccgacacaaaaaaaaaaaa

SEQ ID NO: 212262 - DNA, 446 bp, Glycine max
  unsure (1)..(446): unsure at all n locations
tgagcacgttagagttggaaggcatcaaattaactggagatataccctcttcccttggtaatcttaaaaagcttcaattcttgtaagtatggcattctgtttgctaagttctacagatatataatgagtcttacgccttagcatgtatttttttttgtgcaatgtttaaaagtgtctgtttcttgtcctgcaaccagaacattaagtcaaaacaatctcagtgggactattcctgaatcacttgccagtcttccaatcttaatcaatgtgtatgtaaaataatggnttctataactttgctgtattcttttaagtatatttcattaatttagtatctgattgattattcaaaacttctgtttgagtctgctagatcaaataatctgagtggccaaatcccgagcagttattcatggtcctaaaacaatatggatggtaaactgtaa

SEQ ID NO: 212263 - DNA, 258 bp, Glycine max
agaggcactattgaaagccatgaagacaagtagaagcattccaaatcaacacacattaagatagacctctcggcgagaaatctgtattcttagctacaaatctttctgtgagagctacccacttatgacttgcgctttcaaagcttctaatattcttagatagaagtgtaaaacttaactaccgagtcaaatccctcttgagaagagaagatctgccatctgtgcaggtgaaacacatatatacttataccgtaaagt

SEQ ID NO: 212264 - DNA, 396 bp, Glycine max
  unsure (1)..(396): unsure at all n locations
tgccttgcatgtctagggtttatagagagagagaggtccaagctttatatagttttgatagattatgctatgcgaagatctgcagagaccagagcttgaagcacgagccagtttgagagcctgagatgagtttgtgagtgattgtgagatcctataggtgaatgagacatcctcaccacttgtatttttgaaatctttaatctttctcttctctttgttgttaagaacgcttcctggtatggaaagctaaatcctttgttggatcttccctgtacgtacctaatgtaaatagaattctatctatttaatgatgttttgtgtgctctttgtgctatctatttttcattccagtatgcctttaccttgatcacatagatgcatgctntgttaagggca

SEQ ID NO: 212265 - DNA, 472 bp, Glycine max
  unsure (1)..(472): unsure at all n locations
tangagtaactgtgtcgncaatgttatattattgctcttattttatctacagcatggggtcaacatccaatagttgcatacgaaatcctatctattcacgtccctatatatatatatggcgtcctgcaattaatatttaattatgtacacaatttctaattgtagatagcaaataaaaaaatgtatagaaaagacaggaaatgaacggatcggaataccgaattttgagccactaacatataaaggtagagtcactattctaattcaccttcaagtgggtaggtctttcacaatataatttacaaactatagtgcgtaccatgttgacatgcatattgatgtaaaccacactttttgtgtggagactcttaaataaatatggtctgttataatatttattatacaccaagatactatttagcacctaatgagaagatatatataataagtgggataacatgataatatatat

SEQ ID NO: 212266 - DNA, 380 bp, Glycine max
tattattagcaaccagggcatgaataagtggaccattatttaactagagaattctctctgaattatccttattctttctagactttaacttaaaaacttcagaatttaaccacacctacgtatattatgagaacatctcatttttgtatttcagtagtctaaaaacactattcagtcgcataacaaaacaataacattgtctaccacatatgaaaaattgggatgttacaactgaaagcataaaccttgataactattatgaagtaaaactagttttagatacgtatttttctatttttaaataataatttaagtgattttaggctaaactttatattaaatgcatttttactaaaccattattcctttttttaataaaa

SEQ ID NO: 212267 - DNA, 355 bp, Glycine max
  unsure (1)..(355): unsure at all n locations
ctttcgattcattctatgtacccgtagtggtccacatngtgtttcgtgcattttgattctcgtattgtttacttattataccccctgttgacgtgcttaagccattttacttaagtcattactcgcttaacttaaaaataacataaatttccaccgaacatttgaattgcattatccgttaacttcggttaaaatcaattccgaccgttcggtcgtgccgtaaccacgttggaaatcataaagaggtaaaaaataatataataatcagaaagacatctttagtaaaataaagcggaacatcaatcggacgtattctctttgggagttctcattcttaatcgaattgattaataac

SEQ ID NO: 212268 - DNA, 413 bp, Glycine max
ctgcaacttaattgaaaaagtgcctccttctttatattgttccctatatattaagccattgctcatgggaactggagcattgttaagtttggcaccagcaccagactatacatttcttatttattgttctccaattggcagctaccacaaggtaatgtgttgatttacacgaggctataataatctaagaaaaagattccacttacaacttctgaaattaaatttcatattttagactaatttcatcttaatgaggaaatctaaatcacctgattgagattgagtaaggcgtttgagttgttataaactctacaatacttattcttgattcctaaggataaaaaaagactaatatcatctttgttaattattacacgcgcactaaacttgaaagttgaggataaactatataa

SEQ ID NO: 212269 - DNA, 414 bp, Glycine max
  unsure (1)..(414): unsure at all n locations
tgacgctgcagacaaagctgtctcctagtatggagagcacattgtttgtggttctagtggcagttcctcagctggaggttctcanggtggtgaacaggctcccgaggcagagtatgaggaagtcaagaaatgacatttaggcgtggttttgtagccatttgtttcttattaatcatcacataattgcaagaatacaaggttacttcttttgtatctaatgttgaaaaccattctttgctggaaggctctttaatttgtagcacttttggagtccaaagttccgaacacacggctgtctgaataacgattttgaattntttgcatanagtttgttcactacgttnggctctgactacgtatttgcactttgattggagactcgcatgcacctgttcgcacactcaaagtatattc

SEQ ID NO: 212270 - DNA, 238 bp, Glycine max
cgagaagcagcgtagaacgatagattcaactttcgaagccctagagacccgggtcttacctacgggcgagattaaagttgctcgtgcgaatcccacccacggtgtgacttaccaccggattttctacagaagagacgcccgagatctatttgggagctgtagtctccgcaacacgcaggcgggaagcctgaccttaacttaagaaatgtggattgtggccattagcacaaaagtcccc

SEQ ID NO: 212271 - DNA, 423 bp, Glycine max
  unsure (1)..(423): unsure at all n locations
gagatagacagaanaagacttaagaaattttttgctattggctatctgctaagcacagaccctgcactaagcgcttagtcttcacatgctaagccgagcttgctcgcgctaagtgcatagaaccctgattggttggctgaatagttcagctaaacgcacatcactatgctaagccccatatctttgcggtattgaactttaacctatgggcttagcgtggatgatgcactaagcgccacttcttctctgtaaacattccattgtagcagcgctaagccccagatccattctgtaacttaagcttttaagttgggcttagcgggctaggaggcgctaagcgccaatcttttacgaattttgaattcttggaagtgcgctcagcatgcctggtgtgctaagcctgaactactctttgtaagttga

SEQ ID NO: 212272 - DNA, 482 bp, Glycine max
  unsure (1)..(482): unsure at all n locations
tacaagcaagcttccatcaagtggtaatcagagcacaagagcttcaagtangtgctcctgaaacctccattaattttcagctttaccttctcctccattgttgnttcttcattnttgtccatgtatctcctctcatgtcttgtgctaaatgttgttaattctttagaatttccaccaattaaacttgctatagaagctagatttgattttctatggttcaaatttcttgttcttgttcttgaaccatgaatagtgttgagtttaggttcctttgagttttctcttgctactttttgtggctgaaacctaaaccataaaattcttacaaaaacattaaagtatgaaaaaacctcaaaaatctagagtgacttgttcacctattgtagttttgtcatagaattcatgtctagtcatgaaacttgccacataagaattcttatgtngngctgaatattattattcttgtttctatgtctaactca

SEQ ID NO: 212273 - DNA, 244 bp, Glycine max
cctctcaaagcgagctttcgcagattacggaagacttatagttgccttatcgaggtatcatagaagccatgtattactcacccatactacgaccagcctttgagatgcttccaattcggaaacctcaataagcaccaacctttgaagaatttgaggaaattctatgatgtccttctcggggaagaaaaccatatctttcatccgggtgtctcccctctttgagcagcaatggaacagtgggcaa

SEQ ID NO: 212274 - DNA, 427 bp, Glycine max
  unsure (1)..(427): unsure at all n locations
acagcagantntagtaatgacccactagcctagaattaattatcttatgccattatattatggaattaaaagaacttaatggttgagtgtaactgaaattgtggcaaccaacagtcacccacaacagccaccatttggtctcccaaaaggctgatgcctacgttgccaattgggcccttantacaacttgaactaaacctaactaaagcccttttagttgattataccaaaacatatattggtcagccaactttacaaggattgagccattatttagacaaactaaacactttaaaattgagacaaagtggtgccatttagtgcttctccatttgggccatgatacaactcacaaccttggatgaccttctcgcatcaacacagctctcattcctaacatttgaagcattacactcaacttcaaata

SEQ ID NO: 212275 - DNA, 293 bp, Glycine max
atggccaaaccaataattctcaacactcatttcatgcaaaaaaaccactgcatattacctttctatcaactcactattcaaacaacttttggtacaagccaatacaactcaaaagtgcttataatttaaaacaactgaaaaattaaaatttgaattaaaatgacctgacataaatcataaataactgaaaataaacttaaatgtcaaaacgcctaaatttaaatgtcctgctcctatggttgctcctgtgcatgctcaataaagcccaacacctgaacaactggggaattctg

SEQ ID NO: 212276 - DNA, 474 bp, Glycine max
  unsure (1)..(474): unsure at all n locations
tcacatgtcaaagtacttacgtttacctacgcgctatgaattattacattacanaagtgatatanagaggacaaagaacaattgggtgaaaaacatgtgttattagatgaataggattaacaaaaaaatcacgaattataaaattagtttatgaggtatatcttataaaatatttattagttgatacgttaaaatttgaaaatattctctgttcatgaaatagtctcttttttttaaaaaaacaacaactatactctttatgcaaaacaacgcgttcactgcacacgcaacgctccactcaatctcaatattagtagcctccaattttgaaatcacttttgactatgtttcttttttttcctgtacgagatgcttatatgtaaaatttatagttaactttataacttatccaaatcaaattctaatgaanagcatccacatatttaaagatgcatagaatctcgtgtgggatat

SEQ ID NO: 212277 - DNA, 343 bp, Glycine max
  unsure (1)..(343): unsure at all n locations
cgagcatcaccccaccatgagggatttcttgaatttttnaccttttgaagaactcgagagctatcgctgatcaatttccagcgttttgatttattatgcccctgaacccgacctccgagaaaaaggtatggctattttatttctcgagagcttgtgttgtataattctgacgttttttttgagacgcacctgaattctacatgtgagttaacagttatgatcattagaatttttcatatccttcgatattcaactatgatctcttctatatgtgatgccccagaataaaacttctgtgtctaaaatgtatgaccatttgtatttttagagagcatttgttgta

SEQ ID NO: 212278 - DNA, 424 bp, Glycine max
catgccagcgcgaaaaagcattcaggcacctaatttgaatctcttttgctggctctacatataaaaaacaggcccaccatcccaattttgcaaaatcatattcatatatcattggggcacttcaccgagcacttggagggcgcacgttctgacacaaattgcaagaaaatggggacaatgtggcatgcctccttgcttcagactacaacataagcctaatgcctcctcacacaaaccctcaatttaacaaaacaagcatggattcagatgcgaattgcttcacgaaatttgcaaaaaaatgagcaacttaagcaccaaaacacatcaatggagagccaaataacccagggaaattgcacttacttgtggggagtgaattaaagcgtgaaaagggaagcacatactcaacaatggaaacctgggg

SEQ ID NO: 212279 - DNA, 414 bp, Glycine max
  unsure (1)..(414): unsure at all n locations
ctacgcttcagatacgtagcatatgtgcgcaatacacaatgcctagtacaccacaacaaaatggtgtattataaagacgtaatataactntaatggatatggttaggagtatgttaatcaattcaactttacctgtgtctttgtggatgtataccttgaaaaccgccatgtatttgttgaatagggttcctagtaaggtagttccaaagacaccttttgaactgtggataaataggacacctagtataacgcacctgcatgtttggggttgccaagcagaaataatgatttataatccgcaagaaagaaaattggatgcaagaacaattagtggatatttcattgtgtatccaacaaagtcaaatgggtatatattttatcgtcctactcatagtatgagaattgtcaaactgg

SEQ ID NO: 212280 - DNA, 330 bp, Glycine max
cacaccagatttaatttattgtacattcacatggacacactgatacactttatattgttaagttcacaatatttgttcttgctatcgcagaaaggccttgcaaaaacatagatgtgaagattattccctaaagtatgaaaaagaagattaattgtatttgatagatgatactgagatccttgtgtattccatgattacagacatatcttcaatctctcaccattaagctcgaagaaatgagagtcaaaaggcgtgattcacaacagtggacgcaccatcgcttacctccacaaaaatctagagaagcgtggaaacggtatgaccaatata

SEQ ID NO: 212281 - DNA, 283 bp, Glycine max
catagaaaacatgggacactgaatcttttgtaatttatcatggaccaatatatctaagggtaaagctgcagaaactaagatacacccatacctatatacctggcccgaaaactttttgtatacttcgggaactacgcagctcccacgtggggaacagccgtcccttgaggtcggaaagcgtagccaagtcgaattgagtgcggttgacagagagtttcgttgagccgggtaacccggtgggaaatcacggaataacgcgaaaagttgcccctctaacgctaaa

SEQ ID NO: 212282 - DNA, 427 bp, Glycine max
agctttgccaatatgactgctacttgattgtcttctctcaaaatatatatggggtcgtataatgtggccctcgttagcatggactggatcgatagcctaaacaatattaaagcacaggcaccgattgcaacatccttgagctaataattacacaagtttagagtcagaataaactctaattctcttgtgcatgtcctcgtgacaaagccatttcaagaccaatcataatagttttcagttttgcaatcaacactgtacaaccttctagatttgacacgaagtcgcagatgaaagcacaatgaagaattgtcactctaatgtggaatcagcacaatccctgaaaaggtggaatagtgattcctcattctcatcatagtgagtacacataattgatgggctcaaccctaaccgcatcctcccggagata

SEQ ID NO: 212283 - DNA, 416 bp, Glycine max
cgcactctataacactcagcttctcaactagagacgcttacaaataccacccatccttcctatactatgagaatgcaaaggacatagaagatgaccattgattaaacggaatggcaaagtccttttcccaccccctcaaccaagaccaggtaagataaattgcatcatccaccaatttagaaatggcaaactgatgatatttaaaaatcatggcgttcctatagttccaaatagaaactgtggctgctacccaccaaaccttccactttctattaatagcttgcgaagcagccaaagagaggtgctgagtgaagtgatccacaggcctacaatgcatgactctagcttctgtgacccaagaggtaaattcccaccacagtggcataatcttattgcacgaaaagaaaagatgagag

SEQ ID NO: 212284 - DNA, 339 bp, Glycine max
  unsure (1)..(339): unsure at all n locations
gatccctaagncgactgcagcagcagctcagagacgagggcttgtgatgttcacaaccatgtataaccgcgaacacctggaatacaatctcggatctgatcacggatgcataacagaagcgcctcgaccctgatttaccgcttctctcttcttcttaccactaaacctaagagaaatcaaaacaccaaaggagttgaaccccatctcaccaacccctatagtccctttatacgaagaaaggaggaggagcttgctacctaactcacccaagcgagctgggggctcaagcctgaagcacatgctcgcccaagtgagctcaactctcccagcaagctgggt

SEQ ID NO: 212285 - DNA, 434 bp, Glycine max
agcttataagaacgaaattgcctaaatcatttccaaatatgcatgtgaataaggaagcataaacaagaatcaagccaaggctattgcgcaagcaatcaatggggcaaaacacaccaaaagattatgatgatggatgactcaaattctcacaaaggtaaactcatcactttcaaattgagctatcaaaactatcatgacatgtaaatgaaaaacaaggatttcaagtcacaaaatgtcaagagacttttattttcagagcaattacccattacttgaacatatcctataattcaaagacaaacatgcacaattaacacaacaaaactaactaaattaaactagaacccaacaaaactaacaaaatttaactaatttaacacaactaacaaaaccaaaaccaaagaacacacttcccccccccccccatacttaaa

SEQ ID NO: 212286 - DNA, 409 bp, Glycine max
  unsure (1)..(409): unsure at all n locations
ngcatgatntacattctcccnctttctcaagcaaattcttcttgatatcatcaaaatcttcatgatttacactggtaatcttaataccaaggattacacttgcttctatgaggtctttcatatcaaagttgttacacaacaatgatttcacatcgttcactacatgaatatttgaaccaaatatgagaaggtcatcaacatatacacatatgatagtgcaaatattatttacagatttgtagtaaatgcgtttgtcactttcattcaccttatacccattcgagactattaagttatcaaacttttatgccactgtttaggtgcttgttttagaccatacaaagatttatctaacttgcagactttatcttcttgtccatgaatcacaaacccttcaggttgctctata

SEQ ID NO: 212287 - DNA, 420 bp, Glycine max
  unsure (1)..(420): unsure at all n locations
acctgcggcatcaagctggtgaccaaatatgcccatgattttttctttaagccagtccagacaacaaggcctgattgtagactntaactccccttccatttcttggtgttcttactttatctttgtccgacttggcattttccaagtcatgatgttcttcattgggagaagaaagcttcattttcatgtgatccagttatggcgtaagctgaattgacacacggaaacaaaagaaaaggagcaacaaagttcacagttccacagcgtttcaagctatggagctcatgatcgatgacaagtgaagcgacgcgtggaaaggaaaaactcttttcacaaacccgggtatgtttatgatcgacgaaaaaaacccatccaggatcaacaccgtgatcgttgaaacagcgagaattggatggaata

SEQ ID NO: 212288 - DNA, 408 bp, Glycine max
  unsure (1)..(408): unsure at all n locations
tactcagcctgtttaatccctctcgttaaacttgttttcatgtataaatatttattaaaaataaaanaatgctgatgaccgatcccatgtatattattctacggttacaattgcatatgcttcaccaatgtgatgtttataataagatatatgatatacctcaaggaaaagagctcctataaataactgccgctcgtggaaataagactccacccattgttgttgtttccaaagcccaaggtttttattcaatgcttataaattgttctaaaataaggtgcggagaaaaagtgtaaaaaattcattttctatccggaacatactcctgctctatgcactctatataagggacatggctattttcactatagaaggggttagttaatttatgcctcctgtgtcactatt

SEQ ID NO: 212289 - DNA, 424 bp, Glycine max
  unsure (1)..(424): unsure at all n locations
agcttcaagtattgtattcccatttcttttttacaaaacncctcttcctggggtccccttaaggtaatggagaattatataggtatcttgtaagtggatttctcttggacagtgcataaataggctcaccaagctaacaaaaaaagtaatatcagaccttgtgtgagacaagtaaatcacatttccaactagacgatgatacatctccttatccacttctgcactgccatcttcattacccaatttaatgtttgaatccatgggagtacctctcaatcgacccatctaccctatantttactgtatacgcccacttgcaacccactggtttcttttctattggaaaagaaatcaactcccatgttttttcttttgcaatgcctccatttctgtatccatggtctgtttccaatttttattggat

SEQ ID NO: 212290 - DNA, 462 bp, Glycine max
  unsure (1)..(462): unsure at all n locations
cttcatgaaagcatataaggtattacattacagcattgacatttgaattcaggcacatataagacacaaatacatagaanagtcggtcaccgtagtccaaagcagatcttcatgatggaaagtaattaataaaagcttatgtaaaggaaacaaattatgcaaatatacagcataccgtgcagcatattctgagaaatgtttcccaggttgtcgctgccgtaaagtgtgaagatcaccgcccggacaatattccattaccaaacacaagaatcggtcagtctcaaaatgtgtatacaaagttggtagaaacggatggtccagcaactgcaatatctccctctctgtctgtgctctagtcagcttctttctgcttgctagcgatgccttatccataactntcattgcaaaataacacctagntccactcagctctgagagatacacacttccaatatcaccaca

SEQ ID NO: 212291 - DNA, 421 bp, Glycine max
  unsure (1)..(421): unsure at all n locations
agcgttgtgtaatcgattacacatatttggtaatcgatcaccagcgactgtttctganaaatcaaaagatgtaactcttcgaaaaggttttgactttttcaaattggttttaagttctctaaaagttataactcttttaagtggtcttcttgaccaaacatgaagagtctataaaaagcaggctttgttttgcattttcaattaattcattctttcaatcttgaacacatttccaatcaatcttatacaatcctttacaagccttgaatctctttgaacttcttcatcttctttgtgccaaaagcttttcaaagttttctagttttctgaaccttgaaaacttgggctattcattcttttcatctcttatcccttcgcccaaaagaattcgccaaggactaaccgcctgaattttcttgtg

SEQ ID NO: 212292 - DNA, 458 bp, Glycine max
  unsure (1)..(458): unsure at all n locations
gggaagaagaatgtacatggagattccacttggatataaagttggcagactaaagaaggccctatatggtctcaagcattctcctcgtgcttggtttggtaggttcactcaagctatggcatcttaggggtacaagcaaagccaaggtgaccatactctctttataaaacacttccaagaaggtaaacttactttgctcttggtctatgtcgatgatataattattgcaggcgatgatgagcttgaaaaacaaaccttgaggtagaggttagctgcccaatttgagatgaaggatctcgggaagctaaagtactttctcgaaatagaggttgcatactctangcaaggtatcttcatttctcagtgaaaatatatacttgatctcctcanagaaagtggcaagttgggttggtaaaccactggagcgcccatagagcataatcacaggattcgaaatg

SEQ ID NO: 212293 - DNA, 413 bp, Glycine max
  unsure (1)..(413): unsure at all n locations
gcttctncattggtgtctaaattctaatgtattttgtttgataaattttcggcactaaacgcaagaggttttctaaatgcctgacccagtctgagtgataaagaaacgggtcccaccacaagaattcttttatatgaccaacccctaaagcacgagatgatggttctaatatctcgaacatgaaagtattatattaagaattggaacatagttattctctccatacttgctttcacttattatgtgtttttttatcggtgaacatccagcatatgaatctttttaaatgactagaaatcaatttattttgaatgagttatcgatggtaagaacattcaccattaagagaataaaatttcttcatttgtagcgtgtaacgatgttatgtcctttacttttataacataagaatc

SEQ ID NO: 212294 - DNA, 464 bp, Glycine max
  unsure (1)..(464): unsure at all n locations
tttccggaaccaccttattatagggaangcttctctttttctcgngcggttgccacggaagttccatggtcttgaacgcagaggattggctggcgttggaggagccctgatggcgtgaagggggtttctgacttgcacgcttgggaggtgtgggtgctgccacgtgggcgttggtgtttgcattgttgtgcacttgangatgaggatganggtgtggctgttgttgtggtgcgagcacgtgggtttggggttgtgaaagctgaaagtggccgtggaagtgtgacgtggcaccttgtggttgaggctgcgtttgggagagaatgtggttcatggtgatggacggtgttccaaggttggtgaaaaacgacggcgtcgcagcattcttggttgtgtggtgttgtcaatgctgaaaatcaatcttaatcgcttttgttgggagacatggaacctaatatatgcggatc

SEQ ID NO: 212295 - DNA, 435 bp, Glycine max
agctttcgagaaaatcaaatggtcatagaatttcactcgtatgtctgacccgaggacataatatattgagaccctcgaatatgaacaacgcgaacgctctctaaaaagttgaatggtcctaccttttcacacggatgtcccatgctgcgacataatatatccagacgctctgaactgaacaacggtagctctcgaaaaattcgaatggtcgtaacttttcacccggatggccgatttggggacataacttatctagacgctctgaacttaacaacggaagctctcgacaaattcgaatggtcataaaagttcactccgatgtgcgattccacaacatttattttccagacgctcgaaatggacaacggcagcttccgagaatgtgattggtctaactttttacccggatggccgattctgggacataacttatct

SEQ ID NO: 212296 - DNA, 439 bp, Glycine max
  unsure (1)..(439): unsure at all n locations
acagcagaatttagtaatgacccactaacctagaataatttaacttaatgccattaatctanggaattaaaaaaaacttaatggctgagtgtaactgaaattgtggcaaccaaaagtcacccncaacagccaacaagtcagccaccatttggtctcccaaaaggctgatgcctaggttgccaattgggcccttattacaacttgaactaaacctaactaaagcccttttaattgattaacccaaaacatatttttggtcagccaactttacaaggattgtgccattatttagacaaactaaacactctaaaanatgagacaaagtggtgtcatttagtcctcctccatttgggccatgatacaactcacaaccttagacttttctccttgaaactngggcttgtattcaaacagtatggacagcacttgttgaagagct

SEQ ID NO: 212297 - DNA, 374 bp, Glycine max
  unsure (1)..(374): unsure at all n locations
gggacccggtgtttataggaactatgattanggctacgcgggaagacctgagctcagttgaaggtgggcaactggggacgatggatttatttgtgacttatggatgtggagagtccacttgctccatcgactgatcgccacctactaccacatatgacgggtaccccataatccttcaagcttgaagtgaggaagtggggaagaatgagtcttcctacttttatttgttgaccacagagtggcacctggagatatgttcccggggtcaagagaccttggggacgtcagggggggtgctattgtccaaaacctatctttattcattcccccccctcccatgcctatatcagctagtgagaaccttgtgagtacct

SEQ ID NO: 212298 - DNA, 450 bp, Glycine max
gcagaattggtcttcgccagtgaaaggatcaatgtgggtcctaaaagaggcaaatttgatcatcctactatgacgactgagaaaactgcggcaaataaaaaaggtgaggatgagggagaaacccatgctgtgactgccattcctatacggccaagtttcccaccaacccaacaatgtccttactcagccaataacaaacctcctccttacgcaccacccagttatccacaaaggccatccctaaatcaaccacaaagcctgtctatcgcacttccaatgacgaacatcacctttagcacaaaccaagagcaccaaccaagaaatgtaatttgcaacgagaaaacctatagaattcaccccagttccagtgtcctatgctgacttgctcccatatctacttgataattcaatggtagccataaccccaaccaaggttcatcaaccttcatt

SEQ ID NO: 212299 - DNA, 378 bp, Glycine max
  unsure (1)..(378): unsure at all n locations
cgcatctcattcctaaaaaatcaacgcgttagtcctcggcattattaaacatccattctgagtgatgtattaatactctctgtatcttatcaagaaataaagcttaattcttctgatttgcggtgcacaaaaaccctatacctaanaaatctttcacccggtttgccatccaaaacaatggagtggaaaaacgccaaagatatcttacaaatgtcatgtcntcatcatgattcactaatttccagggccattacatcatcaccttgaactggtatgaattaaactacaaaaaaaattatgttaaaacccctacccggttacccgctgaaggaaaccagctccatcacaattcatacagtaaaccacaaataacccccc

SEQ ID NO: 212300 - DNA, 207 bp, Glycine max
  unsure (1)..(207): unsure at all n locations
catgcacgctgtntttactcaaatgaacaacgtacatgcggccaattgcaaaattaatacagcccaattccaagaggttacctcataaatgttatgattgatcgtcgtggtattctacataattaaattaatcttaatacgtctaccacatataacaaatatggattgacattacccatgagtaataaattcatacttatgagtatt

SEQ ID NO: 212301 - DNA, 424 bp, Glycine max
  unsure (1)..(424): unsure at all n locations
tcagnttatatatatatatatattatatatatatagagcatatatgagatgataaaaggaaaggaacagggattggcattcaaactatgttgacacctcaattcctacaccacctaagactcatctcaaaatatattgcaaaacacttgtgaggatcaaatcagacctaagaactcaactatgtgaatctatataagggaaactcttgtctgaacctaaagagcttctctaaaataaaaggggaagaagaatcccaccaaatataacctaaattctaagcaccaaaagaaacaaacttgttagcacaagcattgtcttcatggtaaatgtgagaaattctaaagttgaaattattagaaagctctatacaatataaccaatgatttaaaggaacaaggggaatatcgaaagataaacaacatga

SEQ ID NO: 212302 - DNA, 378 bp, Glycine max
atccttaagtcgacgcggctgcagctggaggtaaagctacgatgtctctgttatgcacaattgtagacgggcttacgagacatcttgccaacaagcaggttacgaaactcgcaggctttttttcattctatatgagcaaatcattgaccatcatgtttgatgagtggaaaatgaggccgaattatactgtgccagtggagatgtattttcccctgcttttttgacatcatgattacttgattggcatctggcaaagaaataaatgttgggcctgttatctacgggatgactcggtgacgatacatgaagatcttaagggttcagaaatctattcgccaaagcattttgtgaaggtcattcagaaaagcatgaatttgt

SEQ ID NO: 212303 - DNA, 439 bp, Glycine max
  unsure (1)..(439): unsure at all n locations
ntntggagtagaaacatgggacaactcatttatttcagaataagaaatcatatctagtcaaggtctgagagaccatacaagtttcctaacgatctctaattatgtgggccattaagtctatcatatgctgacaatagccgagaagcccatgaatctcttctggggcggagtaggtgtctgccatcgccttggccttggctaacaatcggcgaagttcttgactcccgttcaaggtaagagcaaaccgatccatccacatggttgcctcttggtgtaaagagtcgatcacccttcctctagcctctntttccgcatatacttgggcatactcatccgtgattctatgctcgtgggccgtggctagacccaactcttcttggtacttggcgatgatagctaacatgttggtttctgtctcgcatagacgctgagacaagct

SEQ ID NO: 212304 - DNA, 227 bp, Glycine max
agcttgcaagagctgtgtattatacttagttttttcttcggctcggattattggtatatactacttgcttagctcttcaatcatgaaccatggttgatcaattgttctccaaattggaatagttgtcatgtagtatatgaagtgtgggtttacttttttttttttttttttgtaggggagtatgcctaagtaaggaagaggggggggggggggtttccccctttatc

SEQ ID NO: 212305 - DNA, 441 bp, Glycine max
  unsure (1)..(441): unsure at all n locations
tcaagaataatggcctcagcanacttcttattcccagaaggatattcaataaataggcctcctattttaatggagagggttaccactactgaaaaacttatgaggcaatagacttaaaaatttgggaagccatagaatggaaatgcaacaatagagaaacctatagaagagtggactaaagatganagaagaatagtgcagtacaatttaaaggctaaaaacatcattacttctgccctaggaatggatgaatattttagggtttcaaattgtaagagtactaaggatatgtgggacactctacaagttacacatgagggaacaactgatgtcaaacaatctaggataaatactttaactcatgagtatgaattatttangatgaagacaaatgaaagtatacaagatatgccgaanagaatcacacatatagttaatcat

SEQ ID NO: 212306 - DNA, 416 bp, Glycine max
ggacccaagcaccgagctgcacctaattgaaaagttttctttatgaaaggttccataataaagccattgctcgtgggaactggagcatcgttaggtttggcaccatcaccaaactatacatcactgattcatagaattgccattggcaccaaccacaatgttatttattgatttacacctggttatcataatctaagaaaaagattcctcttacaactgttagaataaaatttcatactttacactaattgcgtgtgaatgatgaaaactaaataagctgacttagcatccataaggagctttgtttgataaaaccttctattcttattctagaggctaaggagaaaaaataactatatcatcttggttattattatagggcaccaaaccttaaaatagaagattaactcttttaa

SEQ ID NO: 212307 - DNA, 445 bp, Glycine max
  unsure (1)..(445): unsure at all n locations
ngacgctgcanacaaagctgtctccaagattgtagagcacatgtcangtggttctagtggcagttcctcagctggaggttctcagggtggtgaacaggctcccgaggcagagtatgaggaagtcaagaaatgacatttaggcgtggttttgtagccatttgtttcttattaatcatcacataattgcaagaatacaaggttacttcttttgtatctaatgttgaaaaccattttttgctggaaggctctttaatttgtagcacttttggagtccaaagttccgaacacacggctgtctgaataacgattttgaattttttgcatanagttngttcactacgtttggctctgactagtattntgcactntgattggagactcgcatgcacctgttcgcacactcanagtatattccgggttcagtcacactttgcacgtcttagtc

SEQ ID NO: 212308 - DNA, 369 bp, Glycine max
  unsure (1)..(369): unsure at all n locations
agcttgcttgtggtgcttctatggaggctttatctttgagcttcaatggggtcctttaatggtgattttccaccatggagatgcagcggaagacaaaagaaaggaggtgagaggaggcgccatccattaaggaataagccatggaagaagggagcttaccaccaagatgagccttgcataagaagcttggagaggatgcttcaatggaggaaaagaaagagggagagaaagagggaggggggagcacgatattgaaggaagaaaaagggagagaagttgaactttgagttgtgtctcacaagactctcattcatcaaagttacaacaagtgttacacatgcttctatttatagactangtagctttctt

SEQ ID NO: 212309 - DNA, 369 bp, Glycine max
  unsure (1)..(369): unsure at all n locations
ctaggagaaaccattataactaagatagtttctaaacaanaatcaattgaggaagcttcgccaagtgtccccattgaaaaacctttattcaaacctgtcaaagtcagtgataaggctaaacgaanaattagggaacttagaaaaactaaatccataattgaaggcgtatgtgacaatcatagcgaattactaaacaagattggtagtttgcttaaggtcattccagacactccccaagcctcggaaaatacttccaaaatggtaacaagaagtacctccaaattaattatatttattaatgaagatagtgaccaaaactcagataacacaactaagataggatcagtgtcagaaaagatataaatccat

SEQ ID NO: 212310 - DNA, 427 bp, Glycine max
  unsure (1)..(427): unsure at all n locations
agctngtaagattatggtgcacccatcacatgtggtactagggggaggtcgggcgatggtgcacaacaagttttccacatccacaaatcgcacataaacccaccatcccctgttgcccacctacaactgagctcacgtactcccacgtagcccatatcctcgtttctctcaacaccaggtccgcatcgatccttccacgcttccccaacatccaggtaattcaacatccaaatcatcacaagctaacaaaccaagcaaaacagggcaaaggcagaaaactctgcccaaaactcagaccaaaatcacagctgtttctcacttaaagaccccaggaacatttccttcgttccaattcggtaaccgttggatcgactcaaattttttactggaagtctctagtacataagcctacaatttgaccgttggg

SEQ ID NO: 212311 - DNA, 414 bp, Glycine max
  unsure (1)..(414): unsure at all n locations
atatgttcttattactggactgattcatttgcttccaaagtttcatggccttgcaggtgaagacccgcacaaacatttgaaagaatttcacattgtctgctccaccatgaaaccaccagatntccaagaggatcacatatttctgaaggcttttcctcattcattagagggagtggcaaaggactggctgtattaccttgctccaaggtccatcacgagctaggatgaccttaagagagtattcttagaanaaattttccctgcttccaggaccacagccatcaggaaggatatctcatgtattagacaactcagtggagagagcttgtatgagtactgtgagagaattaagaaactatgtgccagttgctcccaccatcagatttcagaacagcttcttctccaatattttat

SEQ ID NO: 212312 - DNA, 371 bp, Glycine max
agctttctttgcgacaatgagaagataagatgaaagataaaagaaataccagtggtggggatgtctcctccacctcttgaaacctcacaatctctcaaaatctcatccaaagctccacaaaatggcttcctcatcaagctcagctctttctcaatctctccacagccaaaaactctaaaaaaaactcaacaacccttccaaaattgagatttcagctttaaataggctatcctgtcggtgggcgtgtgcttagccaaagatgagctcacttaacgcccgtaagtgactcttggcttaagactagtcttctcgcttaacctaagggttaaaggcggtgcacttagtgagttcactctcgctcaatgcctctg

SEQ ID NO: 212313 - DNA, 460 bp, Glycine max
  unsure (1)..(460): unsure at all n locations
tctcacctaaccactacccgtgcgatctctacctaagacccaatcttagatatgagaacctccgctcactccctctcactcacactctcgtgtttacaattaagtcaaagacacaccagagatcaactctgaacaaaagagatcaactctacacactagagatcaactctacacactagagatcaactctacacacataggtccaacacttgatgttagggtagcatcaaggtggctcacanaagactcaagtcccaaaaactcactaactaactcttcaatcccggacttggtacagaactcgtgcagcctccatgattatatagcaatctgcgtttctgggctgcaacttcttgatgctggaggagatctatcttcttctgaaaaaatctgcagttaaagaactaanagataacttttgatcttttagttggaatctttaatctttaatctttaatcc

SEQ ID NO: 212314 - DNA, 438 bp, Glycine max
  unsure (1)..(438): unsure at all n locations
gctgagaaataccagcagaatcctatatctattggttatatgtataagaataaaatggggacgtcatcatatcaaagataaaggtgaagtatctcctcgtgatatatgcaactaccatctcccagtctcaagaagcagaacagatgattagagatgcgtttggcaggtagggagaagtcagtaggcaaacctgaacaacagccttttcaccatcaacttctagcacttgtccacgccgagtagttccatctcccaagcgaatattaacaatctcttgaaacttaggtccctgatggagttgatcagcataaaactcggtcacaacacaaaaaatagttggtcatcttcattgagaaaagntgataattttagaataagcatagcatacagaggagtatcacactacagtcattaccttaactttatcaagaatgaccc

SEQ ID NO: 212315 - DNA, 413 bp, Glycine max
  unsure (1)..(413): unsure at all n locations
agatcggccagagngtgaatatccatttgctgatgctggtgttaacatcacattcatgcttattcagatgctggatcttgaagcaggttattttacttctccttttagttttctagtctcagaatatttcatgtataaaagatgaattgtggatgcctttatgtatgggcacatttgtttctgcattctggtctgctgacataaaattttaccagttagttactcttgcactatccagttaccaccgatcatgatctgaatgatggtcagtgccacattgtaattataaggaattagattacatgtgtccaagggcctattttccttatcccaatagcataaagnttttactttatttgaaagaatggaagttggtcattccaatccaatgacgtatgccaaccttatacatc

SEQ ID NO: 212316 - DNA, 425 bp, Glycine max
agctttttgacaagcaaacagacaactatgctactgattattaaagactaaaacatagaagctgaaattcatatgacataaatcataaaataactgacattaaactaaagtgttcataatgcaaaaaatctaaacgtcctgctcctcctatggttggtcttcattaacatccactgctgatggctgaggggtctgatctggagtggtctcctcctctgctgctgctagagatgctgctggtgctggtggctcctcaatcacaggctcctatgctgtagaggccccaccccctccagaggaaaaaggctggtctcctatccaggccacctgtgcataaaacttctccatgctcataatggagggcaagcccaaaccctgaaagctctgcatgatgatcgactaccctctatggatgctctggagca

SEQ ID NO: 212317 - DNA, 413 bp, Glycine max
agctcgtaattcgggataagggaataataataatcagattttcgtttctctctctttcactctctctctctctacgggaggacccttgggcctcaaataccaagcatagcaattactgtattactttcctattaaaccaaaaaaatctaaacatttttacttttttcgtgtcaatattctcaacacgttaggaaagtgatggggaaaatggagaagtcggtggctttgaaaatgaggcttacgacgaaggttgtcaagctctctcacgaggacaagatgccttacacttgggtttgaaagaaccacatatttgaaccactgtatttacttacggggcagattgctgcacaataaattataattttaatattgaggatcggggggataatataaatatttgaatattcataaat

SEQ ID NO: 212318 - DNA, 464 bp, Glycine max
  unsure (1)..(464): unsure at all n locations
tattagtgacactctataaactaagcttattaagacgcgtactcgagaagcttcttcgtggcnttcttgagaagctaacactttatctactaacacccttttaataactaaactcacctccttgaanataattatggataaaataatacaacaaatataatcaaacatcaaacataattactaataatatatagatatatatcacggtgtgatagaaagcaaaagagcaaacttcgtccatcgcagagattgaagtgtttctctatggacatgaaactcaactcatgcgctacaacaaagaagcacaagtgatgaactctgcttcgataaattacacgtaaggctgtttgtatccaaacacctataaaatgggtgattctggtggttctcgtgaagcgtatggtcatggtcaagaatgtttattcctaaggtattcctcttctcacaagggtacaaattcttat

SEQ ID NO: 212319 - DNA, 374 bp, Glycine max
aaagcttttaaaagctgagcttgacttatgaaacaagtaagctgaccgaccataatagtcagcctagcctgacaacggtcggcaagaaagaaaaaaagaagaagggaatatgaagaggagaatgaattaaagaaagcaaagaaaataaaaagggtcagtcataggcttagtcaaatgatgccaaataaaattaataattttttttccatgtaagcatatgcaccacacgtgacatcacacgtttcatgctaatgtgtctggttaacaaccacgtaagcagttaacaaatcccgattaacgacagagacatcgaataaaactttttaaatattatggaccccattcgaaagagaaatttattaaggacccaatgc

SEQ ID NO: 212320 - DNA, 481 bp, Glycine max
  unsure (1)..(481): unsure at all n locations
ctacgctcaagaatatggcctcatcaaactacttgtttcccgagggatattctatanatagacctcccatctttaatggagtaggttaccactactggaaaacccgcatgcaaatctttatagaggcaatagatttaaatatttgggaagccatagaacaaggaccttatgttccctctataatagttggaagtgcaataatagaaaaacctatagcagattggactgaggaagaaagaagattagtacaatataatttaaaggccaaaaatattattacatctgccctacgaatagatgaatactttagggtttcaaattgtaaaagtgctaaggatatgtgggatacactacaagtaacacatgaaggcacaacagatgttaaaagatctaggataaacactctaactcatgaatatgaactntntacgatgaatgtaaatgaaagtatacaagacatgcaaaagaggttcacacacat

SEQ ID NO: 212321 - DNA, 387 bp, Glycine max
agcttctatataagctgaaccattttatcatttaacggaaggtgagttttattcagaaaattagagtttatctcttttatcttagtgagagtgattctcctaaattcttgagtgattcaagaacaccttggctgtatcaaaagactttcacaacctttgtgtgttgcccttgctggaaagagagattctttccttcctttcatcatcacccttgttctttcaaaccacaattccagaaaatccacctctgcccagaattatctcgtggccataactcccattttacgcactcaaattaagtgattcttgaacctaaattgaatttcaaaacgagacctttcacctcggtttggaatcacctcatttggagccctgtagcttcagtta

SEQ ID NO: 212322 - DNA, 311 bp, Glycine max
  unsure (1)..(311): unsure at all n locations
gtgagcaaattcatacgacaataacctgttgtgtcggatgtctgattgagtcccgtaaatatatcgagacgctcgaaatggaataccgaagctctgagcaaattcaaacaacaataactttttactcggatgtccgattgagtcccggaatatatcggaacgcttgaaattgaatgttgaagctctgagaaaattcaaacgacaataactttttactcggaagtccgattgagtcccgtaatatatctgaacgcttganaatgaatgttgaagctctgagcaaatccaaacgacaataaattttacttcga

SEQ ID NO: 212323 - DNA, 429 bp, Glycine max
agctcttgaagagtcgctggtttgcatcattatcttctcagaactcaatgaagaaggatgatacatgtttcttccttcaacaagagacccctcattacaatgaaaaagatgaagttgagttgcatccattacccggaaaccaattatcttctgccgtgtccgattatgttctgagaatcttgtcaaactcaacaagagtcttggcttccactaaagggttgattctttgtaatcacgccacgagccacacaccaattgaactcttcatttgaacccataaacaaaaacttggttacccattcccaccccagaggaagttcaaaaaagatatgatgctgctgatcccacaatggtgttgctagaatcttcctacgacggctgtgatgatgattacatggtatttcaccttgaacttgaaagcacaacaga

SEQ ID NO: 212324 - DNA, 416 bp, Glycine max
  unsure (1)..(416): unsure at all n locations
agcttataagaacaaaattgccttaatcatttccaatatgcatgngaattaagacgcatcaacaagaatcaagccaaggctattgtgcaagcaatcaatggggcaaaacacaccanatgattataatgatggatggctcaaattctcacaaaggtaaaatcatcactttcaaattgagctntcaaaactatcatgacatgtagagaagaatcaaggatttcaagtcacaaaatgtcaagaacttttattttcaaaacaattacccatttcttgaacatatcctataattcaaagaaaaacatgcaaagtcgtacgtgcacacgaaattgacccaaaatattaaactgaaaatccgacgaaactaacaacattattaaattaacacaactaacaaattaacaaaaccaacaaaacaa

SEQ ID NO: 212325 - DNA, 352 bp, Glycine max
  unsure (1)..(352): unsure at all n locations
tgaagtatgtctcacaagactctcactcatcaaagttacaacaagtgttacacatgcttttatttatagactaggtagcttccttgagaagctttcttgagaaaacttccttgagaagcttcttagagaaaacttccttgagaagctagagcttagctacatacacccctctcataactaagctcacctccttgagaagcttccttaagaagattcctaaagaagctagagcttagctacacatacctctctaatagctaagctcacaccctctataatagctaagctcacccncatgaacaaaaacatgagaatacaaaagaaagttcttactacaaagactactcaaaat

SEQ ID NO: 212326 - DNA, 244 bp, Glycine max
attaataatttatctttcaatctttgttcatcatctctcaacatctttgaactctttctacagaatattctgattcatttctcttcatctttcttaaaggttgtgttcaatactttgtctttgaagaaaagttctttgatcaaaaacttgaggtattcatctttttcattctcttctccctttgccaaaagaacagaaggactaaccgcctaaattcttttgtgtctctcttcccgctctttcc

SEQ ID NO: 212327 - DNA, 425 bp, Glycine max
  unsure (1)..(425): unsure at all n locations
ntgaatgctctattaatggagtttactgaatatcttcatattgatcaacacttgcacagtggccaatgatgcgtgggagatcctgtaaaccactcatgaaggaacctccaaggtaaagatgtccagactgcaactattggctacaaaattcgaaaatctgaagatgaaggaggaagaatgcattcatgacttccacatgaacattcttgacattgccaatgctngcactgccttgggagagaagatgacagatgaatagctggtgagaaagatcctcagatccttgcctaagagaattgacatgaaagtcactgcaatagaggaggcccaagacatttgcaacatgagagtggatgaactcattggttcccttcatacctatgagctatgactactcgatagggctgaaaagaagaacaagaact

SEQ ID NO: 212328 - DNA, 429 bp, Glycine max
tcagcttctttgggaccatgaacttgctacttatctcctctttctaaaccatgctatgtgctcgcgactgtgccctctcttcctttcgcaacttgagttcactattgctaccccatagagctccgcgaaatttgttccggccatactcttccttgcgagccctcttggtctcttgttcaaaggctttagcggtaattgcattctcttcccgtaacccggcccactccttccgaacgtgtgtagcggccaacttgaacttctccttggcaagttttgcctttcctaactcgcttttgagagcttggacttcttcgacctcttgcggagcttcaaaactctccttgctgacgacttctaactcggcgagccaatctaaacctcgtatatgaacttttagtcataccgggtaccccaccagtgatgccatta

SEQ ID NO: 212329 - DNA, 438 bp, Glycine max
  unsure (1)..(438): unsure at all n locations
tataatatatcgaggcgctcgaaattgaacatcgaaagctctctaganattcatatggtcataacttttcactcggatgtccgattcacgcgcatcacatattccgactctcgaaaatgaacaacggaagctcccgagaaattcaaatggtcataacttttcacactgaggtccgattcatgcttataatatatcgaggcgctcaaaactgaacaacggaagctcttgagaaattcaaatggtcatacacttttacactgaggtccgattcacgcttataatatatcgacgcgctcgaaattgaacatcggaagctctcgagaaattcaaatggtcataactattcacacggatgtccgattcgggcgcataatatatcgagaggctcgaaacttgacaacggaagctcttagatattcaaatggtctaactttcaca

SEQ ID NO: 212330 - DNA, 399 bp, Glycine max
  unsure (1)..(399): unsure at all n locations
agctgaataccaagttgattgttgtttctcttgggatggatctttaagatcacataacttttccagttccagaacacgccagaagaagaacgaatcattgttgctttattgtaccttgacggtgcagccttgagttggtaccagtggatgttcaacaatggctttatcacttcatggaacggttntctccaagctctcgagtcgcgatttgcttcaatgttttacgacaatccaaagggagctttgttcaagctgacgcaaagaggaacagtgaacgaatacctaaccgaaatcgaacgtcttgcataccgcgtggtaggccttccacctccatttctcttaaggtgttttatctctgggttgtgcctagacggtcatcgcgaagggatggcgcttaaa

SEQ ID NO: 212331 - DNA, 309 bp, Glycine max
gtgtcaacaacaatctaaaagctagtttctgttgtggccaagttcaataactaggttcccaacatgaagggaaaatgattgttgagtctttgaattctacctaaaaagggttgtctggattgaatctcctctttataggcagataacatcattctaagttctagcctataatttgatgattcctagtcagagaaattcagactagcttctggatcaaccaataaaatatcttcagtctggaaggtcacgtcagactaagaatgatcttatggaagaacaacattagatgtgcatagaagacttataact

SEQ ID NO: 212332 - DNA, 413 bp, Glycine max
agcttatgataaaatctgggacttatccattttataagtctccacagaggccattgcctccctcggctagtattatgatcagccgttgaggtgcttcacctttggggacttccagctatcaccaatggtagaagaatttgaagagatcctacgatgccctcagggggaaggaaaccatacctcttctcagggttctatccctcattagctagaatttccaagatagtccaaatctcggcgtaggaattagaccacaggaagcaagtcgaaaatggggtggttggaataccgagaaaatatttggaggcaaaagcaagagtcttggcaagtaaaggtgagtgggccccgttcatagatattctcgcactgttaatctttggaggagtcctctttccgaatgtggatgggttggt

SEQ ID NO: 212333 - DNA, 394 bp, Glycine max
  unsure (1)..(394): unsure at all n locations
tgtccttctnctactgttttctctccaccctgccaaccaagtctttnttcactttctacaagttcctgtagcacccanacaactcatctctatccaatctggtgcgtagcaacttggaaaaggacaatgccaacctttggaagatagttggtggtttgacttcacagcttcagtgaaggcaacggtgacattagctaccttaagggacttcactctccagactgtgcgagcagcaaccctccatttggcaacctcagcctccaaggatgccaccttgtttggtgcctcttggtgcctatgtccattctcttttangatcatcaaacttcgttggaggaaaaccttggcagaatccatggcatgctggaccccagctgaccggataagtntttta

SEQ ID NO: 212334 - DNA, 400 bp, Glycine max
  unsure (1)..(400): unsure at all n locations
agcttcanacggccataacttttgctcctgttatcagaatgactattattatatatgtatttggggtagaaaaaaatttcccatgccgtggcagcctgccataggccggttgaggtctccttcttccaaaaatttcaattctataaaaaggttttttatgaaggactctgtaacatggagagaagtatgatagatgctgttagtggtggagcccttggagacatgacccctgctgaagccagaaatttaattgagaagatggcttccaactcccagcaatttagtgccagaagtgatgttattgtcattagaggagtgcatgaagtagctacaaattcatcctcatcaggagagactaagaagcttgaaggtaaactagatgccttggtaacctggtacc

SEQ ID NO: 212335 - DNA, 442 bp, Glycine max
  unsure (1)..(442): unsure at all n locations
tcctcggggccattcctgcgaagggcaaacattggaaagttaattntaccagtgggacactactcttaaagcaaaaatggcatataacctcctcccataaatacaaacatcaatgtaaatttagagcaagcttatgcgcatatttccttacgaacgttctcttgcacaagacattctattaactaagaaaaatgcacccatacacaatcaaggcagcttcgttacctagattatttacacgtacttccaaggtgtatttgttacttacatcaaacacatctccttggctaaatttacatacatgcatactgaaagcattttggggtaccaaaaattgcacatgtgcacatcttggtatttctaatacctatacatacacaaacttcatgatgaatcttgactatcttcacaaaaaggtgctacancttcatccttttttcaa

SEQ ID NO: 212336 - DNA, 353 bp, Glycine max
  unsure (1)..(353): unsure at all n locations
ttcaatagtgattctccaccaaggaagacaaaggagaagaggtgagaggaggcaccatccactatggaataagccatggaagaaggagcttcaccaccaagatgagccttatataagaagcttggagaggatgcttcaatggaggaaaagaaagagggagagaaagagagaggggggagaacgaaattgaaggaagaanaaaaggagaagaattgaactttgagttgtgtctcacaagactctcattcatcaaagntacaacaagtgttacacatgtntctatttatagactanagtagcttcttgagaagttttcttgagaaaacttccttgagaaagttctttgagaaaac

SEQ ID NO: 212337 - DNA, 375 bp, Glycine max
tcaccttctcgctaagccaatttgttggcctagcgagcatctgttaagcgcaacattcatgggctaagcgcgaggaataatccaaaagaagatgagctatacaggttcgctaagcgcaccgcttcatctctctaagcacactgcttcagttcatccgctaagcgagaaaggcgcactaagccaaaaatcactaacgtgcgctaagtgcatgagcccgaacaaggccacctatttaagcctgaaatcagattttgtgaaaggatgttggactgggattcagagctttgcatgtctagggttctagagagagaaaggtccatgttccaaagagttttgagagatattgctatgtgaagatctacagagacctgagca

SEQ ID NO: 212338 - DNA, 447 bp, Glycine max
  unsure (1)..(447): unsure at all n locations
tcattttcatatatgcatgngaatttntacgcatcaacaagaatcaagccaaggctattgtgcaagcagtcaatggggcaaaacataccaaatgattataatgatggatggctcaaattctcacaaaagtaaaatcatcactttcaaattgagctttcaaaactatcatgacatgtagagaagaatcaaggatttcaagtcacaaaatgtcaagaacttntattttcaaaacaattacccattntttgaacatatcctataatttaaagaanaacatgcatagtcgtacgtgcacacgaaattgacccanaatattaaactgataatccgacgatactaacaacattaacaaattaacacaactaacatattaacaaaaccaacanaactagcaaaccaaagacactcccccccatcttanacaccattgtctcatgtacacaataa

SEQ ID NO: 212339 - DNA, 390 bp, Glycine max
aacctcatcgtctctcacagtctttagatttgggagccaatccaatccttgtgttcggactctcagccacttatgatagccgccgatgatcccattacggcttcccctaagctctctatcctttcttcatgccgcatcccatgccttgcgaactccttggagtacctttgcattggggtcactaaaaccccgtgtaatgaaaggcgtgatgcttttgtctaatggcgctcctctcatggggtagccaagctttcctatggcgagaacgggattataattaatacaaccccttgttcccatcaagggaacatttggacatccttcgcatgaagatagaatcttgattcttccttccttctagcgagggaaccaattaacagacgcccccct

SEQ ID NO: 212340 - DNA, 464 bp, Glycine max
ctttgatactctgcttatgatgtgaatcagttgttcaagaaggtgtgatgatgactaagatgatgacaaaaagcccatagaatgatcaagattaagttcaagatcatgattaatttcaagtttcatcaagaagattcaagattcaagaattatcaagatcaagattcaagactcaacgattcaagaatcaagagaagacttaatcaagataagtattaagaagtttttcaaaacattgagtagcacaagaagtttttcccaaaatcattaccaaagagttttactctctggtaatcgattaccagattgtagtaatcgattaccaatggtttaaaatgttaagactttcaaaattcataatgaagagtcacatctgttgatgtgtaatcgattacaactttatggtaatcgattaccagtgactgtttttgaaatattcatttccaaatgtcacaattcttcaa

SEQ ID NO: 212341 - DNA, 446 bp, Glycine max
atttccttttagtagggaatctatccttcctaaggtggttcttaacccattccccctaattaagaactagctcctttcttcctctattgcctttatttgcatacacctttatttggttctctatttggttcttaaccttctcatgcaacttctttacaaactctgacctagattccccttctttatgtataaaagaagtgtcaagtgggaggggaattacgtctaagggtgttagaggattgaacccatatacaacctcaaaaggggattgcttggtggttctatgatcccccttgttgtaggaaaattctacatgaggaagatactcatccccagacttatggttgcctttcaaaagaacccttaaaagggtggatagagacctattcactacctttgcttgcccatcaatatgtggatggcaagtggtagagaaaagaagctca

SEQ ID NO: 212342 - DNA, 291 bp, Glycine max
cacaagagaaaacacattccctcaaatttctctcttgggcacaaacatgaagctatctgcgaaacccatttcgagtccaggtcgcacagacaagttccctcccccactcatgaggtttctcataagcaatgcgggcagcataagcagaatgtccaggtcaagccctatgttcgtacgaaagaaaaacaccaccttcgaaacccacacccaggaaccctcttcccccaaggtcacgtgcatgggccaggttcgagtcaaacgcgctttcatacatccaccacccaacccgac

SEQ ID NO: 212343 - DNA, 395 bp, Glycine max
  unsure (1)..(395): unsure at all n locations
gaaatatgacttcaatcccgtctactgcgcctttttcgactaatacgacagngacatcatcgtgccgttagctgtgttcattataatgccgcctcacgtgcgcacgatcatcgcatcgaaattcagcgcgtggcttcgctatggtctggaaagtccagcaatgggttctgtgccctcgctgatcatatgggacaccaacgagacgaagaatataagaagggtttgcggctgttggatacgatgtatgcgctggcgatggcaatgggaatgggaaatgcgaatcgcctggttttgatattcatcggtcaacggaaccgacgggcatgattgtttgttgccaattactaatatatactggaggactgcttcttttataaataatttatctgaacata

SEQ ID NO: 212344 - DNA, 432 bp, Glycine max
  unsure (1)..(432): unsure at all n locations
tgacccccgcgacatatctncaggtaccactctgtggtcaacaataaaagcaggaagtttcacccttcaacacttcctcatctcaagcttgtaggattatggggtacccatcacatgtggtactaggtggcggtcgggcgatggtgcacaacaagttttccacatccacaatgcgcgcataaacccaccatcccctgttgcccacctncaactgagctcacgtactcccacgtagcccatatcctcgtttctctcaacaccgggtccncatcaatcctcccaagcttccacaacatccaagcaaaacaacattcanacagcacaagctatcacagccaagcaaaacagagcagaggcagaanactctgctcaacacatcaaccaaaatcacagcttttctcacttaaagaccacagtaacaattnctttgat

SEQ ID NO: 212345 - DNA, 336 bp, Glycine max
tcttgacaaagatcaaaggactaaccgcttgagaattcttttgattcttccctttcccttaaacataagatttcaaaggactaaccgcctgagatatcctttgtttccccttacaaatattcaagggactaaccgccaaagaattctgtgtcttaacacattggagcgtacattcattgtggtacaagtagatagtacatctacttgggttgaatactgagaacagagaggtacatctcttgtggatcagtcaagtgggcatactacacttggttgtcaaagaaacaaggattgacatccttgggatcttgcttgaaaggtttacaaggtattgga

SEQ ID NO: 212346 - DNA, 392 bp, Glycine max
  unsure (1)..(392): unsure at all n locations
tgacgctgcagcttaaacaatttgtggtatcaattactttctctctataatcgaataaaatagagagtgttttcctctgaagaaatatttctaacttagaanaatttcttcacacacactatgatgatgcctaatgcaagacaaatatcaaatgtacttgtagacaaaggatcaagctgaatgttttgatgatgccaaaggatcacatgtttctcaaagctttattcaagacaaagaaatcaaagatattcaagatggatgatcaagacagtctctagagtcttaggaagagtatattaaataggaagggaattccaattgaagtagcaaaaggtttggccaagaaaattaagttaaaaagtgggtttcaagagatttactctctggtaatc

SEQ ID NO: 212347 - DNA, 271 bp, Glycine max
ttaatggatggagcactctctcacctcttttcctttgtcttacgctgcatctccatggtggaaaatcaccattaaaggaccccatttgagctcaaagatccagcctccataaaagccccacaagcaagcttccatcacgctaatgcgttggaccattaacgatctcttggggtggtcgacaaaagtggggcttttgctcctacatatccttaattgcaatgagaaaatcaaacctacgtatttcttgcagaagtggaaaagtacatgttga

SEQ ID NO: 212348 - DNA, 407 bp, Glycine max
  unsure (1)..(407): unsure at all n locations
tccattggtgagatttatgattaccttttcacgctttattttattcccaacaagtaagtacgtcattctttggtcctctatctttccattgatgtattttgatgcttcaaattgtatgtatttgcttgaatctgaaaccaattcatccttgaatttgtgcttgtttcataagattgatgggttgttaaggatggccctaagcctatggtgcattntgaaatgattgggcgtgacactttgcccccattccccaaattttcatgcctaaacatgcgcccaccaagtgctcgatgaaatgcctcaatggcatttgcgcatgggtttgagaatttttgcttaagatttgactcgtgcatatgtggctgccattatttgagtgttcggtagacttgtaggagctataatat

SEQ ID NO: 212349 - DNA, 421 bp, Glycine max
  unsure (1)..(421): unsure at all n locations
attggntggatgttgaattctggntgttcctggtgcggagatgatggtacagcgggtgaaccacgagcggcagtttcttttggtgaggaagccatggaaaaacagagcgtttggaatgatttcgtaaatctcagaatactattgggaaatgctggagaaaacacgaatgccaagcagatataaatttgaatgaagaatgtagaggggcgtgtgaagcaacggtcgaatttgctttgtggtgaacgtgctattaatgttaagtgattcgtttgggcacgttcagattgcagtagctgctataattcctctagcagacaaatgcccagcttgcccctcatgttttcaaactgatttgcatccaaagccttcgtgaaaatatcttgtattttgtcctcagtgtcaacatgcttcagtgtgatca

SEQ ID NO: 212350 - DNA, 467 bp, Glycine max
  unsure (1)..(467): unsure at all n locations
agcttgnctcatcttttatgcgagatggagtccaacatgctagctatcatcgccaagtaccaagaagagttaggtctagccatggcccacgagcatagaatcgcggacgagtatgctcaagtatacgcggaaaaagaggctagaggaagggtgatcgactctttacaccaagaggcaaccatgtggatggatcggtttgctcttaccttaaacgggagtcaagaacttccccgcttgttagccaaggccaaggcgatggcagacacctactccgcccncgaagagattcatgggcttctcggctattgtcagcatatgatagacttaatggcccacataattnagaaatcgtaggaaacttggatgggctctcagaccttgactagatacgactttctttntgaatannaatgagtggcccatgttctactcaaaagctgtgcaatanatactctacttcatcttac

SEQ ID NO: 212351 - DNA, 422 bp, Glycine max
tctatataagctgaaccgatttatcaataaacacaagttgtgttctattctgaaaattagagtttatctcttttatcttaatgagagtgattctcctaaattcttgagtgattcaagaacaccctggctgtatcaaatgactttcacaacctttgtgtgttgccctcgctggaaagagtgattctttccttcctttcatcttcacccttgttctttcaaaccacaattccagaaaatccacctctgcccagaattatctcgtggccataactcccattttacgcactcaaattaagtgattcttgagcctaaatggaatttcaaaacgagacctttcaccgcgttgtggaatcacctcatttggagccctgtagcttcaggtattgccatttctatatttctgtccaaccaccacttaacct

SEQ ID NO: 212352 - DNA, 195 bp, Glycine max
  unsure (1)..(195): unsure at all n locations
atttttacactataagttgttcatgattntaattacaaaacagattgaagataagttgttctaacaaatcagcttctatcacttctgcgcttgattttattttcctcccanatacatagatccatgtgtacgtacataataacttcatgaaacagagtgttagagttatccacatttgntaaactcgattaacac

SEQ ID NO: 212353 - DNA, 349 bp, Glycine max
tcagctgctgcaactataacccttcgatccatagccatgtttcttcaaagaaaacaaccatatatccatgttacatcatagcacaaaccagagccatattgaaagaactgtaacacaagtactagaagcacatctcttagcattcaaatgaatataaagaacatagttttcttaatccttaaaacatatatatatataccacatacctcatttccatgaaaattcacaaaagtcttgagctctgccctctttaaaagggcagcattgtctttacccaacatccaatcaagaacctgaaaatttacaatctccatcagtgtttttacattactaatcatacatttttttt

SEQ ID NO: 212354 - DNA, 449 bp, Glycine max
  unsure (1)..(449): unsure at all n locations
tatatatatggacttcttcaatcattatcttgtcattccaaatcatcataaatgggatcttttaagaaaataacaacgtattgcaaaaatttaaacattactatagtgtatcaatcaacggtagatcattactatacattcgctgtaggacatagaggtctttcaatttacattccagtaattcttttatgatcaatgggaatataacaaacatggagcaagtatagcagagagtggatatcaattccctagcgcttaatatgaccattgtcaattggctntttgagtattaaaataaggtattttaaaatacagcaatgtgtacagaggggaaacaatattaaaaaaaaaaggtggtgaagtttccttcagatatttcattcgggttgtntaacgttctcttaattaacagccaaaatgaatatagaagtcaagataataaagataaa

SEQ ID NO: 212355 - DNA, 343 bp, Glycine max
acctcataaagagagattgagagcggttgacgggttctgtgactacccctttgccaatatgactcgacttatgtttggtgccgaacgtcatcatccgacccaaattcaaggtatcagattttgacaggtacaaagggacgacttgtcctaaaaatcacttaaaaatgtactgccagaagatggggacgtactcgagggatgagaaattgctcatgcacttcttccaagacagcttggtcggagccgcaatcatttggtacaccaacttggaagcatctcgcgtccgctcgtggaaagacttgattgttgacttcataaggcaatatcaatataacactgacat

SEQ ID NO: 212356 - DNA, 374 bp, Glycine max
  unsure (1)..(374): unsure at all n locations
atcaagattaatatgaaaaaagattttctcaaaaaattgaataacacatgggatttttctcaaaaacatgtgtaccaaaagagttttttactctcttggtaatcgattaccagattgttgtaatcgattaccagtagcaaaatggatttgaaaaagttttcaaatgaatttacaacgttccaattgatttcaaaaagctgtaatcgattacaatgttttggtaatcgattaccagtgcctttgaacgttgaaattcanattcaaaagtgaagagtcagatcctttcacataaaagctttgtgtaatcgattacactgattnggtaatcgattaccagtgattggttctgaataaatcanaagatgtaactcttc

SEQ ID NO: 212357 - DNA, 342 bp, Glycine max
acagaccccttatttggttcttactccgccatggccatctaaaagacaccgccacaaccacaggcaccttcggttgggcatgctcaacatggactggtctatatagtcttggaaatttctagctaccatagtcttttgcgctatttctcacagcttgtgtggttgtgctctgtgtgtgttgtaaacattggcttgttgaacgatgatgatgcagaaggagggcacacttgaaagaagcaagacaaagggaaaggattgtcgtggtgaaatcaaagattcagatgaagaaccttgagactgttcatggagaaccaaaccatcatagaggagaatgagaagttg

SEQ ID NO: 212358 - DNA, 378 bp, Glycine max
tgaacagacaacacacgaggagaaatttgtctagccttcaaaaacaaggctagcacaatattagtcaacacaacagcgtaataggtaacacccacaaccccaagaaccattagtatcatgatcgaacctaatcctctcatggcagtgcagaacctaaacacgttccaagccatgcctgctccaaatctatacatattggagaaaaaaagaaaaaaatagaggaaccccaccacaatctaacgccaaaagattgttcctttaagcactgtgcggtgatcccagaaacggaacacgacaacagcaaccagtgacggaacaagcagaatcatcaatgttcccgaacgatgaaacacgcgaccggatatggcggtgctccaa

SEQ ID NO: 212359 - DNA, 403 bp, Glycine max
  unsure (1)..(403): unsure at all n locations
agcatgtctcgtatcgatntattctattacaaccttatctctatngattacatagntggttttgagacaacgactgatttattcaagagtctctgccttaatcgattaccacgtgatttaattgactacttctctttctataagtgtttcagaagtgaacaagaacactttaatcgattacatagatcttgagttgtttccatggtttgggaagaacactttaatcgattacttggagtatctaatcgattacattgatcttgagttgtttccatggtttgggaagaacattntaatcaattaaaaagataatctaatcaattacttcattggaataatcgattaccttgtagatnntaatcgatagaggaagcaaccctgctcgcctgggcgagctgagctc

SEQ ID NO: 212360 - DNA, 279 bp, Glycine max
atacccaattgtaaagatcttggagaggtggccctgaccaaaagtggtcattatgtcaacataacctctaatctctactcgctcccctactaagccgaggagttgatcagcgtgagattggatggtgttaagcaaaactttaatttagatggtcattaggtcaacatagcctataggtacccatcttgtatgagctcttctattttcaccttaatggcccaacaatctttggtgttgtgaccgatactgcaatggtatctggagtatttgggtgcatct

SEQ ID NO: 212361 - DNA, 373 bp, Glycine max
gacaagtggcctcagatatcttaagaaggccgggggttgaattaagatatttgaaactgtttcccctaattaaaaatctatttcactttttactcaaggtatgaattcccttaatgacaatcttcttaaatattaattcaaatgaaacaatttgaatatgaatataaagcaataataaataaaggagattaagggaagagaaaatgcaaactcattttttatactggttcggccacacccttgtgcctacgtccagtccccaagcaacccgcttgagagttccactatcttgtaaattccttttacaagttctaaacacacaaggacaatccttccttttgtgttagagatctttacacaagagactcacagc

SEQ ID NO: 212362 - DNA, 385 bp, Glycine max
tcatcagatgctgcatgtcggtatcatctgctcttattgaataacgatatgcacttcttgcattgtaaatgtgctttatcgtggtgcaactgttggcattgtgttccttcaacgttagcaagatgttttttggtttcaccattgactttgtcatatcaacaataattttcttttcatccttaatcaatcgctcagcgtatggatgtccaattatggacttggccaattcatgattgtgaatcccatagatcaacttcaccatccaaccttcccctccatgcactggtttcccacgatacctgaatggacaaccacatttcctactcccaatgtcttttctaaccaattctgtattcctacacttgtacgtaccactcctttcaca

SEQ ID NO: 212363 - DNA, 350 bp, Glycine max
ataatgactcctctacggcttccacataaggcatagaggatgggcagctcaccaagatgtcttccttgcctgatacgatgaccagatgcccttccactacgaatttcaacttttggtggagtgttgaaggaacaactcctactgagtggatccacggacgccccaacagacagctgtagggggggttaatatccattatttggaaggtaacttgataggtgtgagggcctatctgtactgggagatcgatctctcccctaacctctcggcgggtgccgtcgatggcatgaaccaccattgaactcggctttaagtgggaagcaatgaatggtaatttctccaaagtgctc

SEQ ID NO: 212364 - DNA, 314 bp, Glycine max
  unsure (1)..(314): unsure at all n locations
ctaagcttttaccaatctactccgaacaaagctttttttgtgtcaatttaaacaaattaaatctcaccaggtacttgtacgggaaacaaagcctttgggtggagacaagatttgagggtttcatgcttctatgtgaanggatttgaaggattcgaaggcttcgtgtttgttcagctatatttcaatcttcattctttgtttagtctcttcagttatatttcaataaaacttgttttgagtaggtgattcatacctcgttgttggtgctgatgttgtgtgaacgaagataaagtctgccttcaaaaatattattc

SEQ ID NO: 212365 - DNA, 407 bp, Glycine max
  unsure (1)..(407): unsure at all n locations
agcttncatcacttagtctatggnnnnntcttctccatatattatgaacaaaatttattggaggaggtttattttaataccaacgaaggtccctatccatccagggtggagtatatagtttttctagacatatattaggttcataaacatgttttgtgatgagtgacaaggatgttgtaaagatggttttttataagctatttcttgaaaagtaattgacctacgatatagtttatcattgagtaatataacacctatgatgaatgattgctatttttgacaggggtctgtgaatatttgtagttngcattntgcaacatatgagtatctttagtcctctcaatgaatatttatatactntatacacatggctagcatctgattnntatggcccttgttctctctta

SEQ ID NO: 212366 - DNA, 420 bp, Glycine max
  unsure (1)..(420): unsure at all n locations
tctgctaatgtggcacggcgaaacctctttggctggctgtcccaaccgcggaccttcgcctttgttcttccttcccgaaatgtttttccttacgtcagcctgcgttggtttatagcctaacccatatttcccgtggtttcctttgacacttactatgtcggccctgtcgctgttgttcttgcccaaacccattctgggctcgtagtcgtgccctatcatcacctgagccaccatcattgtcgcaccatacaggcggngctgcctatggagggaatctacggaagcgatgcttactacctcaaaagattggaaattcgtttccaacgactcctccgcagcttccacatacggcatagaggaagaacaacttaccaagacatcttcctcacctgatactatgaccaaatgtccatgcactac

SEQ ID NO: 212367 - DNA, 457 bp, Glycine max
  unsure (1)..(457): unsure at all n locations
acgtgacacttagatactaagctgaatcctaacaatatgttgggattgttttgttttcttttcacaggcaatccatgtcagccttattatccgcaaattaaaaatgaggtaccaagttagtccttgaatttctatatattttatcttattggtattttagtctttgaaattaaaaaaaaattcaaataagtctctaaaatttttttcggacgtcatttaagttactaaagttaacttttttttttcattgtgttcctactccagggtttaagtcataataaaaacatgtgttaaggacccaaatgcaaaaagtgattaatttcatagacttaaataaaatcctaatttgacagattgatttgaattttttttaattttaaaaactaaaatgacatgatcaagatacannattagggattataatatatatttactcacaaaattaactcaactaaat

SEQ ID NO: 212368 - DNA, 335 bp, Glycine max
  unsure (1)..(335): unsure at all n locations
aggttaatagcgtaatttataaacgactcttactattttctaaaataattgattattttaaatataaaactaactgcaataagtattttaattgatattgtgtgtcagaattcanaatttaacaatcaccctaaaaaaataggattgggaaagttacatctcatcattcatttatcttttaaaaatatctctatttgaatagacatccaattcaaataaagggattgttttatcatccaaagtctaaagaaaaacctttcaaattgaatatacgacccactagatagaaattaattatctatatacgattatttaatttatacaaattattggta

SEQ ID NO: 212369 - DNA, 396 bp, Glycine max
  unsure (1)..(396): unsure at all n locations
tttcgattcattctatgtacccgtagtggtccacattgtgtttcgtgcattnttattctcgtttgtttactttttataccccctgttgacgtgcttaagccattttacttaaatcatttctcgcttaacttaaaaataaaataaatttccaccgaacgtttgaattgtattatccattaacttcggttaaaataaattccgaccgttcggtcgtgccgtaaccacgttggaaatcaaaaagaggtaaaaaataatataataatcaaaaagacatcttttagtagaataaagcggaaaatcaatcggacgttgtctctttgggatttctcattcttaatcgaattgattaataactaaagtgaaactaaaggctaaaatcaattcgcctagtcaagc

SEQ ID NO: 212370 - DNA, 176 bp, Glycine max
gcatgatgacgctgactctataatgatatacaagatgcttactgattagcgtacggagcttctggtgaaagatgacatttattgaaggcaactagcgaatattgagcggctaccagaatgatattctcactccacatctttcattacaagacttctgttgagaaagacaactattt

SEQ ID NO: 212371 - DNA, 372 bp, Glycine max
acgacaataacttgtatctcagaattccgaatgaattccgtagtatatctaaacgctcgaaattcagaacaaaagctctgagcaaattcaaacgataataactttttactcgtatgtccgattgtttcccgtattatatcgagaccctcgtaattgataccagaagcccgtatcatactcaaacggcaataaattttaactcggatgtccgaatgaatcccatgatatatcgaggcgatcgtaattgaaaacagaagctatgagcatattcaaatgacaataactttttactcggatgtcggattgagtcccgtaatatatcgagacgctcgtaattgaaaacagaagctctaagcatattctaacgacaat

SEQ ID NO: 212372 - DNA, 242 bp, Glycine max
tattaattttatttatgtccaccttgtttctgttatgttgtggatgcttaagataggtgcatgattgttaatttgataagatgtttctagaggtctatggatcctctgttgggaacgctggcattattatgtggatcacttgtcttcttattgaagaaaatgcataggttgagattccttcgtcatttacgcaagttggtccacttccttgaattctagaacttattagttttcaataataa

SEQ ID NO: 212373 - DNA, 341 bp, Glycine max
aaaaattatttgatcctgaagggccggagctgaatccgcaaaagataatgggaaaatggattccaaaattaatgaggattaatttaaaaatcaaggtttgcgggttgtggcacggctcaatagagatcttagtgatgtaaaaaaaacagcaggaatggattcagatgtcttgagcaactatctttcaaaacttgtaacaggccttgataaagtgcgattggtttgcaatatgaaaagccatatttgcaggcaatttcctttactccacaaagcttttctgaaattgctgaaatgaaattgtaggattaagcagatgtagaaaaccctgaccttgtaaaaag

SEQ ID NO: 212374 - DNA, 493 bp, Glycine max
  unsure (1)..(493): unsure at all n locations
gcttagtaaagctaggcactaacaatctccttctttggcaaattntgtctaaaacatacttagacacttcctgagcaggtacgagcagttatgcaagtgggatcagcaactttcattatcagagtaatcaagcacagcggaaattctgcaaggtgcaagtcgtttccaggatgtcaagacatctcacatgacatcagctttctgcttctgctccccctgtctccatgctcttactgcagcatcttctatcagctactagtcttttccaggatgtcaagacatctcatgtgacatcagctttcccttgtctccatgctcttactgcagcatcttctatcagctactattagcttacatcagtcatcatcagcagcagcagtctccccctcanaatcatgtacatacnaactccnnctcaaatcatgaatcatgcatacatcgtatcctacttctctaaatcataagtcatgcataatactactactgcatacac

SEQ ID NO: 212375 - DNA, 421 bp, Glycine max
  unsure (1)..(421): unsure at all n locations
gcactgtcatggatattctcatggcaatatcgttacagcatgactgaaaagacataccaatatccatcactacaaatgcacgcattcgtaaaatggtgggcataatttcactcatccaaagcggatccagaacaagttaaactctggttccaatcccatccagaattcctcaaagcagctgatccagatacttctgtgtttttgaaccaaaagtctcatctggcagcatttttagcaggatcgacatcaaaggaggtcttagctaaaaatctgaaggaatttctacaaatgttacagcaggaagaagaagcttcatcctcaaagaaggaagaaacaagttctgctgaagaagaagaagaagatcccttttaccaaaacgaagatgattgttgtggtatctggttagattaannattaattc

SEQ ID NO: 212376 - DNA, 406 bp, Glycine max
aacagagatgatcgtgatatatagagagagttattgagagacctatgagtgagaggaagaaaagattgtaatggacagaaagaaaaacatatttttcgatggaggtggtagctcgtcacgtcaaggtgtgttgagagggagagagagatacagagagtgagcattgtgaggtacaatgttttgtacagagtgaggaattttaattcctttgtttttgctaagaatatgaaattctgtcaagttagtatattaaaatgctttacaaaaatgataacatagcatccaaacatagcataagagtattgcttctaatgtgaagttgtcaactaagatctctccataagctaagaaggcaatattacttgtaagctacacatatagtgatagagataaatcactttcaagt

SEQ ID NO: 212377 - DNA, 409 bp, Glycine max
cctacattcctatacacgaaaaactttttccgtatacacacatattaaaaactctgtctctttatatcaacacggtctatataaaaactctattcctggtcaaagatttctttttcgttttcccacatacactcgtggtttatacaaaaattctttatatacacccattactcacacacaagaatttcttttcacaccttatttacacatacacaaaatctttccatacatttatttacatataaaaaacactgttcttttctttatatatagacacgacatttgttcacaacgcctctttctttttttctattcttggcgttatcatgctttttgttcgttttatttttaagacgacgttcctaaaggaaaactctacaaggctctgggatttcaacaaacattatcg

SEQ ID NO: 212378 - DNA, 420 bp, Glycine max
  unsure (1)..(420): unsure at all n locations
cttcttttaaaccaaagattcaagctctgtccataactcatacacattgatataaggtgatacattgctcgaacttttcttcgatcattatacttacaaatcatagttatagcattccattaaggagctctcattcattgtccttcttcccctccagcttattctcgtgggtgattgactcatgcaaattcctgcagtacaaatggttttccatcatcgacttctaataggaataatnnttatgcgctagctngaacatatctctatcatgaatcgcacaagataatagctccccccanaccaggcgagctatgataccactggtgggaaacaatntcccttctcatanactcanaataggaactttagcggaacgggaaaaaaacaagaatagagagtagaaaatgacctaagaagttc

SEQ ID NO: 212379 - DNA, 224 bp, Glycine max
  unsure (1)..(224): unsure at all n locations
aggaacttaaattctgaaatttatattgatagtgtgaatcagggccaatgctttttggggacttttcttagtttcactataaggtcattgtcacacacgcattttctttaacaaacatgtcatngcatggtatcttctcaatattggaaaatataatgtggatttatatctttgtactcaaggtagcattatgtttaaaataatctttttttctgattttgaaa

SEQ ID NO: 212380 - DNA, 416 bp, Glycine max
  unsure (1)..(416): unsure at all n locations
tcttaanatctcttactccttgctcaagtgattggtccatctatgttgaactcactcaagccaaactcttcctccttggatagtcctctaccattcatgtaacttacttccaacacttctaacatttgttacacgggtgaatgatcgtaccagacaatatcaatgcaaagctctttggttcatcataccttcctaatatctattgtctaaacttgtaaacaggtataaactgtcttcccaatatcacagggatcaagtaaaattttattataaattaaaggggcacgagagtatagtttcctttaagaaatatatgtcatgcaatacacatttatcanataaagtttcaagaatgatattattgttataatcatttgtgtgagaataatatataccatctgtagtaattattttca

SEQ ID NO: 212381 - DNA, 448 bp, Glycine max
tctaagcttgtggtgttgaagctcaatggatgcttgttatacactattgttttcacttggcctaagtatgtctatgcctatgcctgattggagatattattctttgttttagattacaagaagtttaaatcgagatttaagattgagatcatatatatgatttgtgatgatttttaatctctagtttgtcaaaatatatgtatggcattctgttgaaagcacatctatgtgtctcctttcacaaaatataataaaatgcgaacaactcttttgaatagtaatttgaagccctgtgccgggttaaaaaatgttctgaaggattattttcttagatcaccatttttggtaagtttcaattggcgcgcctgaatgaaatgcagatctgtaattgaagttcgtgatgggttgacatttctagatctaattgtcatccaaattgaggttattc

SEQ ID NO: 212382 - DNA, 436 bp, Glycine max
  unsure (1)..(436): unsure at all n locations
agctnggaatatagcttgagttatggagtcttatgtggcagttgtaatgacccgcctcatcgctacgatatcactactctaaaccacataaatttcaattnttaaatganaactccgttaatttgcttatgaaaaacgtgagtaatatttntgcgatttacattggccaaacaacacacaaatacttaaatgaatatatgtatagatntattaactcagtacacatcattcacatgatgaaagggaaatttgttcatacatataattaaatctataatttacatcctcaattcaaaaagaattatagaaccaactacaaaggagtgggtaacaaaacacatatctctccaaaataatcccaacgtcatcacgtcggcttggcggctcaacaaaagaacctcactccacataatttactggtgccatctactcccat

SEQ ID NO: 212383 - DNA, 402 bp, Glycine max
  unsure (1)..(402): unsure at all n locations
ntggtaaatgctgtagactgtttaaccagcaaagaagaagatgatctaatggcttgcttggaagacttggatcaagaagacaacactattgaaggaggaaccagcttcaaggaactaaagagcaagaagacttggatctaaaggctgggcttatctaccccatctctgatagcgcttgggtaatcccagtataggtggtgccgaagaaagggggaatgaagtcatctggaatgagaagaatgatttgataccaacatggactgtcactggatggcgaatgtgcattgactaccacaagcttaatgaagccacaagaaatgaccattttcctttgcccttcatggatcagatgttggaaaggcttgcaggtcaagcatactactgctttttggatggatactc

SEQ ID NO: 212384 - DNA, 473 bp, Glycine max
  unsure (1)..(473): unsure at all n locations
atcctcttagtcacctgatgcatgcaagctgcatctttataatcagaggctatttttttaataaacgggggtaagaaaaattcaccacattgatagagaaaaatctaaaatcatacatcttatgcgaataaggcatgctatcccccaacattattgcattttgattccatctttacacattcaaattgttgtttatttttcctgttatcttttcctttgccttagtctaaacttcaaacttacaaatcangatctctttcttcttttggttctcctcatttcttaataattggatttgcatcacttaagtacaaccaaagtccctctggattaattgtnaacttcaattcaatcttactacttgtgataaataagacacttgtaatctattacaagttttgggcgtgtgatgggactttggtttcgacttggttgtacanatcccaatttagaacaatcattctttttttatc

SEQ ID NO: 212385 - DNA, 304 bp, Glycine max
tcttacatgattatttaaagcttaatcgtgcataaatgtgtttacaatgtatgtgtcctttggcatagtgatgttctaagaatattcttgacccagctgaattaatactgaaaacgttcaacacactattcgatatgaagacactcttagtgtattgctatatctgctgattatcctaatatgatgcaaagctgactcaatgatgactatctccatattaaagatttttagtcttgtgatatggaaggttcttgcttaaaaaaattcagaaactcaaagatttattaccctaatatcctggttc

SEQ ID NO: 212386 - DNA, 395 bp, Glycine max
  unsure (1)..(395): unsure at all n locations
gtcatctttattntcgatgtctnttcttccgtctntaacgcgcttttaccgcttatttaagccgttttctcatctaaataatgataaaatgaatttcaaccgatcatttgtgttgtaatctcatttaatcacttttaaaatgaaatctaaccgatcgttcacgctataacctcggttaaaccaaaaaaagtaaaataataataaaataatcaaaatatcttgaaaaataataataaaataatcaaaatatctgtgaataaaataaattaaaaaaatcaatcggaccgttttctttggaagtttccttgaatgaattgattaataaccaaagtgaaactaagactaatatagactcacaaatcaagttgtgtncgaaaatcactaaaaacccgttt

SEQ ID NO: 212387 - DNA, 417 bp, Glycine max
ccttgtatgtcagtgcatattaatgtgataatacatggatatatttgcctcctcatctgtcattaagatgccaactacataactcaacgagatccatcattccaccttgcaactatataaacataatactgatgcttataataacaaatgtattggcttttggcacattattccctttgcgcatggatgaagccattcgtttgttgaactttcaatctgatttccaaagcatgccattctttttcttaaaatcatatgatctactataaattctgacataacttatgatgcatgacagaatgctcgtattctctggagtatgatcctcacaaaggctgccggactagcaaggatcattgaagctagatgacgggacttacacttcagttctggtgaatacatgtgctcactccaacc

SEQ ID NO: 212388 - DNA, 372 bp, Glycine max
  unsure (1)..(372): unsure at all n locations
cacaacaatgtttttccacatccacaatgcgcgcataaacccaccatcccctgttacccacctccaactgagctcacgtactcccacgtagcccatatcctcgtttctctcaacaccgggtccccatcaatcctcccaagcttccccaacatcaaagtaatacaacattcaaacagcacaaactatcacagccaagaaaacagagcagaggcagaaaactctgccaaaacaccaaccaaaatcacaactnttctcacttaaagaccccagtaacaattccttcgttccaattcgttaaccggtggatcgactccaaattttactggaagtctctagtacataagcctacattttgaccggtgggatctacta

SEQ ID NO: 212389 - DNA, 438 bp, Glycine max
  unsure (1)..(438): unsure at all n locations
gctggtttatgcaatagcaccccacctaacgtgcccaatgtctgctgacccccgcgacatatctccaggtaccactctgtggtcaacaaataatagtatgaagactgactcttccacactttctcacttcaagcttgtaagattatggggtacccgtcatatgtggtactaggtggcgattgggcgatggtgcaaatcaactctcccacatccacaaatcaaacatgaacccaccatccacagttgcccaccttcaactgagctcatgtacccccacctagcccttatcctcgttcctctcaacaccgggtccccatcaacccctccaagcttncacaacatccaagcaattcaatatccaaacatcatgaactatccaaaaccaagataacagggcagatgcagaaaactctgcccaaaacacattccaataccaca

SEQ ID NO: 212390 - DNA, 236 bp, Glycine max
gagaagacttgatcaagataagtattataaaggttttcaaaacattgagagcacaagaagttgtcacaaaatcattacaaaagagttgtactctctggtgatcgattaccagaatatagtaatcgattaccagtgtttaaaatgttagattttaaaatcaaatgagagcacattgtgatggtatcgatacacctatgtatcgatacaggctgtttgaaaatctttcaaagtccatc

SEQ ID NO: 212391 - DNA, 472 bp, Glycine max
  unsure (1)..(472): unsure at all n locations
gcttcttatgtgctactcctataacacatgttatattcataatcaggtttcttcctacatgatacttaccaataatacaaatggtgattnttcctttcttagcaagagattagaaccaagagctctaccgagctctaatcctttatcgagctaaccacgaagtggtggccagtcaaaactttacccaaaacatcataactgtccacgatttttgttgcgtaatacatggcgacccttctcattaagaaataaaaaatttgtgccactgataatacgacactatcttcacgtaattataattttaaaacacaataattaacagaaatgatacacaagataacataaatatgtgccaactgtatcatggctctaacgacttgaaaggttatacctttatttgctcacaaggggaggaatatgaaagaatacactactcccttgcatgactcatctctatagcataaacaccatg

SEQ ID NO: 212392 - DNA, 415 bp, Glycine max
acatgtagatatgtgcattattaatactaaaagctctaaagactctttctttatgaaaacattgaatatgtggagagatttgtgactcaagtcaccatgtactatatgagcataaaaagcttctgtactgacaaaaaatgaaacgtctgtattatacttagcatagcatcaacataataacatataactttctaaagagttgatatccacttcaacttcacagcattgactcgatagaagcattttctcctttatagggctccacccattcacaatatttgatataatctcccaagagtacactgcttcttatttcactgcatataggagctgaatccatctactatcaattgaagcatcaattattgctacttaatgttatacagaaagtctaatatataagacgaacccttca

SEQ ID NO: 212393 - DNA, 355 bp, Glycine max
  unsure (1)..(355): unsure at all n locations
gagagnggatgagagcatgaaattaagaatatggagcacaagagacatgaagatgcaattcataattattggaaaaaattgaagtttctcattgagtataaataattcaaaaataatgtatataaatgggtaaaggagactttaggggattttcactctatgaattaattntgaagctgatttagatccaaatcgtntttaagttatctattatattgntcacatatcaaacttacaatccaatataatatgaggaacctattatgaaanattaaatttcacgttaactaaagataataccaataatcaaagtaatatatacaagtagaaaataactcttatcatattaacttat

SEQ ID NO: 212394 - DNA, 444 bp, Glycine max
  unsure (1)..(444): unsure at all n locations
ntcatttccattgatggattctgtgtgttttctcatgtggtctcccaatgcctgacccanagagaatcccaagccacaaattgagcactcgtgtatgttgggtttacccacagataaatcctcaagtttaagcctcttgtggctagccctgtgaccacccaacgcttgaaacgacgagaatttgcggttacaggtcttgcactcgaatgcttcttgggttggacttttttggacattgatatctcctgctaattcagagaacattttcatgcacacttccataactgtgctctctgcttcttcattttctatccgtctcttcatggctatatatatatggatgacaattaattgggcacacgatcgatgatctcaatttgggtgaaataagatgagaatcagattgagttgagtgaaatgtactactggccaaaagatattata

SEQ ID NO: 212395 - DNA, 337 bp, Glycine max
  unsure (1)..(337): unsure at all n locations
tctcataatctgccttatgaaaattaaagntnttgaattcatgcatttcatataattcgtctggaggtgcttgaacatctgctccacatgttagggtgaaattgagttggcatccaccaaatggattacttggatccaccagtgaatatccataaaggcatgtgcaagtaggcctctgattttccatggagcagtanctattatacccacaacaaccgctaccatactgattgactgcttcgcaaatgttaccaggaacatacctgatgattctccaccctggctgggcaatagtactgttcctccgataagcatactgcgtgaaaactccagtgaa

SEQ ID NO: 212396 - DNA, 373 bp, Glycine max
ccacacttttttatgttactttgttcagatgcttgtttatgctcttgaaaagtctccgtttttcatttattttaatggaattttcagttgaacgctaggaataaatctgcagccgcagaatgctatacaagaacaaaggtttgtctggaaggtagtacttgatgcactgctatttgccagtacaaactctcacaggggcaatatatttaacttcttattttcctgggaaggattatattatggatttagctctagtggttgctataagtattttagaaagagaattggcataatttaaaggaatattggttgtgtgaactggcattaattcaataaaaacatttgaagaaaaatactaaattcgatcacattt

SEQ ID NO: 212397 - DNA, 300 bp, Glycine max
tcgcaaaaaaaatagttgtaaaacttttggtgctcaaagaattgtatcacaactttctgttaaaacaatattcaatcaatcacccgaacatagtacccttttggtaaagtgcatcaatttgaaatatctttgaaacttatcaaatttataaagaatgcaatagagagatgagagttaaggagaagatagagaacaagatttatactagtccactctctatttctagagaagctaatccagttatctaattcaacccgaattagattttcactatgcaatgtgagtgttacaagcaatcat

SEQ ID NO: 212398 - DNA, 404 bp, Glycine max
  unsure (1)..(404): unsure at all n locations
ntacgattgctcanatntanggataagagtagtaaatgatgtagtgatacctttangcaatgatgcactgccatgaaattcctgaatgccttcacaaatatcagctcccatcgtgctccaacaagctttgaaaaaatcgaagttgaagctgtatggtccaaggcttttgtctccagcacagcttcaaacaattgctttgatctcttcacaagaaaatggagcttctaaccaattactatcctcattgcttatctgtttgaaatccaccctttccatctggggtcgtgaaacatagttctcctaaagcatgttagaaaagaagcgtttaacttcttccttaacccctaccacatcttcaatataactgcatcagaattaacgcactttagtttattcttctgaca

SEQ ID NO: 212399 - DNA, 414 bp, Glycine max
  unsure (1)..(414): unsure at all n locations
ctgcacgcatgcaagctnntgttcattctacatacacaaagtattcttactgctcaaagctctntatgtctagaaacacgcctccaggtcttggtttcacaaactcagtttgactntgaggtccttgggatttaattcagccaagagtgatacttctcttttcatgtgatttacacctacctctaaaacctatgtgttggtgtatgttgatgatataatcttcaccaactcttcttcttttgaaatcacctctcttattgctcatcttaacaagttttctttgaaggacttangtcctctaaatctcagccaactcccatggtttctggtttaaagcttactattgatggttctttttcagttcaggatcctactcactatcgaagcgttgtcggagctcttcaatacatcact

SEQ ID NO: 212400 - DNA, 434 bp, Glycine max
gtgtagaatggccagacatgatacatgtcagggtttggtttggttcaagggtaaaagggatgccccacattatttccatgacacaaatgcaaaaatgatgatttggaaactttatgcaaaactggtcatgcatgcacctatgtggacactcaagtgtcaaaattttatggtcatgtgatgctagggctcaagattcattccctctattttattcaacccaatgtttccaaaatatgttgttttatccatttgtgctttcatccgagtccattttgggcgtgcggggaaatttcatagcgttcacccttcgggtgtacacacacattgtttccaaaaactaactatgatcagcgaatgtttctttaataaatagatggaagtcattcttttacaaacatgtggttttcagctagacacttattttcttttttttc

SEQ ID NO: 212401 - DNA, 392 bp, Glycine max
  unsure (1)..(392): unsure at all n locations
agcttgctgctttatctcttanacctctttctatttggctgaatagttcatctaagcgcacatcactacgctaagcccaacatctttactggaagtaaacttcaagcagtgggcttagtggagatgattgttagtcaatgaatacgactaacttttgtgtaagaaatctgtgaaaattgtatctaactcctcccatttatggttatttggtagtgttgtaattaccttttgttaaatataggtaataagtacttagtactcccattntgtgtatataataatcatttcctttcaatttcaggttaattaagcaagtttgtgaagtgctgattttgatatgctcgctaagccaatctgtcggcttagcgagccatcccctgagcgcaccacat

SEQ ID NO: 212402 - DNA, 445 bp, Glycine max
tctcttggaccttgagcaagcagctaactcctctgttaagaccatgctatgcgctcgtgattggtctctctcttcccttcgaagcttgagctcactattactgcccacatagctccacggaatttgtctcggccatgttcttccttgcgagccctcttggtttcttgttcaaaggctcttgcggtagccgtattttcttctcgtaactcggcacactctttccggatgtctgtagcgactaacttgaatctttctttggcaagcctagcttttcctaattcggttgttagagctcgaacttcttcatcctcttacggagcttcgaagctctcttctttgataatcttcaacttggagagccaatctaacactcgttaccaactttagccattcatgataccaccgatgatgcattacggatgcccctaattcttatctttctaac

SEQ ID NO: 212403 - DNA, 413 bp, Glycine max
  unsure (1)..(413): unsure at all n locations
tgttgatttacttgagacaaactatatgctcaactgactttttttactntaattctaaatagcaatgaaaagatatattataaacctgtttcacaaaaagcttcctcaaaatggaggctacttcaatctagtacggtagttgacttacaaattaatgagactgactactgatttcataaaaagatctatgaaaatgaggagtaacaaatgtatggtaaagcttctaagagtagaatatgttactatgtcttacaagtaaaaaatatttatgtttaaaagatgaattatgattcataattattctaattacatataaataataaaagttatatataatatattattggatcactaattataattttatgtttgcattttcagtcaatacatttataaaacaatttatcataata

SEQ ID NO: 212404 - DNA, 410 bp, Glycine max
  unsure (1)..(410): unsure at all n locations
ggacctatgaaactaagctatcattaagaatttatagactgttttgtgaatttcacattctacccatagatcatgtttactctttttcaagttctcataatctttgtgagcttgtgcacattctttccaaaaatcatacctttctctcgttaggcgatcttgaagttcattgagttcttttaacttcttttttttgtagaactcaaattttactttcctaaatgtgaaagtcattcattaaagtatctcattctttggaaaaaaaatttcattttccagaaaaatttcctttttcatggtttcataagcttcattgttntgagtaactttttggcaaaagactaatatatgtagaatgatggacgtcttttagttcagaatgatctttagacagtttcttaaactctttt

SEQ ID NO: 212405 - DNA, 380 bp, Glycine max
  unsure (1)..(380): unsure at all n locations
gggggagcacgaaattgaaggaataatttagggagagaagtggaactttgaagtgtatctcataggactttcattcatcaaagntacaacaagtgttacacatgcttctatttatagactangtagcttccttgagaagctttcttgagaaaactttcttgagaagcttctttgagaaaacttccttgagaagctagagcttagctacacacactccctataatagctaagctcaccctcatgccaaaatacatgaaaatataaaaaaaagtccctaatacaaagactactcaaaatgccctgaaatacaaggctaaaaccctatactactagaatgtgcaaaatacaaggcctanaagaagggaaaatctattctaata

SEQ ID NO: 212406 - DNA, 418 bp, Glycine max
tcatgaaactatgtatttcctgaaatgaattcaataaatatgccttctatttttaatggagcgggttaccattactggaaaacccgtatgcaaatttttatagaagcaatagatttaaatgtttgggatgcaattgaagtatggccttatattcccaccatggttgctgggaatacaacaatagaaaagcctaaggatgattggagtgaggaagaaagaagacttgtacaatacaacttaaaagccaaaaacataattacatctgccctaggaatggatgaatactttagggtatcaaactgtataagtgcaaatgatatgtgggataccctacaagttacacatgatgccacaacagatgttaaaagatctatgataaacacattaactcataaatatgaactatttaggatgaatg

SEQ ID NO: 212407 - DNA, 363 bp, Glycine max
  unsure (1)..(363): unsure at all n locations
cccaggtgctgattaccaaaacctttttgacactattgntgatggtgaatatgggtccatacttatcaaccaaagcatccaaaaccttatggggtgtctctgaaccactcaatagtggtaggtgaccaagtattggccatgcacctgcaactgtgggagcctcttttttacctaatgcaaatttgaagggattatacaaaaacaaaaagaagagggttagagaaagaactccagtgacagtggcatttatgtaatttagagcacactccattttggagagagaaattatattgttattgaggggctgttctacaagatgtgtgatcatctcaatagatattcattgtaatagacattcattgt

SEQ ID NO: 212408 - DNA, 399 bp, Glycine max
  unsure (1)..(399): unsure at all n locations
accacaagatgtacagttgtagtccataaagtgaagagggaatagtcagagcaagattgacgaaatccataattcttcaatgcagtagaaagcttatcataccaacaccttggagcttgcctcaaaccatagagtgatttacgaagtttgcataccattcctttgtgttctgtcatgaaactgggaagtagtttcatgtacacatcttcttgaaggtcaccatgtaagaaagcattgtgaacatccatttgatgaagttcccatgctntatcagccgccacagccaacactatacgaacagtaaccatgtgttgcactggagcaaaagtttcagtgtagtctatcccttcaactcggtgatttccacaaatgactatgcctgctttgaatctctcaatg

SEQ ID NO: 212409 - DNA, 430 bp, Glycine max
  unsure (1)..(430): unsure at all n locations
aatgacaatagcatcttttctggaactaaattatggggaaggggaagccatcttctcaatagcatcattcacttctttgcacccccttttaactaaatacaccccccttttgtgttttttttttttgctgattcttttccgaaacgttatggattacgtaacgacacccattttctttccgaaatgttgcgaaactntacggattatgcaacaatgcctttttgacttccggaatgtcacaaaactttacggattacctaacgatgggtgttaagtaccttgaggcggtcaagcaaaggttgcatgccaccaaacaatggtccccggacgaaattaggatatgccagctactntccttgaatatgtcttatgattaacctcatcntaatgtattgtcacantttgtctcctctttgctagctgatattct

SEQ ID NO: 212410 - DNA, 324 bp, Glycine max
ataataatgataataataataataataataataataattattaaacacaacaaaaagaagaaatattttttttgaaaaaggttgcacaaaatgtgtcgaccaaacaagggaaggtgttaaaggattttcctactaactgaacctctttagtgtgtatagggatgcaagcatcagcatctcgaacttgctcaatacccatcttcaccagatcattgtccaaaaggacatggtacacagttgtcgacccctcataaacttttctataggaaccaggggggaggattgtcatcaacatacgacccatgcctatttgatgtatccatg

SEQ ID NO: 212411 - DNA, 410 bp, Glycine max
cagagagcaatgtacactaaatgtaataagaattttttcctgaaaaaaatgaatacgtgaggaacattcgagcacataatgttttcatcataatggcaaccaactgtgataaaagcatactcatagttctgatgttataataaaaactgaaacatattctccaaacctcaagaataattgctgtgtcgaaatgattattaaggaataacataacagatacagtgacttcatggctgtttttaacacattttattaacaattgatatacgatgctataaccatggccagctacaaaagatatttcttctgcagccagagataaatccatcgatttccaaccttaatgaataaatgtatattcatgaataagtgtcagtgtccattgtttcacttgacagctagataaaaaa

SEQ ID NO: 212412 - DNA, 421 bp, Glycine max
  unsure (1)..(421): unsure at all n locations
gcagctnttacgacacgttgggttctacaggcttgtcatatagnattcttattagacgncaaaccactcagcaatctggtgaacaaagatgatgtgtttgtgtttaatgaagaatgtgtggaagcattctatgatctcaagatcagactagtatctgctccagtgcttacagcaccagattgggggcaagagtttgaattaatgtgtgatgcgagtgactatgccataggtgctgtgcttggtcagagaanaggaaaaatctttcatgttatctattatgctagcaaagttttgaatgatgcacaggttaactatgctaccacttaaaaagaaatgctggcaatngtctatgcactnganaagttcatatcttggtgggatcaaaagtcatcatctacactgaccatgcagcaattaaata

SEQ ID NO: 212413 - DNA, 412 bp, Glycine max
  unsure (1)..(412): unsure at all n locations
catgttgttcgtgttgctccccctatctctaacaatcttctttcttttggctntgatgatgccaaacctgtacatggcattgaacgcattcggagggtccgagtcctaaaattaaaaacctgcttttcttattcaatcctaaaaactcttaacacttaagaaaagatcaattcatatcatcatcatcatcatcatatatcttagtatatatataaatggtgctaatgctgcaatataatgcagtgcagtatgctagttcatctcctaaatgcgtatgtaatacaatgcaagcaaatatgcaatatatgtagcaataataatcatattttcccttatgcaaatatgcaaatcatctcccctcttggcattaacaatgccaaaatgtttgaaatcattcataaaacaaaacata

SEQ ID NO: 212414 - DNA, 257 bp, Glycine max
  unsure (1)..(257): unsure at all n locations
ctcgagcttgacgtatattatattgctgcagaattacaagcttattagatgtcagctatcttcatataatattggataatggagtcaatgttgccaaataaatgcggttcataatctgtgcaggtcaagacattgccacacaaggattttaacaatgccagaaatatgttattatcacacgctacatggtccatttaataccttataccagattctgactgctatcacatgtataaagacaatgaanacttgccatg

SEQ ID NO: 212415 - DNA, 415 bp, Glycine max
  unsure (1)..(415): unsure at all n locations
tgagttggagagaagctcatgatatgttatctngaatagtttcaagggttgcattattgacctcctcttgtgattcataggttgatcattctgatgtactgtctgccatcacatagaggttggcttcttcttcctctttcgattcttcatcagatgatgtggtcgctatttcttgccatgtgcttattaatactttcttgtccttgacttgaattccctttttgggaattgacttatcaagatctatacattctgacttgaaatgtgcctggtttcttgcactcgtaacatatgttggatcgtttatacttgccttgcttttctatgtggtttctggatcctttcagtctatacacacctttctcccatcttcttgaatgaagcctgatatctttgctgagctttcattttggac

SEQ ID NO: 212416 - DNA, 281 bp, Glycine max
cgagagtttcgaggttaatttcgagcgcatcgatatattatatgcctgaatcggacatccgtgtgaaatgatatgaacatttgaatttctagagaggttccgatggttaatttcgaagggatcgatatattataaacctgaatcggaccttagtggaaaagttatgaccatttgaatttcacgagagcttctgttgttcaatctcgagtgtcactatttgtgatgcgccaaaattggacattcgagttaaatggtatgagcatttgaatttctcaagagct

SEQ ID NO: 212417 - DNA, 443 bp, Glycine max
tgtttaccccatgttgaatttgcttacaatagagctgttcatagcaccactaattgttctccttttgaagttgtttatggttttaacccactaactcctcttgatcttttgcctatgcctaatgtttctgtttttaagcataaagaaggtcaagcaaaggcggactatgtgaagaagcttcatgagagagtcaaagatcaaattgagaggaaaaataaaagctatgctaaacaagccaacaaagggagaaagaaggttgtcttcgaacccggagattgggtttgggtgcacatgagaaaagaaaggtttccggaacaaaggaaatcatagcttcaaccaaggtgagatggaccatttcaagtgcttgaaagaatcaatgacaatgcttacaaagttgagcttgccggtgagtataatgttaagttcaccttcaatgtctctga

SEQ ID NO: 212418 - DNA, 354 bp, Glycine max
  unsure (1)..(354): unsure at all n locations
agcttgtcaaatttctcccttatcgtacctttatttntagaaacacgaaattgaatcccaggttgatgccatgttgtagaaggggctcatccgacctagcactagccttttctcctcccctgtcctcttagtccaaaagcatgatgacacttgatgattgtgtgttgattatcacgccctatatgtgataaaaatcaaagattgttttccgataacaaccattgatgagctccttgatgaacttggcggtgccacttggtttttgaagctggatcttcttcaaggttatcaccaaattctgatgcatgaagatgacgtttgtaagacagctttntgcacacatcatggtcacta

SEQ ID NO: 212419 - DNA, 434 bp, Glycine max
gtgaagaaattcgaacccaagtcacctatttatatgcctttgttagcctttcaaaaacttgtaaatagttgtgacttttgggagttatttttaaaatttcctcactggtaatcaattacatagttagttttgaggagttatgactcttcatatttgaatttcaaaagtttgtgattggtaatcgattacacaagttgttgtaatcgattactggtttaaaatttaaattcaaaaactttatgaaagctgtttaaaatagttttgtctctggtaatcgattacaatctctttgtaattgattacacattcaaaaattcaaattcaattttttctaaaattgttaaaaacttattttagcttctggtaattgattacaacctctggtaatcgattaccagagagaataacatattttcaaaaacaaagttgtactt

SEQ ID NO: 212420 - DNA, 445 bp, Glycine max
  unsure (1)..(445): unsure at all n locations
gatgagaacaaagatgatgacaaacagctcacaagtcaagatcacttcatgataacaaagatgatgacattcaaaaatgagttcaagattgagtcaagaacacttcaaggatcaagaggaaatttgatttcaagaatcaagattcaagattcaagaataatcaagatcaagattcaagactcaaagattcaagaatcaagagaagacttaatccaaataagtattaaaaaagtgtttcaaaacattgagtagcacaataagttttcacaacatcattaccaaanagttctactctctagtaatcgactaccagattataagaatcaatcaccagtgggtntaaaacggtaagactctcacaattcaaaatgaagagtcacatctgttgatgtgtaatcgattacacccttatggtaatcgattaccaatgactggttttgaaaaa

SEQ ID NO: 212421 - DNA, 434 bp, Glycine max
  unsure (1)..(434): unsure at all n locations
tgattaccatctcacattagccatgtttctgttctggttttttncaaaattattcaacnatattaacaacttgtgtacatacttaacataatcctaatcttatgtcctctccattgaatatataaccctctttttctttgttctagccagctgttgtgtgataacactttatacctatattattctaaatattatatcatattaatcgctcctattatcctaattgtcttgatccgaaattggaaaaacaattttctctttgtttccttgccatacatatatgtctattttgtcataccactatatacctctattattgcgattattatattatattaatcgtttttctatgaacctaattgtctcaatcaaatttatacacaaatttggttgattttcctttcatacattatggctacttattcatgaatatt

SEQ ID NO: 212422 - DNA, 228 bp, Glycine max
tgatactctctggtgatctattaccaataagctgctatcgttttccaaaagctcaatgatcgaagccgctcccgtatcaaatatacatgaaaatgcagtaactaagaagtgatcctaagtcgtttcccaacgagcagtgacaaaccaaatgttcataatatactcgcagtaacagtaacgattgggtggggggctatgatatatacaaaataaatatttactcttgta

SEQ ID NO: 212423 - DNA, 204 bp, Glycine max
gtaaaaaaacctgataccgaacaacttaacttgcttataaaatcacagcgagcctggctggattttatggacaaagaatgtgaattaatcctttcacatgaggacgttcaggatttaagtgacccttattctgaatcagaatggctctcatgtatgatcatacagaccaatacgcgaactcgccagttgcagctataccgtaac

SEQ ID NO: 212424 - DNA, 327 bp, Glycine max
catctcaaacaaacaaatcttatgtaacaagacaattataggtgctgtttgaatacctcacccactcaagtgtatcacacaattatggcttttctctaatgaaacactcttgccttttaccactctaattccccttgagttcttatgcaattcaagagattatggccacaacaaagaacaattcaccaatatgtgtaagggaaggctagagagacaaggaataggttaaccaagaaaaaggctaacaatggttttaggcacaaatgaaggaaataaaattcagaatttaggaattcaagtaacaatccttcatgcaaccaatatatt

SEQ ID NO: 212425 - DNA, 377 bp, Glycine max
  unsure (1)..(377): unsure at all n locations
aattatgacaaaggtgatgacaaanagctcaaagatcaatcaaaggatgagttcaagatggaatcaagaacaattcaagactcaagaagaaaaagttgaagaacacttccaagattcaagaatcaagagaatacttaatcaagataagtatgaaaaggatttttcaaaaaactgagtagcacatggatttttcacaaaacatgtttaccaaagagttttactctctagtaatcgattaccagattgctgtaatcaattaccagtagcaaaattggtttgaaaaagntttaaaattgaatttacaacgttccaattaatttcaaaaaagctgtaatcgattacaatgttttggtaatcgattaccagtgcctttgaac

SEQ ID NO: 212426 - DNA, 409 bp, Glycine max
  unsure (1)..(409): unsure at all n locations
tctatatattgtaaatgaaattttgatcatcaagacaaaggggaaaataaatgagagcgaagaagaagaactagagcttaccttggttggatttgagacaatagcatttgctactagtgacttctcaagtgacaacatgcttgagcaatgtggttntggccctgtatacaaagtacgtatgcaactagtttctttgcaattaatagctaagaacatacaaagaacatagcctgaccttttctgtttgtcatttaccttctttgtaaatgtgaatttttaagggcacgttaccagacggacataatatngcagtcaaaatgctttcagatacatcggcacaatgattagatgaatttaagaacgatgttattattttgtcataacttcaacatcgaaatcttgtcaaagt

SEQ ID NO: 212427 - DNA, 443 bp, Glycine max
  unsure (1)..(443): unsure at all n locations
tgcgctcgcgactggtcccttttctcccttcgcaacttgagctcattattgctaccccatagggctccgcgaaatttgttccggccatactcttccttgcgagccctcttggtctctcgttcaagggctcttgcggtaattgcattctcttcccgtaacccggcacactccttccgaacgtgtgtagcagccaacttgaacttctccttggcgagttntgcctttcctaactctgctttgagagcttggacttcctcgtcctcttccggtgcttcanaattctcttcgctgacgacttttaactnggcgagccaatctaaacctcgtatgcgaaccttcagccattcgtggtacccaccaatgatgccattacgaatgcctctaagctcttgatctcttcttaacaggggttcccatgccttatggattctttgtatagtctt

SEQ ID NO: 212428 - DNA, 229 bp, Glycine max
  unsure (1)..(229): unsure at all n locations
ttctatggttcaaatttcttgttcttggtcttgaacatgaatngtgttgaatttaagttccttaaaattttgttttggtattttttgtggctgaaacctaaaccataaaatcttacaaaaacattaaagtagaaaaaacctcaaaatatagagtgacttgttcacctattgtagttntgtcatatgngtcatgtctagtcatgaaactcgtcacataagattccttatg

SEQ ID NO: 212429 - DNA, 462 bp, Glycine max
  unsure (1)..(462): unsure at all n locations
cttcacacaggcaagtgtttcatcttaatctcttatacaaatatgttattaatcaattgtgcaagtcatttcccatcaaatcaaggataatgtgcataatcatcatggatcaatatgactttnttagatcggacttgtaggaagttttggctttggttgctctggtctttccctttttttttggtgtaagtaggagagcacgcataaagatttggttagtaacttaaacgggcgatcacttcctatcccctcacgtcttgaccaagttactatcgattcccttcctttntactctntaccacaactctgtacatggtttaaacattgtttgttccaaagaacttgntnttcttttccatttcctcttgctcttctccattttgattgagatttcctcttctttttttcttttctttctctttnttcttttttttttttgaggttccttttcttttctttctt

SEQ ID NO: 212430 - DNA, 174 bp, Glycine max
ttaatatactaaaaatgtccatttattggtctttgtaatgatctatttaaagagtcatacactaagttatcatgattattttattaaaccttaagactattattatatgatgaaataagtagatttgattcttataaatcctaaccccatattttgtaccctggccttagggta

SEQ ID NO: 212431 - DNA, 475 bp, Glycine max
  unsure (1)..(475): unsure at all n locations
agcttctacttatgtggcagggcgggctttcttctctttcttgtctccttctcgagctttgaccactgttcttccttcccgcgatgcttcttttcatgtccgcctgagtgggcttatagcctataccatacttcccacgatttccttgggtatttatcaggctagttatgccgccgttgtctttgcctaaacccatcccgggttcataaccgttccccaacataactcgggccatcattactgctgcatcggatagacaaggttgcccagagagggagtccacggaggaaatgctgaccacctcaaaagactggagagcnggttctaacgattcttctgtggcttccacataaggcatagaggatgggcagcttaccaagatgtcttcctcgcctgacacgatgaccaagtgcccttccactatgaatttcaacttttggtggagcgtagagggcacactcccactgagtggatc

SEQ ID NO: 212432 - DNA, 424 bp, Glycine max
ctaagctgcttgggagctcatggggtgatcttgagcttcttgatatccttcaatggtgattttccaccatggagatgcagcggaagacaaaggagaagatgtgagaggatgcgccatccactatggaattagccatggaagaaggagcttcgccaccaagatgagccttggataagaagcttggagagaatgcttcaatggaggaaaagaaagagggagagaaagagagagggggggggggggcacgaaattgaaggaataaaagagggagagaagtggaactttgaagtatgtctcacaagactctcattcatcaaagttacaactagtgttacacatgcttctatttatatactatgtagattccttgagaagctttcttgataacacttccttgagaagcttctttgagaaaacttccttg

SEQ ID NO: 212433 - DNA, 354 bp, Glycine max
  unsure (1)..(354): unsure at all n locations
atgcttttttttattccaaacacacaagttttgagattgaattcctgatcggtcacaagtttaaataataagattttttgtcattcatatcatgttatataatcctaattctattntttttataagagggttagtcgtaacaacacttattttaacactntccttcttaaatactttctattattaagttaattattgaanactataaaataagaagtatattcactcattcaataaaaagtaaaactattaaatttttttataattttaataaaattcattagaaaaatgatattcaaagaattaaaaatgataacaatactttattctatagtgaattactgcaatagttat

SEQ ID NO: 212434 - DNA, 385 bp, Glycine max
  unsure (1)..(385): unsure at all n locations
tattataaaatataaatacacgcgtagatccagccataatatatgcagcaatantggaatcagaaagtttaaaactatatggatattagatgatataaacatatacatatacgctgatattttttggtatatagtttcaaaatataaacaatctgaagtaagggatacttctagctatagatatgaaggtccatgacatatgtacatcactgctgtattaacatatatgtgacaattgaaatgaatgtcggttttgatttttcacccccaattagtcaaagggggttaattaatttcaacaccaaggctatatgcccaaatacctcattaataatatcatatgtcacgtgtgattcatagagcctaagaacatcaaggttcttat

SEQ ID NO: 212435 - DNA, 293 bp, Glycine max
  unsure (1)..(293): unsure at all n locations
tctttctttcttgaaacccactaaaaactgcctaaccccccttgttgtactccataatttattctgcaataacctgcttaaagcagttacatatgtgcctatatcactacagattcaggtacgattaaccttttatgcctaactagggtttcgaaacatcacaacagagacaaaccattgaacaatggattttcatcattaacatacaacatagacataccttcgatggaagcgcagacacgaactccacanatgcgaactcgaatatgtggttgcagtcacggaagcgcaac

SEQ ID NO: 212436 - DNA, 442 bp, Glycine max
  unsure (1)..(442): unsure at all n locations
tgtaaaccaaaacttagtactggatacaccaagnaaggattataagaaaatgttaaatcaaacaagcataactcatacaaaacaaatcaaaatcacatagtacaacaaaaacatatcagacacataatgcattggccggaagaaccaacatgctctgataccactaaatgtggcacccatttatcacttatctaataattaaataaaaataataataattttagttacgaaataaagcagtaaatttaaaactttcataattttacaataaaggttatcacatacgtaactcaaataattcaaactcaaataaaagctctaattgccaataaaatatattggcccacgcacttttggctttgcaagtccttaataaataattgaccttcagaaataaaatcactaatttataacatatactaataataaaagacaatataca

SEQ ID NO: 212437 - DNA, 340 bp, Glycine max
ctacttcatgcactcctctaaggacaataacatcatttatggcactaaattgctgggagttggaagccatcttcttaattaaattcctagcttcaatcatacttctctccatggtactgaggccttcataaaaatattggagaaaaagctactcataaatctggtggtgagggcaactggcgcatatttttttaaatctctcccaatattcatataggctatctccattgagttgcctaatgcctgaaatatcctttctgatggtcgtggtcctagaagcagggaaattttttctaagaatactctcttgacgtcatcccacctcgtgatggatcttgga

SEQ ID NO: 212438 - DNA, 365 bp, Glycine max
  unsure (1)..(365): unsure at all n locations
tgcaagaccgagttaatctagttgtcggctaagaattgacctccactangagctaccatgtccaagtactactgatatcgtcgagtcattggtcacaaaactgaagattgcactacctttaaggataaaatagaaaaattgatccaaaaggggaatctatagaagtttgtcaaaaactaatcacatgataaaaactatgaaagggagtgagatagagccaagaacgtagtttgacccatgatgcaacagaaacacaatgttagggatgagaatcccccacccgaaactcgacttcgagatgtaatcaacataataattggaggattcacgaggggaagaaagtcataactcgacaacaaactcta

SEQ ID NO: 212439 - DNA, 445 bp, Glycine max
  unsure (1)..(445): unsure at all n locations
agcttaaggctgctcatttgctccaggntgtttcatggaaggataaaggtctgtatgggggtcagcaaaggagcataaaccacagactcttgcgacaggtatagatttatgattctaggccagttgggttaccaagttaaccaaggcatctagtttaccttcacgcttcttagtttcagatgatgcagatgagtttgtagctacctcatgcactcctctaatgactatagcatcatttctggcgctaaactgctgggagttggaagccatcttctcaattaaatttctggcttcagtaggggtcatgtctctagggctcaacctctagcagcatctatcatacttctctccatgttactgagtcctttataanaatattggagaagaagatgctccgagatccaatattcatatatgctctccccactgagttgtctaatacctg

SEQ ID NO: 212440 - DNA, 421 bp, Glycine max
ttgacttgagtcatcaagagattataaatatgtgcccatggcatgaatttttaaaatgatctatcatctatctttcaatctatctgtcaatcttctctcaacatcattcaatatcttttaattctttctatagaatctttctgatttatttctcttcatctttctaaaagtttttgttcaaacactttctcttccaagaaaagttctttgttcaaaaacttgtgcaattcaactgtttcattctcttctccttttgccaaaagaacgaaggactaaccgcctgaattcttttgtatctctctttccccttacaaaagattcataggactaaccgcctgagaattgctgtgattcttcccttccgcttaagcaaaagatttcataggactaaccgcctgagatatattttgtttccccttac

SEQ ID NO: 212441 - DNA, 293 bp, Glycine max
  unsure (1)..(293): unsure at all n locations
tctctatacagacattattttgcaattcccaatggtgggcatgtccaaaaatgattttgggaagtggtgacaaatttcggaatgatccaactattaacgagtctaaaatcatagttttaatgcgacaggtttgagtgtatacgaaaaaatatatagctctggcagaggaagaaaggagaatgaatttgggaggaattgacctaatatatctctatttataactaagatactctaaggctattacttactatatttttctttatttttataaanggaactctattttactcttt

SEQ ID NO: 212442 - DNA, 432 bp, Glycine max
  unsure (1)..(432): unsure at all n locations
gtacagcagaatttagtaatgacccactatcctagaatttttataacttaatgccattaacctagggaattaataaaaacttaatggctgagtgtaactgaaattgtggcaaccaaaagtcacccccaacagccaacaagtcagccaccatttggtctcccataatgctgatgcctatgttgccaattgggcccttattacaacttgaactatacctaactaaagcccttttaattgattaacccaaaacatatttttggtcagccaactttacaaggattgggccattatttatacaaactaaacactctaaaaattgagacaaagtggtgtcatttagtcctnctccatttgggccatgatacaactcacaaccttggacttttctccttgaaactggggctngtattcaaatagtatggacagcacttg

SEQ ID NO: 212443 - DNA, 278 bp, Glycine max
  unsure (1)..(278): unsure at all n locations
agctttaatggagcttacatgcatgtggatcaagcacatcttcatctangngatgttctttcgcttcctctatctttntgttcggagaattatctttaattccttggtcttcatcttattctccatgtacatcctccattgtcttgtggtttggtgttgtttaaagtaaattaaaaaaaataaaccgattaaatcttaaatctacacttgttcttgcatttctatggttcaaattttgagatctactctcgaatcatattttgtgtgattttagttct

SEQ ID NO: 212444 - DNA, 432 bp, Glycine max
  unsure (1)..(432): unsure at all n locations
cgagctgtgaattgagntatcattgttggatcgagtggctctcttattaattatgaaggggggggttgaattaattattcctaaacctttactaattaaaaatttactcttctaaggcttttactatgttgttaagagaataaggagtagaagagaaacttaaccaaaagtaaaagcggaaattaaaatgcacagcggaaagtaaaagagtagggaagaaggagacaaacacacaagagtttttatactggttcggcaacaacccgtgcctacatccagtccccaagcaacctgcggtccttgagatttcttttcaaccttgtaaaaatccttttacaagcaaagatccacaagggatgtacccttccttgntatctttgaacctaatggatgtaccctccactagaactgatccacaagatatgtaccctc

SEQ ID NO: 212445 - DNA, 340 bp, Glycine max
tttttttctttggaagaatttttgtgaggccaaggggcctggttgtattttacccccattttactaagacaccccctgcttttttggaattttttttcgaaagttcggaacttacaattcgaacgatcttgtttctttcgaatgtacggaacttgggatacataacatccttttgatacggaagtacaaactcctatcggcaagagctcattgattcgggtgcaggaactacgatggctaattttttttttttggctgtccaatttacaatgctatgtggggccacacgtacaagacaaaaagccatgatcacaagtcccgcaaaaggatacagcataac

SEQ ID NO: 212446 - DNA, 309 bp, Glycine max
tcttcaattccactttggcttcctctggtggtttgtctctctttatctcttcaactttcatcctttcaaggaaactctcttgctcaccttctaattcctccaagcaactctgcacttctttttcttcttctgcaatcaaacactcaagggtgttggtcaacactttttcgagtggagtttgcctaaccatggctttagctaccatatcaatctcttgttccaccttatccatcttaaaacatgccttatggtcactcggatgcttcatagagtcaaataaatcaaaagtaacgttttgattgtcgacac

SEQ ID NO: 212447 - DNA, 212 bp, Glycine max
acttgcttggagaactcaaaagatctttctattatcaccttggcagagctcttgaccgcacttcatgctctggaacatagaagactcatgagacaagaaggtactactgaagggtctttggcagctaaatcattggacaataaaatagaagggcaagtcatgaagcttcaaccacaataatggtaccaatccttctcatgattgtccatcat

SEQ ID NO: 212448 - DNA, 238 bp, Glycine max
aagatggactccaattcggtgaaattgaagatgacatgcccaaacccatcatttggtaggtgaaatcgatgaagatgctaccagttccactctggtgtggcttcccggcttcaagaaaactaagagaagtatcagaagaaaccaagctaatattattctcctcagcacaagaccttgttcccttcaaatccacgaaaacaagatacctttgccaagtgttgtaatttcctgcatcaac

SEQ ID NO: 212449 - DNA, 377 bp, Glycine max
  unsure (1)..(377): unsure at all n locations
tctcttctatttnacgatttcagccttaggctttcttctctttctcttttattttcgggatttacaattccagttcagacttttagttatatcaataaaattttggtctctattngattaatggaaggctaagtccgcaacgttgttttctcttgaggatcaagtacagctctctttgagggtctattattactgggaaattctattcagtctttcctcttcactaaatactctgaatttgtgctattaattcatgcatgcttagtgcttgattatattgctctgcgcttacattacactcatgcctaatgattgtntatgagtaactggtgtgtgtgatgcttaatcacataatgaatgcgttatgttatattcac

SEQ ID NO: 212450 - DNA, 329 bp, Glycine max
aacataaattctgcactttgaccaataaccaatatactcgggacttttgttttcataaataaaaaaagaatttatttaaaattaatgaggtttaaaaacttataaatggaaaaataatttgctaataaaaataagtcttcatagtattaacaaataaatagagtaaataatatttataaaataaagggatgtttaattagtatttatttatgaatagaaaatatagtattttataaataataaataagaaaaagagtaataaaggctagagacctagtctaaaagaatatatatgcagtgtatataggaatgtttacctctctttttca

SEQ ID NO: 212451 - DNA, 271 bp, Glycine max
  unsure (1)..(271): unsure at all n locations
agacggaaggggagagaccagngatttggttggctagctttttgaattcggggaggtactccgcgacggagctgcgttgaacaagcttgaacaatgtccctcgtggatcatcataaaaggagggggcgaaacgggtttcgattgtctgaagcagcgccggccatgacataatgaagaccgttctgaacatccactggaaccagctgagtgccggtccatcgaggtagaaagaggccacggttatgcgctcctcttccggcgttccctgata

SEQ ID NO: 212452 - DNA, 305 bp, Glycine max
gatgaatcgaagggtatgtgcaatatcgaacatgttggctattcctaagttctactattattgataagctgtaaatggaagacaaatgggggccagaatgggaatgtgggattaaaatatctggctctttaaagtattatcttcttctcactacattataccctgttttaatgctaccctttattccgaatgtaatatgtatcctattttgtgaccctctttgaaccatgtgtcgggcaagttgtaaaatgatctgataccctcggctcttttcagcttatatcccttgatatgggtgcacttat

SEQ ID NO: 212453 - DNA, 315 bp, Glycine max
  unsure (1)..(315): unsure at all n locations
attttggactacttgcatccatatctggacaacaaatatctggatgtatgatttctaatagggttgagctcctctttgcatcngttttagactttgtagtttgcttacccttaatgcaattcacacaagtgtcgaaatcagcaaaatccaaagtactaagtactccttcatttaccaatctcttaattctctcgatagagatgtgtcctaatctatggtgccacaacatagaggattcctcattcacaacacatntgttaacccttggcagtaaatgccatagaatataagaagcatcatttttgcattcaatat

SEQ ID NO: 212454 - DNA, 369 bp, Glycine max
  unsure (1)..(369): unsure at all n locations
aacattactgaggcttacaggaccaaaccaaaccatttactacttttacttcatttagttctaaaataaacagaacactgtccaatattatgcagatcaattctgaatttctgctagatatctcataatttggcatccaagaataaatgacagtaaaaggaatcatcatcaccatcatcttggggattggtgtgtggagaaaaaagacgaagtgggtgggtaacggagaggattcttatttgcgtcctcttcttcttcgccgtacaaaggcaaaacatcggttcggaataagacgaccgccatagcggctgacaactacaccacatagacagacacattnnntattttatctcaactcaacacacatag

SEQ ID NO: 212455 - DNA, 399 bp, Glycine max
  unsure (1)..(399): unsure at all n locations
cccctgtgcaatatggttttattatattcaacatttaatcaatgtctggtttgtatggcaagtgattacgatattataaagttatcaaaaaatattagataaacgtcttggaccttaatatgtagtccaaaatccatatatttcaacctgaataaactcaaaactaggactgatttatttggtatctaaactctatatatatgttgggaatctccctctggtgatagtgttggtattccgtgattttcgattggttaattatctatttgagaaagtctagccaataatctatgtccaatcccaattaccataatgttaatataatgataataaacacaaaagtaccatanttataaaaaaatacagtatgttataaaattaaataaatcaactactata

SEQ ID NO: 212456 - DNA, 338 bp, Glycine max
  unsure (1)..(338): unsure at all n locations
caccatcgtttcatagnagaatacagggaatgtgtctactatcattgtcatcattntttttcgccattgaggggtcacttgagctgccaggtctctccacctttgggcgtattctatgaaagatttgtgcccctttttttcacatgttctattgttgcatcctatccggaaccatatcaaaattgtactgatactacctaacgaaggcanatattatgtccttccaagagtggactcaagaaggttccaggttggtggaccacgtaacagctaccccagtaagattttcttgaaggaatgtatcaataattcctcatctgtttcgtatgcccccatct

SEQ ID NO: 212457 - DNA, 448 bp, Glycine max
actttaatcgtttatataagccgtttctcacccaataaatgattaaatgaatttcaaccgatcatttgtggtgtaatgtcgtttaataactgttaaagcaaaatctaaccaatcgttcatgctgaaacctcggttaaacaaaaaaaagaaaaataataataatcaaaatatctttgaataaaataataaaaaaaatcaatcggacgtttttctttggaagtttccttgaatgaattgactaataaccaaagtgaagctaaggctaaaatcaactcacaaatcaagctttgtccgcaaaaatcactaaaaaaccgttttaaggtccaacgctgtaagcggtcctctttgcttttatcggttaacatggaccgttcaaaagcatataatcaacatgtaactttaccgcttttgcatgaactacgtatgtatgatttcctcatcgcaattg

SEQ ID NO: 212458 - DNA, 413 bp, Glycine max
  unsure (1)..(413): unsure at all n locations
aaaaagaattcccaaagaatcaaaaattgaagaagtacggagaagtctagaatgttagacaagtggcctcatatatcttaagaagagggggttgaattatgatattccaaactatttcccctaattaaaaatctatntcactctttactcaagttatgaattcccttaatgacaatcttcttaaatattaattcaaatgaaacaatttgaatatgaatataaagcaataataaataaaggagattaatggaagagaaaatgctaactcatttttatactggttcggccacacccttgtgcctacgttcagtccccaagcaacccgcttgagaagtccactatcgttgtaattccttttacatgttctacacacacaaagacaatcctttctttgtgttataattcctttacaa

SEQ ID NO: 212459 - DNA, 394 bp, Glycine max
tcttccaccaaagtgtatgtaccagatgcaacttttttcccttccggacatgccatcactcggaaaatcgtctcaatttcccttatccagttctgagcaccatcatggttgtatcccccatcgaatgaaagatggttgtttctttggaagcggtccaacccctattactcaacatctccaccagcttctcccctatttggattccctatagcctgagctaaagcttgaatggcatcatctatcgcacagtcatttcgtccagccatcactccctatacacactatggagttagacttggaaggaatacacacaaactatgaaccacacgttatcacatccatcacaagttcctacttgattacttttgagaattgatgcctctatacattaaca

SEQ ID NO: 212460 - DNA, 413 bp, Glycine max
  unsure (1)..(413): unsure at all n locations
agcttttgatatcaaactntaccactggtaatcgattacaagtaattggtaatcgattaccagagagtaaatactctgatatcttataaaaatttggaaaaacttttcttgtaaaacaaaactgtgctatgtttggtttttgaaaaatccttttcaatactttccttgtgaagtcttgacttgttggtttttgggttcttctcttgaatcttgaattcatcttctcttgaatcttgattcttcttgatgtcttttctttaatcttgatcttgaacttgntgactcaatcttgacatcattcttgggggctgtttgcatcatcaaaactactttgatcatacttgattcatcatcatgaagctnacttctacaaaaactaataaaaactatagtattccaccccaaatatattt

SEQ ID NO: 212461 - DNA, 409 bp, Glycine max
  unsure (1)..(409): unsure at all n locations
tgcttcatcatcctcttattcttggaccttatcatangaccttcaatcccatgtaaagaatcattagacgggttggttgcacctctatcattctctccctctttgaaaggattcgtcctcgaatctaatttgttacctacaccaaatgaagatagatcagccacattaaatgtagcacttatgttaccgtattttcttggtccagcttgtaagcattgccatttatcttttctagaactngaaaaggtctatctcctcttggttgctgcttggattttctttgagcaagaaatacttctttgctcacatgaacacagatccaacctactgttcactaaagtatgcaactagtttagagtccaacatcaatacaacccctattccaacaccaaaagcatcacattcaatt

SEQ ID NO: 212462 - DNA, 359 bp, Glycine max
  unsure (1)..(359): unsure at all n locations
tctatcacactccagatattttctcanagatcccaacggttaaatcatggtaaagtgtcttgtgaagttgaaaaccaaatttcgagaggatccaacggttaacgaatgctgggcagcgtttctaccgaggcagcttcatgtagttttctctagaagcttcattaagaggcttcctccagaagcttcattaagaggcttctagcacactccagacatcttctcaaagatcccaacggtcagatcatggaagcgtgttttgtgaagttgcagaccaaatttcgagacgatccaacggttaatgaatgctatgaagcgttnttaccgaagcagcttcatgtagctttctctagaagcttcat

SEQ ID NO: 212463 - DNA, 195 bp, Glycine max
ctcaaatctatgtatctaaaacccctcaatttagtggattctcaaggtttgagaatggtgtaattttggaacaaactctcatctcaaacaagtctataacattaatctaaactcactcaaactggttgtacgatgaaaactctaccgaatcaaaatttgactcctcaacaccccaatttaccctagaaatggctc

SEQ ID NO: 212464 - DNA, 442 bp, Glycine max
  unsure (1)..(442): unsure at all n locations
gtaacanatctttctttgtggngaatcaaccatgtttagttcacatagttagcaaacattaaccatgataagcaaacaaattcaaacttcttaaggcactcatcgaactcttgcttataaggacaatccaccatattcccccgaccttccataacataaccccatgcatttttttttaccaatcagaattttacactttgccttagtcagtcgaccagcatatgaatgtccaacgaatgacttcaccaattcatgattgtgactcccacaaattaacttcatcatccatccttcacctcccacaactggtttcccatgtagcttatagggacacccatattttctactactagtaactgttcttaccaaatatttcttcttggccctatattgaccactcctttcacagccaattaaaacaaatgatgtccttcatctaata

SEQ ID NO: 212465 - DNA, 451 bp, Glycine max
tctgtatgcaactgggcccatcctcgcgatgattctaaagggtccatataaacgccttgaaagactggattgactcgttcccgacaccgtggtttaccgatacggtctcaacttgactaagacccattcattcacttggaactcatgatctctacgatgcccatccgcgatttccttcatgcgagcctgagccttctgaagtttttgtcgaagtaaggcaaacatgtcctccctctgactgagcaattcatccactgccgccaccgtagaagtgcccgtcaagtactgtggaaaacttggtggtttgcggccaaaagtgatctcgaacggcgtcagccctgtggctgaatgtgtggacgtattatacaaccactctgcccacatcagaaaatggccccatgcgcttggacggcgatgcacgaacgctcgtaaatattgctcaatgatccta

SEQ ID NO: 212466 - DNA, 409 bp, Glycine max
  unsure (1)..(409): unsure at all n locations
cgccattatttgntaagccacccctttgtgaatctcactgatcaccagaacttaagggacctaatgactcatgcagtgcagacaccggagcagcactaatatctcattcggttattgggattcgaatataatatccagtatcggccaagacgcgagaatggggtagcagacgtgttatcgagggttgccggagaaaaagctaaggcctccttgtacctactnttcagacctcaattcttctttatgtgtgaccttaagcatgagctatccacacacccagatattttgacgttgctggagataatctgcanagacttaacagtagtctctgagtataataatgaaatggattaattcttcacaagcagtgcatttgccttccatgggatttccatcattccgtactcat

SEQ ID NO: 212467 - DNA, 347 bp, Glycine max
tatccctcccttctctgaaatcaaagttttttttcactacctggacatatggcagccccctaaaaatggaaaaaaaccattatgcctcaaaagaaaagaaattaaattattaaaaaaaagaaaaggtaagaaatggtggggttccctccaataaacgcttctttaacgtcactagcttgacgctggatcccttttaaaggtcttggaggcggatgatggtggttaaccgctctatatcactaccattgtagatctttaagcattgccattcatgatccagctcctctctggttcatttgaagttggaccatatttccactgctccatgtagctctgatgtctttatg

SEQ ID NO: 212468 - DNA, 298 bp, Glycine max
  unsure (1)..(298): unsure at all n locations
ataaatagntatgttaagtcaggtggcctcctttggcctcattttcgtttttccccttctcctctcaaaaccctttctttttcccgtagcccacaaaacctgtctcagaaatacgatgatctcggacttattcaccgttggatcgtcatgaaatttgagtaccacggccgcaacgcaattctgaaaattntcaccgttggaaatattaaaatcttatctgcgcttagagganaacccttcgcattgtagccttttattttcccgcagaaacccagaactgtctcggtaaaaatacaat

SEQ ID NO: 212469 - DNA, 327 bp, Glycine max
tcttaccaacaggtatctgcaacaaccaactttacttacaaaccactggctaactatatcggaagtctaacaaacaactatctaactgtatgggaaattgtctatgttaagatatgcatcctcacctttttcctatggttgttgtgaatttcacaagtcagagttcgaattttctagggtgaatcaaagatagtaaatggccagttgggggttcatcagatttatgtgaggtaaggggagcaataggactgtagttttaagttgaattttggctatttgggtgctgtgagtaatacctgtgggatagtgttggggtttaatgggata

SEQ ID NO: 212470 - DNA, 349 bp, Glycine max
  unsure (1)..(349): unsure at all n locations
tcttgantcggctaatacgaacatttatacgatttcatcctcgctttctttgcgtaagtgcgtcacaatgtggtctttgatggtggcttgtggttctaagtgattggtgaaatccactctgtttaattgtgatgctttggaaaaaaaatcataagtttgttgctgttgttgagaatttgaaagttcagctgccttttgctggatctggaatggcgactacatacttctaagcatatctataatgctgtcaaattgagattgatccgttgcatcatattttctggtgtttgcataatgggattctatactatgcaacatgatgtgngatatctcatgcacttcaattcat

SEQ ID NO: 212471 - DNA, 450 bp, Glycine max
taagctatgcatccatcaaattctcatgggtctatgtagtcttctggaggatcgttcctataaactatccaccacccaagtaaggagacaaaaatatatgcatgtacaataataaaattaacatactctatctcaagagaatgattatatacatgatccagaattatgtgatttccatcaatttccacttgttatgtaaccacacattttaatttacaaaaaaacaattaataggatggacacatatatatttgaaggatgtaaatgcacctcctgattttaactttgagaaaaatacaagtatatattcattgtaataattgcttttgcaccccctaattgtataatgtgaactaggtaggtgcaaattatgatatttattgactaatttgcactccctaatctttacattttgttctatatttagtttactaaaatacttggtttatt

SEQ ID NO: 212472 - DNA, 260 bp, Glycine max
  unsure (1)..(260): unsure at all n locations
agcttgtctgttctatgcagcaanaatgattttttcttttatgttggggaatgagttangctataagcccactcaggcagatataaagagaagcatcgcgggaaggaagagcggtggtcaaagctcgcggttgagacaagaaagtgaaggaagcccgccctgccacataagtggaagctttataagcgcgggtctgggagatgaaggtcaagtggtcgcgatatacgaagatgatgttccgagtacattggatttggtac

SEQ ID NO: 212473 - DNA, 312 bp, Glycine max
tgtaaagtccgcagactaaacgggtcggtcctaaaatcttgtattactatgcgggttcaaaaaaattatgtccgttatccacacggtttgtgaactaaaagggtcgggcctaaaatttgggattactatgcgagttcaaaaaaattatgttcgttatttgcacgatttgtttattccaaattactatgcgggccgaaaatctgggcttaacgaactggttcgcagatccaggttcatatacccacccctagtcaccaataacctatctagtaagccccctgataaaattgaatttggggtcttaatttccca

SEQ ID NO: 212474 - DNA, 271 bp, Glycine max
gatatggtatacaatctgggatatttcacccttaaagggtcctggtgcatgagcacaacatttcctccaataccctgaattgtgtcccacaccccaatttccaattctatggtgattgaaacaaccatgcacagcttggtcatggattactgaccttatatgctggcaacatatggattcattggtgactgatgttccatcctttataaccctccaacctccatacttcgagatgagaatcttaacccatagatcatcatgctgctgcatc

SEQ ID NO: 212475 - DNA, 411 bp, Glycine max
  unsure (1)..(411): unsure at all n locations
tttttcctaagattataaatgaaatgcataacctcgtttcctctaaaaatacacaccactntaattgaattgtataggagagatgttcattatgaatatacatctttgttaagattgtctcgtatgaataatatagaaaattaaaaatatatacatataaaaaaatttgtcaaccaatcacatctaaaaaacctatgaaatcaacattacataagatctcttcatataaagatataaaattaaaatttagctcattacattataagaaattaacttctttagtataattctctcttatcaaatattcaaactgtagttcttacattacgaagaatcaatccnttcattagaccaacacaagaataaattactttgtgtggcatatagatatatataatcatatcataaata

SEQ ID NO: 212476 - DNA, 434 bp, Glycine max
gtgaaaaatagatgtgagataaataagttctctcattatatttatgctaaatgcgatgcatttttactcatgccatcctagtttcaagaaaaatacatatagctcacgtccaatgaattaaaccaatgactttgcttactccacttatacttattaccattatactacataagtctcacgtctaagagatttttttatattaaaaataattaaataaattttttgataaaaattaatcgccaataaaatctgatggcttataaggctagcgtgagacaaaaatgtctttaaaaccttatattcatgcctcacaaaatcattaaaattcactatatgtttagttgttaaatctcataaatgatttgtttatgtcaaattgagatatctaatctttaattactcggagtcaaaatgtatatttttagaaggttaca

SEQ ID NO: 212477 - DNA, 454 bp, Glycine max
  unsure (1)..(454): unsure at all n locations
ctgcaagctggaattttcttgagttatggagtctttttggcagnntgaatgacccgcctcatcgctacgatatcactactctaaaccacataaatttcaatttttaaatgaaaactccgttaattggcttatgaaaaacgtgagtaaattttttgcgatttacatttgccaaacaacacacaaatacttaaatgaatatatgtatagatttattaactcagtacacatcattcacatgatgaaagggaaatttgttcatacatataattaaatctataatttacatcctcaattcaaaaagaattatagaaccaactacaaaggagtgggttaacaaaacacatatctctcccataataatcccaacgtcatcacgtcggcttggcggtccaacanaagacctcactcacataattactggtgcatctactccatanataaaggatacaatcat

SEQ ID NO: 212478 - DNA, 435 bp, Glycine max
  unsure (1)..(435): unsure at all n locations
tgcttggtaaatgctgtagactgtttaaccagcggagaagatatttatctatgggctggcttggaagaactggatcaagaagaaacactattgtatgatgaaccagcttctaggaactaaagagcaagatgacttggatctaaaggctgggcttatctaccccatctctgatagcgcttgtgtaagcccagtatatgtggtgccgaagaaagggggaatgaagtcatctggaatgagaagaatgatttgataccaacatggactgtcactggatggcgaatgtgcattgactaccactagctaaatgaagccacaataaatgaccatnttccttcgcccttcatggatcagatgttggaaaggcttgcaggtcaagcatacctactgcttttggatggatactcatgttataaccagattgctgtggaccctaaa

SEQ ID NO: 212479 - DNA, 412 bp, Glycine max
  unsure (1)..(412): unsure at all n locations
agcttctattaatgagcttcacaactttgtcattctccatggaggcttctccaaaaaatatagtatcatcagcatattgaagaacatccacaggcaccttgttattccccaccaagaaacttctaaagcagttttttgagattgcttccctcatcagacctgtcatgccttcagccactaaattagctttttactgtatcccacaaaattcttttattgtgtatgtcacatggagaataaatagtaacaagggtgaccagttgagcttcttggacccattccccaaacattaaaataaaaccactaccactgattttcctttacaatctaaatggaatatcattccacaaacatagtatgccacctggtgagttaatagctgggagcaattnccaacttacatctacatgtc

SEQ ID NO: 212480 - DNA, 297 bp, Glycine max
gacactagtatatactcgagctagctacattgatgcgtgttggctatggcatcttcattcttggcacttgaattatggaagcttaagtttactatcgaacgagaacacggtgagaggactaccctctattaaccaccctgatcaactctttgaagaatgcttctaggcaagccattcagaacaagttttccaaatgagccatactcattatcttataagccactcgattcaacacatgttgatgtctgtaggccaatcaatccaagctgactgggtgcaaagaactatgtcctcctt

SEQ ID NO: 212481 - DNA, 268 bp, Glycine max
  unsure (1)..(268): unsure at all n locations
atcgaatacagtaaactggtaatcgaataccagaaagaaaaactctctggtaaaagctttgtaaaacttcatgtgctactcaatgtttnaaaaacttttttttgtactatcttgattgagccttttcttgattcttgaatcatgagtcttgaatcttgatcttgaatattcttgattcttgatacttgaaacttctcttgattcttaaattgtcctgactcaatcttgaaattattcctatgggctttttgcatcatctttgtatcat

SEQ ID NO: 212482 - DNA, 399 bp, Glycine max
tgaaggcaaactggatgcattggttaacttggtaacccatctggccttgaatcagaaatctgtacctgtcgcaagggtttgtggtttgtgctcctctgctgaccaccatacaaacctttgcccttccatgcatcaacctggagcaattgagcagcctgaagcttatgctgcaaatatttacaatagacctcctcaaccttagcagcaaaatcaaccacagcagaacaattatgacctttccagcaacagatacaaccctggatggaggaatcaccctaacctcagatggtccagccctcatcaacaacagcagcctgctccttccttccaaaatgctgctggcccaagcagaccatacattcctgcaccaatccaacaacagcaacaaccccagaaaca

SEQ ID NO: 212483 - DNA, 184 bp, Glycine max
  unsure (1)..(184): unsure at all n locations
taaccactngaacatctagtatgagatcttcanaatgtctattacaattaacagaaaattcacacacatctgcaaggaacagagtaattctcaattaactaataaaactaacattcgtcaaaagattctccggtaactaatatgaataacaaacttaattccagaaagtgaaccattcagtcat

SEQ ID NO: 212484 - DNA, 379 bp, Glycine max
ctgctttacggacactataaaactcagcttaccggaagaaatcgctacccctcatgaactctgctcgtggattcgaggttattgacaacattaaatcagccgtggagaaagtgtgtccaggagttgtttcctgcgcagatatccttgccatcgctgccagagactctgttcagattgtaagtggtcaaacaaccaacataaacacattaaactaaatcattaaattgtacatatcaaaattaattaccaatttagtaccacacatgcaattaaagagaacattttgttgattttgatcaatatagcttggaagccctacatggaatgttaaacttggaagaagagacgctagaactgctagccaatctgctgctaacaa

SEQ ID NO: 212485 - DNA, 452 bp, Glycine max
  unsure (1)..(452): unsure at all n locations
gctttgagcnaaatcaatcgacaataactttttactcggctgtccgattgtctcccgttgtatatcgagacgtttgatattcagaatagaagctctgagcaaaatctaacgtcaataactttttactcggatgtccgattgtgtcccgtagtatatcgagacactcgaaattcagaacaaaagctctgagcaaaatcaaaagacaataaacttttacctcgatggtcgaatgtatcccgtaatatatcgagacgctcgtatttgaaaacagaagctctaatcaaattcaaacggcaataactntttactcggatgtctgattgtgtcccgtagtttatcgaaaccctcgaaattcagaacagaagttctgatgaggacatgaccaagagcacgggcaaggatccacttgaaggacttggaggacctatgacaagggctagagcaaggaaagc

SEQ ID NO: 212486 - DNA, 438 bp, Glycine max
acttttgacaagcatacctattttcctcgcaggttatagatttataaaaagagattgtctccatagggacttgaattactcaattcctccggataaaagtaaatagttcaatagttatgtacaatttcaatcgaaatgtcatgggtttgtctaactaacgaaagataactaaagtaacaaaataaggcaatttacagaaataaccaaatttagtgcgtcggaaatatgtaaaattatggaacaatagtaatgaatttaattaattaaagaaaaatgtaagattggatttcatcgttcataccctcaatatcttaataagattaacatacatgaatcattttctaacattactgatgtacacattaaattgaaaaaagatgatggaactcaataaaccaagacaggggtgaatttgttttgaaaacaaaatgtatgttt

SEQ ID NO: 212487 - DNA, 414 bp, Glycine max
  unsure (1)..(414): unsure at all n locations
caagatgatgacaaaaagcccaagagaatgatttcaagattgagtcaagaacaattcaagaatcaagagaagtttgatttctagattcaagaaaagatgaattcaagtttcaagagaagaaatcaagaagacttcacaagggaagtattgaaaagattnttcaaaanataaacatagcacagctttggttttcaaaagagttttctcaaaatcttctaagttaccagacgttttactctctggtaatcgattaccagtttcctgttatcgattaccagtggcaaagtttgttttcaaaagctttcaattgaatttacaacgttccaattaatttcaaaatggtgtaatcgattacaagatattggtaatcgattaccagtgtggttgaatattgaatctctttgaacatcttct

SEQ ID NO: 212488 - DNA, 488 bp, Glycine max
  unsure (1)..(488): unsure at all n locations
ctaagcttaccagccattatggcctaatacaagattctagagctnggtttgaattatcttatgctactcttctttaatacaatttcaggtccagcagatgtgatacctcattattcatctacgctgaatccaccactgtgatctacatgttggtgtatgttgatgacattattgtcatatgcaacaatcctaatttcattaaatccttgattactaaacttaattctgagttttctttgaaggaattaggcaagctagattattttttgggtattcaagttagacctcaaccttaagtatgtcaaggtcantttgtagagtacacacaccattatgtatgtgaaggtgaatataaacatgtaaagaatgaactgctcttttcttttacatattgaatacatgacaacatcttttaaattctngatatagaagcattcaagagcatagtangtcttttgctttgaagtttctatggaagcatgtacaat

SEQ ID NO: 212489 - DNA, 451 bp, Glycine max
  unsure (1)..(451): unsure at all n locations
agctntgagccaattcaaacgacaataactnnttactcgtttgtctgattgagtcccataatatatcgagacggtcgaaattgaatgttgaatctctgagcaaattcaaacgacaatagcnttttactcggacgtctgattgagtcccgtaacatatcgagacgctcgaaattgaatgttgaacctctgagacaattcaaacgacaataactttttacgcggatgtctgattgagtcccgtaatatatcgagacgctcgaaattgaatgttgaagccctgagccaattcaaacgacaataactntntactcggatgtctgattgagtcccgtaatatatcgagacgctcganatngaatgttgaacctctgagccaattcaaacgacaataactntttactcagatgtctgattgagtcccgtaatatatcgagacgcatcgaattgaatg

SEQ ID NO: 212490 - DNA, 217 bp, Glycine max
  unsure (1)..(217): unsure at all n locations
attcggatctccgattgagtttcgtaatatatcgagacgctcaatattgaaaacggatgctcgtagcaaatgcctaccgcaataacttntaactcggatgtatgattgagtcccgtgatatatcgacacgctctatattgaaacacaaactctgagcatattctaacgacaataacttttaactcggatgttcgattgagtctcgtaatatatcgag

SEQ ID NO: 212491 - DNA, 458 bp, Glycine max
  unsure (1)..(458): unsure at all n locations
agcttccatcatagagtctcttccagcttcgngggtcggtttagatacttggcatctgctgttgtggccttgtagatgaaccaccctggtctctgttgaattggttaccagggtgattttgccactgtctctgctgttgatagtgttgattgttctgaaatcctggaaatacacttgtattgaaattgcctttgggctgattccccatatataattaacttcatgtaaaattttctcttcatttgggatacaacatccagattcatgagctctaccacatattgtacatcctgcaacctggagaatagaagaatgtaaagtttatgcagaatgaagctgagttggcaacttactgagagtttctgttaatgcctctagttgcttagatgagcaagtgttttgtgccaacagagcgtcctgtgaggttagctccaataagctcttcttagtaggaatgt

SEQ ID NO: 212492 - DNA, 424 bp, Glycine max
  unsure (1)..(424): unsure at all n locations
tttccttattttgaagctcactacaagccttaaatgaaaaaccatgatatcaccatatccttaagggaatttggagctttggaattgtcttgggaataagtgtggggggtttttgtttcattggataacttgttttgttggctacgcttcatgatgtatnttgggccatacttgatgtacattgtatatcggttaaatgtaggacatgctgaatgaaatgttgtttctcaaacgctatagagttaaaaaaaacaatcgagaatgaaaatgaaaagcaataaagtggagtgaataagatcttaaatggcgaaagaatgatgagactctcnggtctactctatatgnttaaaatttatcnttacttcttttaatatctactnttgttcgtatatgcactattcccaatgctctctattctttggga

SEQ ID NO: 212493 - DNA, 470 bp, Glycine max
  unsure (1)..(470): unsure at all n locations
ggatcttaagtcacctgctgcatgcagcttgaaacaaaagttcagaaaagtatatcttttgttaagattatgatcgcttacgaacccactcattattaatttggtcaagctttgatcactgatagatccgtttcttgcaactttttaaatttgattatagattatagttaaaacaatatgaactaaaaatatttatataaatataaatgctntagcaatgaacaccattggagttgggaacttaggaatgtggtaaagaaaatttctaactagttgtgtatcatttggcattttaggcattaatagtatataaagtctggtgcacaactcatggcattccataaaattaaatgcaagtctctatagactattgggttgaaaacccagtaaatcattcagttatttgtagagggttcctgtggttgtgtcctctgttgagttgagacaatagcataatagagttacgatag

SEQ ID NO: 212494 - DNA, 379 bp, Glycine max
  unsure (1)..(379): unsure at all n locations
caacatttcatggggatgaaagactcgggaatacgcatgctatgcatgcaaaatgtaattatgagattgagatgccctgtcgcaacctacccttcggcgggagggcgacgcgagacttcgcggatgcgtgttccacgaaaggaatacgcgcggagtcgccaccaacgtttatttgaagaaaacgtcgggaaaactggaaaagacgcgatctacgaactnttaagtgaaaggttcgggagttgtatttacgcatggtgaaggtattagcaccccacacgtccgtcccaatggacggcagcctttaatcgaatgtgcaaacatgacnnttgattntatggtccctcttatgtcttatatccttataccctttttatatttt

SEQ ID NO: 212495 - DNA, 454 bp, Glycine max
  unsure (1)..(454): unsure at all n locations
tgcaagcttganggatgttctctactagcaatatttattatgctttagtttgagtaaggaatcggataagagagaatgcatataagaaccatggaaaaggttaaatgttttttttttgggtacagaaaaggttaaaatggttggttgcaagcttttgacgatgttatcttttgacaattttttttagttatggagtgtgcgaagggactgagatataattaanttttaaatatatttgtaagtcattttatatttgaatttattttatgagtgtcttaaggaaatttttaacctgtataaaggtttttatgtgggaaaaaaaagacaattttgtctctagatctagtttaaattaactatagtcttcataactttgttaaattaagtttaaaatgatntttttttcaagtccgactcgagtagtgagttattngtttaattatggaattaattt

SEQ ID NO: 212496 - DNA, 260 bp, Glycine max
  unsure (1)..(260): unsure at all n locations
aattagnttataaaaggggtaaagataaatgtcggaaattaaattttgaaatatctaanaatgctntntaaaaattagttttcggaagaanaaaaaaatagaaaacacggagagggtgtaaaaatgcaaaaaggattccctattattatgctctcactntcatcattantttatcaaacttaaaatgcttaatccaatatctttaactttaatcgtaacccaactaatgaccaaaccagaataaaattaaatcactatta

SEQ ID NO: 212497 - DNA, 435 bp, Glycine max
agcttgtagcaaattcgaacgacaataacatttctctctgaagtcctattgagtcccgtaatatatcgagacgctcgaattttaaaaccgaagctcgtagcaaattcgaacgacaataacatttcactcggaagtctgattgagtcccgtaatatatcgtgacgctcgaattttaaaaccgaagctcgtagcaaagtcgaacgacaataacatttcactcggaagtccgattgagtcccgtaatatatcgagacgctcgaatttaaaaccgaagctcgtagctaattctaacgacaataacatttcactcggaagtccgattgagtcccgtaatatatcgagacgctcgaaatttaaaaccgaagctcgtagcaaattcgaacaacaataacttttcactcggaagtccgattgagtcctgtaatatatcgagac

SEQ ID NO: 212498 - DNA, 452 bp, Glycine max
  unsure (1)..(452): unsure at all n locations
tcgggtgtaaaantcgagcgtcacgatatattacgggactcaattagacttccgagtgaaatgttattgtcgntgtatattgctacgagcttcggttntaaaatttgagcgtctcgatatattaccggactcaatcggagttccgagtgaaatgttattgtcattagcatttgctgcgagcttcggttntaaatttcgagcgtctcgatatattacgggactcaatcggagttccgagtgaaatgttattgtcgttaaaatttgctgccaccttcggtttaaatttgagcgttcgatgtattacgggactaatggacttcgagtgaaatgtattgtcgtcaatttgctcgactttggtttaatttcagcgtctcattatactgacttatcgacttcgaggaaagtattgcgtagaatactgcagctcgtttaaattcagcgctcgtatatac

SEQ ID NO: 212499 - DNA, 458 bp, Glycine max
  unsure (1)..(458): unsure at all n locations
agcttgatgtcattcaaaacacactatgtagacctatttgtttattaaacatgcattggggatttaatggtattcattatgcgatataatttgttgtaacccgttactaaccaattaatattatcaactactcgtttggttaagcaaggaaattgttggtccaacaaaaatcatttacgcgtgcagcatacatcattgtcataattgacaacacataatgacatgcatgcgtattacagtttgagcgtgacaacacatttggctgacttcagtacacattttgaaactagcagtcgctcgacaacacattggttgacttgactacacattatcgacaacacattggctgacttgactacacatttacgcgtgtctattntttttgaaacaaagttaaacaaaggctctgtcacaaccatctatatatatggcagactaggctactaaatcacacatta

SEQ ID NO: 212500 - DNA, 429 bp, Glycine max
  unsure (1)..(429): unsure at all n locations
tctgtgnncagncacggctttgaggctggcgtgttcgattcagggaaaactaattatgttcatttcaaaatagtaatataagatatgatctgaaagtttgaaccctagatgaaacttggtcgcattatttttgttgtttaataaaactattctgatagcttatttgtcactcactgcactatatggaaatgagaggaaaaatgattgtgtttcattccccaacttgaacatccacacctgtgaatgtggttcacaatcaccgatctgtgatattttggcttcttatctatcttaattggaagcaatgacatgtgtatgaaagacagaaatattgtttcataatgtggggaacgtatttgtggttagtcatggtcatccattgcctatggactagtgtctattcctgaatatgttggggacaatcttatc

SEQ ID NO: 212501 - DNA, 430 bp, Glycine max
  unsure (1)..(430): unsure at all n locations
agcttgaaaaagccctagaagagggagcggatcttatagattatctactgcgaactcctctggcagnttgagtcagactattacgaaaactttgaggagcagtaggatttttgctagttccaaattcattatgaaaacctccaacatctacaggagcattactagaaccacttccattaaggaaatgacttgcctcgcgattaaaagcatttgcatctgcattttaattttaataaataaatgatcacttcagatatcatgtacagaataatataatgtgagggttggtactacattacaaactaacctgatgatgacacccttccatgaggaggacatgaactcattgtgctccaatctcgtgtcaagtgcctaaatttgagttgaagatcgaccacgctagaagaatggcatctggtaaccatacagt

SEQ ID NO: 212502 - DNA, 391 bp, Glycine max
tgaagattgaagaggatcaatctgtggtcatactcactattagtaggtcttcgcaacaactcttgtatagccgatctatgtgaaatatgtagatcgcttttaattctctccttctgggatgacttaattataatccatgcatccctgcctttgtttcggcaacggttggtttaagaaatgcgaaattgcagtcctcgttgttacgaaaattagatgcccgtagttgaatatatctcttataatttactctcaaatgttaaaattatacgtttgattccactaatataatcagtccagccttattaagtaaaacattggcgttgtacgaccgatcatcttatctgatcgataacacacgggtgttaacgcatatgctctcacttgttttttg

SEQ ID NO: 212503 - DNA, 442 bp, Glycine max
  unsure (1)..(442): unsure at all n locations
agctntagagacgtgagcatatactgtattatagtttattgtaccctntaattaaatattttctagattcaaatattatctcttcaccatcaaagttgatagtgtcatcaagatggtgatcttcatcatctgaacttgtgtctaatgctgattcagctntactggtggacgcataagccattagacatagattggcttcttcctcactgtcttcactagacgatgaatcgtctaggtcctcctaagtgctcatgaggcttttctttttggactcaaagaatttcctcttcttatcctttggcttttgaaggtaaggacattctggcttgaagtgcccaggattcttgcactcataacaaattattggactattctctttcttgtagaaggatcntttggatgaattgttgaacctagaggagttcttgttatttcacatctt

SEQ ID NO: 212504 - DNA, 442 bp, Glycine max
  unsure (1)..(442): unsure at all n locations
agcttgngaaagtcctagattgaatggaagcaaaaatatgtatcaagcaaacatttgcgcagaagaaaaggtaaaaanaaaattgtaaaacagaataaaggtaaacaaaatgactaaagaggttgctactctaaaggcgtctgaagttcaaagagggaaaatagcaaaacttacttattaccaccattatctgcactacgctccactgtgaactcattaaaccaaggtaagacaagatatttgatgtactccaagcatgggtntccttccactatcttgggcggcaataagctctttttattttcacattcacttcagcctatatccaaatataaagttattctggacacaacataagttttattttaaaaaaataaaggaaagttacaaataaaaggaaccactgaaaatatattcatcattaaggaacaaatagctatac

SEQ ID NO: 212505 - DNA, 429 bp, Glycine max
  unsure (1)..(429): unsure at all n locations
tcctaacatgtggtatcatctagtgatatccctntccattggactaaaacaaacagtttgggaacatcagagtgatgatcccaaagagtggtgaggaaagcaactgggataatttcaagttgattgtctactgaagttggtggcaattctatagctggttctggagtggaagatgatgactgaaagggtctaagaagagagcaatgaaatactgggtggatatgggatccttcgggtaattgtaatttgtaagccatagtaccaatcctttgtagaacttgaaatggaccataaaatggcttagccagctttgaaaacagctcatccttcattgaagattgctctgtaggacacagcttgaccaggaccaagtcacccacatcgacgataatatctcttttattgttatccgtaaagtgcttcatagta

SEQ ID NO: 212506 - DNA, 457 bp, Glycine max
  unsure (1)..(457): unsure at all n locations
agcttgctcaacatgctntatgaacggtctctagatgtcttattctttgagctggacttgggactagtaaggcatctagagatgctagcttgaaaagactcttctatgccagtgtgtaagctcgatcactaaggatggcctagccactggctgctatatcttcagtcaactccataactacgttaggagtctttacacggaaccttccaccaganggaggcataatgtccctacctttgattggattcgcaagccatcaatgaagatattgagatgaatcggctcactgaacccgtgggtggtggagaattccatagtacaccatggaaacaggcaagagattcacttatcgattcatcggggaataggtggaatgaagatatatccacctantccttggcgagcttggacttgaaaaatatatcttcaaaaacttctacaccacctcctcccatat

SEQ ID NO: 212507 - DNA, 237 bp, Glycine max
tcaaggctatgctctgtacttatacagagctctcgtgtatcgtcagaacttgccatgacttactacacccttagtgctgcgagatcacgtctatacacagaatactatatgtatagcaatgcagctactgatgctgttgtgcttcatgacacatattgtgaggcccctctgcttggatggaacactgactacatattgggacgcaaatgatcaacaccataaatggttcaggacttt

SEQ ID NO: 212508 - DNA, 336 bp, Glycine max
  unsure (1)..(336): unsure at all n locations
atctacaagattggggggacatctttgtcanaaaagaagtttttataaataaggggtagaacatatgtagaatttgcaacncttgctaaaagaaacaaatgactcctagtgacnntttattttattacacattgantaatagatctaattacttattataaaagtattattttattaagtctctacgcaactcacagaatgtctaccaatgatagaacgaactcacatcagagttacgaacaaagcgtggtgatacccctaccaaccctatatctaccctcaattcccaatgtccttgtgacatacctggtagttgtaagataaagaatcacaaag

SEQ ID NO: 212509 - DNA, 433 bp, Glycine max
  unsure (1)..(433): unsure at all n locations
ttagagaccatacaagtttcctaacgatttctaattatgtgggccattaagtctatcatatgctgacaatagccgagaagcccatgaatctcttcggcggcggagtaagtgtctgccatcaccttggccttggctaacaatcggggaagttcttgactcccgttcaaagtaagagcataccgatccatccacatgggtgcctcttggtgtaaagagtcgatcacccttnctctagcctctttttgcgcgtatacttgggcatattcgtccgcaatcctatgctcgtgggtcgcggctagacctaactcttcttggtacttggcgatgatagctagcatgttggtctccgtctcgcataaacgctgagacaagcttcttttggacttgaacaggcaactaacttctctttaaaaccatgctatgtgctcgcgac

SEQ ID NO: 212510 - DNA, 464 bp, Glycine max
aagctatacccctctaacctcataggcgaggaccacctccacttccaccaacaccaccagaaccaaccccataaccccttcttcttattcttcccactcaaatggtaccaccaccacaacccaaaagccagcaacaatgaagcagcagcaccaaacaccccagcagcaataataatagcaagattcttcttactaatcccaccacactttcctccaagaggacccccacataacccactattcccttcagaaccctcctatcaaatccattgaaaaacgcaggaattgttccagtaagcctattattggccacagaaaacttcttgagcctacccaaattccacaactcatatggaatcgaaccagaaagctgattattcgacaacaccaactcattaagatatgaacagttatcaattgtgggtggaataacctcagaacgctggctacttgacaaatctata

SEQ ID NO: 212511 - DNA, 449 bp, Glycine max
agcttggaaaatggcccttttgctttgaaatttttttgtgatggagttcccttcctttgatcatttaaatgtatggagggcatgtgcaaatgtgcgagtttggatccttttcttactcctgctgctactgaagagtgatattgcgtgttctggttctgactacttggttggtcttggaagctatgacattactggccctgctgctgatgttaacatgatggggtatgctaacacaggacagattgcatttggaattcacttcatgctgcgggctcgtgctttcattgttgcagagccaaatggtaactgggtagtgtttgtaaaccttgatgcttgcatggcttcacagattgtgaagatcaaagtatttgagaggctgaaagcaaggtactactagtgactagtctcaagagttattgtgataaagaaattgtggttcatgagaaatt

SEQ ID NO: 212512 - DNA, 511 bp, Glycine max
gctctgacaagacagtacacactgctgtcttctcaacaagataaattttgtttatcttctctaaagatacatctaataatacccataattataacagtctcaatatatttaaaaatattataattacaaatagatataatattgtaaattaaattaactaaatttttaaataagtcttatattgtgggacagcgagagtttatacttgaagattaaatagctctaacaagaagtaaaaatcagatccaagtatacataggctttattgcgtgtaaaaataatccatcattcacataaactcaagcataagtatataacagagatgatcaaccagcttgtcaagagcttttgccttggttatttaagcttaactcgattgactaattattataaagtcagctcaatcttttagattgttttaataaagggcatctcaactattataaaatattaacttacaggcatttgtgaggatataatatatatatgtgatatatatatatatatatat

SEQ ID NO: 212513 - DNA, 409 bp, Glycine max
ctgcagcttaacattcattggagcgggggatttatattatactcaatcggacatccgagtgaagagttattgtcgtttgaatttgctcaaaacttcggcaattcatttcgagcatctcgatatattatgggactcaatcacacatccgagtaaaacgttattgtcatttgaattttgctagagcttcgataatttatttcgagcgtctcggatattacgggactcactcaaacattccagtaaaagtattgtcgtcaaatttgctagacatcgacttcatttcgagcgttcgaatattactgactcaatcaacatccggtaaaagttattggcgttgaattgctcacactttggattaaattccaccgccgatatttccggctcaatagcatctgagaaatgtatgtcc

SEQ ID NO: 212514 - DNA, 300 bp, Glycine max
ctctgagataatttaaacgacaataactttctactccgatgtgtgaagagacccgtatatatcagacgcttaaaatgataccgagctctgacaattcaaagacaaaagttttacttgatattcgattgagtcccgaatatatcgaaggctcgaaatgatatcgaactctgacaaatcaaagacataacgttactcgatggtgatgagtcgtacatattaacccttaatgatattgacttgacaaatcacacatactgttctgtgtagatgtgccgttatttggtgctaatggtacgaatt

SEQ ID NO: 212515 - DNA, 422 bp, Glycine max
agcttcccaaggaagctacctagtctataaatagattcttgtgtaacactgggtggaactttgatgaatgaaagtcttatgagacacacttcaaagttccacttctctccctcttttattccttcaatttcgtgctccccccttctctctttcttttcctccattgaagcaccctctccaagcttcttatccaaggcactctcttggtggcaaagctctttcttccatgcttaattcctagtagatggcgcctcccctgtcctcttctcctttgacttttgttgcatctccatggtggaaaatcaccattgaaggacctcatcgaagctcaaagatccagcctccatagaagctccacaagcaaacttccatcaagtgggaatcagagcacaagagcttcatgtaggtgctccttaaacctc

SEQ ID NO: 212516 - DNA, 284 bp, Glycine max
  unsure (1)..(284): unsure at all n locations
accatggagatgcagcggaagacaaaggagaagaggtgagaggaggcgccatccactatggaataagccatggaagaaggagcttcaccaccaagataagccttggataagaagcttgataggatgcttcaatggaggaaaagaaagagggagagaaagagagaggcgggagcacgatactgaggaataaaagagggagagaagtggaactttgaagtgtgtctcacaagactctcattcatcanagttacaacaagtgttacacatgcttctatttatagact

SEQ ID NO: 212517 - DNA, 462 bp, Glycine max
  unsure (1)..(462): unsure at all n locations
agctnnttaaaattanattcaaatttctaaaatttgttacaaacaatttaaacttttggtaatcgattacataccttgtgtaatcgattacaggcatttaaattcaaattcaaaatttgcaaattgtttcagaaatcaatttagccactggtaatcgattacatcctctggtaatcaattaccagagagcaaatatcatatttttgaaaagataattgttcttaaaaaacattttgcaaaatatttcctttagccaaacctgtgcagcatcaattaaggaattctttctaagatcctatcaactaagtacatcattcttcttgcattntctgaattnttgacttgaatcgcgctcatctttggcatcatcaaaacttcatatcatatatgcttctacaatctccccctttttgatgatgacaataatntgaaatcaagataaatgatataccattcataatg

SEQ ID NO: 212518 - DNA, 425 bp, Glycine max
  unsure (1)..(425): unsure at all n locations
tctaaaagtaattttataacttagaaacttttcttcacacacactatgatgatgcacaatgcanaacaaatatcaaatgtactaagatgcaacaaccaagataacaaccaatacaaatgtcactcaagggagttaggcatgtaaaagccaaaacttattcaaaacttcttcaagcttcacaagctttagccttaggttgttcaccatgttgcttccctatctctaacaatctccccctttttggtttgatgatgcaaacttgaatccgacattgagtgcattnggaaagtcttgagaatggattgaagacatgatccttattcttatcctgaacaattccttaacacttaagaagagaactaatcattagcatcatcatcatatgtgtcaattcattatcatgtatcatatatatcaatatataa

SEQ ID NO: 212519 - DNA, 418 bp, Glycine max
  unsure (1)..(418): unsure at all n locations
agctntaccttgtgccactattgctactgcgtgtttgtggttagttntggcactgtcaattgcacctcctttacctaacatctttctttgtgggtctctcttactcagtcactctcatctcattctctgtattatctttcttttcttttctttggctttcctcacagtctatagaattccttttgagtcatagatgcttctctcacagaggttgaaccactgaatagaatattctaattagctcgtatgtaatgtcttatgacttgttaatatgttattagaatttcttatgaatttttaatcaggcttaattgcttctctcatcatgacatatgaactttcctaataagtttgctggttattatgtatttgactatctggatcttatgttatgacaatacgattatgaattttcaat

SEQ ID NO: 212520 - DNA, 213 bp, Glycine max
  unsure (1)..(213): unsure at all n locations
tcgattacgacaactctgttatctgattaatacataagagttttgcctctgaagaaattntcctaacttanannaatttcttcactcacactatgatgatgcacaatgcaaaacatatatcaaatgtactaagatgcaacaatcaagttaacaaccaatacaaatgctactcaaaggaattgggcatgtaaaatccaaaacttcttctaaact

SEQ ID NO: 212521 - DNA, 442 bp, Glycine max
  unsure (1)..(442): unsure at all n locations
agcttgccaagtgccaaacaatatgtttttgcatatggtaatnggatcaacaaaagcattaccaaattataactattaataaaatctctctgaatatgtggtttaattttatatatatatatatatatatatatatatatatatatatatatatatatatatatataacacgcacaaacaacaaaaaaacaaacataatcttatgttattggacaaaagcctatacttcacactggctggacaagtttatttaactactaaccattaaagtaaagaattgtatcgtttgagcacttttgctactatactttttttgttgataaacatatatagtataagttgtattactcttatataatgtccagagtttaagtaatattatgatattattgtacagcgatagttggtgtatgagttactgaagtaactattagcgactgag

SEQ ID NO: 212522 - DNA, 263 bp, Glycine max
aaagcacctctgctttgttcctcatttcaatggcttcttcccctgtcattatcctcttcactgccttctccactgcatcacatgaaatactatctccctgcattccaagccactgtttagcaccaacaggtaccccaattttaaggacctcaatcaccaacttctcattgaaaaattggtcggcgaaaataggccaagtgaccatgggaacccctgcagtcacttgcttccaacgtgaattccatccacaatgtgtcacaaac

SEQ ID NO: 212523 - DNA, 457 bp, Glycine max
  unsure (1)..(457): unsure at all n locations
agctngntattaagaaaatataatacttattctaaattactttgtaanagctgagatgacattgaaataaaacaataaattctgatgatgaagatatgaggattttgtaaagaaggttgatggttatttatgtaaaatcttgaaaattagagttggtttggtagtgaatataaaattattgtagatctaattataatcctttaagcaaatgtataaacaaagtaacaactctttaaagaatacacatatataacagataattacaaattattaatgctaagtaaataggtttaaattaaatcttgaatttatttgtttcattaagcacataaactcatgtgttaaattaaaataatttatgaatagctgatctcttttatactgctacgtactactcataacaaaaaatactgctacgtactacagccattcatatttacactttatattctttact

SEQ ID NO: 212524 - DNA, 397 bp, Glycine max
  unsure (1)..(397): unsure at all n locations
aattcataattctgatttttaattttgatatttagttttataaatgtgtaattctgatatttttgataaattatgagtattagatatttaaattaattataaattaaataaaaatcattaattnttaataaaagattactaatattaatgtaacgttagtatcgatggaaacattacatgccaccgtgaagtagagaaagtgtttacggaaaagaataagaatataacattgtgaagaatttagaataaattttgttaattcaactnttttaaataattaatttaataactcaattaatcaagattatgtggttataatntatcagagagaataanatcagtatttataagattagagaaatcaaaagataccacttatattttgaaagatcaatat

SEQ ID NO: 212525 - DNA, 458 bp, Glycine max
  unsure (1)..(458): unsure at all n locations
agctntgccgatttagttnttgctgatgaaaggatctatatgggtctgagaagaggcaaatttgattatcctactttgatgaatatgaagcttgnggaaaatggagagaataagaaggagggaggaacccatgttgtgattgtcgttcctacatggccaaatttcccaccaactcaacaatatcaatactcagccaatatcagcctttctcattacccaccaccctatcagccaagaacaaccaaccatccataagggccacccctaaattagccacaagactcgcctgctacatatccgataccaaacaccacccttaacataaaccaaaacaccaaccaggaaaggaattttccagaacagaagcctatagaattcaccccaattccagtgtcatatgctaacttactcccatatctactcaataatgcaatggtagccataatcccaacaaagat

SEQ ID NO: 212526 - DNA, 362 bp, Glycine max
  unsure (1)..(362): unsure at all n locations
gaagaatacctaaagcaactagtcaagacttcacaagggaagtatcgaaaaagaattttccaaaaccaaacatagcacaatgttggntttacagaaaagattttcaaacttttctaagttaccagagtatgtactctctagtaatcgattaccaattacctgtaatcgattactcagtggtaaagtttgatttcaaatgcttttaactgagattgaacgttccaaatattatttaaatggtgtaatcgattacaatatataggtaatcgagtaccagtgtatctgaatggtgaaatcatattaactgtgagagtacatctgtcatacatgcttgtgtgatcatcacatgtatggaatcgata

SEQ ID NO: 212527 - DNA, 464 bp, Glycine max
  unsure (1)..(464): unsure at all n locations
agcttctaaactntatacaagaatgaagctctgatactctttgttatacaagtggcctcagatatcttaagaagggggggttgaattaagatattccaaactacttccccaattaaaatctatttcactttttattcgagttataaattcccttaataatgaactccttaaatattgattcaaataaaacaatttgaatatgaatataaagcaataataaacaaaggagattaagggaagagaagatgcanactcagatttatactggttcggccacacccttgtgcctacgtccagtccccaagtaacccgcttgagagttccactatcttgtaaattccttttacaagttctaaacacacaaggacaatccttcctttgtgtttagaattcctttacaacaagagacccacggtctcttaatcccttagagaatgagaagaagaagaagaatgaatctctct

SEQ ID NO: 212528 - DNA, 440 bp, Glycine max
  unsure (1)..(440): unsure at all n locations
agcttctgcagattcataaccatcttggactatcgctgcatttcctctttccttgatctatgagaattgaaccattctgcctttcaggacaaaatcttctagtgtgaccttctcttttgcagtggtaacatcttatattaggcacatttccactatttctagactatggctttgatttcttcttctcaagatggttgtctttcttggttcgtttaccttggactattaaaccttcaccactcacaaaagccttttgcttatttctttcattcaattcttttgagttcagggctaattgaacctctaccagggacaaagattctctcccatacaagagtttctttaaaatgagaaaaagactttggtaaattacacaatagtaatagggcctgatcttcgtcatcaatagtcacatctatattntctagatcaagaatgag

SEQ ID NO: 212529 - DNA, 444 bp, Glycine max
  unsure (1)..(444): unsure at all n locations
tctagctttatgctgcactgagagatntgaagttttcattattcatttcagtaatggaagcttaaaactgcaaagatgttggggaaactcaaatttggttctganacttaacttctgtgtgattgtcaacttttgaacattgtgcatagaagcatatttcatgaccctatttangagtttgggctcaaccaaaccatggcgcttgaaatcaagactaagaagggaaatcgagtcatctcgactgaacaaaacccaagatacaaattntctatatttgttcagcttacttaagtgtgaagaattgaatgcaaaattagtgagacatttccaaaggtctttctcctctttactatctcgttctcttcatcttcatcaccaaacttccctctctttctttttctacccatatatatgccangatagnttctaaaatatttcatctat

SEQ ID NO: 212530 - DNA, 438 bp, Glycine max
  unsure (1)..(438): unsure at all n locations
agcttgaagagggaatntgaatgagacaaanaaaatgatgtgtttgtgtggtacaagtttaactaacaccttgggtggaaaagaattgcaatgaatgagagagggtactttgtttttattttaatgactcaatggttntgtttgtattctgtgaaaaattttggggaagtgctgttggcaaaatgacaatggacacaatgcatggtggtggaaggtggtgtatatttaccccaagaaaatatnttatttattttattttggtgggttcagatgaattctgttccactttccacgcaagaggtcaaccaacttgaggaaaggacaatggtattgtctgaagtatgatccacatttacccatcacaaattcaaagcaacatgatttggaaatgactttattgggtctcactttcttctcttctcttggaattggacccct

SEQ ID NO: 212531 - DNA, 334 bp, Glycine max
  unsure (1)..(334): unsure at all n locations
acccgcttagaggtaagggatgagtntatcacaattggggctaaactgaacgtgtgtaggaatccttagatgatcaaattgggattaattctggcgtaatttatgccgtntaaagtttgcatgtacaatgataacaacacattactcatgtttgatgggtcaactaatgccttgatgcgaatcggatggtttaactaagtgtttgaccttgattgttagaaacctagaaattcgtgaaatctcgattctcgtatgttntcttaatactgattgaagggctntgttccccatgatatgataatgtgttagtgagaacgtgtgatgagacatgtgt

SEQ ID NO: 212532 - DNA, 450 bp, Glycine max
  unsure (1)..(450): unsure at all n locations
agcttgccacccagctcgcccaggcgagcatgtttgtttcctccagaagcaacagccttctggaggaatcttctggagggcccaagtgggcctggttgctatttgcacccccatttttactaagtacaccccctgcctttttttggtgattcttttttcgtaaagttatggaaacttacgaatttcgtaacgatacttgttttctttccgtaatgttacggaaccttggcgattacataatcatcccctttttgacttacggaatgttacggaacctcactaattgtgcaacgatgcttccatttgatttccggtgtgtcacagaaccttactgattgtgcatcaatattntctttttttttccggcatgtcccggaatttacacattgcctaatgatgggtgccaagcacctcacaaggaccaaatanaagtcgcatgtcatcaagcaa

SEQ ID NO: 212533 - DNA, 324 bp, Glycine max
atggttgaagcatattgatagaaaaacaatgatgataatctcatgtatgtttgaactctggcacacccttgggaactatcaagccatccagctaccttgttcttttgggagcttatttaggactgacattatatttgacattcttttagggagtgatcttttgggttaagctggcttctttactttacaggattaacttcagctttgacatggatgaagaaatgaaatcactttttttatggatgcatgtctacctattgagaaatgatatctactggaaagattagcgtaaacttctaagaaggaaagttatgtatgataatt

SEQ ID NO: 212534 - DNA, 441 bp, Glycine max
  unsure (1)..(441): unsure at all n locations
agcttgcctcanagaggtccaggaaggataatgctgtctaatggactagntccgctcctgagtatgacagtcaccgctttaggagcgttgtacaccagcagcgcttcgaggccatcaaggaatggtcgtttctccgggagcgacgcgtctagctcagggacgacgagtatactgatttccaggaggaaatagggcaccggcggtggacatcactggttactcccattgccaagttcgatccagaaatagtccttgagttttatgccaatgcttggccaacagaggagggcgtgcgtgacatgagatcctgggtaaggggtcagtggatcccgtttgatgccgacgctatcggccagctcctgggatatccgttggtgttggaagagggccacgaatgcgagtatggccagaggaggaaccggtctgatgggttcgatgagg

SEQ ID NO: 212535 - DNA, 324 bp, Glycine max
tctcacctcttctactttgactgtcgctgcatctccatggtggaaaatcaccaataaaggaccccattgaagctcaaagatctagcctccatagaagccccacaagcaagctttcaccacgaagcttgtggatcagggagctaacataacatttcatgcatgtggaccttcttctaatatctctgacttgcagcagccacctatccctcttccatgtccacatagagcaattcccaacaaaagaatggaagaagtggaaaaggatatcttggagaccttctcgaaaggaaggtgaacataccctctgtagatgccatcaagcaa

SEQ ID NO: 212536 - DNA, 446 bp, Glycine max
  unsure (1)..(446): unsure at all n locations
agcttcaacaaacatttacctaatatttgtaactgtcttagaaagttgccagaactcccanaaataaaaaataaaaaaaataatgacacttttatcatttaacggtacaaataaacgacaataactaaaatcttatccctcatctagtctctatatggaagaagttcaaccttattaattccactaaggaacctagctatgcttgttctttcctccttcctaagtccaactcttaaaaggagtagttccatttgttgtctatattcttcaacactcatactcccttgtttaagcctttggagcttgtccataagctctctttcatagtaggagggaatgtgcctcttcctaaggacactcttaagatcatttcaatactctactggaggatccncatgaatccttcgctgttagtccaccaatagagggcatacccttgaaagcta

SEQ ID NO: 212537 - DNA, 388 bp, Glycine max
  unsure (1)..(388): unsure at all n locations
ctaagcttctactatgtggcanggcgggtttacttcactttcttgtttctttcgcgagctctgaccactgttcttccttcccgcgatgcttcttttcatgtccgcctgagtgggcttatatcctaaaccatacttcccacgattcccttgggttgttatcagactagttatgccgccattgtctttgcctaaacccatcccgggttcataaccgttccccaacataactcgggccatcattaccagcgcatcggacagacaatgttgcccaaagagggagttcacggatgaaatgctgaccacctcaaaagactggaaagcggtttctaacgattcttctgcggcttccacataaggcatggaggatgggcagcttaccaagatatct

SEQ ID NO: 212538 - DNA, 459 bp, Glycine max
  unsure (1)..(459): unsure at all n locations
agcttggctctagaccttgtcattggccccttcaacttattatgtgattctaggtccttatgctctttggatagccctctatcagaagatttctttacccattgttgttatattttgatatattaatactcttggtgatgttgtgtaatattttgaggggcagtgaataattttatctttctaacagttgtaatgatttcaatacttctatgtntatatcttaagggtcactgaggctcaatatgtatgattacacanttcttttagtttatcatcatttaattttgtgcaagttaattctttataaggtgtacttttattatagagtgtgtgagggtagacagaaaatggcaacaaccttcaaaatggtttttaaatagagaatgcatcttgacaatatcctttatttatgagcatcttaattatacgtacatgctttatatatatatatatatatat

SEQ ID NO: 212539 - DNA, 283 bp, Glycine max
ggacctggagatatgtcgcggtggtcaagagaccttggggatgtcatgtggggtgctatttgccaaaaccaagcttgaccaatcccgacccaacccgggcatatgttgtcagtgagaacctgtgatgtacctaagcaggcgagctcctggcagtcaatagataaaaggaactatgaccacaaagcaaggaggcttgtgtggtggctggccagctgtgaactctgagtggtacatgggatatggcctctggtaaatcgataccaagggtgggtaatcgattaca

SEQ ID NO: 212540 - DNA, 456 bp, Glycine max
  unsure (1)..(456): unsure at all n locations
agcttataagaacaaaattgccttaatcatttccttttatgcatgngaattaggaagcatcaacaagaatcaagccaaggctattgtgcaagcaatcaatgggggcaaaacacaccaaatgattatgatgatggatgactcaaattctcacaaaggtaaacttatcactttcaaattgagcttttaaaactatcatgacatgtagaggaaaaacaaggatttcaaatcacaaaatgtcaagagactnnttatttcaaaacaattacccattacttgaacatatcctataattcaaagaaaaacatgcanaagtgtacttgcaaatagaattgacctaaaatattaaactagaaagccaacaaaactaacaaaattaacaaatccaacaaaactagcaaaaccaaaaccaaagaacactcctcctccaccccatacttaacgactcattgcctcaat

SEQ ID NO: 212541 - DNA, 432 bp, Glycine max
  unsure (1)..(432): unsure at all n locations
tactaagcttatatgggctntctctgcattgctactagcatcagttatttttcttgctnttcttccaatatagcaagatcatgatccataacaccgagatgaaatttgacttgctcattccagtcagagaagttaagcccattaaaaattggtacagatgatacatgagaattcaatgagttgggaacagacactgcataataaaacttcacataagcattttggtacataaaacacaagtcgtacatataaattactcagataacaatcaatgtatattgatgttctcctttgggtgatacaccaacacacaacatacaaacatgatgatgctaataaaattcttaacattatttgacaattaaatatgcaccaattagtagtatctatttcatttgggtatatanataanactaatgatacacacaaatc

SEQ ID NO: 212542 - DNA, 434 bp, Glycine max
agcttgcttccagggggcggatttgttttgaatgctgaaggggtgccctggaagctcctgaggaaggacttgactactctggcacagacctaaagtgtcctgtcctattctaaccttgccctcacctctcacacgtccgatctgaatatggactgggcgaggttagtttatggactggttatgaagatggacatgggcgtgggcttgctaatctctggacagatatcacagatggcccagtccaactcctctaggctcggcctaccagcactgatcacaaccatatgcttcgcccgaggagttgtcccagactctcttaccttcgagtctctcagccctgccattaatttggtatatattaagaagaactactagaacctggatgatccttcgatcatatttccagggactcgcaaggcttatgctcgaggatc

SEQ ID NO: 212543 - DNA, 404 bp, Glycine max
  unsure (1)..(404): unsure at all n locations
cacagctgtcaccggaatcttaagaatgtcagaccatgtatgctttaatacaaaaccatctaccagaagaacagatcaatatattaattttcttttataatggacaagcatacacaatattttcatagcattttatctaaaagaaaacaggattgtaaggctatcatgatgtcaacaaatgccatcttagatgatgttaanatctgaatggatgtacaataaaagataccaagccaacaatcattggtaaacaaaggatgaatacgagaagagatgtcacgaaatagaattagcatacacctatatgagcaagaattatcagtcaaaacaaaaattctaataaataatttcctaatgattccttatactatgtacgctatgatctccaacaccttgatcacaga

SEQ ID NO: 212544 - DNA, 459 bp, Glycine max
  unsure (1)..(459): unsure at all n locations
agcttcgngaaagagatgaagaatatgaaacctagttattaccatcgcaatgttgtcggaggcgtcgcgactggcgaggaagagcaagagattcagagacagaaacggaggggcacagttatcatttcagtttctttctattctttaccagttgcgaacttagcgaatgaaaaataatatatatatatatacatatatatatatatatatatgacatagcactaacgtatcactaactgaaaaatttgttaggtatttgataaaaaaaaaaagaatttttaaataataatatgaaaatgaccaacattttaagtatgaaaaatttatttaagtccatctgaaaaataattttcagttaataaatgataaggaaaaaatttatcacaataaattatttcattctagataaaataataaatgacaaattctatcattttatgtaaaataaaaatggtaata

SEQ ID NO: 212545 - DNA, 335 bp, Glycine max
  unsure (1)..(335): unsure at all n locations
gctgttagtccccaatatggcattgtgggtanattggtatataatctggnttatgggtagcgttgtctctagaacatttccattggatttaatgatgaaatctgtgcatttttagatgaaaaagaggctaagttttgaattgcaatagcagcagttgggctaagcgcatatccaccgctaagcgcaacttcagagcgtngtagcgcaaaaagaatctggcagagcatcagcatcaaagccacgcgctaagtgggagattaatgcgctaagcgcagcaggtgcctttagccatgctaagctcgagactggcactaagcccgaatccacttactcgc

SEQ ID NO: 212546 - DNA, 453 bp, Glycine max
  unsure (1)..(453): unsure at all n locations
ctacccttatggtttgcctccggacttcactcttcgtaccgctccagacgaattgagccaagcccctaccttcgaggggcagctccctcctcatgccgactatcctctgcaagaagatgatgaaggagatgcccatttaggccctctacttcccctcaaggatccgaccccccatgagttaccccaaccaaacatagtctgccacgttccgtctccattccgcacccgtaaggaactcgttccctttgcctcaacgaagcccacgtagcacacaacatctcagtcgagggttttgaaggcattattaatcatataactaccaataactatatcgcgtttgcggaagaagagattcccgttgaggggagagggcacaacaaagctctacatgtgtcaattagatgcatggaccatgtcngtgctaaggtactcatcgacaatggttcaagctta

SEQ ID NO: 212547 - DNA, 390 bp, Glycine max
  unsure (1)..(390): unsure at all n locations
ctcagcttcagtttatcagctttatcttcaagattcattatctcactatggattaatttcttcacttaaggtcttgtctgatgattgtggcctttggagcttttaataattgcattaaatgcatgccctttcttatgcagtgaaccactctgattggtttcgtgtagaacacttcatcaaaaaaccacttccattggtcagagcaggtctgcaaaccagagcacantctttgatgaagatggtganctttaaatctngaacttcaattattcttcatagaattccacacatcatagaagaatgtctctacaaaacaaatctcagacataaaggattaaacgaagtcttaaattgtatattagaacatggtttagcttatcatcatctaat

SEQ ID NO: 212548 - DNA, 456 bp, Glycine max
  unsure (1)..(456): unsure at all n locations
agctgngatgttacaagcaccgtcatgtacaaggtatgaaatatgttgatatcttcttactgaattggtgacaggggtattagcaaggtacaaaatattttccatcatctttctcctctaaaccctaacctaattttttttatttcaattcacttgtaaaggaacacaaacacgagttactgtgttgatttgattaaaagaaaatactgaaatgggaactaatcttttgctatcaacttaccataagcatttaaactacttaattaaattatgagcaagctaatgattttttttttgttaaaaagctctcattgttgataactaacattgttaattgatgaccgtgatgcatgtttgtgccagatcattgacaatgtttcataatgcagaataatttattcttttgcagcattgtgattnttcaatcacacttggattttgataggtttcgattaa

SEQ ID NO: 212549 - DNA, 349 bp, Glycine max
  unsure (1)..(349): unsure at all n locations
catcaacctncatttctccgagaatacgactcgaacgcaacgtgtgcttgtcacggagaagccccggggcgttccattgagcatggtagggctctgaagcgtaaggtgcaaggtctaattgatgcgggctggctgaaatttgaggagaattgcgtgtaaatcctgacattgacaagagatgccacacatggggcaatnttgaaagctgttgttaggtgtncctaatgactcatcangggttccaaggttatgccatctattgtaaccacagctacaatgttaatgaaaggataaagtgatatctttgtcctcatctctccaaacgcttgtgttattaactttatcgaat

SEQ ID NO: 212550 - DNA, 457 bp, Glycine max
  unsure (1)..(457): unsure at all n locations
agcttatcttttaagcatagcaagtctgagaatattttctctactcaactcgatgcttgggcatgttgggcggtacatcgttgctggcgctggcattgatgagtgttggttntgattataattttggagcctcgagtgaagagcagagagccacttgctaccttgcttcttctcatggtgctccataaatcgattgcctcaataccacgatacaacagaaatggaaatcattccatttcattggggactttgatggcataattttgtgcaccatcatcattaacgattcacaatttgtgttaggattaaatttacatgcctttagttgtggatgtgaggtataattcttgtatttgattgtcaatatttgaaatgaaatgttataattgatgtactcttctaaatctaanaacatatttgcctttggagaattttgcttccagagtactcttaatta

SEQ ID NO: 212551 - DNA, 368 bp, Glycine max
  unsure (1)..(368): unsure at all n locations
tacattaagtgtcatcactgatatgttctacagnntgatttgcatggatntctagatgtcataaaatatgatntatggatatgatttaggcactctttctttctttcttaggcattttaagccactggccagaaagttacccaatgtatactgtntgccatttgcaagccctttgagccaaacacttgatattttgtctgaacactaaactatggataaaaggttgctaccttaccttatgttaggagaacaaaggtatcttgttgggaattcctatcattaggtggctaatgtgatgtacatacttatgttctaaatgtggctattcataacaatgaatattgtatagaaatgagaagaaagaaaag

SEQ ID NO: 212552 - DNA, 442 bp, Glycine max
  unsure (1)..(442): unsure at all n locations
aggaaactgaaggagaacaagtaatctaactgtattccatttatgcttaagatttctagtagcaaagtagnttttgtgtttttgtcaatagtaattgctgcaggctatgattattattattgttgttgttgttgtagttgttattattgttatttcgttagttttggattccctctatggttttgtctggccaactgtatttggtcaagtgatgtttcgtcttttttaagctttacagtatttcttttactactatttaattaattattataataattattctgtggcttgtttgtggcggtgtatttgctttaatattaagttcagttctccttggtcatatgttatgcaattagctgggtaccttctgttagttatattactccttgtaattgcttactgatttagatggttttcctctattatccatttgctgggttca

SEQ ID NO: 212553 - DNA, 284 bp, Glycine max
gtcttgggtttctctgtatttcaaaataattgcggccactacatacacattaaattattctctttttatttaccaagaagatatagaaggttcattattaggttgtaatttgcttaataatactatagcagagaagatatagaacgttcaacgcatttagtcttcgaaatttgtttgtacttgcttctttgtagtcccccccatgccaaaccatatatacggatggttagcactaattagcagtaaatatatacttcactggatttgttatgagcatggaaatt

SEQ ID NO: 212554 - DNA, 278 bp, Glycine max
tgtttttaagggagacatcctcaccagcagaaacgtacttctccacaggataataatcaatctgaaacccttgaccacacaatacacaatggcttgggttgacactctcactaaagcagttctgaacataacaatacaatgatactgctaatcataatacccacttcttatgaactacatacttcctacccacaacttcgaacgatctcacagaggttaaattgccattttgtaacatactctgggaggccagctatcagtaaatcacagaaacactt

SEQ ID NO: 212555 - DNA, 69 bp, Glycine max
tattattccctgccccttaaaaaatctctagatatctactggtccctttgattttggaccttattgaac

SEQ ID NO: 212556 - DNA, 446 bp, Glycine max
agcttgtaacatataaatattacattcgcatttcttttaacataaatgaaatttttaatgggtgaaacacacagtcttatcctcccaaatatcatgaggcactgtcatttctcggaaaaaccttgataactctagaagaagtcttaatcatataaaccatgaacaggaataaacatgtaattgttaacatcaagtacacaaaaatgtttcaacatatggtccaaaatttgcccgctgagtaagccataaaaaaagtttcgatgtagacggctttttacaaaaaagggacaaaattgtacattctttttatcggatgtatgttttaaaaaattacctaagagtggataagtcataacaggtgagttagaagtcgtaacatttgttatcactccttattttttaaaacacaactgacatctaaaataattagtaaaagaaattgcttt

SEQ ID NO: 212557 - DNA, 293 bp, Glycine max
cccattctatacatattacaaaaactcaagcatatcaaatcataaccgacaggtctcctcatttgctctcctcatttcttttctcatttctccaacaacatcactcaatccttaacagtatgagtacccaatcatcattcttctctgatgcgggaagttcttaacactctaatccttattctcttctttcttatttatggtgaacttcttttcttcttttaacattccaatcatcaatcgttatggatatttatggattacttcattatacgttgttcgcattatggaatcga

SEQ ID NO: 212558 - DNA, 442 bp, Glycine max
  unsure (1)..(442): unsure at all n locations
agcntttggtacanagaagaagaagaagaacttctttgagatttcaggctnngaaaggaattgaagaatttgttaaaaatatttgaaatgattgattcaaaatgcaaaacaaagccttgcttttatagactcttcatgtctggtcaagaaggccattcaaaagagttataacttttagaaaaacttaaaaaccatttgaaaaagtcaaaactatnttgaagagctacatctttagaattttcagacacaaacactggtaatcgattaccaaatatgtgtaatcgattacacaaagcttttgagtgaaacaatgtgactattcacttttaaatntgaatttcaacgttcaagaacactggtaatcgattaccaaaacattgtaatcgattacaaccttttgaaaatatttggaaccgtgtaaattcagtttgagaacattttc

SEQ ID NO: 212559 - DNA, 451 bp, Glycine max
  unsure (1)..(451): unsure at all n locations
gctcaaaggtcaagaacacttcatgataacatagatgatgatctaaagaatcaaagaacgagttcaagattgaatcaagaacaattcaaggttcaagaggaaatttgattccaagaatcaagatcaagattcaagaatcaaaggtgatgacaaaaagctcataggtcaagaacacttcatgattccanagatgatgatctcaagaatcaaagaacgagttcaagattgaatcaagaacacttcaaggttcaagaggaaatttgattccaagaatcaagatcaagatcaagaatcagagaagactcaatcagatagtatgnaaagtttttcaaactcagttcacatggattttctcaaaactttttgccagagaattactctctggatcattcccgttttgtatcgatacaatataaatgtttcaaagattcactgattacacgtcccttgt

SEQ ID NO: 212560 - DNA, 456 bp, Glycine max
  unsure (1)..(456): unsure at all n locations
agcttagccncaactgagaaggtgcctttatgtgtcttattcaaccatgacaatggagcgtactgcctacaagagctggatggcaaagtaattccacgaatgttgaatgccacccacctgaagttctactttagcttacctacactttaaacctaatgttgtagtcttttccctaatcaagtcttatgtcccaaaagtagaaaaatcaagggttttggtttaaagggtttttaacgtggcacatctggggtaatgaaggggatttgtacttaattaaatacattgaataaaagtttgcatcacttccttttgacatgtctcttatcaagacaagaatatccatagtcgtacctacaaggctcttaaaacccaaggtccgtccttgggaagccctccttctaagcatcacaactccagtatatgtcacccacgacgagtgacatatatgcacgagaa

SEQ ID NO: 212561 - DNA, 354 bp, Glycine max
  unsure (1)..(354): unsure at all n locations
ctgaacttagtctgaatggtagagacaaaccaatataaatatgggtcttactttctttttagttatcttttgtcttaaactgacatagtatttgaatttgatcttgtttgagaaacatatntctatttttaaaatatgtttccatcgtctaaacttgttttgcgcacatttgttatctcngtttattaagttatacttcanatgataactntaattntcacgaagaaagacttaagaatattcttaaattacaatttaacgccttatgatatttctaattgtagttactctattcaagactttanctttgatcacttaataacattgaaattcatagtctattaacattattat

SEQ ID NO: 212562 - DNA, 93 bp, Glycine max
tcagttgctggctgatacaatgtaagccatcatagactatgtattccaatccatgatcggtgctctaagcctctccgaacgtccactgctagt

SEQ ID NO: 212563 - DNA, 459 bp, Glycine max
agcttaaaggagcactcaaactgagtgtatttaccctctaggtctacactccgaagaatccgtcagggcatcccctcctgattcaggtccaacccataaaatattttagcacgcagactatatctatgaattgtataaaacacacgactcctcaattggtctcaaaataattatatctcgtcgcacttgtgattaaactcgtcgggtcccttcagtgattcccatcacaataatcggcgtgcattaactcatcgcccttaaaaagtctttgagtcatgtgattgtactataattcatagctcacaactcactgcacacaataactcaatgcacatatatattacaagtcaatacatactcaatttatcacatacacttggtctcaatcataatgggataatcccaattaaatatgttatcacacctcatgaatcatatacactttacctatgaactatg

SEQ ID NO: 212564 - DNA, 410 bp, Glycine max
  unsure (1)..(410): unsure at all n locations
cttctagtcatctcatcctacagagaagctaatgattctttaaccgtgttgtgaaccttgaaaccacagccacccacaacccttcaccctcctcttcctcagccacacctacaccacanactcaaccagttattccacacagactcaaattggatgtccctcattttgatggtatggacccatcggggtgggtattcaaaattacccaactttttgaataccactcaaaccnccgatgccgagagactcaccatcgcatcctttacatggacggcccgactcttgcgtggttccagtggatggctcgtaccatcaactgtcgacctggtccagcttcctggaagccatatatgcccgatttgcgcaatcaccatatgatgacccaacaggtcttcttttaaaataacaca

SEQ ID NO: 212565 - DNA, 437 bp, Glycine max
  unsure (1)..(437): unsure at all n locations
agcttcgacaaaattgccactgtattcatacgcattcacaattgaannccaatatcccgccaccaaaaaacatattgctccaagtgtacaaatctctatctttcattttgtcaaacatgttgagtgcctaaatcaccaaagtcgaggttaaggatttattagatataaagncatatcatatattcacatattttgcaaacatacagcacaaaaactaacctgttaatatgacatactatgcattacatcatatatgacaaacatataacttgacatattttaacatataatatcaatcctttatacattttgcaaaanaaaaatatctcttttttattaacatggaaaggtgaaaaaatgtaattacacagttacaaaacatgggatggtcacccctctagcgtcatctgaaatcagagaagcttgttgagggggac

SEQ ID NO: 212566 - DNA, 343 bp, Glycine max
cctcatcgtctctcacagtctttagaattgggagctaatctaatccttgggttcggactctcagccacatatgatagccgccgatgatcccattactgcttcccctaagctctctgtcctttcttcacgctgcatcccatgccttgcgaactccttggaataccctcgcgttgtggtcactgaaaccccatgcgatgaaaggcgtgatgctttcgtatgatggcactcctctcatggggtagccaagctatcttatgacgaggacgggattataattaatacaaccccttgttccatcaagggacatttggacatccttcgcatgaagatagaatcctgattc

SEQ ID NO: 212567 - DNA, 461 bp, Glycine max
  unsure (1)..(461): unsure at all n locations
gcttgtatataaggttgtagatgacttgaataagttggttaaggagattcaattacaagaaaaaaataatggtcaatgatgaaggtgatgtcccaacattaacgaaagaatatgtgacataagaaaatgggtctaaaaatattgacttgggttaaagagacacagaaaaagagttgggttgagtttgagtataaataaaacgaaaagctcaaatagtgaaactttcaccaagtctaagatttgggatatataaagttatatttaaatcaacttttatttttccttgattacaagtattgtgttaattttaatgtttattatttaagggaattgaatctctaaccaagtggattatgcaacattcaatttgacacatccaccacatgaattcaatcaaacaaataanaaccaaattagtttcactagaattcttgtggtatgatctgatatgaacctactat

SEQ ID NO: 212568 - DNA, 449 bp, Glycine max
  unsure (1)..(449): unsure at all n locations
agcttncacatcaagcaagttcatctcaaagctcttatgttacaatagaattcaaaagttagagaatttgcttggaaacctngtagttgtgcttaaagtacgatttgcagaagatccacaaattaatcaagtcttagaagttatagatcaagaggtatgaattcataattctacttattcaacgatttaactatgatatgatactttacaaagaaaaaacatacttttaatttatgtacctacaaatggttctaccagtaaagatcatcaaactacaaacaatcttaactagaggtgagttgaaatttagatgataatgaagatgtgagctggcgacaaaatgttatttcaggaacatgatttagatggtaatgaagatgtgagccggcgacaaaatgttcaagtggttggttttactttgctatttgccagcatttgaataactcttt

SEQ ID NO: 212569 - DNA, 313 bp, Glycine max
  unsure (1)..(313): unsure at all n locations
caacccccagagccctattaatatgntttactagaaaaaggaccagctccacgcccatttacccccggacagcacccaagccgaacgccgttgcatatcagagcaataaggccgttccgtggaagtatacccctcccgcatttggagaaagagttgaaccgagagtgactgcctatcatccaatgtgaccaacatcatcagcctcagtggcgtaacccgcaatggttggatgttcgctccccctcactcggcggaattgccctccaacgggaaagcgcccatggtccaagaacccacagacatagccaccccc

SEQ ID NO: 212570 - DNA, 465 bp, Glycine max
  unsure (1)..(465): unsure at all n locations
agcttgtgaaaggaattacaatntatgtttaaatggttgtttttatgttagaatgttattatattaataatttaaagatgtttattgttaatttactccttcaaataaatgaaatatatagctattatatttatcattttttgtactaaaaagtatccgtaaaatgataactacattattctttcatgaaaataaatgggagacgtttctaaatttttggactaaattaatggtaaaaaatatttgtaatgataccataatctctataggaatagtttacaaagtttgtcgcagacttattcagctaacacaccaatcaagacctctcccttcttctaaattattcaagatataatagattatgggtctcgtaatgctaatagtcttgtattgaatcattgtgccatgtataacgcatgtaattagtatcatatatttagactatacccaaacaagtaacattta

SEQ ID NO: 212571 - DNA, 482 bp, Glycine max
  unsure (1)..(482): unsure at all n locations
ctaagcttatgatatattgttggagtggcatcacacatttagttcttctattgtgattccatatcctctgctattgtacttcttccattctatnntctaataacactctgcatgtttaggaatgatntatcttccagaaataatcacctttttcttcaaaatctaccttaggaagttgacaagagtaagtgattatttctcccagttagacatgcacttgatctggtaggcagaaaacatgataaaatgcatatacatcagagtagaaagattatttggatatcacatttaaaatcaatggagaacaagattatagaagagcagatatctccaagccatgaatctgttataatggagtattaagacatgactcanatagctcaacagataaatgaacacttgcctgccccttgttgaagaatgcactcgtcataacatcaatctcctttgaagccactatacgagaagcttacttgaaactg

SEQ ID NO: 212572 - DNA, 450 bp, Glycine max
  unsure (1)..(450): unsure at all n locations
agcttcttctatttctaacactggaacactctggcatatataatatggaaggttcaagnggaaccaaaatgccaaagccttatatggagaatatgcaaaaatagtgtttgtgaggggaaaccttcaaacaaagatggacatagatcatgtgtgcccttgttgtggagaggaatatgagtctttggaatatgcactcttgttacgtaaggaagtacaaccaatctggtttgctagcccagtgagtggaagaatgagaaatgcccaccaaagctcctctaatcagtggcttgtggattgtttgcagctgcaagatgaagagttcatgaagcacacttttggtattatttggtctatcttgttaagaaatgaatgaattttcaaaaggagacgaccttggctggagaatattttntaatctttgatattatggttggaaagagggaaggaaat

SEQ ID NO: 212573 - DNA, 488 bp, Glycine max
  unsure (1)..(488): unsure at all n locations
tactaagctgatctaaatgtttanaatactttaattaatattgaattctttttctttattaatatatatgcgagggggagagggtgtcacaatagatggatcccatgtgttaaatattaggccttttcttgttccaccgtgtatatttcttctacatccaatacttatatgaattttctaaaattacccttgctaataaacgaattcgtgacgaaatagttgcattcttttcttctacatctgatttgtatcatatttataaaatcaattctattcatccgattgcccatggagagaaagtatatgtccgaatcaaatataaatgctcttgaaaaatatggtctgacagtgatggccttaattatgttgagaactacattgaagctaaggaagctgaacgaaatatggtgtttgcagactcagtgagcccactccatatacatgtatagcatgtggcaaaccaacataccttcactttccatagttaa

SEQ ID NO: 212574 - DNA, 446 bp, Glycine max
agcttagccagactaagcagctgtaagaagaaagcttatttctttggaaaggatccactcataacagaaagcataacataattgggagtggggaatcaaattggttgtttcgaccttgtagggtgctgtagtgagcatatccttatcaatcttatgaattgtccatatgattcatactaattacaaattcttatgtttattatcatagatagaccaaagttgcagacaaaaattatgcttcagccgctacaccgcaacatcaatcacgatgacaaccaccaacgaaccttcgctacattacacctccatcaaaccatgctcaataataaaggaggaactccggctaataaaacgaatatgaataaatggtgttgacaacaatatagaaggaaggatgaattacttactgggtatttttatatattccaacagtgtcgcgttaatat

SEQ ID NO: 212575 - DNA, 351 bp, Glycine max
  unsure (1)..(351): unsure at all n locations
catggaatncgagatggtcctcgtcttggacgactaagagtattgaacaaggttagatttttcatcattgccacattatcatgtatcatattattactattactactgtactatgtctatgtttggcagtagagaaagagcccagctagaattggacgaacaaaagtgtgtttcaattttcaatccttccattttctagctttagagcctgctctaaatttcttagacactngcatgtgtcttagaatggacaattgtatctagtgacaatgagttatgcattcggtgattactgcatgttagaatactggtcctgcgtgctgaatgacttgacgagagcatgctcttata

SEQ ID NO: 212576 - DNA, 284 bp, Glycine max
ccaaaaccagccgaagcgaaacaccaagcgccaatgtgtcttacaccaacccagggcacctcccgaacaaatccgcccgataccaaatgccaacagacgaggaaaaaaaaacccggcaaagacacctaagacggcaagaaagtcacatgaaattaggggacaaaccaagcagggcagaaattgccatagggaacaaagacctatagccgaacattccgcaagcatgagaagcgggccaaatgaggccagaaagcagagacttatatagatgggaaaccgacaaa

SEQ ID NO: 212577 - DNA, 445 bp, Glycine max
  unsure (1)..(445): unsure at all n locations
nnagctttgctaattagtcttcaccgacgaaaggatctttttttgtatganaagaggcaaatttaatcatcttgcttggacgaaagagaaaactggggcaaatgaagagggtgagaatgagggataaacccatgctgtgactgccattcctatacggccaaggttcatcaacctccatttctccgagaatacaactcgaacgcaatgtgtgcttgtcatagagaagccctggggcgttccattgagcattgtatggccctgaagcataaggtgcaaggtctaattgatgcgggctggctacaatttgaggagaatcacgtgtaaatcctgacattgacaagagatgccgcacatggcgcaatattgaaagctgttgttagatgtcttctatgactcatcaggatttccaagtttatgccattattgtaaaccacaattacaatgc

SEQ ID NO: 212578 - DNA, 143 bp, Glycine max
  unsure (1)..(143): unsure at all n locations
atccttaagacacctgcggcagcaagcttgtccaccacatagcaagggagttttggtgattcaccangcggcggtgccaattggagaatctctccaataacaaaatatcaaccaagtagtaaaagggtgatcaccgagacact

SEQ ID NO: 212579 - DNA, 189 bp, Glycine max
cactgacatccgacaaatagctcgatgagctatgaaaaaaatcgacatgacttcaacgccaaaagaaccaaacctgaaactccacacggataactacgcgaacctaatatgagcaaatcactctatgttattccctataaagaaaatgggaaatctttcaatagttgctgcactataccgacgcgaaag

SEQ ID NO: 212580 - DNA, 454 bp, Glycine max
  unsure (1)..(454): unsure at all n locations
agcttctnctctttcccatgagtagcaggggcattattgttttatttagccnncnctcgctgagctgcatcaaagattctacacatgtagggcaactgtgcgaagttgtgaataccgtgataatttaccatcatctttacttctgggcgcacgccattgacaaattacacgcatttggacctcccccctgctttcccctgataatgaggaaaataccttacaagggtctcaaacctcgctgatactctaccaccgtcatactattctggtcagctcgagaaacgccatctcttcctattcttcacatcttctggaaatactacaccaaagaagttgtcttgaattcttccattggacaacaacaccagctgctacttctaacctgggcgagtgttctcccaccaatactccgcctcatctgctagcatgcgagtagcaaacaacaccttctgat

SEQ ID NO: 212581 - DNA, 287 bp, Glycine max
tagatgagatcacagctaaatacatttctagatgagattagatgagataagactagactcgatctaattttgtagcataaaatagtctgtccttctcaaatccaagcccaatgcttcattaattcctgaaattagatcaaaaacatcaaatcagctgaatgggcgccaatcatataactgcctaattaagttgacaactaatatgaatcacgactcataatggtgcacaaagggttaagaaataggataaaataatggcacatcagccctctcaatgagtcaatctc

SEQ ID NO: 212582 - DNA, 455 bp, Glycine max
  unsure (1)..(455): unsure at all n locations
agctngtgaatgggccaaactgaaagtcggttgtgatactttatactnannnacnaaattcggactttataacccaatctaatcatggctcaaaacttagtctgcaaaaaaacttgtacaatgtgagcttcataccataaaagctcggattgaatcttggcttttctacacgacctattatagctcgcaactagcattgagctcacaagagactcacttcaaactatcttgatgaaatgttgggcttcaactgtaatattctcaaacgaaataccgttgaacctttttagcccaatttgagcgtaacccacacaaaaagtgcaaatgaaacttcactcgatggaccttattttgaaagccgaactaaactcacatccaacctagttccaacttgttcaatgaagatgaaggcttatactttatacatttgacacaatatacatatgggcatcttt

SEQ ID NO: 212583 - DNA, 296 bp, Glycine max
  unsure (1)..(296): unsure at all n locations
catggctctggaaacctaatgagactaacaatagactatgtggttaactaagtatntgtattctttctatatacatgttactcgtcctttccatatgaggttatctgggagacatagatgcacagaaagctctgttactttctaatgtaagaacgagcggcttcataacctcattttaggtacattagcttgaacttggacttgatataacaagaggagcatatcttgcgggaacggaaattgttgctgatgggaaacgaggaactggactaccggaagtcaacaaccccatatgt

SEQ ID NO: 212584 - DNA, 434 bp, Glycine max
  unsure (1)..(434): unsure at all n locations
agcttctcgatatatgatgtgcctgaatctgacttctgtgtgacaagnnatgaccattngaatttctcgacaccatacgctgatcaatttcgagcgtctcgatatattatgcgcctgaatcggatgtccgtgtgacaagttatgaccatttgagtttctcgagagctttcgtggatccatttccagcttctcgatatattatgcgccggaatctgacttccgtgtgacaaggtatgaaccattggaatttctcgagagctttggttgatcaatttccagcgtctcgatatgttatgcacctgaatcggactttcgtgtgacaagttatgaccattaggatttctcgagagctttctgtgtataatttccagcctctggattattatgcgcctgaatcggcctttcgtgtgacatgttatgaccatttgaatttc

SEQ ID NO: 212585 - DNA, 289 bp, Glycine max
  unsure (1)..(289): unsure at all n locations
cctctcgatatattatgcgcctgaatccgacctccgtgttttatctattaccaccngagnttctcgagagcttccgttgttcaatttcaagcttctctatatactatgcgcctgaattggacctccgtgtgaaaagtatgactacttgaatctttcgagagcttccgatattcaatttcaagcttctcgatatattatgcccctgaattggaccctcgtttgataacgtatgaccatttgaattctcaagagctttcttcgtcaatttccagcgttctgtatattatgc

SEQ ID NO: 212586 - DNA, 455 bp, Glycine max
  unsure (1)..(455): unsure at all n locations
agcttaagggagacttgcttgctccctctgcacaaatttcccaangnccctaatatactcatatgttttcatgggagagaaattgtaatgacctgcctcgtcgccacgatatcaccactataaaccgcgtgaatttcaatttttatatgaaaactccgttaatttgcttataaaaaatgaaagtacattttttgcaatataaattcaccgaacaacacacaagggtgagtttattataaaagaaattaacacaaaaaatcaaatgaccattattaataagaaaacattaacanataccataatcatacacaaacatccattagtccaacatacactcaacangtagtcatctgccttccataattccaatcaatcatgctcagtatgatgcatgcacctaacctcaactctcaaatgcaatgtggtaccatttgtcaggaaatagcctaagcatg

SEQ ID NO: 212587 - DNA, 417 bp, Glycine max
  unsure (1)..(417): unsure at all n locations
ctcagctctcaggaagtttcttagaaagcttctaaggaagctacctatttctataatagaagcatgtgtaacacttggtgcaactttgatgaatgagagtcttgtgagacacaactcaaagttcaatttctctctcttttttcttccttcaattntgtgctcccccctctctctttctttctctcattcttttcctccattgaagcatcctctccaagcttcttatccaaggctcatcttggtggtgaagctccttcttccatggcttattccttaatggatggcgcctcctctcacctctnttcctttgtcttccgctgcatctccatggtggaaaatcaccattaaaggaccccattgaagctcccagcctncatagaagcctcacaagcaagcttccatcatcgtacgtgtgat

SEQ ID NO: 212588 - DNA, 458 bp, Glycine max
gcttccttgagacacttccttgagaagcttccttgagatgattcctagagaagctagagcttagctacacacacctctctaatagctaagcgcaccttcttaagatgagaagctggagcttagctacacaccccctataatagataagctcaccccatgacaaaatacatgaaaatacaaaaaaaagtccctactacaaggactactcaaaatgccctgaaatacaaggctaaaaccctatactactagaatggccaaaatacaaggcccaaaagaaggaaaaacctattcaaatatttacaaagaagagtggatccaaccttggcccatgggctcagaaatctaccctgagtatcatgagaaccctagggccttctttagtagctctagcccaatcctcttggatccttctatccaatacccttggggggtgagaatgcatcactagacaaactctt

SEQ ID NO: 212589 - DNA, 436 bp, Glycine max
agcttcctcggggccattcctgcgaaggcaaacatttgtttagttagttttagtgggacattactcttaaagcaaaaatggcatataacctcctcccataaatacaaacatcaatgtaaatttagagcaagcttatgcgcctatttccttacaaacgttctcttgcacaagacatttaaccgaaaaacatgcgcccatttacaatcaaggcagcttcgttacctagattatttacacgtacctccaaggtgtatttgttacttacatcacacacatctccttggctaaactcacatacatgcatactcaagcattttggggcaccaaaaattgcacatgtgcacatcttggcatttctaatacctacatacgcaaacttcatgatgaatcttgactatctacacaataaggtgctacatatttaagcatatttttc

SEQ ID NO: 212590 - DNA, 250 bp, Glycine max
  unsure (1)..(250): unsure at all n locations
agtatgacagtcaccgctttaagagcgctgtacaccagctacgcttcgaggccatcaanggatggtcgtttctccgggagcgacgcgttcagctcatggacgacgagtatactaatttccaggaggaaatatggcgcccgcggtgggcgtcactggttactcccatggccaaatnttgatccagaaatagtccttgaggtttatgccaatgcttggccaacagatgagggcgtgcgtgacatgagatcct

SEQ ID NO: 212591 - DNA, 219 bp, Glycine max
accggaaagacaacagacagaaaaaatattgattaataagaacagggagcagggcaaagggagaccagaaacccgcacggcaagagccaaacgagagaccggaaccaaaccacagccgaacaaccgaacgaagaccccaaagaccccccccagccgaggaaagagaccgaacagcgcaaaaaagggagaaaggagagaagcgaagaccgaaggaacaaa

SEQ ID NO: 212592 - DNA, 442 bp, Glycine max
  unsure (1)..(442): unsure at all n locations
agcttggttgttagaaagactccttgtggtgtacttattgttgtctactttacttgcacttactgcttttaccatagaagtagtttatatctgtcttaaccatccattatcaatgttattccaacaatgccttatctctgaataaaactctatctaataagcaagttccctgagttcgatactcggatcattccgttttaattctaaatacttgacgacccgacgaatcggattttccttgaaaatattnggatagaggaaaataggaccaaaaagtacctgcaggggaaattcaacaaagtatttatggcgccgttgccggagaatttaatgccttatatttttctctctgattcatcgattctttttgtcatattttaggtattgcacattttattattctcttgaaatggataattggtggtttggttctcttgtatgc

SEQ ID NO: 212593 - DNA, 467 bp, Glycine max
  unsure (1)..(467): unsure at all n locations
agcttatgctgcaaatatttacagatagacctcctcattctcattatcanaatcaaccacagcagagcaattatgatctttacagcaacagatacaaccctggatggaggaatgaccctaacctcagatggtccagacctcagcaacaacaacagcagcctgctcctctcttccaaaatgctgatggcccaagcataccatacattcctccaccaatccaacaacagcaacaacctcagaaacagccaacagttgaggcccctccacaaccttccctttaagaacttgcgaggcaaatgactatgcacaacatgcagtttcatcaagagaccatagcctccattcagagcttaaccaatcagatgggacaattagctactcaattgaatcaacaacagtcccagaattctgacaagctgccgtctcaagctgtccaaaaccccataaatgtcagtgccatttcattg

SEQ ID NO: 212594 - DNA, 335 bp, Glycine max
  unsure (1)..(335): unsure at all n locations
acacggagagctcttatgtattcagatgaaatctaatcgatttacatatgtgataattgattattttgagctatagagactctcttctttngaagctggctctggtaatgtttacaattcttgtaatcaattaattgagtacttgccatatttcagaaagtacgttgtgcttgctcaatactttgaattaattatctaatccttgaaagctatgatatagtgttgaacttatcgcttcttatagactttgagatctattcatatatcttctcatgtttgataaccactaagcatgtataaagaaaaataagtctaaacacttaacatgcctagtc

SEQ ID NO: 212595 - DNA, 419 bp, Glycine max
agctttgaaatttgacgggttatgtataatgatgtttgaactctgtaagcaaccaacaacgctgtgaaggcatcattactttaactgacaaaatttgcacaccttgtttgtttgttaaccttttctacttttgtatcagcgtaactggcttgtatcgaaacaaccttggatgttctctaaattcattcttcattctgtattcttctctttccaaaggagacatcaaacgctcgattggacttgcaaatatctactataaattggtttttaaaaatatttttctatttttattagtagttaaaaatgtattttcgtttcaagattatattataataaaataaggaatttcattatttgtactttttatcagtatactaattttagaaatacatataaaataaatgatctggaaaaattat

SEQ ID NO: 212596 - DNA, 434 bp, Glycine max
  unsure (1)..(434): unsure at all n locations
ggtggacaagctggngccctactacttcagagactctgtttattatgatgaagggntcgaaagcaatcatacactctgaagtcattctatgtacagacaagccactagtacaaattctttgggtagagacaacagatagggatggagaacctccgatgtttatgganaagatagaaacatgaatggtgagaatttgatttctataagacctctgttgaatcttgttccatgtaaacataactcttttgattaatacaagtgtctctttctctcttctatttattctatctggcaagacatgataacaaanatgagatgcacggatacatccatacggaataaccagacataagaacttattgttatatataaacattcaatacctcgataaataatcttgactctggtaagatatcgtttcaaaagaaaaaaat

SEQ ID NO: 212597 - DNA, 300 bp, Glycine max
ccccaatccagaaaaaaaaatacaatatttgtaagagagagattctctacaaactccaactaaaatataaaaagtggtgctgaactagctatacttctaacccgctgacgtcttcgaagataaaatacaaaatgaatcatcacgactcaaatgacacacaagaaaaagaaaacagaaaataatggattaaacattattaattatgacccgcagtatagggggcgaataaacacaatattgatgaaagtatcaagagaggggcgggcggcgcacaatcgaaaccgtgaagaggaaaacaca

SEQ ID NO: 212598 - DNA, 218 bp, Glycine max
  unsure (1)..(218): unsure at all n locations
aagaaccaccaaaacaangccaaaagcaaagctttttaaacccacgaacagccagcatggcagcacaggcaaacccgagaatacaggaggcaaaccacaagaaaacaggaaaagacccaacacagaagtgagaaacagagtcaaacaaagccaaacatatgcaacaaacattcgaacacaaaacgaacaggacagagcgacgagccacaccccaaaca

SEQ ID NO: 212599 - DNA, 462 bp, Glycine max
  unsure (1)..(462): unsure at all n locations
agcttggcatgcatgtgggcataatcatgaatattttcatgtatatgatgantncgctttcaaaaatattaaattgaaaatacattattgtcattaagcaatatttaaatacattctataatctaattatgaaacatagaaaaatcaaatgcaattcagtttcaacacaataaagtaatcataaacaatcaattacagacttatataccttgtattagattcatgtttaccattaccatatcttgcacttatttagntatatactcccggtaaaatgtaaaataaggcgctatttatcggttcaatttggatggtcatgacttcatggccagaaacgacacgaaaataattatataatagtaaattactgcgattgaatataataataaaccaaatcatcggagggataacatttggaaagttctaacactgctatatgatcgttgacaatgccacactact

SEQ ID NO: 212600 - DNA, 377 bp, Glycine max
  unsure (1)..(377): unsure at all n locations
atagagggtcagtttcaagtggggatcatgtctttcatactcagttagaccgccagatatttcaacaggagatggagttcatcttcatgttcaattccaccaaccctcttatgttntgaatgagggtagtacgggaaatttttctatggaagttgttatggagtcacctcttgatcaaagggtgcctggtgtttagttctaattccctttgaggttaatgataatgaagcaactaagtaatatcttggcaaatttcctgcatgggttacttttagaaacattttcccgacatgggtttgtttctaaagtaatccctgcattgtgctctatnttacgtagagcacatgcaaatcgcaggagggaatggcgctttccct

SEQ ID NO: 212601 - DNA, 367 bp, Glycine max
  unsure (1)..(367): unsure at all n locations
agctngagaaccccaaacccaaaatagagtacaaatttgtttttataccacatcctacaaaaccagattattacgcagtgcccaaatcaaaaggaaacgatgaactacatctgcttccacaatcattggtgtccaaggagttgttttatgtaaaacatattcggtaagaaatggaatacatactggcacatccaagccagagaattaggcttctatttatgtttaataacacaaatattcataatggcaagtgaccataaggtatgataggataactcttgagctgttgtacatatcatgtggaacatgacaaactaattagcactttaaggctgtgngtttataatgaccataatcctaattatgc

SEQ ID NO: 212602 - DNA, 453 bp, Glycine max
  unsure (1)..(453): unsure at all n locations
ctattatactaagcttatgagtgtcccatggatgatgcatggtagntntgttaattttctattcatcatcgncatatgtgtatcatggaaatgaaattgggtattcccttattcttgaaccgctggctaaacaaatataccaacatgcgtcatgtcccgccatccgtaggccatttgagccaaacctcaacagttttgccataaccttgacctaggatggaaatttccaaccttaccattggaagaaagaacagaaagatattcccaaaaaaaaaggggcttcttttaccttgggttataaatgtgcatcanaagaaatgaaaagaataaaggaaaggaagatagtcaaccaatcaaagattggagaatagcataaaagaaagaataatatagaaaagaaataataatacgataagcttctttggaccagacaagggttgaacaatatgcgac

SEQ ID NO: 212603 - DNA, 455 bp, Glycine max
  unsure (1)..(455): unsure at all n locations
gatcttaagcactgggctgcagctgcctanagaggccaggaagacttttttttaaggaactagttccgctccggagtatgatagtcaccgctttaggagtgctgtacaccagcagcgcttctaggccatcaagggatggtcgtttcttcgggagcgacgcgtccagctcagggacgacgagtatactgatttccaggaggaaatagggcgccggcggtgggcaccactggttactcctatggccaagtttgatccagaaatagtccttgagttttatgccaatgcttggccaacagaggagggcgtgcgtgacatgagatcctgggtaaggggtcagtggatcccgtttgatgccgacgctatcaaccaactcctatgatattcgtttggtgtggaagagggccatgaatgtgagtatggccagaggaggaaccggtctgatgggttcgatgagg

SEQ ID NO: 212604 - DNA, 96 bp, Glycine max
cttgcttttaacactatactatgacgtaagtttgcagcaactggtgagctctttgttgcatgaccctgatgcataattcctttgcaacagggttac

SEQ ID NO: 212605 - DNA, 396 bp, Glycine max
  unsure (1)..(396): unsure at all n locations
tgttcatctttatcaccaagtcgtataccaaccttgccctatccaaattaagatcaaatgtgtgagatgtangggcgaggtttgagtacgaaaggacactctatgtttgtgcaagagtggtgagggccttcctaagtagctttcatggtgcaccctctacattaaaacaaatcccctccctgaaatgcagagcctancagccagctcctgagggtctatgcgagttcggtagaagagtgagtatgatgtgtactgctcctctagctccaggatgaggggcgtctccaggaatgtattcagtgagttcccatcaaactttatcagtttccctctgactcgaacctgttttggagaattgtcttcagggtcatacaggttcgagtagaactccttgat

SEQ ID NO: 212606 - DNA, 339 bp, Glycine max
  unsure (1)..(339): unsure at all n locations
tactgatcctgtgggtatgcaatttcaattttttttttacaacttagcaaaatatcttggatgaaatggctataaaaatgggtaatgtggaggaaacaatatgggacccttctcttacttntgatctattaatcttaaccatnttttttataaatttttctgatcattgcccaggtttactcatatctaagaatgtggatggggggcctaagcctttctggatgctggactgctggcttcaaagataagtctttcaaggatgtggttatcaattgttggtcatagttagaaccaagagggtggggagggatttgtctcaaagaaaaaatcaaatgtctc

SEQ ID NO: 212607 - DNA, 456 bp, Glycine max
  unsure (1)..(456): unsure at all n locations
agcttcatgatgatgaatcaagttgattcaagtagttttgatgatgacaaaaagcccaagagaatgatttcaagattgagtcagcaagttcaagatcaagattaaatcgagattaatttcaagattcaagaaatgacatcaagaaagaatcaagattgaagagaagatgatttcacaagggaagtattgacaagaatttttcaaaaaccacgcatagcatagttntgttttacaagaaaagtttttctcanaattttctaagttaccagagttttactctctggtaataagttaccaatttcctgtaattgattactagtggcaaagtttgatttcaaaagcttttaactgaattttcaacgttccaattgatntttaatatggtgtaatcgattacaatatattggtaatcaaattaccagtgtatctgaacgttgaaattcaaattcaattatg

SEQ ID NO: 212608 - DNA, 401 bp, Glycine max
cacaacaagtttgcacatgcactatgcgcgcataaacccaccatcccctagttgccacctacaactgagctcacgcactcacaagtatcccatatgctcgtttatctcaacaccgggtccccatcaatcctcccaagcttccacaacatccaagttatacaacattcaaacagcacaagctatcacagcctagcataacagagcagaggcagaaaactctgctcaacacatcaaccaaaatcacagcttttctcactcatagaccacagtaacaattccttcgatccaattcgttaaccgttggatcgactccagaattctactggaagtctatagtgcatatgcctacattgtgaccgctgggatctactagcaaacatccagaactcattctgcactac

SEQ ID NO: 212609 - DNA, 451 bp, Glycine max
  unsure (1)..(451): unsure at all n locations
gctnttctgcttaagcaaactctttgccatatcaagtattgttatgtttcttctttatgctaaaccattgtgttgtggagtgtanggtgctatgacttcatgttgaatgccacatttctaacagaaatcttcaaactccctaaaggtatactctccaccaccatgtgtcctcaaaacctcgaacaattttactttgtctttcaaccattgctttgaaccttttgaaaacttcaacacttcactttagcctttatcaagtgtagccatatcattctattattgtcatcaataaaagagacaaagtatntgttgccaccaggtgttaaatgctcgagccncacatgcaactttaatgaagacatctttcaatgtgaactaaacaccagacataaactatgaagtttatcttaccagtttcaagttcaccgctttggatatcattnctattctg

SEQ ID NO: 212610 - DNA, 397 bp, Glycine max
  unsure (1)..(397): unsure at all n locations
attcatcatttgggtttgatgaaaaccccatggatcaatgcctataccacaaggtcagtgggagtaaaatatgtttccttggtttatatgtagatgatattttacttgcagccaatgatcgggtttctacatgaggtgaaataatctctctctagagaatttgacatgaaggatgtgggtgatgcatcttatgtcactgacattaagattcatagagattgatctcgaggtattttgggtctatcatatgaaacctatattaacaaaattctagagagatttcgaatgaaagattgttcaccaagtgttgctctcattgtgaaaggtgataggtttaatttgaaccaatgtccanagaatgaacttgagagggaacanatgataacattccttatgc

SEQ ID NO: 212611 - DNA, 384 bp, Glycine max
cgctcacttaccatcgctattaactgtttggaatgcatctcctcggagcaaaaaagaagaattcatcagagacaaaaaaggaaaagaaattccataaggaacaaattccttcaagaggggaaaagctaagaaagaaagaaatcccaatctagaatgggaaaagaaataatgagatttaaaaagaagactgctcaacggtcaaagaaaccagaagaaatgtgcagagaggtctttagaccggactatatctgaacaatacagaattgtcaccaaatgaacaacaacaaggaaaggagaccatgacctatcatggtcttctccctttaattgccaaccagaatcagtgcgctagcgactttttcgccccgcactatacaaaaatag

SEQ ID NO: 212612 - DNA, 434 bp, Glycine max
  unsure (1)..(434): unsure at all n locations
agcttgccacccagctcgcccaggcgagcagggttgctttttttataagcaacagccttctggaggaatcttctggagggcccaagtgggcctgattgctatctgcacccccatntttactaagtacacccccttgcctttttttggtgattcttttttcgtaaagttacggaaacttacgaatttcgtaacgatacttgttttctttccgtaatgttacggaaccttgtggattacataatcatcccctttttgacttacgggatgttacggaacctcactaattgtgcaatgatgcttccatttgatttccggtgtgtcacggaaccttatggattgtgcatcaatattttcttttgttttccggcatgtcccggaatttcacacattgcctaatgatgggtgccaagcacctcacatggaccaaacaaaag

SEQ ID NO: 212613 - DNA, 412 bp, Glycine max
  unsure (1)..(412): unsure at all n locations
aaactagctgcatttataataactaccggaaagaagaagtatgtttctttatctcgngctttctccacacactcacaaccacatgttccacacacaaaggtaaacttaccaaaataaaactacatgtatacaaataaataaattcaagtctaaaaaaaaaaggaagagaactaaatattatatactctgaaaataccttgaataatggtcagaaatttataataaaactacaattatatgaaagtcatctattaacatcaagcgctaacaacatcatagttcaatcaatacatacaacaccatcataacataagtttcatagccccttatcatatcatttattgcatcaatatcataaatcctcacatagctcaatcagcanaaatcctcgtcatataccaaaaaataatat

SEQ ID NO: 212614 - DNA, 434 bp, Glycine max
gcttctccgtctttttcgtatgaagatgggttctttttatgaacaaaaatgctcaatcctgctggtatctgagaatcacttaatattagtgagaacaattgtctctgtgaagaaaatccaagccaagacgcttccgtaacgctcccgagacgtttccgtaggtgatcttgtgaagactttccaccgttcttcatcgttcttcgatcatttttcgtcgttctctcgtcttcaactggtacggtcccgatatcgaacttttcaattcattctatgtaccctcagcggccctcatctgttccgcgtgcttttattctatttcatttgctttcctaccccctgtcgacgtgctttactcatatattgtggccattctcccgactaataaacaaaattaattccaccgatcattcgtattgcgacatctcttaatttct

SEQ ID NO: 212615 - DNA, 310 bp, Glycine max
tggaacatcatcaggttctggatcacttaatatttctgcactgatatgcatcattggctttctgctaggatcatgcttgtccttcatccatgtgttcagcttatcaaattgtacatccttactaaaaactgatttgattcgctccttggatttaagaagttgtatgaccctatgggattgtacccaacaagaacatgtggtcactctggcatccaatgtcgccttgttgatcacaatatgctgaacatgtgaaccaaaactctatatgcttccagatggtgcttccctgacctacaggtaacgtacttga

SEQ ID NO: 212616 - DNA, 461 bp, Glycine max
  unsure (1)..(461): unsure at all n locations
agcttgtaggattatggggtacccatcacatatggtactaggtggcggtcgggcgatggtgcacaataagttttccacatccacaatgcgcgcataaacccaccatcccctgttgcccacctccaactgagctcacgtactcccacgtagctcatatcctcgtttctctcaacaccaggtccccatcaatcctcccaagcttccccaacatcaaagtaatacaacattcacacagcacaagctatcacagctaagcaaaacagggcaaaggcagaaaactctgcccaaaacaccaaccaaaatcacagcttttcacatacaaataccccagaaacatttccttcgttccaattcgttaaccgttggatcgactcgaaaattntactggaagtctctagtacttaagcctacattgtgacgcgtgggatctactagcanacatccagaactcattctgcact

SEQ ID NO: 212617 - DNA, 421 bp, Glycine max
  unsure (1)..(421): unsure at all n locations
tactcagcttctatttagacctcgatcggtcatctctccatgccgacgtcagttatcattttttttcgatcaattccgngaataatggtttttttttgttttggtcgggatgggccaacgttttcttggcctcctaaatgagaagaacaacatgccagtgtccgtcggaacgaaccctcggctgagctcgcacggaaaaacctagccgacctaagttgtaaattttttaggcaacaccaaaacaaanaacttcctctatcgtaaaaaaagaacataatcggccagcattngtaaaagaaattgcccaatgtcggctganagatatcagtcggggccatataaggaccgacaccggccattgtttattctattcaatccctgaataacaaatggatgatgtcgattaggaaatggtcgatcg

SEQ ID NO: 212618 - DNA, 458 bp, Glycine max
agcttggactgtgctagagagaagaacaaatgatctttgtgaacaaagagccatttctagagcataattgggtgttggggagtcaaattttgattcggtggaattttaggtgtaaattcagtttgagcaagtttagattgaggttatggacttgtgtgaggtgagagtttgcttcaaacttacctcattctcaatttcacttttcaaacctagaaaacccattgaattgaggggtgttagacacctagattctgtgttgctgtgctgtaaagcttgattttgggttagacatgattgatacatgatttgggacttgcatgaattgatttgggcaagattggatgagaggaagtgtgatcttctaaatctgcacttatgcatatatttgctgtcaaaataggtgcagcatgaatttggctttgtgcagataaatacttgtgtgtggttggctgatgaaa

SEQ ID NO: 212619 - DNA, 309 bp, Glycine max
  unsure (1)..(309): unsure at all n locations
atggatgaggggaagtgtggttttcgaaatatgctctttgtgcagattttgctgtaaaattgtgcagcagaattttgcacaagtgcagaanaatccatgtatttgctggttgtggaaagagtaatggtaaatgagttctggatggttgctagtagatcccaacggtcacaatgtatgcttatgtactagagacttccagtaaaattttcgagtcgatccaacggttaacgaattggaacgaaggaatntgtactgtggtctttaagtgagaaaaagctgtgattttggtggtgtgtgagcagagtttct

SEQ ID NO: 212620 - DNA, 363 bp, Glycine max
  unsure (1)..(363): unsure at all n locations
agctttanctggngttgacactgtcgtgtagtattttttacttatgactggactaacaatccattgacctgattcaactgtggtgggacctagcaattatatcatgttctttggactttctaatcattcgctagtagctaaagtcgagttctaacccccaaattccacagttgttatatacctaatccccgtcacacctctatttaatgtaaatagtagtacaatttttataaaacacaaagcgagccctcgatattaacgatacctctattttatttttatgcaaattacttattggaatgcttatgccctcataaaccagagaaagtgctcttctccaggagagataaattttgctgcaca

SEQ ID NO: 212621 - DNA, 328 bp, Glycine max
taaaaaattttgggaaaattcatagatatgttaacattaatagttgtcgatgtcgcatactttcaagaacttggtcatgattagatggattgaagtcttcgctgagaaaagttcaatgataccaacctacttgctgtttaatttataaattaaatatacggaatacttgctcgtttgtcgctcacagctctgttagatatttaagggcggatagaacatgtaagtaagttgaagtacaggtattcattcattaagaaaataacgcaagctgattgtctgtagacagggcttccacagttgttttgtcatagtattgaaatacttaaca

SEQ ID NO: 212622 - DNA, 457 bp, Glycine max
agcttgtataaggaataacaacatatatatcttgtcttgcaccaacaaggaataatggactcacacggtttctctgtatctataccagcagcacaaatacagtttaaccatgaaacccaaccatcatctgctgttcacccttcgtgcgtatatttctaagtgtaaagcaaataagcaagctatacaaaaaagccaacccttaccaactccttcaacattcacgtaagtcctgtatcatcatatcaatcgatctcctttccttcacaaagagatcgaaacaatcataacgttaaacaattcaaacaagccctgtgattcatctcccattcacaataagagaattttcttcctttccctttcgcattaatccatgcccaagctctatgttatgccagatcccatgcggccacacaacacagcttcccaattcccattggcccctctaaaataacattgt

SEQ ID NO: 212623 - DNA, 325 bp, Glycine max
  unsure (1)..(325): unsure at all n locations
gggcaatattccttggcacccttaatcatgtntcaattgntggtaagtntaggtcttttaatccaaaaaaggaaacttggttaccatgtgagagtaatttggataaatgaaaatagttttggatgttatatgcatgagtatttcaatgcttgcactactacgaaagtgtgnttttatgacaggcgttctactttngtaattatgtgtctganaaatccttttatgatgcacattctaagacggttattgaaaaccgccttataatgtgtgttcctcataaaaaattatgacgggttttattaaaatccgtcngtatctcaattga

SEQ ID NO: 212624 - DNA, 353 bp, Glycine max
aggggtgggagtctattctattgtttttgatcgcccacgtctgcggaagatctaatggattcaagtgcaattagattgtcacggcggcatgagtgcgtgctaagatgttgctgtttacgttgtgacaacctggacggtgaagttgcattattgaagaacaacatgtatggtatgcactagaggtgcttggtcattcaaggaatacgatgtgctacgactaagggctttcatgactttctcttattctggacggactagaagcacaatagatggcctagacaggaaaactcgagaattatctcgactttcctaggcccaaatgatgattgccacatatccatgtctcaccataa

SEQ ID NO: 212625 - DNA, 452 bp, Glycine max
  unsure (1)..(452): unsure at all n locations
agcttcacttcacttcttcaggtggtgtatgatattcttctaaaggaaaacatgttgccaaaaagttactatcaggctaagaaaatactgtgtntgatgggtatggagtatcagatgattcatgcatgccctaatgattgcatactatacataaatgagtttgaaaaaatgcacaactgccccaggtgacgctgacacaaaactactttggaccgacttcaaggggctcttgcacctctatgttcatggttgctgaagacctanagcagttgacataaaatatcagagaccagctggaggagtcaatcacacaaaaagtgactcaacaattaatgatgtccttcagccatatgcagtcacaaatgcaattacagggacttacactgcctcttgaggttaaggctngtcattttgctgctcgtatcaacacacaggaaagttgtgtcaatctc

SEQ ID NO: 212626 - DNA, 418 bp, Glycine max
  unsure (1)..(418): unsure at all n locations
atcttgagtggtgagttctagaacgcttctctttgttggtgcatatgtgccatcaggaagaatggcgtgatcactatccgccatgttttctatgagttccattgcctcctccggtgtctttagcttaatcttccctcttgcggatgcatccaatatttgctttgattgtggtcgcaggccatctatgaagatgtttagttgcaccgattcactgtacccatgtgtaggcatcttcctaagtagtccatggaaacggtcgagtgcctcgctganggattcattatgaaattgatgggataaagagaattccatcttcccttcagcggtctttgattctgggagatatttcttcaagaaattctcaccactcatccatgtcacaggcttttcccttaacaagcaagctattttgcttatc

SEQ ID NO: 212627 - DNA, 455 bp, Glycine max
  unsure (1)..(455): unsure at all n locations
agctggcatganttacattctcgccctttctcaagaatattcttaattcttcttgacatcatcaaaatcttcatgatttacattctccccctttctcaagaaaattcttaattgtgcttgacatcatcaaaatcttcatgatttacattctccccctttttgatgatgacaaccacctggtggttaggagcaacaacaaagaaaaaatatctatttgcatatagtttactccccctggttttgcaatgatggcttatatgagacagttgaagatttcatatttttcttatgtaaacaaattgtctcataaacaatagataattcttcttactattntatcttttatctttctctccccctttgtcaacatcaaanacaaatcatgaatagagaggagtaaaatgttaccactcgttgcaatgtatgagaatcaagtgataccaagaggcattaaa

SEQ ID NO: 212628 - DNA, 262 bp, Glycine max
cctggagatatgtcgcggcggtcaggagaccttggagatgtcaagtggggtgctatttgccaaaaccaagctagaccaatcccgacccaacccgggcatagtcagtcaatgagaacctatgacgtacctaaacaggcgagctcctggcagtcaaccgattaatgaacagagaccacaaatgcttggagggcttgtgtggtgggcttggccagctatgacttcttgagtgatatttcgaatatgggctctggtactcgattac

SEQ ID NO: 212629 - DNA, 438 bp, Glycine max
agctttctccactaagttgcctgatgcctgaaatgtcttttctgatggcagcggtcctaaatgaagggaagaatttctccaagaacacccacttaaggtcgtcccatctgaaaatagacctgggagcaaggtactaaagccaatcattcgccactccctccagagaatgaggaaaagcctttagaaagatatgatcgtcttggacgtcagggggcttcatggtggaacaaacaatatggaactccttatgaatgttatgatgatcttctcctgcaagaccatgaaacttgggctgcaaatgtattagttcagtcttgagaacatatggaacaccctcatcaggatattgaattcacatagtaccataagtgaaatcaggatcagccatctccctaagagtcctctcacgaggtggaggttgagccatgtcctcagtat

SEQ ID NO: 212630 - DNA, 464 bp, Glycine max
  unsure (1)..(464): unsure at all n locations
agcttctatataagctgaaccattttatcaataaacacatgttgagttttattcagaaaattacagtctatctcttttatcttagtgagagtgattctcctaaattcttgagtgattcaagaacaccctgtctgtatcaaaggactttcacaacctttgtgtgatgccctcgctggaaagagtgattctttccttcctttcatcttcacccttgttctttcaacccacaattcagaaaatcacctctgcccagaattatctcgtggccataactcccatttacgcacttcaaattaagtgattcttgaacctaaattgactttcaaaacgagacctntcacctcgtgtcggaatcatctcatttggagccctgtagcttcaattattgccatttctatattnctgtccagccaccacttaacctacattttaccatcccattcatccattttatgccaagaacc

SEQ ID NO: 212631 - DNA, 290 bp, Glycine max
  unsure (1)..(290): unsure at all n locations
aaaactaatggctgagtgtaactgaanatgtggcaaccaaaagtcacccccaacagccaacaagtcagccaccatttggtctcccaaaaggctgatgcctatgttgtcaattgggcccttattacaacttgaactaaacctaactaaagcccttttattgataaccccacacatattcgtggtagccaactttacaaggattgggccattatgtagacagactaaacactctaaaatngaaacaaagtggtgtcatttagtcctcctccatttgggccatgaatacaact

SEQ ID NO: 212632 - DNA, 464 bp, Glycine max
  unsure (1)..(464): unsure at all n locations
agcttctggtgggacatcttgacttgctgtccaatctgacattcaccacagattctgccttcttctattntcagatngggaatgcctctaacagcacctttgtcaatgatnttcttcatgcctcttaagtgcagatgtccaaatatttgatgccatattttgacttcatcttctttggagaatagacatgtggaggagtaactggtttcttgaggtgtccataagtaacaagtgtcctttgatctgctgcccttcattaggacttcactcttctcatttgtcaccaagcattctgactttgtgaagtttacattgaatccttcatcacacaactgactgatgctgatcaagttcgcagtcagtcccttcaccagcagtactttgttcagactaggaagtccatcatggactagctttcccattccagtgatctttcatttagagccatctccaaatgtcacata

SEQ ID NO: 212633 - DNA, 496 bp, Glycine max
  unsure (1)..(496): unsure at all n locations
ctaagctccgtttcaatggaacgtctcgattattacaggactcaacttgacttccgtgtataaagatattggcaattcaattttctcagaacttcggatctaatatttgtgcgtctcgatatattacgggactcaaccagacatccgagtgaaaagttattggtcgttgaatttaatacgagcttccgttctcaatttggagcatctctcgataaattacgacactctgtcgggcatccgagtaaaaagtnagtggtcgtttgaatattctaagagtttccgttttcaatttggagcgtctcgatatattacgggagtcaaccggacatccgtgtatatagttattggtcattcaatctgctcagagcgttcagtctcaaatttgagcgtctcgatatattacccaactcaatcggacattccagtaanaagttttgtctgttgaatttctacgagcttcgctttcaatttgagcgttcgaatatacaggactcac

SEQ ID NO: 212634 - DNA, 407 bp, Glycine max
  unsure (1)..(407): unsure at all n locations
agctntangcatggtgagttgagatgttatnttattattatccctanggtaactctgaccaaataaaaacaaaaatctcccctatagtcaatattaagggtgcaattttatttaatttcttagagattcttaagtcatatttaacttgaggacttatgtctagaatgtaagtggatagagtttggttgggtttggtctaattttagaccaaccgaatgaaatattgttgggttgattttttttttccttaacaagcccaattggtntatgtttgatagttagattgatagactaaaatgataatagaaataaaaaaaaataaaaatgaagcacctaattagttcaactcattaaaaatcaaggtattcaaatatgcaaaaacttactatatataaacattaatcatg

SEQ ID NO: 212635 - DNA, 361 bp, Glycine max
  unsure (1)..(361): unsure at all n locations
ttaacaactacaagccaattgtcatagctaaccaaggcatgcagggccaaaattattattaatcttcatatgtgccactcaagttggtaagtntgtctcaagtttacttggcaacatatcaagattgctacttcaatagtcattgatagatntaataatttacaattttttcttctcagcaagtgtgacacatacaggattggaaattaaacacanagggataacctttttaccaattatttcactacaataaattttctttagtgagatgacattcttaaccctagtataaagatccaacataagattcgttgtactagagtccacaacattgcaataaagagataaatagtcatcaatg

SEQ ID NO: 212636 - DNA, 402 bp, Glycine max
  unsure (1)..(402): unsure at all n locations
agcttctcgatatattatgcgcctgaatcagacttctgttactaaagntatgaccatatgaatttctcgatatattatgcgccttaatcggactttcgtgtgacaagttatgtccatttgaatttctcgattgcattcgttgttcaatttccagcgtctcgatatattatgcgcctgaatcggacttccgtgtgacatgttatgaccatttgaatttttccgagagcatccgttgttagattctgagtttttggtatattatgcgcctgaatccgacatctcggtgacaagttttggccatatgaattcttgagagcattcgttgctcaatttcgagcgtctcgatatagtctgcgcgtcagttcgacttccgtgtgacacgttatgaccatttgacattct

SEQ ID NO: 212637 - DNA, 315 bp, Glycine max
  unsure (1)..(315): unsure at all n locations
ctcagctctcatatatatgggctgatcgactgtcgttggaagtatgactcatttgaatnctctagagctctgggtggttcaattctagcgtctcgatatgttatgcacctgaatcggacttccgtgtgacaagttatgaccattttgaatgtcacgacagcattcgttgttcaatatcaagcatctcgatatattatgcgcttgaatcggacttccgtgtgacaagttattaccatttgagtatctaagagcttgcgttgtcaatttcaagcttctctatttcatgcacctgaatcgacttcgtgtgacagtatg

SEQ ID NO: 212638 - DNA, 413 bp, Glycine max
agcttctcaaggaagctacctagtctataaatagatgcatgtgtaacacttgtaactttgatgaatgagagtcttgtgagacacaactcaaagttctacttctctccctttttcttccttcaatttcgtgctcccccctctctctttctctccctttttcttttcctccattgaagcatcctctctaagcttcttatccaaggctcatcttggtggtgaagctccttcttccatggcttattccataatggatggcgcctcctctcacctcttatccattatcttccgctgcatctccatgggggaaaatcaccattaaaggaccccattgaagctcatagatccagcctccatagaagccccacaagcaagcttccatcacatgagccaaccatgttgggatcataaaccca

SEQ ID NO: 212639 - DNA, 456 bp, Glycine max
  unsure (1)..(456): unsure at all n locations
aacttcctcatcaatatatccatttagggaaacactctntacatccatttggtacaacttataattcattattcaagcataagcaagaagtaaccttacaacctctaatctagctaccggtgcatatgtctcatcaaagtctataccatctngtgggttataacctttggctacaaggtgagccttgaaaacctaattgtctaggtataacactattntcatcaagcttgttcttaaaaacctatttagttcctatgatgttcaagttattagtacttgntatcaattcccatacatcattccttgtaaattgatttaactcatcatgcatagacataatccaaaactcatcttgtaatgcatcatcaannattaaggggtcaacttaagacacanaagccatatgttcacaaaacanacttaaagagtgnctagtagatactctcttctcatatc

SEQ ID NO: 212640 - DNA, 414 bp, Glycine max
  unsure (1)..(414): unsure at all n locations
agcttatatgacaagcttgcgtgagaagcgagagnttatctttatactccctccaatagctaagctcacctccttgaaaagcttccttgataagctagagctatctacacacacccctctaattctaagctcacccccatgccataatacatgagaattcatagctacacacattcctctaatagctaagatcatccccatgccaaaatacatgaaaatacgtaataaagtaactatctacaagagactactccttaatggccctgtaataacaaagctttagacctttatactcactagtaagtggccacaattacaaggggtaagatagaaggggacacctatcgtaatatttataaagatgcgtggacctaaccttggctcatgggctcatatatctaccatgaggtttat

SEQ ID NO: 212641 - DNA, 500 bp, Glycine max
  unsure (1)..(500): unsure at all n locations
tgtgactcttgtcaatntctttataactagtcacttaataagtttttgatcttttgaaaaancttcagaaacaagtcacttgaagaattgcgactcttggaaatgtatctttcgaaatcagtcactggtaatcgattaccattaaggtgtaatcgattacacatcaacagatgtgactcttcatcttgaattttgaaaaataaaatgtttagaagctctggtgatcgattacaagtgtcgcgtaatcgattacactaggctaaaatgattaaaactgttaaacctaagttgaactcttgaattataatcttaacatttaaaacactggaatcaattactacttctggtatcgataccagagagaanactctgtggaatgatttgtgaaacttcttggatactcaatgattggatactttntagtgctatctgatgagtctccttgttcttgaactgacttgatatcctgatctgatcatgaactgatctgaatctgatct

SEQ ID NO: 212642 - DNA, 428 bp, Glycine max
  unsure (1)..(428): unsure at all n locations
agcttgcctcaaagaggtccaggaaggattatgttttcgaaggaactagttccgccccggagtacgacagtcaccgctttaggagcgttgtacaccagcagcgcttcgaagccatcaagggatggtcgtttctccgggagcgacgcgtccagctcagggacgacgagtatactgatttccaggaggaaatagggcgccggcggtgggcaccactgattactcccatggccaagtttgatccggaaatagtccttgagttttatgccaatgcttggccaacagaggagggcgtgcgtgacatgagatcctgngttaggggtcagtggatcccgttcgatgccgacgctatcagccagctcctgggatatccgatggtattggaagagggccaggaatgcgagtatggccagaggaggaaccggtctgat

SEQ ID NO: 212643 - DNA, 396 bp, Glycine max
aaaatgcagagcatgctcatgcttatgttgacaatgaaatggatgaagcatgtgaccatgatgtctatgttgcgaaacgatctaatggtaaaattcataatcagagttagcctaaaccaaacctcatgttgtctccttccaaaaatgctaaccgcgaactgtccactccctctttaactgtaaatacaaattcttggcccgggaaagatgaaccttttgatgaagacgataccgtataaacataatatgatcgtgacaatgtcgaatattgttggagatatgcatgatgaaacaatgaagattatgattatgaaacagattatgaagactgaatcagtcatggcctccactatgaaacctacctcttccacgaaatatatcttctctctacaaaaa

SEQ ID NO: 212644 - DNA, 284 bp, Glycine max
  unsure (1)..(284): unsure at all n locations
atactntagtgcatatacactcgagcgaacagtcacaaatcaggtctgaaacggtccaagctaagtgtgctggtatggaagtaaatcaatcataacccagaggtgtccgagtaatcgatagctaggcgaatgccatctagtcattatttaatgcgtgaattataacttctctattgaaaagaaaaggaaaatcactgaaagaagtgaacctttgctaacagtctcacaagagatctaatcacgctacactaagtatatctaatgcaacatctctaccaagggca

SEQ ID NO: 212645 - DNA, 425 bp, Glycine max
  unsure (1)..(425): unsure at all n locations
agctttngcaagctggaatcatttatcctatctcttatagccaacgggtgagtcccgtccaggtagtcccgaagaagactggcctcacagtgatcagaaatgagaaggaggagttgattcctactcgggtgcagaacagttggagagtctgcattgactataggaggctgaaccaggttaccaaaaaggaccattttcccctgccattcattgaccagatgcttgaacgcctggcaggtaaatcccactactgtttccttgatgatttttctgggtatatgcaaataactattgctcctgaggatcaggaaaagaccacattcacctgccccttcggcactttngcttataggaggatgcctttcggcctgtgcaatgcccctggtaccttctagcggtgcatgattagtattntcagtgatttt

SEQ ID NO: 212646 - DNA, 438 bp, Glycine max
  unsure (1)..(438): unsure at all n locations
ggcttattcctgcccacttctatactttatatttttataagttaancgcattctaagaaaattatgtgaaattttaaatgtatgagacaaataattgcggataagaatagattagatcatccgttaggtatctatggtctcaccaataataagcttatgttatatcatacttctctagaanataaataggttaagaccttttcaaagtctatttagtttagaaaaattggactctatcacttaannaaatctttagacataatagatcaatcttagtgttattattatattaaatttgttatgatatattgaatactttgttatcggaaacatttgtttcaagacatcttttatttgcgaaaatgtaagagtgagaattatctatttcatatntcttagaaggttatgacnatatattntcccgacatatttgattct

SEQ ID NO: 212647 - DNA, 248 bp, Glycine max
  unsure (1)..(248): unsure at all n locations
cggaccttagaaactcagctnttgagaggtcaaccacggacacactcgactcagatgttcgagtgtgatccacacgatgtctggacgaccatacttgattactgaagctctctaattatgcgggcgatcataactatcatctgctgagtctggtcgagacgcccattattttcttacacggcggattaagtgccgcccctcttctaggccttggctgacaattacggaagctcttgatgtccgatcga

SEQ ID NO: 212648 - DNA, 352 bp, Glycine max
  unsure (1)..(352): unsure at all n locations
agcttcacanaanatgctactatcaagcgtctattcaagtattttnttcaagaaccagattcgttntaaactgattcccctctctgaatgtaggctttggctaataaaatcttcttgtactacttcatttcgtggttcgaaagcagacgggccacaagaccttccaacttttggcaattcagattcccttattagctacaacccactaccctgagcaatatataagcatagcaccagctgcatattcttacagaacctttcccttcaactaaaaaaaaaactccttggtcttttttcccttatcattaatctttctcttccttttctagctagcaaagtgcaacattacaat

SEQ ID NO: 212649 - DNA, 425 bp, Glycine max
cttgcttcattaatgtcccaacatcatccggtaggtcttgtaattgtggttaatattctgtagtaaattctagcttttagataccaagaaatacagcagatctcgtgtgtagacaatccttatgcaatttaaacaagaattaaaatatgttaatgcacaattatttttattttttttctgccaaaagaacttaaacgagaattaaatctgaaaaactcagtcctagcaatgtaaacatagaatgatgcagcaggatagtatatgcctactttgcaaccaccacgatgaatgtatcatcatcatgcacatcccacaagggcatgccttttgctgcaacaatttgatgaggtagtttcttccactggcataggggagaatgctgaataatattcatatggctgtgaatattacttggcttccatggg

SEQ ID NO: 212650 - DNA, 428 bp, Glycine max
  unsure (1)..(428): unsure at all n locations
ncatgatgatgaatcaagttgattcaagaggttttgatgatgaccaatatgatgactaaaagcccaaagaatgatcaagattaagttcaagatcaagattaatttcaagtttcatcaagaagattcaagattcaggaataatcatgatcaagattcaagactcaacgattcaagaatcaagagaagacttagtcaggataagtattaaaaagtttttcaaaacattgagtagcacaagaagtttttcccaagatcattaccaaagagttttactctctggtaatcgattaccagattggagctatcgattaccaatgttttaaaatgttaagattctcaaaattcaaaatgaagagtcacatctgctgatgtgtaatcgattacaactttatggtaatcgattaccagtgactgttcttgaaaaattc

SEQ ID NO: 212651 - DNA, 410 bp, Glycine max
  unsure (1)..(410): unsure at all n locations
agcttgaaatcaaaatcttaataaataatagtttgatgtccttttatagnaactggtaaatgaaaaacattgatttgtttaaaagtttgggatcattatcgaacaatgaaaattgtagacttaatttgtttcctcccatcatatagaatttccaatagttactatacatcacatctaaatttgcttcctaaaaataactactttangcaataaattgtttcctaaaatttgacaactgccacccaacaacatcataaagtttaaatattgaaattcagaggacaccaacatatgaaccttattactagatttctgaagtaggcttttgataatatctcatgagccttatttggttctaatttcacatcacctgataatttctaaacaacgagtatgagtgcacttcactt

SEQ ID NO: 212652 - DNA, 450 bp, Glycine max
tcaagttcttgtataaaattataaacaagtgcaaatgtatgaagggcctacacaagtcagtaactcattcatggagaaattatacgttacatcagacaagaatgcctacaatgagatcattctatagccgtcggttcatccttgacaatcaactatgctttctttaatttttcctgccctattttccttttacttttaaacccattttcaattctaccctcaaaataatcaaatggacatatattaacaaattttcaacacataaccaggatagatgccaatgtcaaataaactcaaaatcagatttaacatagatcacctggcttgtacaagcaacaaaattgctactcaagttccaaggagtaatctgcagttccctctcgatgtgtgatgcagcagccaatgctatcgcttcatcatgaagacgactcattgcagatgaaatattag

SEQ ID NO: 212653 - DNA, 407 bp, Glycine max
  unsure (1)..(407): unsure at all n locations
acgccaatatatttgctacgcttatcaatatcatgagacagctatattagatttttcattatcataagcaaaagtttagagtctgaacttaagagcaatcaaattatgactctcaaactttattgccgtaaattatgtcaataatgatctatgttaaatacatacttaatagttagaaagaatgccgtactttttataatcgtattatattggatgatcaagcttctaaccgaaaaaatctattttaacactattcttcactcgccatatgaaaatataaaattctactatatgattatttatgataaacgattctcaagataattatttatcacaataatttgtcacagctaagctcacattaattaaatgttactaattcctttcatattntaaagaattcatat

SEQ ID NO: 212654 - DNA, 195 bp, Glycine max
  unsure (1)..(195): unsure at all n locations
agcttgaggttccaattgttggaacacaaagctgccactctcctcaagaaaaggatgtagaatctatagccaaagacttataaaaagggggtcattccaaaacatctcctgtggttcttcaagaaggtgagaaattaaaagatttcagtgcanatgagtctcatttggctgctgaacctgatcctccacagctca

SEQ ID NO: 212655 - DNA, 461 bp, Glycine max
  unsure (1)..(461): unsure at all n locations
ntgagatgatagtgggaattagaattaggggtgtgaaagtgaaaccatagttaccaggttcccaataagtcacttggagaagtattcagtacataagggatgtacttagtcggtaggctataggtttgcctcacaagattttttttcttccattcttgcatccatcaaaactagaataagaaaactatagtaatgctataagaagggttttaaatagcatgctatagcggcatagtagagcagcccctgtctggtataggggttgctgtagtggagctgtttantgtagtggccatagaaagaccaaatagagggttaaatagcagccatagtggcactatatgttgattccaaaaaagccctctgaacaaatacaataagggcgtgttttctgtgctatcttttggatttcaatttccaaaattgaaatctatatagtagtgaaagtgataaagaagaca

SEQ ID NO: 212656 - DNA, 401 bp, Glycine max
  unsure (1)..(401): unsure at all n locations
agcttactaaggcacctgttctagctcttcctgacttttctaaaactttngagctagaatgtgatgcctctagagtgggagttggagttgttttgttacaaggtgggcaccctattgcttattttagtgaaaaacttcatggtgccaccctcaactaccccatctatgataaagagctttattctttaataagagccctccgaacttgggaacattaccttgtttccaaggaaattgtcattcatagggatcatcaatcacttatgtacattagggggcaaagcgagttaaataaaaggcatgcaaaatgggtagagtacctagaacaattcctatatnngtatcaaatacaaaaggggaaaaaatgtggtagctgatgcctctctatgagcacacattgt

SEQ ID NO: 212657 - DNA, 467 bp, Glycine max
  unsure (1)..(467): unsure at all n locations
tctcccataagctaacaagttaataaaaaaatcatctttatggagatgttaaaatcacttttagcttctccaaaaagttaattttaacttatgcataagctaattttaacttacagggtaaatttatttcattttttccttcttattttcttctcctatgtgtgtgaggtgtcatttttaacatttgggtagtgcactgaacaattaccttagaaaatagtcccttntttttcatatttagttttcaggattctaaacaacctaaaaagaaactcaaaaaaactgaatactttcccatcaacttcagagtgttgctaggtgcacccagcattattgttggtgcacccaacattcttacaaaatggcaaaattggccttgcttagttttcctcctacggatcaacttgatccgtaagaggaaaaataattataatatactttaanatacaacatanttatttataata

SEQ ID NO: 212658 - DNA, 472 bp, Glycine max
  unsure (1)..(472): unsure at all n locations
agcttgggttggtttaagtaaaagtcttcaaaatcctccttgggtgttagaactattanccatttcagtcatgtataaacttgaaaacactcatttttctcgaaaagctacttttgccaaaatttaccttggagactaccctcactatccaaaaggaataatcccacaagaatgtgtagaaataaaaaccaaagaaataaatgggaaatttcatttttgtcttattaaagttttgaaaataatcctaactgaatattttaatgttttcgatttcaatttcagctatccttttccaaatcccccaccaaggagaaaatgaagatatggaggatcatgaccaatggagtttgaaaaaaatctaatcgaaaaagagaagctcattcttctagtagcacaagaaatatggtatttcaaatntcttaaatttattgtggtgatattgattttgctattaatacaattaattctataa

SEQ ID NO: 212659 - DNA, 477 bp, Glycine max
  unsure (1)..(477): unsure at all n locations
tccctgtcgtcatcgaaaccacaactaaacctgcaccatccaccacgaaattggtgtaaaaaacatcccaccttggtgtctctagaacatgtaaccaagagcaattgagaattataaaaataccaatgtatgaaaaagaaaggaggtaaggattttatttacactcaaatgaaatataaagagaaaaggctagttcaaatcaagaaaaaaaaaagagggaagtgagagagggatgtcatttttacactttaaataaaaaattagcatcagaaggacatatattgtagtcacaaacccttagttgaacacttaacttacaaaatagtagtccatatcccaatcaatttccaatcatctcctagccctaacccaatcctaattagaatttagatatagtatatgaacaanagcagtaggaaaaattgaatgttaaatttgagaggatcaaatttacatatgaataaataaactttcttt

SEQ ID NO: 212660 - DNA, 245 bp, Glycine max
  unsure (1)..(245): unsure at all n locations
agcttgtaatggtaagaaaaaagcaacacacgtctttgaaaagcttgtgtttgagtgaaacagtagctgngaggctttggttaatgatccttccttgatatttgacattcttactagcttatttcagctgtgtttcttaataatcatgttcacatctttgaaaagctgcatgtcttctgagaagctttggagcacacaccttgtaaataaccattgtggttntgtcacttgaggacaagtgaact

SEQ ID NO: 212661 - DNA, 464 bp, Glycine max
  unsure (1)..(464): unsure at all n locations
tgtaggattatggggtacccatcacatgtggtactaggtgtgcggcgggcgatggtgcacaacaagtttttccacatccacaaatcgcgcataaacccaccatcccctgttgcccacctccaactgagctcacgtactcccacgtagcccatatcctcgtttctctcaacaccgggtccccatcaatcctcccaagcttccccaacatccaagtaatacaacattaaaacagcacaaactatcacagccaagataatagggcaaaggcagaaaactctgcccaaaatagcaaccaaaatcacaactttntctcacttaaagaccccagtaacatttcctttgttccaattcgttaaccggtggatcgactcanaacttttactggcagtctctagtacataaatctacattttgaccgttgggatctactagcaaacttccaaaactcattcttgaatactctt

SEQ ID NO: 212662 - DNA, 443 bp, Glycine max
  unsure (1)..(443): unsure at all n locations
agcttggtcttaattataaaaagatagatgcttgtctctaacactgcatgtnnattngggagattatgaaaaaagnttggatgctcgtaagcattgtggtacatctagatggaaacccaacaagaagaagaaaatagctgcaaaggttttacgttactttccattgaaaccaagattgcaaagattgttcacatgtcataagactgcaaaagatatgagatggcatgttttggaagacaataaagatgggttgttaaggcatccaagagatggagaggcatggaagacatttgatttaatccatcctaagttttcttcagatcctcgaaatgttcgcttaggccttgctactggatggtttaatcctgctaggaccttgagttctacctatagcatctggccagtttcttaattccatataatcttccaccttggatatgtat

SEQ ID NO: 212663 - DNA, 451 bp, Glycine max
  unsure (1)..(451): unsure at all n locations
taccttgaatgataaattgtatcctttgcaccctttatgatctgaatgatattgncaaaaatttgaaccttgaacttaaatcattatctccagataccttgcttagattctaggagagcatatggttcaaggcaaatttaccccaaatttgggggagtgaagttaataaggatgtaaagataagggtaaagcatcagcacacacaacaaataagttgtatgttaaaaaaaattgtgttattataataaggtcagaagcaaagtaataggaaaagataatgagaaagctacttgtatggaaaagatcacttggataagtctaggattttcgctcttagaatctaaatctttgaatcctaaaagaaccaatgagattttgtagccaagcctcactacaagccagggaaagtccttctaattcttgttatacatttctaactttatggcatgag

SEQ ID NO: 212664 - DNA, 442 bp, Glycine max
  unsure (1)..(442): unsure at all n locations
tanatggatgattntatcttcgagtgatgattgtgttgttgtgttgaggactcgtttcttacaaaataatcatttgcagtatgtgaaatatgctatttggtcctcaactcgtcattttatgcatattctttgtgataattctagttcgataattggctcttgcctgaagatccacttttggaatgataaatgtcttaatgataaaatctttgctcgtttaaatttaccatcacaggtggattcttctttgtaagctcaagtgtctaattctatagtcaagttggcatggaatttcccccaacaatttgtggactctttccctggcattgtgaatgatattttggccattcctatccttgtctagcctcacgaggatttttntatttggaaacatactgattcttgtgagctttctctgaaagaagctcttattttcttaaag

SEQ ID NO: 212665 - DNA, 467 bp, Glycine max
  unsure (1)..(467): unsure at all n locations
agctntcataggtgaaatcaggtgcagccatttctcttatagtcctctcacgaggtggagggtgtgccatgttctcanaatgtgcanaatcagaatgctcagaatcagaatgctcaaaattataatgctcaagatcaggatgttcaaaatcaccaataacagaatgcacagattcaccagttatggaatgctcagaatgatcaaaaggtataaaatgatgcctaactaatctatgaaatgtcctatctatctcaggatcaaagggttgtaagtcagatggattgcctctagtcatacactacattcagcatgcacacaactagttgccttgtcatgtaaataaaggtgtaggtttgaactacagctaccctcaaatgatatccaaatgacttgataatttgtgagcaaccctataaaatgatgagaagatagcacaaaaaatttcaaacaaaaaatcaaagtctaac

SEQ ID NO: 212666 - DNA, 467 bp, Glycine max
  unsure (1)..(467): unsure at all n locations
tcanaccacagcaacacanaatctatgtgtccaatacccctcttttcaatggcttttctaggcttgaaaggtggaatttataatgaggtaaatttgaggcaaactctcacctcacaccagtccataacatccatttagacttgttcaaactggatttacacctaaaatctcaccgaatcaaaatttgactcttcaacacccaaatttgccctagcaatggctctttgttcactttggtcatttgtttttctctctagctcagcctaacctttctcacatgttctaaatgacatttcaagctagtattaactcactctaacctccatttaccacgaaattcagacttagccttccaactctcaaagtctcactctttttccactcataacatcacattctcactttctaaccctaggttagttctacccttcatctctaacagttttccatcagcaatttcagcatat

SEQ ID NO: 212667 - DNA, 268 bp, Glycine max
  unsure (1)..(268): unsure at all n locations
atactcttcaaatgttaagagccttgtgcagttcgaatttctaaatggcgatacaagacattntacctaacaaagtcaagcatgccataactcgcttgtgctttttcttcaatgccatatgtaacaaaggcattgatcctctcaaatcgtatgagctggaaaacaagactgtattattttgtgtcagtggagaggattttctctttattttttgcatcatggctcacttaatgtcatccatgagggaataaatgtatgggcccgttat

SEQ ID NO: 212668 - DNA, 467 bp, Glycine max
  unsure (1)..(467): unsure at all n locations
actcagcttaacatcagacccttccgggtgctggatctacttcacatggacttgatggggcctatgcaagttgaaagccgtggaggaaagaggtatgcctatgttgttgtggatgatttctccagatttacctgtgtcaactttatcagagagaaatcagacacctttgaagtattcaaggagttgagtctaagacttcaaagagaaaaggactgtgtcatcaagagaatcatgagtgaccatggcagagagtttgaaaacagcaggttcactgaattctgcacatctgaaggcatcactcatgagttctctgcagccattacaccacaacagaatggcatagttgaaaggaaaaacaggactntgcaagaggctgctanggtcatgcttcatgccannagaacttcctataatctctgggctgaagccatgaacacagcatgctacatccacaacagagtcacact

SEQ ID NO: 212669 - DNA, 431 bp, Glycine max
agcttatgagaattccaagctgtataagcaaaaagttatattttatcatgacaaaaagctatcaaaaaggaattttccacctggtcaataggtattgttatttaattctcgattaagattgtttccaggtaagatgaaatccaagtggttgggaccattcatcatcaaagaatttatgccacatgaagcagtgatactagaggatcccaccaccaaaaggacatggactatgaatggattaggatcaacactacctaggtgagatttgagaggatatcattgtgtcatctacagaacttgaccacacaaaatgttcactaaaagacttaagagcctctagagcacctagattctaacctacttttatttcttttgtaattcatattgggattaatattttggtaaatatgctaattattagatactttcta

SEQ ID NO: 212670 - DNA, 473 bp, Glycine max
  unsure (1)..(473): unsure at all n locations
ttgtggccatgtaaacactaaggcttagggtttggtttcctccgttcattcaacccagggtttccaaacaatgcactttcatcaagttatgcacacatccgagtccatttaggccttcgggaaaaatctttcattgcattcgtggtcgaagccggtaagtgcaccggatcgtgcaagtagtataaaacggtaagaaccgagtgtcgaactcttgggaaacttgtgttacttggtaaagctatattcagtgaataggtgtctagtatgaaaagatatgtgtggactatgaacaagtatgtaaactaactattaaaaaggaaaatcacgtgagtaatgatgtgtaaagacaagtagacaacgtgttggtcttcctattaggtgcttgatgttataaggatattctntatttaacaatgctcatgtgttctatagtgtctactaaaatgctaaaccccaatccctcgtgatagtct

SEQ ID NO: 212671 - DNA, 331 bp, Glycine max
ctgcagcttctaccaagggactacctgaataattctttgatgccccttttagcctctgttcccttttcttggtttgagctcactacaagccttaagtgaaaacatgatataccatatcttaagaatttggagcttggaattgtttgggaaaaggggggggggtttttgttattggaaacttgtttgtggcttacttatgatgatttgggcctactgatgtacatgatatggttaatgtggactgctgatgaatgtgttctaaagattagagaaagataaaattcgaaaaaaaaaagcataagtgatgatagacttaaaggaagaagagaac

SEQ ID NO: 212672 - DNA, 453 bp, Glycine max
cactatagaacactcaaccttatcccatgccacattagcagatgttgcatgataaatcttctcaaacgcatcatcatctaatgcttcatagataaggaagagaaatttcttgtctctttttcttgaattctttaaagtctccttttgtgcttaggatagtgaagtcccatcttgcggctccttataggctttttcaaccacatttcccaaacatcatgtgctccaagaagtaccttcaatttggtgctccaattatcataggtgcttccctttagaagttgaacttgtataaggatgccgctccatattgctcatcataactatagggggatttcttatgagaccataagctccgataccactttgttggaaaggagaaggttataggaagtatttgagagaaacggaagaggaaagaatatttggaagaagtctagttttttcttacttgag

SEQ ID NO: 212673 - DNA, 441 bp, Glycine max
  unsure (1)..(441): unsure at all n locations
agctngactttangaaccttcgatcagtcaggactctcagtttagaagctcgactttaagaaccttagattcggcccacatataagaaaagttgcacaactatttgtggatcttatctcgagaaaagatttctatggtagatagctattggaaagatgtttcaaaatctctaaaggacttagtattgtaagcccagtaatagatggtgctattaactnttctgttatatttaaatttaaaatgttcacattgattaaatgtaacgcagcattatgctatgcaagccaaatttgatatcccggaagcaccaaatttcaaaaagaaggtcatgtttatggtggtgacaagaaagaggcatattatgtctaccctgaccagcaaatttatgtatgctaacactgacgagcaacaaacacaggatccttcatcaaagtatgatct

SEQ ID NO: 212674 - DNA, 460 bp, Glycine max
ggatagtgaactgcaacccttgaaagatagccggtggtgagtatttattcatatcaaactattgggcaacttttggagagaacaacaatagtctaatttcaatatctacaaattccacaatttacatagcaattctaaaagagttctaaagtaaccaaaagaaagatttaagtaccttagatgttgtaaatcatcaattaagatgacaattctcctctttccattttgtgaagcaccacccacaaagaataatatttacaaactgggccagaattgtggaaacctacataggtcctcaaagatttgaacttatgcaactgacttgaattaatggttcctcatacaaatagcagagatggtggacttttccagcaaaggtagttatatcattggaacatgtaatgcaacaagcctcatttgcaacaaattgcgcaaaatcatgaacaagatcgtcgatctt

SEQ ID NO: 212675 - DNA, 425 bp, Glycine max
  unsure (1)..(425): unsure at all n locations
agctttcttcgagcagtttacggatcaaggtgatccatattcttcaatcttaattntaaaaattgctaaatatttgataaatagtgagtttttttttttaaattaggaattttggttattagggccacctttgaatctatgctaaatatttgataattagtgtaattttggagaatatcaattgtttcaatttgatttaatgcaaatttgtaatttccttttatgtaatttccacttagcatcataagttggggactacctaatgcacctgttgccaatatgacatctccccttgaacttgaattcttggctttngttatgtatgcttcatagagttcatccaaggtgtcgttactctagatgaaccttatacccttagctctagtttcatttcctgaacctacagcagttgagtggcaaaattc

SEQ ID NO: 212676 - DNA, 391 bp, Glycine max
  unsure (1)..(391): unsure at all n locations
ngctctanattacattgatgtttgtatttatgggaggatgttgtatgccatttttgttttaagagtagtgtcccactggtaaaactaactttccaaatgtttgccttcgcaggaaatggccccgaggaagcttgcctcaaagaggtccaggaaggacaaggcagccgaaggaactagttccgctccggagtatgacagtcaccgctttaggagcgctgtacaccagcagcgcttcgaggccatcaagggatggtcgtttctccgggagcgacgcgtccagctcagggacgacgagtatactgatttccaggaggaaatagggcgccggcggtgggcatcactggttactcccttggccaagtttgatccagaaatagtccttgagttttat

SEQ ID NO: 212677 - DNA, 110 bp, Glycine max
  unsure (1)..(110): unsure at all n locations
gcaagtgctttgcttannttaggttagaaatcaatggaaaaggagttgcaacaagggcaggaaggaatatttttggcctctgtttactcttantggaaaataaattacta

SEQ ID NO: 212678 - DNA, 429 bp, Glycine max
  unsure (1)..(429): unsure at all n locations
ggccttctgagctggatattggccattgccctatttgcatatgctacagctgnnggggataaggcaatgctccttgaatagcagtctctagcttccttaaactatntctgcttgaaaaactcgttaccctggaatatacagatggatttcagtatcagcatcatacaggacaggaacactaaaatcaatatattataaatcctaacagatcaatctccccctaccctgtcaccccaagaccaaacagagaggggggggacctaccaggtctttctcggaagcagcatcaggaacatcttcaggaacaaaactactatgcaaatgattaattcttgataaatcatactgtcctggagaatatcttgcattatcaaaagaaatgggatctncttttgatgccttctccacacccacagatcccgtaattcg

SEQ ID NO: 212679 - DNA, 106 bp, Glycine max
ttattctcatgaactttgatgcatgcgaaagccaataacacccctaagggttgaggaaaatgattataaaagaggggatgaagacatttggaggcctaaatttttg

SEQ ID NO: 212680 - DNA, 421 bp, Glycine max
  unsure (1)..(421): unsure at all n locations
tcagccacaataataacgtccaactcagaagacgttaaaatatcgctcttgggaggcaacccagggttttatattntttcttaatttgggttactttaatcttatgtcttatatttttgaactttactttgagtctttattcacgaattattttttaaatttctaatattttttgttagagctatcattgcatggcttaaggacagacctattttttatgagaagtatgaagacatgccggatcttgttgattatttcatcggaggagtgtaacaccctaaaatattactaattataaattgatatttaattgtatttattgcgttatttgactatttagttgacttgaatgaattgaggtatagcttgaattagtcatgtgtgaatttcttgatgtggatgttgagttatgttgagtttt

SEQ ID NO: 212681 - DNA, 340 bp, Glycine max
agctggcctaattaacctaatattaatataaaatgattattaaacacacacaatggaagtactaagtatttattacctatacttaacaaaaaaatacttataactctacaaataaccataaatgggaagagtgtgatacaatttacacaagttttatacataaaagttagtcgtattcatcgactaacagcgtcccaatgacactatcacatacatgtttctccacatgcataacatcaatacaatgcctaatgtcagggtcagaccaatatggaagatcaaagaaaatcaacctcttcttccatatgcaagtcttacttttttccttcgtttgggtctt

SEQ ID NO: 212682 - DNA, 439 bp, Glycine max
  unsure (1)..(439): unsure at all n locations
tctgttataagtntaaattgacttatgcatgatctaatntatagaagctatcatttatgttttcaaaaagcttattttaacttataacctgaccaattttttacttatgagagaagctttagcttcttattttctcttctcttataaagaagcttatttaaccaggccctttagtcctttttagctagttatccaagggatttggttacagtacaaggcaacttaccctgttggaatgtttattactactaatatagtgtagcggcatctcatttctcagggtattgttggttttagatcatctagaattataatgagcattggactttgatatctggtgagtcatatttatgaaggtgtctaaatgtattatgtatgtacatgctcattatttgccttatgcttgattacttgtgatgaatcctacctccagggcatt

SEQ ID NO: 212683 - DNA, 436 bp, Glycine max
cttaaaatagtctgtctagtggctggcctcagttgaataattaagcttcttctgtaatgcgattcacttcatgttcggcctcaaacagaaaaagataacgttcgaggttcacataaatacaataaaatacgtcaccaacgcctatatatagccagccaaaccacaaaatatttttgaggcaaggagaaccgtgtaatatccaatttcatataccatttatttcatccacctttgttgaaaataaataaactaaaaattcgtataacacattttttaacatgatatttgaataatattgtgttaaaaaaataatatttgaataaattaggctggcatttcgtgaatacaatttcctgtttttaacatttaagaagtaggataatgtataatgtgcacattcatgtcagtgtaattacttttttcttattttgcacta

SEQ ID NO: 212684 - DNA, 225 bp, Glycine max
  unsure (1)..(225): unsure at all n locations
agcttattaacaaagaaactattctaaaaattatttggaatctcttgacttctaatgatactcgggcatctttctattgtagtaggttccttanaatgaagctactatcatttcttacattcctttatccatttagactggaattaagccattctttcccattattttggagaattttatgcggaaactgaaactgcaagaaacacactaccggggggggggggg

SEQ ID NO: 212685 - DNA, 409 bp, Glycine max
  unsure (1)..(409): unsure at all n locations
tagacgactntgttcgagtcgagaatactttattatttatttnggataagttgaatatgatgtagaagaaaatgaatgtgagcctttttcccctttgaaagacttgtaaaaaaaatgttttaaaaatatttttaattaatatttgatttttttttattagtatatatgtgaggggtagagggtgtcacattcaccaccataggaagtcaggataagagcttgaaggtagaagaagatgagtggagggagaaggagagaaggagcacaaaattttatgcttaaaatgaggtctgaactttgaagtgtaattctcaaatgatcaaagttgaaaaaatgcacacacaacgcctctctttatagcctaagtgtcacatacaaatggaggaaaatttgaatctctattcaaatt

SEQ ID NO: 212686 - DNA, 353 bp, Glycine max
cgtctcttggtatgacaacgagtggggatacatgttatccttctttaaccttttcttgtatgtgatagtgggttagtgcgccaataagttgttaattagttcaaaaatctaatcacgcgaattttagatgctatattatgtattcagcttgatctaaactaataccctatgtgtgcctggtttgcagcttacgtgtcattgacctgcttgatccgttgccaagaagtctttttaaggttgtactgaaaaaaaagtagcttgtctaaacattatgggctggggtctatctgcaatatagtgtcttcttgctctggcagaaatgagaaatataaataaatcggttgcgggaaccg

SEQ ID NO: 212687 - DNA, 361 bp, Glycine max
accttaagtcacctgcggcatcaagcgtcttacatattgtgtatgaaaccttttttcagaaggagagaccatttttatcttctcctcaccataacaatgccctgcccgttctcctattgatgaactaagcctgcttatgattaagggcttgaccttgaaagagtagtgcatctctaaggcttcaatacattcccatccatagctaaaaaaccctgaaagaggctaagtaagaagggaaaaaattgcaaggaatttaccaacaatatccaaaattgtctcagaccttatcaaatggaggttatacgtcaaaactgctttccgaacccatcatggttcctatcttgatcaagacacaaaattt

SEQ ID NO: 212688 - DNA, 460 bp, Glycine max
  unsure (1)..(460): unsure at all n locations
ttcttcaataacccctttattctcttgtgaaatgtnttttttatgctctctcctccttaatgagttccataggtattcttccacaacccatttattctctgcatagttggtcacattctgatttagcatatactatatatacaagtgtctagacaaatttagatagccaaacacgagaattttttttatcaaaaaataacataaaaaattgttttcattctgtatggattttaatttattactttataagaactttagtaattatcaaaatcactatttagtcccgctcaatatcataataacaatttatttccggttcatcctatctaattgcggccactcacctaacatttagttgtgtacctctcatttctttcttccgtgtcacacacgcgtaaaataaataactaattaccctcattttctctctcaccgtaggccacatagcacacacacttat

SEQ ID NO: 212689 - DNA, 209 bp, Glycine max
ggaccttgaaactcagctacatattcaatttcgagcgcttcgttatattacgggactcactcactcttccctctcaaaaggtattgtcgtatgattcggcttatagcttaaacattgctctctgagcgactcgatatattacgggactcaatctgacatcccatgaaagacctattgccgtttgaatcggctcatatggtcagaattga

SEQ ID NO: 212690 - DNA, 480 bp, Glycine max
  unsure (1)..(480): unsure at all n locations
agaatactcaagcctttagttcctcctattaggttcctgaaataggggcacggttctaactttctacgtgccatttccttgatattgccatgcatatctttatgatatcatgtttgtgtgcgtctttcctatgctttctatgttgttatgtcatttcgccatcatttgattgtgttaccatgcttgttcgtctggtatgtttcttttcatcaaccatgtactctcacgcatgtatgcccatactgtgtcatcactcatgcattgcatttgtctcgtcattatgtcacgggaagtctgaaggtccgcatcaccttcttaaatgcatgcatggggcaccatggtaatgactatgaatgaaccatgaggcccaatgcttgtgagtaagaggagacgatctttcgagtacttgtgtctataaaatgcattngtgtcatgcatagcatacacattccctcatgcattcattatatttcctccatg

SEQ ID NO: 212691 - DNA, 422 bp, Glycine max
  unsure (1)..(422): unsure at all n locations
agctttgaaagcacaatacagaagtgggtcactctcatccgtgtagggtaaagctaaaacaaaaatctctcagatagagatctagcacacagtattataaatgtggaattctttaatttgcgattcatagcctttgaaaattccttataaagccctgaagaagaccggtggagtgcttcatcattcttaacactttacaactcaatgcattccgaagttgatcacttcacaaagattagtggaattttagctggtggtgtgtagtattctatctaaggttagactgagtagtattcttcaatctttcattgtgatgcttctcatcagtctttctcatggcagcttcttcattaacaatattnatcttcttatgcaatgggtcttcctttctgatgtgctatagtgattagaactcatcaaag

SEQ ID NO: 212692 - DNA, 479 bp, Glycine max
tccatcaagtggtaattagagcacaagagcttcaagtaggtgctccttaaacctccattaatttttttgctttaccttatcttccattgttgtttcttcatttttctccatgtatctcctcacatgtcttgtgctaaatgttgttaacatgattctttagagtttccaccaattaaacttgctatagaagcttgatttgattttctatggttcaaatttcttgatcttgttcttgaaccatgaattgtgttgagtttaggttcctttgagttctgtcttgttattttttgtggctgaaacctaaaccataaaattcttacaaaaatattaaagtataagaaaacctcaaaaatctacagtgacttgatcacctattgtagatttgtcatataagtcatgtctagtcatgaaacttgtcacataagatctcttatgttgcgctgaactgtaatttcttgtttctttgtctaactcattcg

SEQ ID NO: 212693 - DNA, 468 bp, Glycine max
  unsure (1)..(468): unsure at all n locations
agctttanagggataaaaggctcacattcactttcttctacatcatattcaaacttgtccaaataaataataaagtcatctcggctcaaacaaggtcgtctaagcttcatacaattaatatagaacctatatcctaatgtcacatcctatcagagcgttgtgttgcccgtgtcctctagcatgaggttcttcatagtcatccacctattcatctgctcccccgaacacaaagttcaatatcatcacaggatccaaacacaaacagcaaatcgggagtgagttatcacattcctaactactagagagaaacaagacaacatatagtagccaaatacaatttacttagcatatctcacattatttcatcactttgtcattcaaaattcacttttcaatcatcaatcacaatacacaagaatcacacactccgatcaagacataataaacaattagcaagcgtatgcgaca

SEQ ID NO: 212694 - DNA, 452 bp, Glycine max
  unsure (1)..(452): unsure at all n locations
acctataaaactcagctttaagggcttttctttcctgcgtttaatctaccatgaggtatgaacttgaaaagtttacttttattcttcttttctggctctataattgacgtggttctcaatggaattttttgctctgctccagttttttctacctttgctttctttgattcggttgatcctgggtttactgttcaccacaatcaacattaacaacgaagctttatctaattttgcaaagtcaactacatatactatacgataccattcggctcagattcttatattccgggcattttctatttttttttataaaagggttgaattttaacatattgtggatctttggtaaccatatgttaaatatggggctgtcttcaaggctatgtgtagttgaagttctacctgaatcttacatcttaacatatggntgattctggaaccatatgttaaaa

SEQ ID NO: 212695 - DNA, 343 bp, Glycine max
tcttcgcgaaattcctcacggaaacgttacggaaacgtttcggaagcgcctcggctcggattttcttctcggaaataatttttccaagcaaattctaaagagagagaagtgcctaaggggctgaacccttttccatctcacttcctcccctatttatagcaaaataggggagatgcttgccgcccaactcgcccaagcgagcagggtttgcttctctatggcccacgagggcctggttgctatctgcacccccattattactaagtacacccctggcttcttttttgtgatactttcttcgaaacgtaccgaaacttacgaatttcataacgatacttggttt

SEQ ID NO: 212696 - DNA, 425 bp, Glycine max
  unsure (1)..(425): unsure at all n locations
tganatgaggaagtgtggaagggtgagacttccttcttttattgttgaccacatagtggtacctggagatatgtcgcgggggtcaggagaccttggggacgtcaggtggggtgctattgcccaaaaccaagcttgaccaatcccgacccaacccgggcatagtcagtcagtgagaacctgtgatgtacctaagcaggcgagctcctggcagtcaacagataaaaggaacaaagaccacaaagcaaggaggcttgtgtggtggctggccagctgtgaaacttgattgatatatgggatgtggcctctggtaatcgattaccaagggtggtaatcaattacaaggtttaaaaatgaagacaggaggctaagatggtctctggtaatcgattaccaacggaagtgtttcgattaccatgcttgaaaac

SEQ ID NO: 212697 - DNA, 467 bp, Glycine max
  unsure (1)..(467): unsure at all n locations
tggtattttgagctcgatcggtcatctatcctgtccgacttttactgtcatttatttcgatcaatatcggtgaataatatttttttgccgaggtgggctaatgttttcctggccgaataaatgggaacacgccagtttcggccgaaacaaaacatcggttgagctcgcacgaaaaaacctagccgacctacattgtaagttttttatgcaacaccgacaaaaacaaaacttcccctgccataagaaaaaacattatcggccagcgagcgtttttttaaaaaaaaaattgggcaatgtcggctgaaaaatatcagtcggggccatttcacgaccgatgtcggctattgagttttctattcaatccctgaatgaaatttgcatgatgtcgattangaaatggttgatcggcgtcatccggtgatacttcttttttagacctcgatcggtcatctctccatgccgaagtc

SEQ ID NO: 212698 - DNA, 278 bp, Glycine max
  unsure (1)..(278): unsure at all n locations
acaagcctataaaagaccttcggagtcagtttgtgtgttcttgattggaagacatgagatgaattgcaaaaattgagacttatgttggttgttgattggtgaataancctaaacacttgtgcttgagtgaaagaaggactgcgagggctttggtaatgagccttccttgaaatctggcattcttactagcttatttcatttgtgttccttaataaacatggtcacatctttgaaaagttgcatgtcttgtgagaaaccgttgattgaaacattgatta

SEQ ID NO: 212699 - DNA, 344 bp, Glycine max
ggtatgtcaacatggtttagaagaacgcagaatttatatattaattattattcctttattaatacatatgcgaggggcatagggtgtcacaggtctgcttatccttaatgcactccacacaagtcttagagtgcttataatctagagtattgaatacctcatctttcactaaccttttaatcctctcaatggagataagctctaatctttgatgccataacatagaggaattctcattaatattacaccttttaaactatttcgaacatgcattaaactattagtggcataattttgtaaaccactaagataagaaccatcatacatgataccattcgcaacac

SEQ ID NO: 212700 - DNA, 481 bp, Glycine max
  unsure (1)..(481): unsure at all n locations
agcttcataacataatttatcaaaatgaaatgattcttccttattcaaaagattgctcaagggcttcgcaattttagaaaaatctttgacaaaatgcctatagaatccagcatgtcctaaaaaacttatgatgcctttgacatttgctggtggtggtaatttttcaatgacttcccccgtagctttgtcaacctcaatgccatgctctgagattntatgacccatcacaatgcctttagccaccataaagtggcatttctctcaattgagtaccaggtttgtttcaacacactacttcagtatagtgtcaagattagacagacatatatcaaaagaagagccaaaaatagagaagtcatccataaatacttcaatacttttttcaatgagatcagagaaaatagaaagcatgcatcgttggaatagtgcaggagcgttacacaaaccgatgggcatctttctataggcaaaaacactaaag

SEQ ID NO: 212701 - DNA, 470 bp, Glycine max
  unsure (1)..(470): unsure at all n locations
ntgtggccatgtaaacactaaggcttagagtntgttttcctccattcaatcaacccagtgtttctaaataatactcttttatcaagttacgcacacatttgagttcattcagggcttcgggaaaaatcttcattgcattcacctttcaggcgcacacacattctttttcaaaaactttctatgtcctgacctatgaattggcggtcattttctttcaaaagcgtgttggcttttagtttttttttcttttagctttttctttcaatcaattttttcaaaaaatgttttagaaaaggtttgtaaccctggaaaagttggtaaccaagattacactttatcaaaaggaataaaaggtgtgcgaatgaaaatacacaagaccccttatttttttggcgtttcagacaaaccatcgcanagtacatacaacaatatgctagaagcggtaaaattagtcaaaatgagataaccaa

SEQ ID NO: 212702 - DNA, 405 bp, Glycine max
  unsure (1)..(405): unsure at all n locations
agctntacaaactattgtgaacaaaatatgcaaatggtgagagtgctatagtgctgctattgcatgaaacattatccattagcaaagaagagatagtgactaaggaagccaactaacagactaactaaagtaaccaaaaagtaaaggcaggaaccactatatgcagggaagaaatggaccatacctgcacaggtggaaaactaacttttccaatatgatcttccccagcgaaaccaaagatgccaacagcctggttataagtcacacgctttccaacctcacacatgttcttgtagaaggaactggaaaggaaaactatcctcagaaaacagaagatttcttttctataaataaataanaaaagagtaaaacagtgcaagagattggtgaaattctcaagtgaca

SEQ ID NO: 212703 - DNA, 469 bp, Glycine max
  unsure (1)..(469): unsure at all n locations
nttgcaagctggaatcatttatcctatctccgacaaccaatgggtgagtcccgtccaggtagttccaaagaaaaccggcctcaccgtgatcaaaaatgagaaggaggagctgattcatactcgggtgcagaacagttggagagtctgcatcgactataggaggttgaaccaagttaccaaaaaggaccattttccactgccattcattgaccagatgcttgaacgcctggcaggtaaatctcactactgtttccttgatggtttttctggttatatgcaaagcactattgctcctgaggatcaggaaaagaccacattcacctgccccttcggcacttttgcctataggaggatgtctttcggcctatgcaatgtccctggtaccttccagcggtgcatgattagtagttntagtgattttttagaannatgcatagaggtgtttatggatgatntcactgtatatgga

SEQ ID NO: 212704 - DNA, 365 bp, Glycine max
agcgggaaccaatatgagtataatctctattattcttcattaacttattgattagcaatacaagcactactttttgagcaaaacaacttacagcaaaaataatacactttatctaaatcctttgaatacactagccatattttatcatatttttctccatatggcattactttttgcgaggaaaaagaagaaaaatgtctattattttcatcttttggatactgcatatcattatatctaattggatcataaatattcttaaaaacttcatttgatgtactattgagctccttatctgtttctaaacaatcttcttataaatattcattatcctcttagtcttgactaggataaaactattcata

SEQ ID NO: 212705 - DNA, 343 bp, Glycine max
  unsure (1)..(343): unsure at all n locations
aactataaaactaagcttctggcggctcangccatctagactagcattgtcttctctattccaacttggtggagtccagtgacaatgttgaaccacacccctgttacatgaatactgacattagatgagacgatttcaaactaatgcatggtgacgtttctttctatctgaataactttttgaacagagggatgaagtctgtgtacctcacaatttcatagcatcatttctaacttctacaagggtatgcacaatacagcttgctaaaaactccatgatattgtatcgtccttaactttcatacatacacatttgtgatattttatattgattaacattgaaa

SEQ ID NO: 212706 - DNA, 357 bp, Glycine max
agcttattacatcataatatcttaaataaaattccatctttctctctagataacatatttactcaatctaggttactgtacaaatatattaatagtctccctcagagctaatatattattgagctgctaacacaacataaatattaggctagctacataaaactttggcgagaaaagtcaagaacagctcgagcttatagtggagattctaaagacagagcattctgagaaaggaacaaggctaggtttgcaaaatcaaggcctgggactaggggtatgcatgatttggtttaccaaacttaatctagtttaaaaaccaaatatatggattgaattttaaaatcaaacactggtcat

SEQ ID NO: 212707 - DNA, 440 bp, Glycine max
tgtaagaatgtcttgggataccattatggagcctaattattgccctaatcaaaatgaaaccaagaaaaaaaaactaggagaacatattatatatcaagttgaggcgaagacttgaaggtctatcataaaggcatcacaatattttcttctatttttcaactatttgaaagcaaattattctttaatgttgttggttattgttgttgtaaggataatttagtaagaaaataatttattctattttagtaggattttttagcataataagatttttcgtaaaaataaaataatgtttaacatatataccaatttatactataaatttattagggttcttggtgacatgtaagattgatgattatcatttgtaattttggtgttctaaaaaatatctaatttatgttttatataaacactttctctattatatggtgttaaat

SEQ ID NO: 212708 - DNA, 458 bp, Glycine max
  unsure (1)..(458): unsure at all n locations
agcttgcaatgaaagatattgtgtatgtangagtctggtgtcaatctaaacacacaaaccaaggccataattcaaaataggtaagatagaaatgatgatagtcattggcacaaacattgacttctgcaactgctactaagcttgcaatcaaagatattgtatatatagtaattaactttccattcagcaacacaaatttgttttatttgtacgcttaaatttgttagattgcctattcaatttgaaatgtcaaatttctatcttacatcttttatttggacaatatgtaacanaagatgcaacaaagaagtttactaaaccttatattagagatggacatcagttctttatatattgcttgtctggcgcaccacaanactatttttgatttcttttgccaaagatagactcgtttatatagttctcgtttgctcaagtaaatcggattatacttgcgt

SEQ ID NO: 212709 - DNA, 462 bp, Glycine max
  unsure (1)..(462): unsure at all n locations
tgtgcaaatcaagtcactcccgcattatatctctagcatgcattggatgttggtctcgtcctttgtcacgggaagccggaaggtccatatcaccttcttaattgtacacatggggcactgcgcccccaaatgcgcaagtaagaagagataattttccgggctctcgtgtccgtaaaatgcattcatatcatgcatcgcataagcatctcttcataacatcataatggacatatcctgcatttgtccgttatcatattccagcctcccattttgcatgagtcatggcatcatcatgcatatgcgttcaacaaactntttggtctgcaaaattgcataccatttgttttcatgtttgctcatccttgtgttttcctctacaaaacaaaaacaaaaaagggggaagcgtgaaacttcacactacattcttagtttcatgtgttaggcaccatgagccaaccatgt

SEQ ID NO: 212710 - DNA, 163 bp, Glycine max
  unsure (1)..(163): unsure at all n locations
agcttcatgatgatgattcagtatgaatcaagtatttttgatgatgacaaattgcctaaaagaatgatttcaagattgagtcaaccagttcaagatcaagattaattncaagtttcatgagaagaaatcaagatgattcacgattcacgagaagtttgttttc

SEQ ID NO: 212711 - DNA, 467 bp, Glycine max
  unsure (1)..(467): unsure at all n locations
nttatacaagctaccaaacaaaatataagtatgaactgaaatttaaaaactgaaccaaaatntanaaactgaaacataaacataaaatgtactaaagacaaaataatataaactattcaaagtgcaagaaaataaagatcctgaacttgtcaatcatcttgtgcaacgtcattcaggtccaatgctggttcagatggtggatcctgagaaataggcaagtccaacacttgtgcagatggctcaggatcaggctgacgagatggctctggtactgcaacatcctcctgtacaataattggatcagtctgaataatgaagggctcangtggagagggctctgagatgtcaccagaagcatccttctgtgcaggctaaggctcctgggctacggaggcctcaccccctcccaaaggagaaggctggactcctagccaggccaccttctgaaagcaatcttcaatgctcat

SEQ ID NO: 212712 - DNA, 460 bp, Glycine max
tgacctatgaacttatatttatttaggtttttactttctactttaatgatgcaaaatcttatagctctatgttgttaacttgttctgctaggtctgcttcgccttctcctgttagaagccgtcgaagtcgatcaaagtcattatcaaggtccaggagaagtcgttccaggtgtagcttcccagaaacgcacttctaatttgctctataacttaccctatattagacatgcacacacattcataaaagctaagttgtgatatgatagatatcttagcatagcaatgctaattacgttctttgtagtgatggttaagtttgtttcaggagtcaagattctgctgatgtggagaatcctggaaataatttgtatgttacaggcttgtccacaaggataactgacagtgatcttcacaagtatttcagtaaagagggaaaggtactgttcctttcaattggtat

SEQ ID NO: 212713 - DNA, 409 bp, Glycine max
  unsure (1)..(409): unsure at all n locations
aagcacctgcggctgcagctttaaactgcataaaacatctagcgttttagaataccaactcatcgctagtggtgctgaggttgcgagagcaatctttgattcaagtggctagttttcttcctcccagaaaacaagctctccttcatcccaatccaattccaactctgtttgattcatccgaccataagattttatctgtgagatactgaataactagcaacatattttcaaatcctttattatcctttctgttacagaatttgtgacaaactactatcttggcacctaccttaatccacagtctaccttaataatcccacttccatgtttctggattcaaaggcaacactgagactttanataggtcctagactgctatcattatctgttcgaagtgtgtctgttcttg

SEQ ID NO: 212714 - DNA, 452 bp, Glycine max
  unsure (1)..(452): unsure at all n locations
ntaagagaaattcccttcttcttcttatcattatcttcgtgttgatttaatctcaacagttccatttcgtgctcctgtaactttccaaataatgtagcaagagacatgttagttaaatctcgtgactcagcaatggctgttaccttatgttgtcattccctacttaaacatctcaatactttatttatgagatcttcatttggaaaaaaatttcctaaagatgcaagatgatttattatatgtgtaaacctcttttgcatgtcttgtatactttcatttgaattcattctaaataattcatattcatgagttaatgtatttatcctagatctttctacatctgtcctgccctcatgtgttacttgtacggtatcccacatgtcttttgcacttttacaatttgataccctaaagtacccatccattcctaaggcagaatgtaattatatttt

SEQ ID NO: 212715 - DNA, 370 bp, Glycine max
agcttgcggctcagcttcaataagtgctcggggcatcctatggactgagcgaaaaggctcaggtcatcaaatactacgcatcttttaaagcacaaagcgaggattggaacctcaaccctacgttcttttaaaagactgcgatgagaaaattacagaggatacgaatccttgggggaaaccaagaagagcacacaaaaataaaaacaagctgcgacttccttaattgccccagatcttaagcgtagtagcgcatgacaacgtcggagttcacgggtgagggtagctccttgtcatccatgttggcgagcactagggcccctccggagaaagccctttttacaacgaaaggccgtagttcggggcccacttt

SEQ ID NO: 212716 - DNA, 479 bp, Glycine max
  unsure (1)..(479): unsure at all n locations
tgtaatcgattaagctaatacgagagacttctctgcaagctacaagctcttgtgtaatcgattacaatcatcctgtaatcgattaaaacagagagtttgaaacactgaagaaattttctaactttagaacatttcttcttactcctacatgatgatgcatgatggatgcacatatgaaatgatagggactaagatgcaacacagaatacaacaatcaatacaaatgccacttaagagagttgggcatgtaaaagacaaaacttcttcaagcttcaaggctaagtcttcctgttgctccccatatctctaacaatttaataggtaccaacaagtaagatagactaaaagcaagaaattaagtatgataatatttgtattgcagtaattggtatgcaacaagggaattcanatcctgatctattatgtatataatgtataatggtacaaaaatgagaatttagtcaatttataacttactt

SEQ ID NO: 212717 - DNA, 447 bp, Glycine max
  unsure (1)..(447): unsure at all n locations
gcaagcttcaacaatcacattcatggctacacacaattgaaaggtgttaaatagtcatatgtttacacatcaagagagacacactcatccaaggcatatatagttcaaaaggtttgcacaacacaaatccacacatcaagagagagataaccttattgccaatatacacacaagaagataagggctcattaaggcattatcaatcaatattaagactacctgtgcggcgtccctaaataatgactggtttaatagtaataaatcaaatcgcagaaaccatgtgaattttnttttttgcactgttattcatttcacggtaattaaattcagaaggaaaattatcactatataagcctgaatggctagttcacaactctattcggattcatttctttctaatcactcataacctctaaactattttactatttcaaaatataccagtca

SEQ ID NO: 212718 - DNA, 468 bp, Glycine max
  unsure (1)..(468): unsure at all n locations
ggaactatgaaactaagctttcttaattccataggcttggatcgcatcttttcttgggacactcttcttcctcttaaacgccaccacctcttcctcttcgttcgcctcttccacttcttctaaaattgtggcaagccctccttgccttgaatttttcaattccaatttcagctgttcaactaaatcatcatgctcccattcaaagtcaccctcatctgattctgaatcactcaattcatcttcccacctaatatcttcatttctcttcaagccattcctacacacctcttcttctttgctttctgaaccttctctttgatctttaaccacagcttttgtagaatctttaccaccaaaaccatgtgcttntaaggacttcaaacctcttatgccaggttccatttccacatacccatctttagaataaatgccatgagcactagattctgaaacttttccatcacatga

SEQ ID NO: 212719 - DNA, 115 bp, Glycine max
  unsure (1)..(115): unsure at all n locations
atcctcagagtcacctgcggcatcaagctngctctaaatatacatgatgtttgttttatgggaggaggttatatgccactttttgctttaagagtaatgtcccactaaaactaac

SEQ ID NO: 212720 - DNA, 457 bp, Glycine max
  unsure (1)..(457): unsure at all n locations
ggtccacaaagtggagaccataggtcacaggtcttatagtattaaagagtcttgattccatgtccattgaagaactagttagaacattaaaggttcatgaattggaactaaaataggatgagggaatcaaaaaggaaaaatctatgtgtgcacaatagaccaaaacatcctcagcatccacctctagatcaatgcacaataatgcccctaatgcaaatccaacttagacaaagatgatcaactagccttcatatctaaaaagataaaagaaagatgtgaaggaagagaggcagatcaaactggaggggctcatccaagaagcaatcttgagatagaaaggacaaaaagaagagttcataattggtacgagtgtagagcctaacacttcagtctgaaatccatctangatggacgaagactaaagaatacttcagtcgaaggcaaatggtctatgaca

SEQ ID NO: 212721 - DNA, 385 bp, Glycine max
  unsure (1)..(385): unsure at all n locations
agcttgctgcttgtgtaacagggtaccgggtgtataattctcactacccaactntgtgtatctgtggtttaaaactagtaatatatgtcgcaatggtatcggtacttatagaaatcccattatcgtaacaattcattattgtgattcgcccctggattagatttgataaataaatgattctggagagcgaggatgaaccacaatgtatgcttaactttgcataactattagactattaagatctgagtgttgaggtgtgatcttccatcttggtttaaaaatttcgctagtactatgggaatatgggctactttgtttgcatctatctctgcaaggtggcacacgaaatactctagccgcgtggacatgtcaggcaaagtttgag

SEQ ID NO: 212722 - DNA, 462 bp, Glycine max
  unsure (1)..(462): unsure at all n locations
ntgaatgttntttcatgtcttatctaattatcatcatgattatcttctcaccaaaactctaatattttagtgtcgtcaatctttattgacaagattttctaccaccatcatcttacaagaatatattatattattaatataataaaacaattagttataaattgttacaatttaaatttaagttataaatatatctaaatttaagttgtagataatttaatagatatataacttagagtttattatttctatatactcatatatatatatatatatatataacactcacaattaaacctaaataaaatccaaattattctatttttatactcactatttaagaggatacactctacaggnaaactcactgtgcattatgctctaattaaaaccctacaattatcccttgatgatttgagagcattggagcatagttgcaggtaccagcctccgcggtcattg

SEQ ID NO: 212723 - DNA, 458 bp, Glycine max
  unsure (1)..(458): unsure at all n locations
agcttgngcaaatcaaatcactcctacatctcatctctagcatgcattttctttctttacccactcctcacgtttgggtttttagggaaaacaccataactaaacgcgccgcaagggatccctatcgcaccagatccaaatctaaaacgatgggtgatcaagaggagacacaggaacagatgaaagccgacatgtcggctctgaaagaacaaatggcctccatgatggaggccatgttaggtatgaagcagctcatagagaagaacgcggccaccgccgccgctgtcagttctgctgccgaaacagacccgactcccttggaactacgcaccattctccctaaacatagtaggacggggaagggacgcactgtggcactatggcagccctcacctgtgatacaaccgagcggcttacccttatggattgccgcccaactattcaccacccatcttgca

SEQ ID NO: 212724 - DNA, 444 bp, Glycine max
tctttgggaccttgaacaagcaatcaattcctctatcagattcatgctatgtgctcgcgactggtccctttcttcccttcgcaacttgagttcactattgctaccccatagagctccgcgaaatttgttccggccatactcttccttgcgagccctcttggtctctcgttcaagggctcttgcggtaattgcattctcttcccgtaacccggcacactccttccgaacgtgtgtagcagccaacttgaacttttccttggcgagttttgcctttcctaactcgcttttgagagcttggacttcctcgtcctcttccggtgcttcaaaattctcttcgctgacgacttttaacttggcgagccaatctatacctcgtatgcgaactctcagccattcgcggtacccaccaatgatgccattacgaatgcctctaagctcttgatc

SEQ ID NO: 212725 - DNA, 377 bp, Glycine max
agcttgcatcaatgcggtcttcaaatctttgatttatgctaaccatattatcaaatgagtatagctaataaagcttcatgttatcatgcttctattgaattgacatcagatccattgatctgattgcttattacaaaatgcacactctatacatgcttcctcacagacagcaaaatgcctcatggaaaataatcctacccaaaatggataaatgtatattcacaatttcaaacacaaaacagaatcctccaatacagaaaattagcactaaatataaaccatctcaccaatctataatcacatgatgcaatttttattcttaattttatatttcaatcacaaccaatatttataaaattaaaatctaaaaagaaata

SEQ ID NO: 212726 - DNA, 377 bp, Glycine max
  unsure (1)..(377): unsure at all n locations
tggcccanaatctagacgagaccttatgagatttttgatatatcataatgtgacaactaattagtactccacatatataactgcaaattctatttttcattaacttactaaatacattgaagcatattcaatgaatatatacaagttcaaggaatagcaactaattaattgataacgaagaagcagctaacaaatatatttattttgatatatgaaataaagaaaatctcatatttgttactcttcaaaacaccttaatttaattgaagtttcatttttaaccactctttttttttattcttaattgatgtcaacgttcaataaaggataatctaaaaaaaattaaatgaaattgctacaagttaaatgatactaat

SEQ ID NO: 212727 - DNA, 88 bp, Glycine max
ataagactttgtcccatcccattataagaaacttggcctggatgtaaaaattacacacacgtgattaccgttggtttagaccacatct

SEQ ID NO: 212728 - DNA, 409 bp, Glycine max
  unsure (1)..(409): unsure at all n locations
tagctcacaacactaggcacaaagtaatctctttttnagttaactacgccccaaagtgattcattatgctctaatgatcagagcggatgtttaactgtagatgcattaatatatataaaatataggggctagaaggaccttagagctttcgaacttaaataattatttggacatgaaattacttcaagtatatatcagaacaaacctgtggaatattagaaatatattccatagacataagagctgatttcctaaatactggacagagattaacagatggtcgtcccaccgaaaaaggtttgaggccaccttctcgaaaagattattgacgtgatgaccagctttaagtttaaacaatgaaagtagtgaatcacccatgtctatcacacactgaagcttaaccaataat

SEQ ID NO: 212729 - DNA, 478 bp, Glycine max
  unsure (1)..(478): unsure at all n locations
gaccttaagtcacctgcggcatgcaagcttgtcaatcttatagcagtggttggtattcaatnttttaaatagcttgtatcaattnttgaaaagctcctttaaatagtatgtttaaatgctaacttctcacttttaacgcttaacattnttccgtaaaaaaaaaacactcttaacattttatttttcttttacctttaaagtattcattaaatttccttatggccttaatttttacataagttgggatnttattttcttttggttatcttcttcttacactgtttattttaaccatcacactatttacattatttgttatgttatctaaatattatacttcaccatattttaattattacattcatcaacatattaaaagtatgacatatatttaagtggttgttaatttatttgttttaaaacttggttgccaatattttaaaacataatataatatttatagtaaaatgcataatat

SEQ ID NO: 212730 - DNA, 464 bp, Glycine max
  unsure (1)..(464): unsure at all n locations
tgttaagtgtctttctttcgataaatattaatatgatgtattggtatcaacaagtagatatcttatggtgaaacttctggaaagtttacttgaccgaaagtggtcaagtccatgtagcctctggtctctactctcttgcctgcaaaaccaaggagtggaccagcttgaggatgggcagtgtcagggaagaccttgagtctctagaaagttttccaatataggatgtaagtggaactgccctggttgatgaggaccttagacaccatgaagtttgccatgatggagatagccacgaggtcgtcctggttgacagggttgatacccttgaagtccctatccgtgaaagtgattggagagagactttgtcgtaattgtgcaattaacaaaattgatgttgatgtctcgaatggcgtaaagatggcatattcgagactagctggactgtactccatangaaaatttgc

SEQ ID NO: 212731 - DNA, 486 bp, Glycine max
  unsure (1)..(486): unsure at all n locations
ttatccatggcttcctatggtggtgaggttgttcatgactcatcttctccttgaagnggcatctccaatcacctttcctccttttccattccactaccattgatcttcaagaagcgaatgagttcattgatgaaggagatccaaggcctacaagctctacatggagctacaatacctacaagacaaaatcaattagagagaggtggtacccaatttaagttgggtctaatggggttaatcttcagagataaatcttttggaatccacatgtattttactcttagaatgtcaaactttctaacatagtaatcttaaaatgtttttcctagaccaaggagatggttcataatgtgagtgaattttgtttgaagttctgaaatggtttccccattcttcattcgaaaatgcttcatatttaaatacgagagtgtgctttcttgctcttctcacatccattgtgccttcatgagtggcctcaagcatatt

SEQ ID NO: 212732 - DNA, 123 bp, Glycine max
cagcttgtctaacatttatgcgagacggagacttacatgctatctatcattttctagtaccaagaagagttaggtctagccatggcccacgagcatagaatcgcggatgagtatgctcaagta

SEQ ID NO: 212733 - DNA, 358 bp, Glycine max
  unsure (1)..(358): unsure at all n locations
atgcatgactcctgcactcaactctagacaaaccaccaacatgctagcgttcttaactagacaccgagcaaatgtttgcaaaataaacgccgacaaccatacactgngttgacattctactcgaccatacgcagcaagggaagttatgtgaaggcataggctcacatcacagctagacgcgaccatgcggctggattattaagctcctaccttagactatatacattagctaccctgtatgtgccacctcgcccatgcatgaacaacatctatcaactgcaacggagagactcatgggcttctatggcaaccgactcatgatatgatactttatgggctaatgctcagaaatgacact

SEQ ID NO: 212734 - DNA, 308 bp, Glycine max
  unsure (1)..(308): unsure at all n locations
tatcgcatataatcactttaaaatatttattttcttctctctcccccctctactcacacacacacaggcaaactccttgtgtgtactagtataaccagataaaatggaacagttttgaatgtttgagtaagttcaattttcaactgacacattggccactttttcaaaagggaaagagagtacagggtggtgatcaagtttgttgctcgggcaaatttgtatcacttgggccaatttctagctggtaagcgtgctgatgcaccgcaagaggcacttcanattcttgacattgtactaagagagctgtc

SEQ ID NO: 212735 - DNA, 447 bp, Glycine max
  unsure (1)..(447): unsure at all n locations
tcttagaccatattgtataattctcatctatatatttgattattccttcaaggttagttaattgccaacttaaattaattaatgacccacatgaagaatgtgaaattcgatttccacaataattggcacaaaaatcaaatagagtatatgctaaaaactcaaatcaggaagaacaaaggttatatattttgatttacatttaagtttaacacaaggcttacctttggtgaaggagcagagactggctgtggcttgggttctactgatggtggcggtgtaactggggttgcaggctcacttggttgttcttcctgcaaagaaataaaaaaacaagaacaatggttacctatgattgttcctaaatgtttgaggaaacataccaaataataacaaaaacactatgcatgtattctatgagaactgaaatntgtgttgtgatccactacc

SEQ ID NO: 212736 - DNA, 441 bp, Glycine max
  unsure (1)..(441): unsure at all n locations
agctttcttgagaanacttccttgagaagcttcttttataaaacttccttgataagctagagcttagctacacacacccctctcataactaagctcacctccttgagaagcttccttaagaagattcctaaagaagcttgagcttagctacacatacctctctaatagctaagctcacctccttgagatgagaagatagagcttatctacacaccccctataatagctaagctcaccccatgacaaanaacataaaaataccaaataaagtccttattacaaaaactactcaaaatgccccgaaatacaaggctaaaaccctacactactagaatgaccaaaatacaaggcccaaatgaaggaaatacctattctaatatttacaaagataagcaggctcatacttagcccatgggctcgaaatctaccctaaggctcatg

SEQ ID NO: 212737 - DNA, 401 bp, Glycine max
  unsure (1)..(401): unsure at all n locations
ntntgtacaagcaatcaactcaaagtactgaaatttaaagatctaaatcataaacactaaaatttaaatgaatgaacatcaatcatataataaatgaaaataactaaaatgttcaaaatgcacaaatttaaatgtcctgctcctgtggttgctcatgtgcatgctcattgagatccaacacctgagtagctggtgaatcctgagggataggctgctctagctcagatgctagtgcaaatggtatgacatcatcaggtatgggtactggggatggctctgggatctggtctctggaagtctcctcctcttgagccacatgtacacctgcatcaaaataaaagggctcaagaggggtgagctcatcctcccctctactgctgctgctgctggctcctctggtt

SEQ ID NO: 212738 - DNA, 480 bp, Glycine max
  unsure (1)..(480): unsure at all n locations
agctntagatgttaggtgatgcaatcctaccccttatggtttttgtatagaaaactccaagtagattgggccaaagatgcaagagaaggccctagggttcttatgagccttatggtagatttcgggcccatgggctaagtatgagcccacttatctttgtaaatattagattaaggtttcattatttttgggccttgtatttagggctccataatgtaggtagggtaccctagaaatataagatttttcagcccttgtatttaagggcacctagactatgttttgtattaggggtagttttgtaatttcacatgtactaagtggatatttgatgtgtgtgggtggaaataaatttatattgaattggttaagcccaatccaataatatttagagggggaggtgagcatttgcttactacaccccacngccacatcnatatagtacactntgtgcatgtccttcatgcttttcatgcctca

SEQ ID NO: 212739 - DNA, 484 bp, Glycine max
  unsure (1)..(484): unsure at all n locations
tganatgaggaagtgtggaagggtgagacttcctacttttattcgttttccacagagtggtacctggagatatgtcgcgggggtcaggagaccttggggacgtcaggtggggtgctattgcccaaaaccaagcttgaccaatcccgacccaacccggccatagtcagtcagtgagaacctgtgatgtacctaaacaggcgagctcctggcagtcaaccgataaaagaacaaagaccacaaagcatggaggcttgtgtggtggctggccagctatgaatcttgagtgatatctgtgatatggcctctggtaatcgattaccaagggtgggtaatcgattactaggcttaaaagtgaagccaggaagctaagatggcctctggtaatcgattaccaggggagcgtaatcgattaccgggcttataaatgagatcaagaagttaagagggcttctggttatcgattaccaagggatgtaatcgatta

SEQ ID NO: 212740 - DNA, 446 bp, Glycine max
tatgatctgatcatgtatgtgctcttataaaattttatttcttttcaattctccacataattcatttctatgtgttatcctgttatgaatagtattgtataattagagctggggaaaagagcataagttcatggactagataatttaaacctggctttaaaaattgtttggctttctcgtagtctggattgtttgaaatttaaaagcagtaaaccagaccagacctgtttagcacatggattaaattgggtagggtatgaaatatgtgtgtgtaggaatcaaattacactagtgtaactgtaccaactcttacaccattcaataatttttaattggataattttatctcaaaacatactgttggattaaagttctcttcacaaagatttatatctacaaaatttattctaattcaaaagtatttggttgctcatatttgtacatta

SEQ ID NO: 212741 - DNA, 452 bp, Glycine max
  unsure (1)..(452): unsure at all n locations
agcttaattgactccttggagttgtttatcttttatatgngttgccaaattgacataactagaatntttctttgagtcttgtttttaatttgncaatctaatctagtgccattctaggacttcctttgtgttccaccttggcttgggggggttgccttttgctttatttttttttcttgaatctcattgaattaatgtcacattaaatttacttttggtttagttctcatttcatattttnggttcttgtctttgtttttgcgtttaagtgttgcctacaataaggattggaagaggaaattggtgcgttgcttgaaagaatatttntgagtcttggaggtacaccatcctaggagcaccattggatttaaacaaccaaacctaacaaatttgagtgagaccttgagaaacaaacttcattgaaaacaattgaaaccttaatgctttgtaaa

SEQ ID NO: 212742 - DNA, 426 bp, Glycine max
  unsure (1)..(426): unsure at all n locations
ctggaggcattacctntatggatctaaatttgttgtgtttttgaccataagagccttagatatttgtttgatcaaaaagagcttaacatgaggcagatgagatggatagagttccttaaggattacgattttgagcttagctatcatccatgtaaagccaatgtactagctgatgccttaagtagaaaatcccttcaaatgtctgctatgatggttagagagttggacctcttaaagcaggtcacagacatgagtttggcatgtgagatcacctctagtagcattaagttgggtatgttgagagtcaccagcgaactcttgagcgagatccgtgagggtcataagtttgacccattcttgtcagcccagctagagtccatagtcgcaaggagagagagtactctagagtgcaactgatggagcttg

SEQ ID NO: 212743 - DNA, 410 bp, Glycine max
  unsure (1)..(410): unsure at all n locations
agctngntggattatggagcacccgtcatatgtgtgtctaggtggcgatcgggcgatggtgcaaatcaactctcccacatcctcaaatcaaacatgaacccaccatccccagttgcccaccttcaactgagctcacgtactcctacataacccttatcctcattcctctcagcaccgggtccccatcaacccctccaagcttccgtaatatcccagcaatccaattccaactatcatgaactaccctaaacccagaaaatagggcagaggcagaaaactctggccaaaacaccttcacatattacaactttccttactcaaataccccagtaacattctcttcgttccgattcgttaaccggtggatcgactngaaaatnttactggagggtnctagtacataagtctac

SEQ ID NO: 212744 - DNA, 473 bp, Glycine max
tataagaaacaaaatgcctcaatcatttccaaatatgcatgttaattatgaagcatcgacaagaatcaagccaaggctattgtgcaagcaatcaatggggcaaaacacaccaaattattatgatgatggatggctcaaattctcacaaaggtaaactcatcactttcaaattgagctttcaaaactatcatgacgtgtagaggagaatcaaggatttcaagtcacaaaatgtcaagaacttttattttcaaaacaattacccgtttcttgaacatatcctatatttcaaagaaaaacatgcaaagtcgtacatgcacacaaaattgacccaaaatattaaactaaaaatccgacgaaactaacaacattaacaaattaacacaactaacaaattaacaaaaccaacaaaactagcaaagccaaataacactcccccccatacttaaacaacacattgtcctcaatgtagcata

SEQ ID NO: 212745 - DNA, 479 bp, Glycine max
  unsure (1)..(479): unsure at all n locations
agcttatactcattgataagtatataagaactatttaatatgntttaaagtataataaaatttatacatcaataaagtgatcaccttcaattctatactcaatctaactttatgaacatagcataatttatgaattggtgagcacatcaaactataagttcacatgattgaaatattataattcaagtttcaaaaataaagagtatcatttaacatattattaaattaaaaatgccaaattgtttgaaaaaacaaaaagaaattaaatggtgttcatgtcaccaaggttgagaataaaaatngtccttatcaaaccaaacaagaattcctcaattcacaaccttgatatcatcataacatgcattaaactgaaggctagtcagtggaccacttcttgttccatttcctaatcattaatcaatcaatgagaaatagtcaagggatttaagatattcagatacactctaattcatgaatat

SEQ ID NO: 212746 - DNA, 450 bp, Glycine max
  unsure (1)..(450): unsure at all n locations
gaccttaaaactaagccttaccccataattcctccaatagtgcaaattcgctntgaaccattatctccttttatgaatgaggctctcctacaacctatgaaaggtataaggagataaactgtacaggatcaaggttcaatcaaacaatcatactttcagctcanaatgggtgcaagggataaatcaatcatgcacaaagtaagctttttagctaagaggctctcttcatcaaaatatggccttcatcatcttcaatttcacgcattcattccatactcaaagattcatgcaaaaatcattactcaatgttagtcgttctctcatacttaaagatcacactctcaccaggttgtggctaatgagtaccttcacaatcaaactgtcaaactgactaacattttcagtcatgatcctaatcaatggtctttctcttcttatgactgcacactc

SEQ ID NO: 212747 - DNA, 446 bp, Glycine max
  unsure (1)..(446): unsure at all n locations
agctncattaatatgttatttatgacctttatttgttnttatgaacaaactnngaaacccttggacatcttcatcacaagttttatgaaaaaacttgtaaatcctttctttacatgattccctcttcagggtatgaccccctctcatctaaggtgttggctctcttccgggtgatggtttttctcatatcaagaatctttatttatggaccaatcataattttaaaaagaggaaacacatcctaaaatatattaaacaaattcataatattttataaatntaaatagtatcctaaaaaatttaagaaaatagcaaattcataattttgattgtttctttttttaatatttgataaaaaaaaaacgtgtctctgagttggacgtattcaataccaatatttgctcagcactctgtctatattattattttataaaagcactgtaaca

SEQ ID NO: 212748 - DNA, 446 bp, Glycine max
  unsure (1)..(446): unsure at all n locations
tgttgaccaatatcatgccacatgaggagaaactttatgcatttccagacaacaaggcctgattgtagactttaactccccttccatttcttggtgttcttactttatctttgtccgacttggcattttccaagtcatgatgttcttcattgggagaagaaggcttcattttcatgtgatccagttatggcgtaagctgaattgacacacggaaacaaaagaaaaggagcaacaaagttcacagttccacagcgtttcaagctatggagctcatgatcgatgacaagtgaagcgacgcgtggaaaggaaaaacctttttcacaaacccgggtatgtttatgatcgacgagaanaacccatcaaggatcaacaccgtgatcgttgaaacagcgagaattggatggaatatgacgcaagatgcgaagaaattctgggattaaatgacc

SEQ ID NO: 212749 - DNA, 454 bp, Glycine max
  unsure (1)..(454): unsure at all n locations
agctntaagagtgattcctttctttttcttgtctatttctgcgtgtggatttagtctcatgagttccatttcgtgttcctaaagctttccaaaaagagttgcaagacacatgttagtaaggtctcttgattctgtaattgtcgttacctttggttaccattctgatgcaatcctccctaggaaaggaccagttaccagagccatgagcaagagactccaagaggattgggctagagttgataaagaaggcttanggttctcatgaatcttagggtagatttttgagcccatgagccaaggttgggtccactcttctttgtaaataatagaataggttgttttcttcttttgggccttgtattntggccattctagtagtatagggttttagccttgtacttcacggcatttngagtagtctttgtagcacgactttttgtgtatttcatcgttt

SEQ ID NO: 212750 - DNA, 466 bp, Glycine max
tcaggctgttcaatcgcttcaaattgttgcacataacggcttatgtctgtgtggtggtcggcataggagcataaaccacagagtctggcgacaggtgcagatttctgattcatggctagttgggttaccaggttaaccaaggcatctatgttaccttcaagcttcttagtctcacctgatgaagatgaattcgtggctacttcatgcactcctctaatgacaataacatcatttctggcactgaattgctgggagttggaagccatcttctcaattaaatttttagcttcagcaggggtcatgtctccaagggctccaccactggcagcatctatcatacttctctccatgttgctgagtccttcataaaaatattggaggagacgctgctctgaaatctggtggtgagggcgagtagcacataattttttaaatctcttccaatattcatatagactctctccac

SEQ ID NO: 212751 - DNA, 469 bp, Glycine max
  unsure (1)..(469): unsure at all n locations
agcttataaactatatgttataagctcaaaaacttttagcttatatgcgctagctaatttaatttacagtatttaataagactaatatttaaaaaatataaatgtcaaatgatgaaaaattatatatttattatttctaatatttaaattttatgtctaagtaaattcatcttaaaaagtaggtagaaatttaatctctttttgttggggtttcaatgctatacaatggattatgcataattttgatattnttatcatcaactttgatttagaaaccaaatattttaaccataaatccaaataaacaatgcaataattcattaaaataaatagtttgacattaaataaattaataaaaaagtagaatttcaagtggcataattacaaactaaattatatacaagagttttttatatgacaaanaaaatataagaangnttttacattgaataaaagttgaaaatgaatt

SEQ ID NO: 212752 - DNA, 455 bp, Glycine max
  unsure (1)..(455): unsure at all n locations
ntgtttctgaacaacaaaactggtttctcagccataaatttttgttcagcaacagatgaaagactcagagaatacaacgaaactcatgtcatgaataatttaaaccttgcccctcagtctatcaacaagtaagaaacttcaacagttttcacacatgctttcttgtagctagtatgaacattctaatttctaccactaaaggtttttttatattaacattcattaacttcccttgtacgtggcagagatttacacataagtgaggcactgcagatgcaaatagaggtgcagagaagactaaatgagcaacttcaggtgtgttaaacaaacttataccattaccatgcatgcantttcatcccatcaacctgaaaaattattatgggagagaccatcgtggtcctaactaatttacgtatgacacctaattgaatattaattctaactctttctca

SEQ ID NO: 212753 - DNA, 273 bp, Glycine max
  unsure (1)..(273): unsure at all n locations
agctntaacctcatcgtctctcacagtctatatatatgggagccaatccaatccttgtgtccggactctcagccacttatgatagccgccgatgatcccattactgcttcccctaagctctctgtgctttcttcacaccgcatcacatgccttgcgaactccttggaggacctttgcattggggtcactgaaaccccgtggtgaggacaggatttataattatacaaccgccttgttccatttagggaacattttgaaattcttcggatgaag

SEQ ID NO: 212754 - DNA, 471 bp, Glycine max
  unsure (1)..(471): unsure at all n locations
ngctcgtctngctgatatttatcatgcagacttttctgatgatgaccgatgaacaattagggatcaacttgaaacttatgtgcttcaagtgagaagaaatgcttctttttccacttgtgaagatgttcaaagtttggctatgaagatggttcaaactgagaaacatttggtatttccattggtttataaacttattgagctagctttgatattgccggtgtcgacaacatccgttgaaagagctttttcagcaatgaagattatcaagtctaaattgcgcaataagatcaacgatgtgtggttcaatgacttgatggtatgttacaccgagcgggagatattcaagtcacttgatgatattgatattattcgaacatctaccgcanagaagtctcggaaaggacacttgcctcgtaatattatttaacccgctattgtaagattatgtctatctcttttattttaaactat

SEQ ID NO: 212755 - DNA, 467 bp, Glycine max
  unsure (1)..(467): unsure at all n locations
gagacacctgcggcatcaagcttgctattattcctatgttaattactctctatctgctacatccctccccagtccctaccatgaatcagaagcatntattgatgcataatgatagctatacattactggaacaaaggtcttctacaacgatggtaaagtaccttctatcacggttttataaaaagattattttatatagctccacataactattcttcttgcttcctactntttcaacatgaaattcaatttcatggcgctatctatcctgagtttcatggtttcttcaaactattcgtagctccattttcaatatactttgcagtttgctgctctctgtggatattggtactgtggncgactctgatgtgtagatacaaggaagaagctggaaacaatatttaatggcgccctcgtcatcttataggaatgtaagcagcaccttggntatttccattcatctgtct

SEQ ID NO: 212756 - DNA, 442 bp, Glycine max
  unsure (1)..(442): unsure at all n locations
tcgtccctagacaattgtaagagtaaattattcatgcactagacgagtctaaccaaccaatcccaaacaaggtcttatttcatcgatttttttggtcatttaaggcatacattgacacatttgcattttgtaaacccattgtgcaaatcgatggaacatagctatatgaaagatacaaagagacgctnttagttgcagttgcacaagatgacactaacaacatatttccattggcatttgtcagtgtcgagggtgagatagcaaatgggtgacacttttttttttttgcaaaacttgagaacacgtgacaccacaacatggtatatgtttaatctctaacaggcacaagttaatcaaaagtgcatacaaacgacctggcagtgggtggatagcagacaactcatcacatgtgttctatattcggcacatagatcaaaactac

SEQ ID NO: 212757 - DNA, 256 bp, Glycine max
agcttctacatatgtggcagggcgggcttgcttctactttcttgtctccaacttctagctctgaccactgttctttcttcccgcgatgctttttttcatgtccgcctgagtgggcttataacctaaaccatactatccacgatttccttgggtttttatcaggctatttatgccgccattgttcttgcctaaacccatcccgggttcataaaccgttcccaacataactcgagccatcattaccgccgaatcggac

SEQ ID NO: 212758 - DNA, 484 bp, Glycine max
  unsure (1)..(484): unsure at all n locations
gacctatgaaactaagctgcttggggcttctatggggctggatcttgagcttattgatgttctttatatggggctntccaccatggagatgcagcggaagacaaaggagaagaggggagaggaggcgccatccactagggaataagccatggaagaaggagcttcaccaccaagatgagccttggataagaagcttggaaagatgcttcaatggatgaaaagaaagagggagataaagagagaggggggagcatgaaattgaaggaataaaagaggtagagaagtggaactttgaagtatgtctcacaagactctcattcatcaaagttacaacaagtgttacacatgcttctatttatagactaggtagcttccttgagaagctttcttgagaaaacttccttgagaagcttctttgagaaaacttccttgagatgctagagcttagctacacacacccctctcataactaagcttaccttct

SEQ ID NO: 212759 - DNA, 393 bp, Glycine max
agctttccacatccacaatgcgcgcataaacccaccatcctctgttgcccacctccatctgagctcacgtactcccacgtagcccatatcctcgtttctctcaacaccgggtccccatcaatcctctcaagcttccacaacatccaagcaaaacaacattcaaacagcacaagctatcacagccaagcaaaacagagcaaaggcagaaaactctgctcaacacatcaaccaaaatcacagcttttctcacttaaagaccccagtaacaattccttcgatccaattcgttaaccgttggatcgactccaaaattttactggaagtctatagtgtataagcctacattgtgacgcgtgggatctactagcaaacatccagaacttattctgcact

SEQ ID NO: 212760 - DNA, 481 bp, Glycine max
  unsure (1)..(481): unsure at all n locations
tatgcgcatatttccttacaaacgttctcttgcacaagacattctattataccgaaaaaaatgcacccatatacaatcaaggcagcttcgttacctagattatttacacgtacttccaaggcgtatttgttacttacatcacacacatctccttggctaaattcacatacatgcatactcaaagcattntggggtaccaaaaattgcacatgtgcacatcttggtatttctaatacctatacatacacaaacttcatgatgaatcttgactatctacacaataaggtgctacatttcatgctcttttcaagtttttgctacctaaagccgcatgcaaattcaagtatattttcctttgctgactaanattgtattcaaattaaaaggtatacantttttggtaatgtatcttctttacataacatgcaacatatttatgtatatttttttgtgagaacatttgactaccaaaaattatatg

SEQ ID NO: 212761 - DNA, 230 bp, Glycine max
agcttattacttgcttaaatgttatgaattgagtatgatattcattattcacggatccaataaactaattgcgaatgtcgaacagaagattgcaggcaatatggccagctctcataattgaggatatcattgaggcaaagagactaaaagcgtaaccagagacctgtattttgacggaagcaccacgcattcctccgagtgaatttctctttggaacaaccaagtttttt

SEQ ID NO: 212762 - DNA, 492 bp, Glycine max
  unsure (1)..(492): unsure at all n locations
gacctataaaactcagcttggaggtgagaagtcatcagcatcgactgagtcgatgatttgccattgtccttgaatatccggaaacgtttttccttctctgcagcatccttatacacttttacatattcggacatccattgctcgtggcatactcgcatcgatgtctcgcgcagctagcgacacatcacctgcgatagcacaacggcaaggaggaggaacagagctagcatgtgctgatgatggcatgcgaaagccatttctgatcaacaaaaagcttaaagagttgaggaagatagggctctggaacgatctcgttgtgagagaaacgataatttggtacgcactgatgacaaagactctggtggcttatatagagatcataanctgcatgatgaggaattattaatcagaagatgtatgcgtggtgctctctgattgagaacgcctgcacgggcaagtaccttcaatatactcatttagactggaagatca

SEQ ID NO: 212763 - DNA, 434 bp, Glycine max
  unsure (1)..(434): unsure at all n locations
aagaagggggagcacnaaattgatggaataaaagagggagagaagtggaactttgaagtgtatctcataagactttcattcattaaagttaaaacaagtgttacacatacttctatttatagactaggtagcttccttgagaagctttctaaagaaaacttccttgagaagctagagcttatctacacacacccatctaagactaagctcacctccttgagaagcttccttgagaagctagagcttatctacacacacccctctaataactaagctcacctccttgagaagagaagcttccttgagaagctagagcttaactacacacacccctctaataactaagctcacatccttgagaagagaagctagagcttagctacacacccctataatagctatgctcacccgcatgaggaanaacatgagaatac

SEQ ID NO: 212764 - DNA, 475 bp, Glycine max
  unsure (1)..(475): unsure at all n locations
tagacttaattctatctgctatgggtctcagatgtttagattngggcttacccaagaagataggcactcccaaataagagaagggaagactcccaatcttaaagccgagaagttgcttgagagccatgattttcctacgagatatgtcatcgagaaagaaagtacacttctcaagactgatatgttgccatgaaacttaggcatagttgtgaaacaagtttaataagctatctaaggaccaagatttggccttataaaaaaccagaatgccattcgcgtaaagggtgtgcgaaggcattggaaaagaacacaagctagacatgggagagaaggccttagaatcaactaattgagaaatccctctacctaaaacatcttaagcaagacaaaaaagaagcagagatagtaggtctccctaacgaacactccttttataaggtacataaccataaagggattcattaatgaagaaaga

SEQ ID NO: 212765 - DNA, 289 bp, Glycine max
  unsure (1)..(289): unsure at all n locations
agctntagatggaaaacctgtggtgattctgntatgcaactacacaaagcacagcgtcgtgttcagctcttaggggaaatcctcctatatccaagagaccactaatgaaaatccacattcaatccaaagcaaggaacataaaataaaaccaatgaagaggaagaggaagccataacaacgcaagagcataacagcgcaagatcaccgatttccttccggcttggtcgcgtgaaatgtaaagaaaaccattaaaagaagaagaggaaggaagccatacctgattacctga

SEQ ID NO: 212766 - DNA, 431 bp, Glycine max
tgtgaaatcaatggaatccaagattccatttgacacaagtcgttcaattctattcttagaaatatgacctaagcgtttgtgccataatgctcctgagtttgtattatcaattctacgcttagtaccacacaattctgcattaaaggatttaccataggaagctacagtatcaagtaaatatagattatcattaaccacgagtgaaccagttccaacaatatatgaattaaaagacatcttgaacacgttgtttccaaatgaacacaaataacccaatttgtccaaataagaaactgaaaccaaatttcatctaaatgacggtacaacaaaagtgtctttcaaatccaaataaaaatcagtacataataataatctaaagtgccatatagcttccacttctaccaatttaccatctccaacatagattcatc

SEQ ID NO: 212767 - DNA, 426 bp, Glycine max
agcttcaagccaaggccagactctcgtgcatgcttaggctgctcaagagaaaataccaaactcctccaaaaattcagatttcaagcttaaataggtgggttggtccgtgctcgcgagcttagtgcaaatttgaatcgcttagcacacataagtggattttggtttagcgtgcttctctcgcttagtggatgagctgaagcggttcgcttgatgacctggagcagtgcgctcagtgaacctgacaactcatcttcttctagattcttcctcacgcttaaatagcaagttctcatctacctccatggcttcctatggtggtgagctttgtcttgactcatcttctccttgaagtggcatctacaatcagctttcttccttctcattcaactaccattgatcttcaagaagcaaaagactccattgatg

SEQ ID NO: 212768 - DNA, 477 bp, Glycine max
  unsure (1)..(477): unsure at all n locations
gcttctagccaaatggacttaccttgaattaatgcctttgatattccttttgagccttgtttccctttccttgttttgaagctcactacaagccttaaatgataaaccatgatatcaccatatccttaaggaattttggagctttggaattgttttaggaataagtgtggggagatttttgtttcattggataacttgttttgttggctatggttcatgatgtattatgggccatacttgatgtacattgcatattggttaatggttggacatgctgaatttgatgctgtttctcaaaggctacatagtacaaaaaaaaatattattaaaaaaaaatcgaaaaagaacaagaaaagcagtaaagttgtgtgaataagataataaatgacaaaagaatgatgagactcttggttctactctngntatgttaaatntatctttacttctttttattctcttatggtttcttaatatgcg

SEQ ID NO: 212769 - DNA, 412 bp, Glycine max
  unsure (1)..(412): unsure at all n locations
agctntttatggacttaagcaagccccaagagcttggaacaagataattgacgattttatgatgaagttttgataagtgtaacttgttagacaagtggcctcagatatcttaagaaggggggttgaattaagatattgcaaactatttccccaattaaaattctattntaatttcaatgcaagttacaagttcccttaaaaatgaactcttaaataatgattcaaaaagaacaatctgaatataaatgtaaagcaataataaataaacgagtttaaggtaagagaaagtgcaaactcaaatntatactggttcggccacacccttgtgcctatgtccagtccccaagcaacccgcttgagagttcactatcttgtaaatcctttacaagtctaacaccaaggacaatctttc

SEQ ID NO: 212770 - DNA, 470 bp, Glycine max
  unsure (1)..(470): unsure at all n locations
tgtatacaacactgcggctgcagcattcatagctgaccttttccaacctctatcacccttgttgcccaaattccttctatctctaagtacattagtcaatacacgttccatttccaaattccatgtaaaataacttcttgtttcctcattatttttccctaaaacttttcttttgtccgtcatttttttattatatgactccattgaagttaatgtcacttattcaacctgcacataacaaatattaaatataacctactttattcatttgactagtccactgcacaatcatagaaaatatttcaagcaaagcttttatgcaatagcaaagtacataaaagtctatcttcaatagaaaagtacaatagtaacaaagcacacaacagttgtctgcaatagcatattacatctaaaaaagaactatccctaagcaaagattctcctaactngataggtagcacacatattca

SEQ ID NO: 212771 - DNA, 479 bp, Glycine max
  unsure (1)..(479): unsure at all n locations
agctngcatatgctgattagcatnagcaccccttgtccagactgtcatgcgagcagtaatatccggcaatcactcttaagggcttatttatttgttccacaagtgtcgcctgcagcacgatacaaggtaaccattttcataattctttaggtcttgtttcttgtgctgttaggtcctacttcttgcggggtttatgtttaactttcacaattcttctagcagatntgtcacctccacctgtgcccaatgagaaactccctcctagactgccagaagcctgaaaaggagaagggttcagtggagcaatattctgttgactaccaaactggaaaggactgcctcctgatggagtcgatgctccaaataaaaaatttgattgaactggngcaggttgctgactgtatacaacactcgcaggtggagttgctagacctgtatcctcaaccatactgtcctccatactcatctcaccattatta

SEQ ID NO: 212772 - DNA, 471 bp, Glycine max
tatgtatggcaatgtcattgagtgagatttcaatttgacttattctaaagtagggaacatacaagtcttttgatttgtaaagctcttggaggaattgcttgattatcagtcttcttgaaacattcatttgataattttcttagtgacatcaatttttattatgttgtcatgttgcgtagcttcttgtggagatcctaaggttttctgcatcaacattttcaactctgttgaaattcactgattttggtgacaatgaattgatggacactgttgaaatcttcattttagaagcattaaatctgactaaagattctatatcagaggctaaggtaacatgtttctctctgtaccacacttgacaatgtgggaacagtttatatgtgtttttcgctttaattaaatgatttgggatttagttttgatctattgccagatattagtttctctcaaccttattattacttaatcatg

SEQ ID NO: 212773 - DNA, 451 bp, Glycine max
  unsure (1)..(451): unsure at all n locations
agcttaggataatgatgttgtgtacaaatttgtcttcaatgaaattgtacaaaaagtagatgtcatgaagttgttacaacatataatgtagttaataatcatgcaattaacttcaaacaatcttaatctgattgctttggaaatgtactgatgtcaggacaaatggtcatcacatacgcaacagaggtataaccatcctaatttactcacttacatgaagcttgtcatgttcaaaatatcacatatgcaaattgatgataccttgcagataatagcctcaaaagttgattattatgacttanaattaaaggttgcaccattacactgtcataccatttaaccacaacacagaatctaatacaaagtcacactaaacttgagttacacaacatttgcttaagacactaagtataaacattgcatgaagtatagatgcattcagtgtaaaact

SEQ ID NO: 212774 - DNA, 480 bp, Glycine max
  unsure (1)..(480): unsure at all n locations
gacctatgaaactcagcttggcagcattgctggtaggttcttcanaatatataagtaaatagtattagtcaaaccaacttaaaattaaaaaaggtttctgcaggacaggttaaattcttgctaagtatacctgctggaccagatagcaaaatagccctgcttgctggtgggaggttcctggtgtgcttggaaaagtgaagactttctaaatgaacatatgcagcacttgtcaacaaagcttgagttctttcactgtaatttttcacattatatgcatgcataagatatggtgatattaggaaaaaggaaaataaaaatgatatattgctcatgacatctgaatgaataaggaaaaaaaggtagtaataataacacaacaaattcctccatggttagatcaaatccatctgtaacaggacatgagctccacatatagagatccacgctaaatataaacaatatctaccagaaacaatactt

SEQ ID NO: 212775 - DNA, 356 bp, Glycine max
  unsure (1)..(356): unsure at all n locations
agctttgaaaggcctattcctatcctacgatgaatctttgaggcctgagcctggcctatagcctatcaaaggctnttattttggctcggcctgacctttttaaatgcctggcctagcctgatagcctttttaaaagccttcttctcaataaatatttaatattttatggagtaggaacataataggaaagttaaagaaaaaggaaagtcaatcaaaataatgaggaatataaaaaggaacatgactcacacctaaattgtaattaaagtccttgattataggaatagaagttatagagcagtaatgtgtaatcaaagtctgatagtttcagaaaaaaattaattgtatccaaaaat

SEQ ID NO: 212776 - DNA, 464 bp, Glycine max
taaagtatgcccgagtcattcatccctatgaaatgttgttgaagtattggcgatcagaattgccattccttggattatagggttgaaccaagctcatgcttttacaaaaaggttcatcaagtcaagttgaaatatggaagtaaccgtcttgcaaaattggggcaaaagatgaatcgagtcacatcactgcttcgtctactgccaaacatatttaggattgtttatgtccttgttacttccagtttcaccttgacaaagatgtcatggaccatgttgaaaatctaaattgattcaaccccatatcctgcgtaaaaattcgcaatacttcaactgtacatcattcgcatacatccatgcttttcattggttgcattgctcattgcattctttccttgaaaataaagtaaataaaataaactaaatgaacttaatcattgtatcaaaaagaaagggaacgctttacg

SEQ ID NO: 212777 - DNA, 458 bp, Glycine max
  unsure (1)..(458): unsure at all n locations
agcttctccattggtttctaaattctaaggagtattgtgtgataaagaaacggtactaaacgcaagaggtttntctaaatgcctgacccagtctgagtgataaagaaacggtaccaaccacaagaatttttttaaatgaccaacccctaaagcacgagatgatggttctaatatcttgaagatgaaagtattatattaagatttggaacataggtattccctccatacttgctttcacttattatgtggttttttatcgctgaacatccagcatatgaatccttttaaatgactagagatcaatttaagttgaatgagtaattgatggtgagatcattcaccattaagagcaaaaaatttcttcatttgtagcttgtaacgatgttatgtctcttaactttataacatangactcactcactgattggagccaaaattactctcgtgctgaataattt

SEQ ID NO: 212778 - DNA, 355 bp, Glycine max
  unsure (1)..(355): unsure at all n locations
cttgccaccttntccggaaccaccttattatagggaaagcttctctntttccggcgcggcgccacggcaagttccatggtcttgaacgcaaaggattgtgctggcgttggaggagccctgatggcgtgaacggggtttctgacttgcacacttgcgaggtgtgggtgctgacacgtgggcgttggtgtttgcattgatgtgcacttgacgatcatgatgagggtgtggctgttgttgtggagcgagcacctgggtttggggttgtgaaagctcancgcggccgtggaagtgtgacgtggcaccttgaggtttaagctgcctttgggacagaacgtggttcatggggatggatggt

SEQ ID NO: 212779 - DNA, 508 bp, Glycine max
  unsure (1)..(508): unsure at all n locations
atccttaagtcacctgaggcatgcaagctgggagaggatgcttcaatggaggagaagatttagggatagaaagagagaggggggagcacgaaattgaaggaataaaagaggtatataagtggaactctgaagtatgtctcacaagactctcattcatcaaagttacaacaagtgttacacatgcttctatgtatagactaggtagcttccttgagaagctttcttgtgaaaacttccttgagaagcttctttgagaaaacttccttgagaagctagagcttagctacacacacccctctcataactaagctcacctccttgagaagtctccttaagaagattccttaagaagctagagcttagctacacatacctctctaatagctaagctcacctccttgagatgagaagctagaagctagctacacacccnctataatagctaagctcacccncatgacaaaagacatgaaaataacaataaaaaagtccttatacaaagacaact

SEQ ID NO: 212780 - DNA, 482 bp, Glycine max
cgtaggattatggggtacccgtcatatgtggtactaggtggcgatcgggcgatggtgcaaatcaactctccacattcacaaatcacacatgaacccaccatcctcagttgcccaccttcaactaagctcacgtactcccatgtagcccttatcctcgttcctctcagcaccgggtccccattaatccctccaagcttcaacaacatccaagcaattcaatatccaaacatcatgaaccatccaaaaccaaaaaaacagggcagaggcagaaaactctgcccaaaacacattccaataccacagctttccttacccaaataccccagtaacattctctttattccgattcgttcaccgttggatcgactcgaacattccactagaggtccctagtacataaatctacattttgaccgttgggatctgctagataacgtttagaaccaaatatgtactactctttccacaaccagcaatacacg

SEQ ID NO: 212781 - DNA, 461 bp, Glycine max
  unsure (1)..(461): unsure at all n locations
tattataaaagtcaacacatttaccatacatgatgcgttgtatttaaatgatantataccttctcggctcaattatgcaattattcacttaattattattaaaatttcaaatggatttttgaatcattaaaaagcttaatcacatcctctaattgtctaaaaacactacaattgtatcttcttttttatcaacttcattagttttattgaccgaagacgtgtaaatatacatttttacatcaaatgcattgataaccgacgcaaaagtatctatttatatcgaccacaaatcataacaatgatgtcattttacatttagtgcattgacaactgatgtataagttgtttgctttaaaaatgattatttcctttaatgagacctgacagcgttgatgaaaatggtacacatattgtgtttttaacaatcagaagatcagatactacttttagttattgaaaac

SEQ ID NO: 212782 - DNA, 381 bp, Glycine max
agcttgcagagagactccattgacacgttctcgtgataatattgagggatttcatggaaaggctttggaggagattcccacagtggtcttagaaagtaggagaatttctgcccgtgcaaatagagaccgaagatgccaacaggaacaatcacaaacagaaatatataggttttgaagtccaatccctttagaatacacttgagtcttgacatgctcagtgctgcaggagttccattctgcatagtaagcacaaaacaaatcttcaagttacacggataacttatggatcataaaactcataccatatgcttgactgcgcataacaacataaaagtataaagactgacaatggacatgtaaaataagataaaaagaaaaaag

SEQ ID NO: 212783 - DNA, 445 bp, Glycine max
  unsure (1)..(445): unsure at all n locations
tgtattacttcgttcanaataatggcatcaattcaattagtaacatgctcaaaatattgagtactaacatgaaatatagtcagctaagacatgagcaacttgattagcttattgtaattttatattagttcgtctctatctctaggggtgggaataggccaggtcagactgggctttaaaaggtctgagcctaacctacgatgaatttttgaggcccgagcctgacctatagcctatcaaagactttattttggctcggcctgaccttcttaaaagcctagcatggtctgatagcctttttaaaagcctttttcacattaaatctttaatatttctttgctcgggagtaaaaacgtaataggaaagctataggataaggaaacgttaataggaataggagagccaataaaaataatgacgaatataaggcgcacatgactcacac

SEQ ID NO: 212784 - DNA, 387 bp, Glycine max
  unsure (1)..(387): unsure at all n locations
agcttctcaggaagctacctagtctataaatagaagcttttgtaacactngnggnaactntgatgaatgagagtcttgtgagacacaactcaaagttcaacttctctccctttttcttccttcaatttcgcgctcccccctctctctttctctccctctttcttttcctccattgaagcatcctctccaagcttcttatccaaggctcatcttggtggtgaagctccttctttcatggcttattccctaggggatgacaccgcctcttacctcttctcctttgtctttcactgcatctccatgggggaaaatcaccattaaaggacctcattgaagctcaaagatccaacctccatagaagctccacaagcaagactccatcacctt

SEQ ID NO: 212785 - DNA, 482 bp, Glycine max
  unsure (1)..(482): unsure at all n locations
ccttgggaagtgttctntgacagtgacaggggggaaggtgatctagggtttcttcgaaaacagtgcctcgtcaaaccctaggattaggaacctgaggaagaatcctaggggaaaacaggggagaaaggtgaacgagggtttcttcccactccaacacttgcagttccgggtatatcaaaaacaatgcctcctcgtcaaagccatcaccaccgccaaactgggtcagaggcactgacagagacagagacagtgacgacaacttgggaggaaactaatcaccaccgtcaaagttacctcctaacattntttttcataatttcttgctctttcgtttcaatttcaactcanaacaaaaccatgattntctctttctctttggttctttctttgtttcacatccaaagccaatccaatcgatcttcttttatctttgttcagaatgcattctgtgccttcctctntcctcctttctctaacgacta

SEQ ID NO: 212786 - DNA, 457 bp, Glycine max
  unsure (1)..(457): unsure at all n locations
agcttactgatacactgatggaatntatccatgagacgcagttcgtggtcttgatttaacctgcgaatgttatgagtatatttcttagcttcattttgtcaaaatctaaagtcaactcagtttaaaaaaataattgtttattaagaattgtatagatgtcaccttttatctatatatataaattgctataaaaatattatttttacagttatttacagatactaatttgaagactactaattatactaatttcagataaacttatcaaattagacgcaatccataatgggtcatattaatatttttgagttttataaaattgagctagtttaattgcgtgctagtaatgggcctgctattggcacccctcattcccattcaaacctttctagatggtattantttatttgacaaaaatatcaccagataatgggttccactttccacttgtgtatct

SEQ ID NO: 212787 - DNA, 453 bp, Glycine max
  unsure (1)..(453): unsure at all n locations
ntaatgggctatntaggccagatagggctctntctattaataagtttgtttttctaagtgcacctcatatcccttctttctaactctcaattactcgttatatcctttttcttaaagaagtacacctcttttgtttttcataaatgtctttccaaaattacatacacctattatggaactatgattcatagttttagaaacatacttccaaaataagtatatatatttttcaataaaatatcacttattgtcatcctatcatgttaaacgcttatcttatactcatgtttgttaatcttattttcatcctatcattagtgttctttaaatcttatctaaaatattattttcatcttggttttattattctttaaaccctaatgttaaactatcttcaccatatattcattatataatatntaactttcatcattattatataatattntacat

SEQ ID NO: 212788 - DNA, 464 bp, Glycine max
  unsure (1)..(464): unsure at all n locations
agcttcanaatataaactaacccctaatggtgcgtcgatgaacgaataatggtgtaggaatcgatcacggaagcgattcggaaacgcctcgcctcattnttttcttcttctttcttcttcttctcctctttcttctcaattctggacctctggaccgtggaacccctttccttcagccccctcatgcctatgtatagcaaataagcggaggaggttgaacagcagctcgcctaggtcagttggttgcttcctccaaaagtaaccttgctcgcccaggtgagctggttacttcatccctaagctttctggtggctgttagtcggataatatgactaacttttgtgtaagaaacttgtgtaaattgatataaatcctcccattctatggtcatttatagtgttgtattactgtttgtaaatataggtaataagtactaatatccctttttgtgatttaatgatcat

SEQ ID NO: 212789 - DNA, 416 bp, Glycine max
tgtgaattttgaagcatcaacaagaatcaagccaaggctgttgtgcaagcaatcaatggggcaaaacacaccaaatgattatgatgatggatggctcaaattctcacaaaggtaaactcatcactttcaaattgagctttcaaaactatcatgacatgtagaggaaaatcaaggatttcaaatcacagaatgtcaagaaacttttattttcaaaacaattacccatttcttgaacatatcctataattcaaagaaaaacatgcaaagtcgtacacgcacacaaaattgacccataatattaaactagaaacccaacgaaactaacaacattaacaaattaacacaactaacagattaacaaaaccgacgaaactatcaaagccaaagaacacttccccccatacttagacaacaca

SEQ ID NO: 212790 - DNA, 377 bp, Glycine max
  unsure (1)..(377): unsure at all n locations
agctttgagctatgagcacccacgactgttccatgagcagtctaaggttttcttcgacccacagttccaacaacaatgtagggttttcttggacttttcttcgataggaggttctgtgggttcctgcgagcggtttccgacagtattgaaatgaatgtggggcaatgtgggtgtcgaccgagtggtttccgacagatttcgggtgggaggagaaagagaagagagagtgcaacagggttttcaagcgcgcgagttgtgaaattccaacacgttttaacatattaacataacaacattaacatcggttttttaaggataatcgatgttaggatgaatctgttaacatcggttntgtanaaaccgatgttaacttcaac

SEQ ID NO: 212791 - DNA, 437 bp, Glycine max
  unsure (1)..(437): unsure at all n locations
tcaagaatcacgatcaagagtcaagattcaagatctcatgttaagacttaatcaagataagtatgaaaaggattcttcaaaaactgagtagcacatggatttttcacaaaacatgtttaccaaagagttttaactctctggtaatcgattaccagattgttgtaatcgattaccagtagcaaaatgtttttgaaaaagttttcaaattgaatttgcaacattccaattaatttcaaaaagctataatcgattacaatgttttggtaatcgattaccagtgcatttgaacgttgaaattcaaatttaaatgtgaagagtcacatcctttcacataaaagtcttgtataatcgattacactaatcttggaatcgattaccaatgactnattctgaataaatcanaagatgtaactcttcagaatagttttaactttttc

SEQ ID NO: 212792 - DNA, 339 bp, Glycine max
  unsure (1)..(339): unsure at all n locations
atccttacagtcacctgcggcatgcaagctngnttcanaacatatgtggaatggagaatattataganaattacacattagagaaggtgcccccacttatcaaggtcaagaagaaatatcagatgaaattattcctctacttcagcaatctgattcttactggattgtgaagatgagatatttaaaaaaaaaacagcattaattagtgccctcatagaaagatggaagccggaaacacatacttttcacatgagatgcggagagtgcaccattactcttcaagatgcctctatcttattaggtctccgggtgtatgggccaccattaatcgggtcacct

SEQ ID NO: 212793 - DNA, 457 bp, Glycine max
  unsure (1)..(457): unsure at all n locations
tcttatccaaggaacattcttgatggtgaaactccttctttcatggcttattccctggtgtatggcgcctcctctcacctcttctcctttgtcttctgctgcatctgcatggcggaaaatcaccattgaaagacctcattgaagctcatagatccagccttcatagaagctccacaagcaagcttccattatgaaccttgaaggatatatatatttctttgcttggttccttgcattacaacatactttcatttccatttgatttgcaccactccacctttcacacagtaggtaaaacctttggagtccatggctcccatcgagattacattcttcttaagctatagaacatgaaaacattggctaaagttataacaattccatcatgcattgtgatttgtagaacctatgccaactacccngctagcggcattgtatccattagagcaataccact

SEQ ID NO: 212794 - DNA, 424 bp, Glycine max
  unsure (1)..(424): unsure at all n locations
atcctcttagtcacctgcggcatcaagcttgaaaggtatgtctcgtgtctgnttaatctattacaaccttattgtaatcgattacacaattatttttgagacaacgactgatttattcaggagtctctactttaattggttaccatgtgatataattgattacttctctttctagaagtgattcaaaagttaacaataacactctaatcgattactttaagtatctaattgattacattgttcttgagttggttccaggtgttcggacgaatgtcttaatcgattgaaaagataagctaatcgattacttcattgaattaactgattaccttgtagatttaatcgattacatgcgctttataattgtttctctataaataactagcttggtgtctcttcanaataatctcgaaaataacacaac

SEQ ID NO: 212795 - DNA, 409 bp, Glycine max
  unsure (1)..(409): unsure at all n locations
gcttgacgcttaacaacgaacttttgtttcttgtttttataaagcagtggagcttggtggtttgtcaagaacttgatatggtctcaatgataaagacgaaaatgtataaacttttatgtcttatatgtctttcttattattctactttaaactgtcctacgtttgaatttaatttctttttggaaaatcatgtctattttgtcaaatatattttcatcgtttaaaagcgttttctgtcaaaaaaatttatgtcttataaagtttttcttcaaacaataactttgttttcttcataaaagtcttgaacattttctaacattataattcaatccttcttgtgatatttgcctntacaggtggtaagcaacacaaaacacaattatattaaaattattatgaatactaatct

SEQ ID NO: 212796 - DNA, 390 bp, Glycine max
  unsure (1)..(390): unsure at all n locations
agcttgcaccagcccactgtcattttgtttcacatttcatatgttacaatcttttgaatgtagactaccgtttcttacactatatgaaaacaatccattaagtaactcagttgaatactctttcaatgctggattatgtaattaatggcagatggcaaaaagccgaaaaattgccataagtaaaggccttcaacataaccatacatattaatgtaaaaaatgtatgacatagaaggccaaattgacaagagaaanaaaacattgtcttaaaaaacaagaaaaataccctttagttcattatgattttctgctttcttctgcaattcactcttgagttttgagatatcttcttgagccacacgcaattcataatcactaatagctaacttt

SEQ ID NO: 212797 - DNA, 464 bp, Glycine max
  unsure (1)..(464): unsure at all n locations
ntaatctanacatgcatntagtgtttagaataaatatgttatcagatatagtaagttgttgcaactacggtatttttttttcctaatgcgataagcttgctattaaaaccaatcttgtgtatctatcaaaactcgtttgaactggagttggtttctccttttactgaggttaactaaaataccatggtcgcgggtgtgaaaggaaaagtggtgctaaaaaatattcattgagattattattctataaattaataagactgtgtttggcaatgacatgacttgatttattcaatttatgatttataaatcagacaggaaaatggagcaatgaattacttatccagaatgttgaagcacctcaagtacaatgttgatgcccagaattaacactaatgtntaatcttgatatttaagtgtaatgtgaaaatcaccccatttcactgaattatgtttagttctcatat

SEQ ID NO: 212798 - DNA, 324 bp, Glycine max
  unsure (1)..(324): unsure at all n locations
agcttgcccagagattgaatccacggaggaaatgcttaccacctcgnaaaactggaaagcggtttctaatgactcctctgcggcctccacataaggcatagaggatggccagctcaccaagatgtcttcctcgcctgatacgatgaccagatgcccttccactacgaatttcaacttttggtggagtgtagagggaacaactcccactgagtggatccacggacgccccaacagacagctgtagggggggttaatatccattatttggaaggtaacttggcatgtgtgagggcctatctgtactggaaggtcgatctctcccct

SEQ ID NO: 212799 - DNA, 459 bp, Glycine max
  unsure (1)..(459): unsure at all n locations
tanaggtcgccagtttgcaagaattgtggcaattgatgggtcagctccaatgtcaagccatccgcaagacctataagaagatttgggacctagctatggtagaagtctctgtggaagcaattgcatcccttactcagtattatgatcagccccaaaggcgcttcaggtttggggacttccagctagtaccgactgtggaagaatttgaagagatcctgngatgtctgctgggaggaagaaagccatatctcttttcagggttctacccttccatggcaagagtatccaaggtagttaaaatctcggtacaagagttggaccatgtgaagcaaaataggaacggcgtagtcagaataccaaggaagcatttggaggaaaaggcgaaggcgttggcaaatcaaggagaatggacttcgtttattgacatcttggcactggtgatatttggtggcatcctct

SEQ ID NO: 212800 - DNA, 145 bp, Glycine max
tgtatccaaagctcgactcaccataaacgttgtcccatggttagactgccctttcttgcactccgccgccacaaacctatgagatcatagttgactctttgcatatccatgtacgaagagaacgattattggccctcatctgaac

SEQ ID NO: 212801 - DNA, 487 bp, Glycine max
  unsure (1)..(487): unsure at all n locations
gatccttgagtcacctgcggcatgcaagctngcatccttttcaattgttctcttgcatcatcaagggttagaaatacaagaatggaanacaatacagcatcccttcgagacagcttaattggataagatacatgcattgtaggcttaattatactttttatcactcaactataattattttgggaattctatcgtcccattttttgtgtacttttcaccatcatattcttcaatttttacatattttatccatccattaaatgagtaatggcattcttacgtgtctttaaaaaattaaacaataaaaaacacaacgatgttgtttgataacaaaatcacgccgtttcatgacagatgataacaaaaaatggtaaagacttacatatacttttgatccctatatataattttgctattaatgcaacttggccatanaaaaaaatatagcacatttagtcctgttggtaaagggtcgggcaaaggaatg

SEQ ID NO: 212802 - DNA, 483 bp, Glycine max
  unsure (1)..(483): unsure at all n locations
ctaagcttgttagttctctaatttatggtcattctgaattaaatttggtaaattaatcttgttntattgttaacactgtctctataacatttccattgaatttaatgatgaaatctgtgcattgtcaagtgaaaaagaggctaagttttgaattgcaaaaaacaacaattgggctaagcttagtagttgggctaagcgcatatccaccatgaaaagcgctgctacagcgtgcttagcactaaggagaatctggcagagcatcaacatcaaagccgcgcactaagcgtgagataagtgcgctaagcgcagcaggtgccttcagccaggctaagctcgagactggcgctaagcccaatttcacttgctcgcgctaagcacgagggtggcgctaagtgcagcgtcgcgatttcagagcctatntaaagcctgtcttgtgtagaattatggtacaacattcaccacctttatgacacttttatgaca

SEQ ID NO: 212803 - DNA, 471 bp, Glycine max
  unsure (1)..(471): unsure at all n locations
agcttctatagaagggttgttcctaatttctctattattgcatcacctctcaatgagctagngaagaagaatgtggcatttacctgnggtgaaaaacaagagcaagcctttgctttgctcaaagaaaagcttactaaggcacctattctagctcttcctgacttttctaaaacttttgagctaaaatgtgatgcctctggagtaggagttggagcttgtttgttgcaaggtggacaccctattgcttattttagtgaanaacttcatggtgccacccttaactaccccacctatgataaagagctctatgccttaataagagcactccgaacttgtgaacatntaccttgtttcaagggaattgtcattcatagtgatcatcaatcacttaagttcattagagggcaaagcaagttaaacaaaaggcatgcaaaatgggtagagtaccctagagcaatttcatatgttatc

SEQ ID NO: 212804 - DNA, 481 bp, Glycine max
  unsure (1)..(481): unsure at all n locations
ngccaacccatggaagctcctaatatctcccacactatntgtgatgggccattcttggatggccttgattttctcagggtccacttggaccccatttctgccaactacaaaccctaagaaaactatattatctacacaaaaagtacacttctctatatttgcatagagggtgtttttcctaaggactgaaagaacttgcctgagatgtcctaagtgataatctaggctcctactgtacactaaaatatcatcaaaataaacaactacaaatctacctatgaaatcccttaagacattatgcataagcctcataaaggtgcttggtgcattagtgagcccaanaggcatcactagccattcatacaaaccaaacttggtcttgaaagcggttttccactcatcaccctttttcatcctgatttggtgatacccacttctaagatcaacttttgaaaagatattggcaccatgcaactcatca

SEQ ID NO: 212805 - DNA, 444 bp, Glycine max
  unsure (1)..(444): unsure at all n locations
agcttaatactngngcctcagttaacaagggttatgtagcacatgacatnnttgctatttggaagcccataataattttattttatttttgtatttttttcagagctcaaggagtgttcctatgcatatgcatcttgtatcaattaatgctgctttggcttcttttctttttacttattcatgctgtgtaatcactaatactagagacaaaaagggtattcaaatcaaaagcagcaaaaaccattaaatagaatctgagttctaaaagataacttggtaatcataaaatcaaaaggataaagcaaaatggaaaaaaaatattaggaaaacttattaggaccttgatgcattccttcccggtcttttcattatcaactacgactgcatccataaatnntacccatagcacggtaacagctatggtatacttcttttgtgttgcct

SEQ ID NO: 212806 - DNA, 484 bp, Glycine max
  unsure (1)..(484): unsure at all n locations
ntcatgtaattagctcttattaaataaatgtttaattaagttgtttaaccaaatatgcccatttcatacaggaattgtagataaaaaaagatatctagaggagacaattaacataaaactacacaagaatcacataaagtacattcatataatagggaaatttgtgttgacaacgattcctcatagttgtaaactaaagctacatataatcagcattatcagaataagcataatttgtttaatctaagggaaagttcattatgtcttgtagaattttaaagtttgagataaagaaacactaccaaattctcaatgtagctacgaatgcttaacattgataatggaaaacacaaaaaataaagcgtttataggatttccaatgatatattactaaatcaacaaattcatgtagaanaagggttaggatctangaatgtgtaacaagaataaacatgtagcttgataatgagcacaggggtacaat

SEQ ID NO: 212807 - DNA, 348 bp, Glycine max
  unsure (1)..(348): unsure at all n locations
agcttgtaggaatatggggttcttttcacatgtgggnctaggcggcgagcgggcgacggcgcacaacaaagttttcacatccacaaatcgagcataaacctaccatcccctggtgcccacctccaactgagctcacgtactcccatgtagaccaaatcctcggttctctcaacaccgggtacccataaatcctcccaagcttgcccagcatccaagtgattcaccatgtcaactacagaaactatcacagccaatacaacaggtgaaaggcagaaaactctgcgcaaacagaaccaaaatctagcttttctcacttaagaccgacggacaattcttcgtttaattcgt

SEQ ID NO: 212808 - DNA, 450 bp, Glycine max
tctccatacaaatagtatcgtcagcttattggagaatattatcaggcactttattcttccccactataaagctttggaagcaatctttgctgattgcttccctcatcaaacctgtcaaaccttcatcaaccaggtcaaaaaggagtggggccacaaggtccccttgtctcaagcctctttgatgcttaaactctgaggttgggcttccattaacaaggactgacacagaagctgaagtaatgcaccccttgatccaactaatccatctctcattagagcccattcttctcaacatatataacaggaactgccatgacacatagtcatacgccttttcaaagtcaactgtaaagacctacaagacctgttggccttcttgacttctcactacctcattagcaccaaagaccatcaacaacttttatctttacaatgttgactgcttatcat

SEQ ID NO: 212809 - DNA, 416 bp, Glycine max
  unsure (1)..(416): unsure at all n locations
agcttcaccacttccgactaaacttccagctggttctcatataccctcttgtgcttggcctggtacgtataattnttcaaaaaattgctgtctggttttttgtttgcatatcctgtttttaactggcatgttcttttcttctgtaactgcaaaaaaatatttacttgttgagtggcttctaactttaataatctttaacaatttttaattaaggaatgatgcccattgctgattgcatgaacaaatgaattggaatccttccaatcctttgaataacttctcatgctatcatgcatgaggaatatagtgcaattttattcatatgccgacatatataaattctcgacccaatcaaatatgttattaacttattatctattagtatgaagttctggtttgaatgttacatttcatgt

SEQ ID NO: 212810 - DNA, 382 bp, Glycine max
  unsure (1)..(382): unsure at all n locations
cttgacatctgacctaagagcattattaagttaattttaaatgtanattctggtgattaaaaacaatcataaattacaaaataaaaattaaaaaattaaatcacaatttgtggctgtacaacaaccaccacacacgtctaaggcaagagattcagattgagggcccaattggtggctataacaacagtgttgctggcaaagttcaatgtaatcactgacaacaccatcatattcacccaacgcatcatcaagaagcttccaatatggacaaatttcatgctcacaaattgcaagtccaccctcgcaaagcctccaccctacaccctcacagatctggttgtctatgtatatgcatccatctgaggaagatgcactggtgcac

SEQ ID NO: 212811 - DNA, 385 bp, Glycine max
agcttctcaaggaagctacatgaagctgcctcggtaaaaatgctgttcagcctccattaaccggtggatcttctcgaaatttggtctgcagcttcacaggacacttgtccctgatctgaccgtctggatccttgagaagatatctggagtgtgctagatgtttccgtgtccgagaccatttctcacttgagcgttttcagcctttgctttcgtgtagcttaggaaaaacaccatttcttctcctttctttcttcaaagccattcctaacatcccaagcactttctccatcacccacagccaccattagccacaacaaattgccgttgttctccattgaaaccccacaccgagaggaacccttcaaccgaagcgaaatcttccaac

SEQ ID NO: 212812 - DNA, 436 bp, Glycine max
tctgtccctgagaaactggttcccagaagacaacagggagttaatattgctgaaaaccctagccttgcaacaagtcctatggaagtagacccggagatggataagaagatccgcagtattgtgagtagcattctgaaagatgcttctgtgcctgatgctgagaaagatgttccaacatcttccaccccaagtgtttctgtgcctgatgctgagaaagatgttccaacatcctccactccaaatgctgaagtcctttcttcacccagtgaagaggaatcaacagaagaagaggatcaagcctcagaggagacccctgcaccacgggcaccagaacctgctccaggtgacctcattgaccttgaagaagtagaatctgatgaggaacccattgccaacaggttggcacctggcattgcagaaagacttcatagcagaa

SEQ ID NO: 212813 - DNA, 332 bp, Glycine max
  unsure (1)..(332): unsure at all n locations
agctnntaaaaaattaaaagtggtaattgtgttctgctattggcatccccaagttaccatctaaaattcccaaccaaagtgaagaagacaaaaacatccttttggtattttgactggcaaaaacatgtttcattgattaaatttaacataatggaaaaaatattgttatgataatctttcataaaatgttaacacaactattttttttcaaaaagtttaataggacaaaaacttgtttctattatgcattgtgaattcacctccctactaacacaacatgaactggtttttatcgagggtatttttgataaataaaacataaaaatggaaac

SEQ ID NO: 212814 - DNA, 474 bp, Glycine max
  unsure (1)..(474): unsure at all n locations
ntatagaacanatntattatgtgtgtgagtgactgagattttttaaaattattttctgtctatttccagcttttatttccctttgaagccgcacaggtatacactcttgaaaattcgacaaaatccattatttgttgagcctatgctagtaaatgctggtaggatcattgttgcaacaaccttgtgtaatagacgtactttgttcattcaagtcgtgtgtattaatgagaggagtgttgtttaagcagcgatgtgttctcatttttcactttgtacaatgcacatgatgcacactgatattggtagtgctcttcaagaagatttgtatacctaccagaatcttggttattgaacttctacaatcacagttgcagctaatgatctacaaacttctaaagagacgaaaccataggtgcaaagcttgcttactaactaatatcagctgttgctttcagcatagtacatatgttaatt

SEQ ID NO: 212815 - DNA, 145 bp, Glycine max
ctctgacccttatcaccgcagcctgcacttaactgggcacaggaacaggatatgtgctctctctcgtttttctatggggaacaaacaaaccaatctattttatttttggagttttttcagagctcaaggagtgttcctatgcata

SEQ ID NO: 212816 - DNA, 394 bp, Glycine max
atccttaagtcgcctgcggcatgcaagcttctacagtcttattccatatgtccccaattatgagaaagacatttctaatggtttgtcttctgccttagatgcttccaaaaaccctttgagttcatgaaagccaaccattttccactttgagcaagtcaacaagaccatcccaataaactttataaatatgcatgttcaagtaaaaccaaaaccaaaacgaaaccagaacatccagctaatgttcaagtttaagcaaaatccaaacacaaaaacaagaaaccaggaaactaaaaaaaaaagggtacaaaaacaataagacaacaacgaagtttgaagtatagacaaaagacaaaacaaatcattctcatccccgaaacacagattcacccggata

SEQ ID NO: 212817 - DNA, 403 bp, Glycine max
  unsure (1)..(403): unsure at all n locations
ntgtcaacaattgtttaataagttccttgttatataaaacactgacaccaccatacctgcacaatgatctgtaggttgcccctaagattggccagcagtaagtctttcatgcattctaatgcccattcttttgacagtgtaccaaaaaactctacgagtgactgtaacaaccacataatgagtaggtattttacaagctcacagaatgggttttaatttttaaactctaagagattaaaagcagaacagcacataaacctgaggttcaattgcatgtgtattaacaatcacgcgtttgatgtctggtaattctgtgtaatgctgcaccaagaataatgcaatcaattaacgggttgattttaagattaacatagagaaagtgccagaataaaacacatttgga

SEQ ID NO: 212818 - DNA, 382 bp, Glycine max
  unsure (1)..(382): unsure at all n locations
agcttagccctagaggggatggaccttttcatgtttggagaggatcaataacaatgcctatagggtggacctcccagaagagtatggagtcagcaccacttttaacatttctgatttaactccttttgcaggtggagctgatattgaggaggaggaactaacagatttgaggtcaaatcctcttcaaggggaaggggatgatgcaatcctccctaggaagggaccaatcactataaccatgagcaagaggctccaagaagactgggctagagctgctgaagaaggccctagggttctcatgaaccttagggtagaattctgagcccatgggccaagggtgggtccaattatctnntgtacatataaactaggatgtcattat

SEQ ID NO: 212819 - DNA, 465 bp, Glycine max
tgtatgtgaatctcggctgtttctagctccggactataaaatgctatggagaaaagtgttgcacaatattgaaaggaatttgcagccatgttttttgtgaagcttcaaatgataaactgaatatggatatattcttcggagttattggtcagtgatcacacttcatctactttaaagggtaagaatagtatgtaaaatgaactgatgaagataatgatgccagggaacccaaattttggtcccagagaaaaaatagaatcattaattaattaattctataaaaagtaccacaagccccacctttttgggggattttctggaacataacatggcaggtatggtcatcaatagcatgagctaattaggttgtttcattttgtaattgcgaccactgttgtgctcaaacttttgatctttaagccaatgccactaattgtcacaacttttcatctgctctgattatgt

SEQ ID NO: 212820 - DNA, 342 bp, Glycine max
agcttcgataatcaatttcgagcgtcttgattattacgggactcagtcagacatccgagtaaaaagttattgtcattagaattagctcagagcttccttcttcaatttcgagcgtctcgacatattactgtactcaattagacatctgagtaaaaagttattgtcgtttgaatatgctcagagcttcggcattcaagtccgagcgtctcgatatattacgggactcaatcagacatctgagtaaaaagttattgtcgtttgaatttgctcagagcttcggaaatccatttcgagcatctcgatatattacgggactcaatcagacatccgagtaaaacgtta

SEQ ID NO: 212821 - DNA, 331 bp, Glycine max
atgatgaactaaaggacgtcaatatggccaccgctgaaggcttgccatatgtcggaaagaaatttgtccccatagttaagcgagactgaagggaatatgtgggccatcatctatgagtgcaaagagaagctaaatctagcagcgactcacgagcaaaggctagaggatgagtacgccaagatatcagcagaaagggaagcaagggaaagggtaattgattcattgcaccaagaggcaacaatgtggatggaccgatttgctcttactttgaacaggagtcaagaacttccccgattgctagccaaggccaaagcaatggccgacacctact

SEQ ID NO: 212822 - DNA, 444 bp, Glycine max
  unsure (1)..(444): unsure at all n locations
tgcatgatttacatttctccccttactgaagcaggaggctttatttcttcttgacaccatcaaaatcttcatgaattacatccttccctttttgatgatgacaaccacctgtatgttaggagcaacaacaaacaaaaaatatctattgcatatagttactccccttggtttgcaatgatcgcttatatgacacagntgaagatttcatatttttcatatgtaaacaaattgtctcataaagaatagataatttttctttctatcttatttattatctctctctccccctttgtcaacataaaaaacaaatcatgaatagaaaggataaagatgtgtcactttttgcaatgtatgggaatcaagtgataccaaaaggcattaaaacaatcattctatattaatcaagcataaacaagtacaattacacatcaatcaaacacaatc

SEQ ID NO: 212823 - DNA, 436 bp, Glycine max
gctgcaacttattgcccagtgtgtactcgtgtgtttcttctctatcaaaacatccttatggctttcgctaccttcaccatagctgatatgcagcttggatgatgttgatttggacacttaagattgagagactaagattggtcaaacttttgtttagagattaaaaaaaaattccgttaccaaatatataattaaccttttaaatgaacatcaattccttcctttccacatgcatgcatcattatatgcttcaaaatagcatcaccaccatattataataataataataataatcattataataatagtaatataagacttgaagatcaacatgtccaactcaagggttagaggatccttgagtttgtaattttcatgcatgggcatcaatctcctaatacaacatgcatcgcctttaccatgttgcacgatcaca

SEQ ID NO: 212824 - DNA, 368 bp, Glycine max
aaagttagttttaccacggggacactactcttaaaacaaatatggcatacaacctcctcccatcaacatccatgtaaatttagagcaagcctatgcgcatatatccttacgaacggtcgcttgcacaagacattcttttaactaagaaaaatgcacccatatacaatcaaggcagcttcgctacctacattatttacacgtacttccaaggtgtatttattacttacatcacacacacctccttggctaaatttacatacatgcatactcaaagcatcttggggtaccaataaatgcacatgtgcacatcttggtatctctaatacctatacatacacaaacttcatgatgaagatcgactatctaca

SEQ ID NO: 212825 - DNA, 200 bp, Glycine max
tgttgactattaatttcatcttagattgttatgatttcattatcctcttgcctaatataaataatctacttcttatcgattgagcacccacacgcgcgggaaatgtctcgtggtcccaaccaacaccttctggcacgattctgagtttgtgtggcttcaactcgctccccactattcccacttcttatcatctgttaatt

SEQ ID NO: 212826 - DNA, 369 bp, Glycine max
ccaaaccttattacctgcccactttttacactcaactttttttatattaaatggcagcacacacacactattattctataattatagttatttttaactggctgcgctgctcttttcttaccatatgacactttcacccaataactcccccaaatttgggacacatttgacttgaaacataactcccctaatatggaacaaatttcctggaactaagattctttctatgaatgatgctctcctacaacctaagacaatgtaacatgagataaaatgtgcacgctcaaagttcaatcaatcaaacatactttcattacacactggcggcaaggataatttattcctacacatgtgcaccttctaggctaa

SEQ ID NO: 212827 - DNA, 421 bp, Glycine max
  unsure (1)..(421): unsure at all n locations
agctttgagccaaaatcctgactcaccatattatttgacctanggngagaatgtcaatccttaccctcgggagcaaaaaagaaaagaaggaatatttccaatcaaagaggaagcaaaaaaaaaggagagaaggaaaatttccaatcaaaggaacggaaattccctatcaaagagtgggagaaagcaaaaagaaaagaaagaaaattcccaatcaaagaatgggagaaagaaaaaaaaagaagtaaaaaagaagaaagcttaaggatcgaaagataatagaagaaatgtgcagataggtcgttggaccatacaatatctgaacaatacaaaattgtcaccaaatgaacaaaagaaagatnaggaaaccacgacctanaatggtcttccccctttaattgccaaccaaaatcttgtgcgctag

SEQ ID NO: 212828 - DNA, 418 bp, Glycine max
  unsure (1)..(418): unsure at all n locations
agcttatgctgcanatatttacaananaccttctctacctaagcagcaaaatcaaccacagcagaacaattatgacctctccagcaacagatacaaccctggatggaggaatcaccctaatctcagatggtccagccctcagccacaacaacagcagcctgctccttccttccaaaatgctgttggcccaagcagaccatacattcctccaccaatccaacaacaacaacaaccccagaaacagccaacagttgaggcccctctacaaccttccctcgaagaacttgtgaggcaaatgactatgcaaaacatgtagttntaacaagagaccagagcttccattcagagcttgactaatcagatgggacaattagctacacaattgaatcaacaacaatcccagaattctgacaagcta

SEQ ID NO: 212829 - DNA, 274 bp, Glycine max
  unsure (1)..(274): unsure at all n locations
tttttttgtttngcatttttgcatattgaagaaactatgctttaaattgtaagatctctctacaactagtattaactacatgatagaatcttctcctcgatgtaaagtcacctaacttccaaaccatttaggatggtgcctcctactaacacctatgcataaacattcatttaaatctttagaactgaatattacttgaatatccttttgttttttgagactaacggctgtttgttcttgggaggactgacttaactcactgtttgcagtgttt

SEQ ID NO: 212830 - DNA, 335 bp, Glycine max
  unsure (1)..(335): unsure at all n locations
ccacaagaagaggcncatcataacgcacaaaatggtatgctagtccctctgatttataaacaaagctcatgtaaatctatgtatgcacacgcgtatgtgtggaatatcctaccatttatatcaacatagaggacatccacacattctatttgccacacacatatatgcattagaaaagaacatacatatctatcgctcgaagcatttcggtcaaaagtcacacctcaattatatcttaaacatatgcctttacaaactacctacatatattggaaatatatctcatacgaatatttattgtttcactcacatttattgatattggcaagcatatt

SEQ ID NO: 212831 - DNA, 416 bp, Glycine max
  unsure (1)..(416): unsure at all n locations
gctgcagctgccctcagatgtttagagggtttatttgtgttttatgctaattatacaccaanntgatgagtgcattcgcccttcacaatgttatagatggggtcagatgggcccaatgctaattacacccccttatttgttgagtgtagcccccccaaatgttctagatgggcccagatgggcctaatgcttagtgcaccattaatgttgatgagtgcaacccccctccagaatgttcttgatgagcccagatgggcccaatgctagtgacaccccctagtttaatgagtgcagccccctatattgtgctgttggctgatttattttcgaaacatcgcgaaacttttcgaattacacagcgacgagtgttaagcattttatatcacttagccaaagtttgtgcgttgacaaaaaat

SEQ ID NO: 212832 - DNA, 382 bp, Glycine max
gcgcacaacaagtattccaatcccaatgccgcataaaccaccatcccttgtgaccacctccaactgagctcgcgtactcccacgtaggccatatactcgtttctctaaacactcgggtccccattacatctttcaagctttcacaacattccaagcaaacaacattcaaacagcacaagctattacagccaaacaaaacagagcaaatgcagaatactctgctcaacacatcaaccagaatcacagtttttcttacgtaaagaccacattaacaattctttcatccaactcgttaaccgctggatcgactccaaacatttactgcaggtctatactgtataacctctgcatttcgaccgttggaatatactaccaaacatcc

SEQ ID NO: 212833 - DNA, 381 bp, Glycine max
  unsure (1)..(381): unsure at all n locations
ctcaccctccgccagaaactcagaagtgagcccattgaaagctccttctcgccctcattatctgcagaatggcaactcaactgcaccgcaaactggaggaaccattgcttccccaacaaaatcattggtgtccaagatcatggacttgatgttnggagtctaaattagctgttctgctgaatcaaactaatattgttctgtttgttgtaagcaatgattatattctctcgattattcatacttatgaagtgttcggcatgtcttgttcatttaattgagttggaatgttacactatggatctcaattgtcagaaattatggcattttaacataccaatcttattatggatggctatactatagaacacgacttgtattttg

SEQ ID NO: 212834 - DNA, 438 bp, Glycine max
  unsure (1)..(438): unsure at all n locations
agcttgcttatggagcttgtatggaggctatatctttgagcttcaatgaggtccttcaatggtgattttccaccatggatatgcaatggaaggcaaaggagaaaaggagaggggaggcaccatccactatggaataagccatggaagaatgagcttcgccaccaagagagtgccttggataataagcttggagagggtgcttcattggaggaaaagaaagagagagagagagagggggggagcataaaattgaaggaagagaagttgaactttgaagtttgtctcacaagactctcattcatcaaagntacaacaagtgttacacatgcttctatttatagactaggtagctgtcttgagaagctgtcttgagaaaacttgcttgaaaagattctttaagagaacttccttgagaagctagagcttaactacgaatac

SEQ ID NO: 212835 - DNA, 430 bp, Glycine max
taccaagctcggaagaagtgatgagacaagcgctaaaggcagagcttgaagtaccccactagccgaagagaagttcaagtccatatccatcaaagtctgaaaagagtatgatgaactaagggacgtcaatatggccaccgctgaagccttggaacgagaaaccaagaaggcccgataggaagaacacgtgccagcaaagttttgatgggctttatagggcaccaatagtaagctcaagctccgaagaggtgaaaggaatcatcatgggtcaaaggcatgatcttgaacgaccagctaaaggcttaccttacgtctaaaagaaatttgtcccaacagttaagcgagactgaagggaatatgtgggcccgcatcgatgagtgcaaagagaagctaaatctaccagcgactcacgagcacatgctagaggatg

SEQ ID NO: 212836 - DNA, 421 bp, Glycine max
  unsure (1)..(421): unsure at all n locations
agcatgctttcaacaaattccttctctttaactaccatttgcataaacctagtagaactacccatcatatctcccaaagacccaatacccacgaatttcatgtgagaagaagtccacccatacctgaaattcgaagtcccacaacgtagaggtgcgcttcacgacttcgaaaatggcttccttttgcaatttggagtagaagtgatgagcaaagtttggagctttaatgggcaacaatggtggaggagaaagggagaagaaaagcaacgtgggagatgaggaaaaagcttctgaaaatctgctgagtgaagtgagagagtgtggctttttaaaaaaaaaatattctttttcctattggtnntatttttaaaagcacttgccacttgtcccattntgagtggaacaaanagggcccactttt

SEQ ID NO: 212837 - DNA, 387 bp, Glycine max
  unsure (1)..(387): unsure at all n locations
aaaatctttagaaataagtcactcgaagaattgtgacttttggaaatgtattttttgaaatcagtcactggtaatcgattacacatcaacaaatatgactcttcattttgaaatttgaaaattaaaacgtctagaagctctggtaatcgattacaaatgttgtgtaatcgattacactagtttaaaatgaattanaattgttaaacacaagttgtaactcttgaaatttgaaatcttaacgttttaaaacactggtaatcgattactatcttctgataatcgattaccagagagtaaaactctttggtaatgattttgtgaaaacttcttgtgctactcaatgttntggaaaacgtttttagtacttatcttgattgagtcttctct

SEQ ID NO: 212838 - DNA, 209 bp, Glycine max
ttattctactgatgtttatgtgtttactgtgctctcataacgtcattataatatgctcttgccttgatcacgtagatgcatgctatgttaagaacattcaactctcgggaacctaccttgattcttataacttgatacgacatggctagtttatcgtattatcactagggatcgaggtacaataacctaattatttgtatgtctgtctt

SEQ ID NO: 212839 - DNA, 137 bp, Glycine max
  unsure (1)..(137): unsure at all n locations
actacccccccccccccaagcctgatctctgcaaccnnanaacacccaaancnacaaaaagaagtttttccccccaaccccccacaagccaaacaccccaaaaccccccagcccaaaatcccccaaaacccacaaac

SEQ ID NO: 212840 - DNA, 311 bp, Glycine max
ctgttattcctatacatgatagggccattcgcagagaaatgaatacataaggggcatgcctggctcataaccggtcgctgaattgaggactggtctacacacacagaagactgtatggttacaagctccatttgctcttcatcataagcatcacccaaaactggatccacaagctctttgatgctatttgcacaaagcaaattgtttgcctgcaataatagttttgtaaaagggtagactaaaattacactttaatcttctatgcactgtgagtgtaaatatccttttcactgtcgaccaattataattta

SEQ ID NO: 212841 - DNA, 412 bp, Glycine max
  unsure (1)..(412): unsure at all n locations
agctggaaggcaaactggatgctttggttattttggtaacccanctggccttgaatcagaaatttgtacctgtcgcaagggtttgtggtttgtgctcctctgctgaccaccatacagacctttgtcgttccatgcagcaacctggagcaattgagcagcctgaagcttatgctgcaaatatttacaatagacctcctcaacctcagcagcaaaatcaaccacagcagagaaattatgacctttccagcaacagatacaaccctggatggaggaatcaccctaacctcagatggtccagccctcagcaacaacaacagcagcctgctccttcctttcaaaatgctgctggcaaacagaccatacattcctncaccaatccaacaacagcaacaaccccagaaacagccaacag

SEQ ID NO: 212842 - DNA, 442 bp, Glycine max
  unsure (1)..(442): unsure at all n locations
cgacccgngatccttaagtcacctgcggcatgcaagcttgttgatatgttgttccacacatgtnggactaggtggcggtcgggcgatggtgcacaacaagttttccacatccacaatgcgcgcataaacccaccattctctattgcccacctccaactgagctcacgtactcccacgtagcccatatcctcgtttctctcaacaccgggtccccatcaatcctcccaagcttccacaacatccaagcaaaacaatattcaaacagtacaagctatcacaaccaagcaaaacagagcaaaggcagaaaactctgccaaaacaccaaccaaatcacagcttttctcacttaaagaccccagtaacaattccttcgatccaattcgttaaccgttggatcgactcccaaattttactggaagtctgtagtacataatcctacatt

SEQ ID NO: 212843 - DNA, 376 bp, Glycine max
gcttgagaaggataggacagcctaagctaattgagacccggtgtcaagaaagtcagtccatacctcaagttgaaagagttgagaactaaggagtcatatggcaccgctgaagccttggacgagaaaccaaaaggccgaaggaagaacacgaccaagcaaagtttgaggggtttattggcagcatactgagctaagctccaaaaggtgaaggaatatcacgggtcaaggcatgatcttgacgatgagctaaggcttgcctttgtcgaaagaaattgtcccacagttaagcagactgagggaattggggccatatcgtgagtgaaaagaagtaaattacggcactatgacaaggctgagatgatcccagattcacaaa

SEQ ID NO: 212844 - DNA, 382 bp, Glycine max
  unsure (1)..(382): unsure at all n locations
agcttatttttatcttatctctcgcaatttttatcgganactcttgagaaattcaaatggtcttaacttttcacacggatgtccgattcgggcacataatatgtcgagaggctctatattgaacaaccgaagctcttgagatattcttatggtcataactcttcacacggatgttagattaaggcgcatcacatatatagacactcgataatgaacaacggaagctcttaggaaattaaaatggtaataacttttcacactgacgtccgattcatgcttataatatatcgatacgctcganattaaacatcggaagctctccatatattcaaatggtcataaattttcacaccgatgacccattggggcgcctattatgtca

SEQ ID NO: 212845 - DNA, 376 bp, Glycine max
ccccccagtatctatagataggcatgagggggttgaatgcaaggctctacacctgaaatcaacaatagtttagtgaaattaatgacacgacggagcatagatgaataatattcttcgccgaggcacttcgaggacccatccctaatgcttacgtgagtgttcttcatacctcctcagaggtgcttcatattatttcattctacaaccgcctaattttatttgtgaagctttgaatgaatactatgcacccttaggggtccatgcttgcttcgcatgacatcaaattcattcttctaccattggtgacattttatgtgttaaagcgagctaccccgattattcgtgttgtaatctcacttatcacatgtgaaatgaa

SEQ ID NO: 212846 - DNA, 382 bp, Glycine max
  unsure (1)..(382): unsure at all n locations
actgaggaacggagcttggtggtgtatccatgaccttgtgcaanaaaaaaaaatataaattagagaacatttcaaatataccaagttaatatccaaagagaaaaaaattgatgacactatgtaatattggaaacacattacttttagntaacacaattatgtaggaatattctcttgtaagtcttcatcatgatcattactattngcatgtacatcatccacttcatgttcttcaattatggaaggcatgtgtgtggagaaagaatgagtctcacaattatccagtgttgaatcacatattgatatttaacaccacttgttcttccatgtagaaccacaaaccatcatgagtcatacggatctttgacataaaacaccctgt

SEQ ID NO: 212847 - DNA, 366 bp, Glycine max
acatgcttccttgaaagatggatattcaatggttcccacagtcttaattggttcataaccacatgggcctcttgcaacagttaacattgatctaagaaaaatatactcatatgtgcttggaggaacccacatcaaccttcccattggataaccctgacttgcgggggttccaagctcttcaagttttgacatagacaaacttggacacaaactgagtataggttagattctttgcctctggatattttctatttgcatccctccaggaggtgaatatcgatttggtaacatgtagggttaatagaacattatcaatcacttcgttatctttcaacaggtaagtgaaagaataacctttcaacagtt

SEQ ID NO: 212848 - DNA, 357 bp, Glycine max
  unsure (1)..(357): unsure at all n locations
ttatcttacttcttacgaanacactctcatgggctgtggactatgtaacaaaatgggtggaagcactactggtacaacatgcacatgcacaaaccgctattcgcctcctaacaaagaatatcttctcaaggtttggccacccagggcactaataaatgatggaagatctcattattgcaatgcccaacactacagtgtcaaacgcaacgtagcttcaccataccaccctcaaaccatgggcaagttgaagtttctaacaaggaacttaacaaaattctagacaaagaacttgctcaatcaatgaacgattggtccctattactagatgaagctttaccggtatacagaacaacatat

SEQ ID NO: 212849 - DNA, 335 bp, Glycine max
ttggagagggggacaactttttattcttttacgccttaattggggcttcgtcgtgaataatctatattaattccggattaagaaaaatttcaaaataataaaattatcaatcgatatgacttattatataatattttaaatatatataagatgatagttatgataaatgaaagtataaatctttttacattatcatgcataaattatttaatttaaaaaaatatttgtattagctataatatatatatatatatatattaataagctcattttaaaatagcttttaatttttttttatgattcaaaacagtttaatttaataattgcttaataaa

SEQ ID NO: 212850 - DNA, 261 bp, Glycine max
  unsure (1)..(261): unsure at all n locations
cccggctaaaaacnaacaaaaaacaccgcccctacacacgagatgcatatgcaaaacatatattaaagtctatgatccatccacagaaaccaccatacaatgccctataggagtttgctgcacacccaaatgctataagatccacttagcttaccttgggttctgccagtgttcccctatcttaacaggtatggataagaaattatgttgaaaagcttaggcttcggagatgacaaaaccgggtgggtatctatacaacaa

SEQ ID NO: 212851 - DNA, 379 bp, Glycine max
  unsure (1)..(379): unsure at all n locations
caccatggagatgcagcggaagaccaatgaaaagaggtgagaggaggctgccatccattaaggaataagccatggaaaaaagagctttcacaccaagatgagccttggataagaagcttggaaggatgcttcaatggaggaaaagatagacggagagaaagagagaggggggagcacgacattgaacgaagaaaaagggagagacagtgaactttgagttgtgtctcacaagactctcattcatcaaagttacaacaagtggtacacatgcttctatttatagactacgtagcttccttgagaagctntcttgagacaacttccttgagaagcttctctgagaaaactttcttgagaagctagagcttaactacacaca

SEQ ID NO: 212852 - DNA, 347 bp, Glycine max
cacccgaacggggtggatgccacaatatgaagaaccattggaaaggatgaccttttttatttatatggctttgtcctgctgacgaaggtgtgttgatttggcaacactgtcgcatcgtgcttcaccccagggaagagaaaagggaggtacaatcaaacgataaaagggatatgggaagaggaagaggatgggaagagaagaaagaggaagaggagagggggagaggggaaaatgatcaattgtgtagaaaggggaacaggaactagaggaatgggagatagggaaaagggaagatgaacatttactcacagaggggaagaggaaaaaaggaatggcataaagggaga

SEQ ID NO: 212853 - DNA, 429 bp, Glycine max
  unsure (1)..(429): unsure at all n locations
agcttaggagtagagggaggatggattatcttgtgagcnnaaattgacaagcacttacacaaatacatacatatacaaaggcttagtacttgacaagctatgaacaatcctaatgaggccaacctttaaaaagacaaagccccaagacaagtatttacacccataaccataaatgcctggcacttaagggctctagatcatcttgaggaggccaacctccacagagacctactttcaaaaggttgagccataaacaactacttatgcccacaagactttaacatttgagtggttgaagatcgtcatggataggctaaccggtgacaaaccaagctcgtacatatcgacctcaatgattatcctttcccaatcaatcacacaacaagcccttggcatactaactttgtaatacataaagcttttgtgagc

SEQ ID NO: 212854 - DNA, 432 bp, Glycine max
agcttgacgagccatcagcgtgtctgtcttttctccattccgggctcatacccatcccttaacataactcgagccaccatcaagaggcaccagataaatatggttacaccagaagagactccacataagcaccgttcacaatttccagtgcttgaaatgacattttcagtgactctttcgcagcctcaacataaggcgtagaagacggacaactcaccagtatgtcttccttgcccgacactataaccaactacccctccaccacaaacttcaatctctagtgcaatgttgatgggaccaccccaaccgaatggatccaaggccgacctaacaagatactataggtggggtttatgtccatcacttggaaagttatctgacacgcgtgtgggccaatttgaatcaagagatcaatttcttctctcacgtcac

SEQ ID NO: 212855 - DNA, 358 bp, Glycine max
ggatccttaagtcacctgcagctgcaagcttatttttatatactatccctcttttattctgatacttgcatacccctgcactgctaacttgagtgccaaagtgtctttgtaggtacatcccacaacccgtggacgaagagctcatggatgagaaccaccatgatgaggttttgtcaaatttgttcacaacatatggtgcctaccatgggtgtttttgacaaacggaacccagcagacttggagaatccctcacgttagaagcttaatgatcactcgttgatcatggccctgccaagagagatgaattccttgaatccagaaatgccagagatagataacctctcaaggagaatgtcat

SEQ ID NO: 212856 - DNA, 318 bp, Glycine max
cataacaatatgcaccataaccctatacgtgagccatactgtgacatgaccaacagatttatgtctatcctcttcaaggggagtgggtgatgcaatcctccctatgaagggactattcaccacaaccatgaacacgatgctccaataggaatgggctatatctgttcgcaaaggccctacgattctatgaaccttacggagatctctgagcccatgggccatgctgtgccacttatctttgacatatacactagatttcctattttcggccttgtattaggctccaaatgtatgtaggtcccctaaaatgctagattt

SEQ ID NO: 212857 - DNA, 355 bp, Glycine max
tttaaaacaagaaacatattacctattttattgtttcacaatcaggtgaaaagcttttaaagtgattaaagaaccagctctactccagattatcacaacatggttcgcttccaaattggtattttacatcaaataactgaaactagcaatcactagaaatggagcctaaattaacccactttcttaaagggtgtaatataatttataaattcttataattaggaacaaagacagtatttcttttaaatatttattaaaatcaagttattctattattgcaacaaaatatatcatattagaatacatgtcttatttttatgcataaatatctacaactttggatacctatatatag

SEQ ID NO: 212858 - DNA, 468 bp, Glycine max
  unsure (1)..(468): unsure at all n locations
ctctgcgtcacctgccgcatgcaagccttgaatttactctgttgataaaatggttaatgtatacaactatgttcagaaatttcaatttccaaataatctagctgacgaaattgacttctatcatagtccatcttatcgtttttctcgctgcttctttcttagcgatggcatttagggggggaccggcattcataatccaacgagtcaaaaatttatgtttgtattttatattttattatttcttaaggctaaaatatgttgataatcactaataaaaatttaaattttaggttggttatccaacaaattttttcttcatttttngtttttaataaaacaaaaattatttttgtgtttgatacttatttttagtccctaataaactcaataattttgtatgtggttctttttaaatttttttatgncattagccactttgaaaatgactaataacacaaagaaaaatga

SEQ ID NO: 212859 - DNA, 421 bp, Glycine max
  unsure (1)..(421): unsure at all n locations
agaactagtgtatggggagcaccaaattgaaggaataaaagagggagagaagttgaactttgagttgtgtctcacaagactttatttctcaaagttgcgaccagtgttacacatgtntctatttatagactagatagcttccttgagaagctttttgagaaaacttccttgagaagcttctttgagaaaacttccttgagaagctagagcttagctacacacacccctctaataactaagctcatctccttgagaagcttccttgaaaagattcctaaagaagctagagcttagctacacacacctctctaatagctaagctcacctccttgagatgagaagctagaacttagctacacaccccctataatagctaagctcacccncatgacaaaatacatgagaatacaaaannaaaaat

SEQ ID NO: 212860 - DNA, 370 bp, Glycine max
gataatcttatttaaactggataaataagataattataagtgatacaactctgtctccaaatatttaacgtaattatatatgtaagactaattaatctaaaataactctgcatgattaacatactcagtgctataacactaatagtttggtaataactaattcattgataaatattataaaatcatcaatatttgagagtattagaataaattttacttcgtattagaataaaattaattagatgcaaacctattaacgaaatgctttaacttcaccaaatatgtgattatgaaagccaagggttgatggcagaagaaagagcacgatatataccatgggacggtggcatttgagagtgatttggaaaag

SEQ ID NO: 212861 - DNA, 351 bp, Glycine max
tcttggcagatactatgctagatggcacaccatgtaacttgacaacctcacttatatacaacgtggtcaaccttcttcaaggaaaatctgactataatgggaatgaagcgaagagacatactcaatctgtcaacaataacccagatagaatctatacctctatgggttctacgttgtcttaccacaaaatccatggaaatactgtcccacttccacttgggtatctctaaaggttgtaacttcccttaagtctctgatgttctatcttaccttctgaagactggcatgctaccaaactcactacctcttcttatgtcggcaccaaacatatcttaatctgaacatctggac

SEQ ID NO: 212862 - DNA, 434 bp, Glycine max
  unsure (1)..(434): unsure at all n locations
agctggntgaaaaaaatcttggaagagctttatttatgtcttaagcgtcggctaaagttggggatgataccattgtacatggggtcattattgatcttaccaacactagtatcatggatgaaacacctgaggcatccaatgcggccatagttgatgaggttgttcaccacattcaagaacttgtgttcaacaatcaaaaacctcaaatgaagctaccttaagagacaatggtgaaccagatgtcatcattgtctactctagtagataaggaattgttcctttgaactatgcataacccgttattggtacaagggatcaagtgcaagacatgattatgcaagcaatggagtcattctctgaatgccaacaccaagaaaatgagtaatttaggctctccatgaagaatgccctcacaactaaattctccaaccttg

SEQ ID NO: 212863 - DNA, 461 bp, Glycine max
acctataaatactagctgtgcgaataaatcactcctacatgtgatctgtagcatgctattttctttctttacccactcctcacgtttggttttttagggaaaaacaccataactaaacgcgccgcatggaatccctatcgcaccagatccaaatctagaacgatgggtgatcaagaggagatgcaggaacagatgaaagccgacatgttggctctgaaagaacaaatggcctccatgatggaatccatgttaagtatgaagcagctcataaagaagaacgcggtcaccgccgccgctgtcagttcaactgccgaaacagacccgactctcttggcaactacgcaccatcctccctcaaacatagtaggacggggaagggacacactgcggcacgatggcagccctcacctgggatacaaccgagcggcttacccttatggattgccgcccaactattcacc

SEQ ID NO: 212864 - DNA, 390 bp, Glycine max
  unsure (1)..(390): unsure at all n locations
ctacacatcgcaattttttctttcacattagaaaaacgacaactttctgtgtcctatgaatagtaacgcatttaatttaccgcattttttatgagaagttaagttttacgctatcagaacatgacagaagtctattccaacggttataatgtccaaaaaagaaatcattaaatattcagatcactcagagaagaattaagataanatattcacacaattatactttggtgaaactgtctgtataaaatgatataaaattaatgatattaaagacattgacatttaatattaatttcaaagcaattaaactgtttagaataagggcatttgagtccagtaattaattagcttgttttgatatcattttttctattacaatttggttgaaaa

SEQ ID NO: 212865 - DNA, 416 bp, Glycine max
  unsure (1)..(416): unsure at all n locations
ttacttgacattagntatgtattgagtaagattaggggatatatttgtcttgacaagccctttattggcaagtgtgcatgctctttatgtgattaaaatgcacttaacaagttttctttgcctatttttaaaaagatatatgttactgaggactctactcaaagaattaaaaagaaaaacatattaacatgtgtaaaatgatgttcgttaagattctttttacacaatcttatgtatctttacacaaaatattttgtcttttcaattttttaaccaatgtcctaaatattggccagtaagacatttttcttaataataattaattgatcaaacgttttcaggcacgtcaaccccttgagcctatcaaaaagagcacagttgattttatttctattcctaacacagctattaaaaat

SEQ ID NO: 212866 - DNA, 433 bp, Glycine max
  unsure (1)..(433): unsure at all n locations
ccgctgcaacttcaccaaagtataggacaaanaattattaattcatttgtgttcngttaattcaagctacgggcattataataaataaattctaaacttttaaataaataaaaaattaaatgcactcatgtattactcgcttctccctcttcaataatctctcaccttgaagttagtgatctatttacaaaacctcaacattggtatgttcttctttcttctgattggtgctaacattctcatccgatgaaatttgttcctaaaagagatgacataagagagacaaatgagtaataagcgactgtatntaattctttatttatttaaaaaagtagacttttaattacctatatacccttatcttgaattaatttaaacgcaaagaatgaatcgactcttcgtcctaattgttggccgacttatatatataata

SEQ ID NO: 212867 - DNA, 298 bp, Glycine max
gaacttcttggatgctggcggggctacacatctctagcatggcagcgcatttgtccgggttggctacaatccctcagtgagtgatcatgaagccgacgaacttgcttccacctaccctgaaagcacattctttaggggtgaggcacatgtcatatttgcagaggtcctcaaagacttgttcaagtgccccacatgctggactatgctttgagacttgacgaccatgtcgcccatatatacctccatgtttaatctgacctgctgttaaagactcggccatcacacattggattgtacg

SEQ ID NO: 212868 - DNA, 433 bp, Glycine max
agcttctcgaagggcgaccgtctggagatgttttcatctcacgcgcgaccagagcgcgcgtgccgacaaaacgcgctcctggtgctctctgcatgcgcgctcaaagagctccgcgagcgttgtgacgccctcccacgcggagctgagcggtgaatcgaagcggtgattgcgcagcgcgaggccgggctcgccgccggcttctgcggggatgccacggtgcttgttggagctgcggctgcggtagagaaggacgaggagcggaaccacgaggccgataatgtatgcgttcatattgctgatccaacggtcgcagaacaattcggaggaaatgtgatgttgttttggtggtggcgatcgaacgagacggtggtttcagaagaacgatgagccgggtatgagtttgcatggggatcataagagtgaagaatttgaa

SEQ ID NO: 212869 - DNA, 265 bp, Glycine max
atctaaaagttcacatcaactacttactacagaaaaacattcttccacattaagagccaacggataccttctgtatatttaataatgattccgagtccgtcttagtactgcctctatctaaatggcgatgttgtactcacaaaatagttacaggtgacaatctatcccttgcctaatatgttaactgaggcaaaagtgttccgacttgagtgataatcttactacacacgaactggattttaaagcaatactaacccaataattc

SEQ ID NO: 212870 - DNA, 231 bp, Glycine max
ctgcagctcatggagcagactttggcttttataagcctttttggtgatttttagccatggaattgcagcgaaagataaaggagaagatgttaaaggagacgtcatccactaaagaataagtcatggaaggagaagcttcaccaccaagagagtgacttggataaaaagcttaaagaggaagcttcaatggaggaagagaataccacagagagagggggaggaggggggggg

SEQ ID NO: 212871 - DNA, 364 bp, Glycine max
  unsure (1)..(364): unsure at all n locations
gaacaactcagaataaggtgtttcttggcaatcctcgtcttttcgaactagccaatggaatgtcattataggtacatgacccactttntattcgatgtatgttctttcaatttgaaattgggttgagatctagagaaaaccaacaactaaactcacccatgtaatgtactccatttatttaatgtgtttaaattatcaggtcttaatttgagatatagtattctatttaatgattttctaaaagtatattgtatttttcaattaaataaaaagctataaacttatttttgattcctaatcaatatctaatatttgtgtgtgctctctaataaaactttctttttcgttgagtccttaattaaac

SEQ ID NO: 212872 - DNA, 427 bp, Glycine max
agcttgagtgagccagcatatgtgtgagtcatttcaagtagagagcctctctgagagagaagataaatagcttgggaagtctctatcctcaagcttgagtgagccaccgtagagtgagtcaatccaagtagagagcctctttgagagagaagataaatagcttgggaagtcatagcttgggaagtctctatcctcaagcttgagtaagcctctctgagagagaagataagatagcttggaaagtctctatcctcaagcttgagtgagccaccgtagagtgagccaattttgtaaacacatccttgtaactctactatcattttgtatagcggaagaatctccatattggagaaatataatcgtgcgctcccattactacctgtaactactaagtgtctatcttacactatacaaagcgggaaagtct

SEQ ID NO: 212873 - DNA, 424 bp, Glycine max
  unsure (1)..(424): unsure at all n locations
tgagctcattggtactaccccttagagcccctcagaatttgtttctgccccattcttccttccaggccctgtttggttcccgctctaacgcttcgactgtagtcatgttaagatcccttacatcgtcacactcttttctgaccctagcgactcctgtcttgagcttttccttgactactctcattctttcaagctctattttcaaggcttacacttctttgctttcttcaaggacttcggcttccttcccacttttttagcttcgggagccaaggtatcccttgcatcctagccttcaaccacttatgatagccgccgatgacaccgatagtgctgtccctaagctcttcatcttttctttccaatgtattccatgtcttgccgattctctgatggatntttgcattgccttcattgaaacccc

SEQ ID NO: 212874 - DNA, 241 bp, Glycine max
ggggggggtttttttttttcccgtttttcccccctccatttccaatatacagctctggacaaaaatccgtggtggaaaatactagagatcctctcagtaactaaaaatagggctggatcataaaccggaagtatacatccacggagcaccgcaaaaaatgacaaaggaatcactgcaaaaaacgtgccaagagacatttcttctacagataccaaaagatttcctcccggaaaaaaaaaga

SEQ ID NO: 212875 - DNA, 431 bp, Glycine max
  unsure (1)..(431): unsure at all n locations
agcttatctttgttaagtaatctaaattaatttgttataatctaccgntnataatagagctcaatatctttttcaattcaaattaaattaattggcacaagttaccatttataaagataatcaaattaattattataagaattatcttcattaatcgtaatcaaatcaattcatgatattatttttattacagataaaaagagtaatttatgtcattattaactcaaatttaaataaaaaaaggtaatttgtgtaacaattaatttgattaccattacaaaaggtgatatgcatcatcattaatataatttgtattaaaattaattcaagtaaacaaataacttaattatgcaattaatttttagtgaaaaaatattcaacataaatgtgtgagaatacgatttccttgtgtaatttctttgcaccccttt

SEQ ID NO: 212876 - DNA, 478 bp, Glycine max
  unsure (1)..(478): unsure at all n locations
gacctatanaaacncaagcttaagcaatttcttaacacaatcaagaaggcgagagttatttatccaagccgatcaagaattctctgagtagtaatcacaaggacataaatcataaccagatgtcaaccctcacatcccacttgaagcacacgatatatggatttcttgtttgacatcacaaagacattgtcctgcgatagcttaaacaagtaagcaagttgaaacatgaacaaaagtagcatatatcatataccattgatgaacaacccacaggcttcagatcctttaacacacctttttgtcaatcaaagttgtcacatccatcagaatcttcattctccagtgagaatacatcatgaaactgaaatgctcttgcggcactaatggaaaaaattgtttacacagaataaaaatcattgagtatataaataaagctaaatccaataatccactataagacgcaactgagaaactacat

SEQ ID NO: 212877 - DNA, 398 bp, Glycine max
  unsure (1)..(398): unsure at all n locations
agcttgttaatggctatactgaacatgtttggtttggnttggttcaaggataaaagggatgccctcacattatttcatgacacaaatgcaaaaatgatgatttggaaactttatgcaaaactggtcatgcatgcacctatgtggacactcaagtgtcaaatttttatggtcatgtgatgctagggctcaagattcatttcctctattttagtcaacccaacgtttccaaaatatgttcttttatcaatttgtgcattcatccgagtccattttgggcgtctgggaaaatcttcacagcattcacccttcaggtgtatacacattttttcaaaaactagttatgatcagttgaattttttcaaagaaaagttggaagtcatctcttttcanaagcatgt

SEQ ID NO: 212878 - DNA, 352 bp, Glycine max
  unsure (1)..(352): unsure at all n locations
ttgatttttaatgaaacaagattatgttgaaagctnaaggagaacaacctagatgacaatatgaatgacctatggccaacccttgttaacatgcccaagccatgccttttatgattagagttgcttttgaaattttaaccaaaaatgggtaaagaagtttaaaccaaaaatggaaactcatcctatcctaatcccttagatagaggtgtgtaaccttccttggattttgtgtaattgagtgaaccttgcacaaagtccactctcatagagcataaatacactgtcactcaagacaaagtgtaattctttcacagatgaaaccttagctcataaatattgtatatctctctca

SEQ ID NO: 212879 - DNA, 114 bp, Glycine max
tgcccttagtgatgccacacttaaattgtgggacctgttgctctgttcttctataaagggagggactcttatcaaaagtttacccgacccgagaggacatgttaaatcaaccca

SEQ ID NO: 212880 - DNA, 381 bp, Glycine max
aactacgcaaatcggtgtcacattaactacagcatcgcatgccatcaccatattttctaagttgtgtctctaatattgctcttccatattggcctttgtcatttaaacgcccctctctctctctgttcagtaaatgtttatggttatgagttctgcccaatttttgttctgctcgcggcatactaattatggacctcattatttatgctcatgaaaaaagcaagctcatgttatttccacctaacatttttgctgtttccaccacacattctcttatgaatttttgtttctaaatacacaactaataaattgcagggtgcacacccaaaacactattgggctatccaacatattttaaacaagcccgttatgttcctaaaa

SEQ ID NO: 212881 - DNA, 303 bp, Glycine max
aaaggcactggtaatcgattgccacaacatcgtaatcgattacataattctgtaatcgaacggaacgctgtaaattcatttgaaaacttcttcaaatccattgctctattggtgagcgattacaataatctgcgaatcgatgtccacagagaaaaaactctttggtaacatagtttcagagaaaaatctatgtgctactcattttttgataaaaccttttcatacttatccagaataaaccttctctggatacttgaattctgcgtatagaaacctgatctctattcttggaagcttgattct

SEQ ID NO: 212882 - DNA, 332 bp, Glycine max
tttgaattgagtgtgatgcttcaaatggtgggaatggggctgtgttgatgcaagaaggccatccaattgcttattttttgaaaagttaagtggcctaccctcaactattcatcttatgataaggagttgtatgccttagtacgggctttgaaaacatggcaacactacctttaatcccaaggaatttgtacttcatagtgaccatgaatccctaaaattattaaggtgccaggcaagcttatcaaaacgcatgcgatgtgggtggaattcctagagcaatttccttatgttattaaacataaaaagggaataggtaatattgttgccgatgc

SEQ ID NO: 212883 - DNA, 330 bp, Glycine max
aagaaaatatttctatgcatcagccttggtaagtaagaaacgacccaacatatttacctatcgttggattttattacctcgcatttcgtattttaacataataggttaggttaaatgctggttggaaattatcacttatacatgttctctcaacaacgcttcgattctgaactttatcaggctaacattagttcctatgttcatactcagatcatcccgttaattttaaatacttgacaattcggtgtgctttcggacacccccttgaaatttctagaattaatgccacaaattaactgcagggggacccataaagtattatggcgttgt

SEQ ID NO: 212884 - DNA, 384 bp, Glycine max
agaggggggagcaccaaattgaggaataaaagagggagagaagcggaactttttgaagtatggctacaagactctcattcatcaaagatacaacaagggttattcatgtttctatttatagactaagtagcttccttgagaagctttcttgagaaaacttccttgagaagcttctttgagaaaacttccttgagaagctagagcttaactacacatacccctctaataactaagctcacctccttgagaagcttccttgaaagattcctaaagaagctagagcttacctacacacacctctctaatagctaagctcaactccttgacatgagaagctagaacttatctacacaccccctataatagctaagctcaccctcatga

SEQ ID NO: 212885 - DNA, 429 bp, Glycine max
  unsure (1)..(429): unsure at all n locations
agcttatgccgcaaagagggacaagagagcttctcaatcttatttgcaaacnccaccacagcagagcgattatgacctttccagcaacagattcaaccctggatggaggaatgaccctaacctcagatggtccagccctcagcaacaacaacagcagcctgctccttccttccaaaatgcttgtggcccaagcagaccatacattcctccaccaatccaacaacagcaacaaccccagaaacagccaacagttgaggcccctccacaaccttccctcgaagaacttgcgaggcacatgactatgcagaacatgcagtttcagcaagagaccagagcctccattcagagcttaaccaatcagatgggacaattagctactcaatcgaatcaacaacagtcccagatatctgacaagctccttctcaagct

SEQ ID NO: 212886 - DNA, 427 bp, Glycine max
  unsure (1)..(427): unsure at all n locations
atgcaagcttgagttagtcgcagcgtttttagccctctctgattctnctaggcctgattccactagtatcctctgggaatggagctctacctcanacgggagtactgcttccatcccataaactaagaagtacggtgttgccctagtagaagttcgtaccgaggttcggtatccatgcagggcaaaaggcaacatctcatgccaatctttgtacgacactgccatcttctgaataattttctaaatattcttattggctgcttccacggctccgttcatctttggtcggtaaggcgtggaattgtgatgttggattataaactcttcgcacatttcccccatcatcttgttattcaagttggtgccgttgtccggataatcttcctcggccaccgtatcggcagatgatttccctcttaatgaacct

SEQ ID NO: 212887 - DNA, 397 bp, Glycine max
  unsure (1)..(397): unsure at all n locations
aatgcgtcacgtctaagaggaaggtcgatgtgttttctancctttgaccgagacggcgagaggagggtgaaccacattccattcagataggcccctacacttgcaatgtggtgtttcaagtgatggacataaatcccgcctacagctcgcctttggggagaccctagattcacgcgctaggaggggtcccttcaacgcttcaccagaaatcgaaattcgcggctggtggactcttggtgatagtgctaggcgaagaaaatatgttggtgagctgcccctcctccgtgccatatgtagaagcagcggaggaatcatgggatacagttttccacatcttcgaggtagcgagtcgtgcctctatggaaacaagtccgttgctacctagtctctctaatgc

SEQ ID NO: 212888 - DNA, 292 bp, Glycine max
cacgtttctatttatacactaacgagcttccctgaaaaactgtcttgagaaaacttccttgagaagcttctttgagaaaacttccttgacaagctagagcttacctacacacacccctctcataactaagctcacctccttgagaagcttccttaagaagaatccctcaagaagctagagcttagctacacatacctctctaatagctaagctcacctccttgagatgagaagctagagcttatctacacaccccctatagtatccaagctcaccccatgacacaaaacatg

SEQ ID NO: 212889 - DNA, 411 bp, Glycine max
  unsure (1)..(411): unsure at all n locations
agctgcggcgaggtgaggaagagatgctatttatgcgaccacaggangacgcgcatactgaatcatactatcatacatcattgcaccttgtctgaacagcatggaataccttacaactcatgcctgcccaaatgatcgtcttctgtacaaaagtggttgtgcagaattgcccctttggacaagatgtggtggatcacgaaccagtgcgatagatcattacaattgtcttctccctgtgcccaccgaacgagggcatacccacctagagtctgtggtgcctctcttctccttacgacagagtcacatgaccaaccgcctgagaatgctttgactttctctcttccccttaagcgaaatattggaaggactgccgcccgtaaatcttctgctttcattgaagaaatcaaggac

SEQ ID NO: 212890 - DNA, 264 bp, Glycine max
ctgcagcttgagacacatgacgcttttaacctcccccctacctgattttaaatggcgactccagacatttctgtctggctggatcttgaaaagttgatggccaacttcgtccaagctttattaagcttcccttgtttggactagaaacccttttttttcttttccaccttttacgtccaccttttcatcccaaccataccccaaacgattgttcgtgaccccctgcggcccttacaacaatttccttatgcgttgtaataacct

SEQ ID NO: 212891 - DNA, 450 bp, Glycine max
  unsure (1)..(450): unsure at all n locations
actcagctttccaccgatttacaggcgggtagtgtggaggatctttctttcttangagtggacgttggggtctttctttctttcctggttcttgcttaagagaaacacatttgtgcagccatccatttatggcctccagatagaactcttgagctccaatccacttggtaaaactagaggatagataatggagctcgctctccagataagaagtaatttgcctacgtaattcagagtgtgtggcagcaattccagcatggctgttgatatacacagctgacattgtctgagactgcagcttgtggcactcaaacatcacttaccacatccgactgaacctgccatcgcagcacaacggaaacataagagacaacaaataaagcaacaagttcatatttatagacaagttaattaacatgtataaaccacacctaatacctaagataacac

SEQ ID NO: 212892 - DNA, 419 bp, Glycine max
  unsure (1)..(419): unsure at all n locations
agccctgggaagaaaggaaggattttatntttttctctnaaaccaaacacaaggaaatcattcaatttcacttttccgtcacatgaatgatctgatccagcatcattctcaagacaaacaacaaatcatcgatagaatttttgaggcctgacttggaaatagtctggatatataacatgagaaataaatacgattcaacatgaacatgcaaatatggaaaattttaaagagaaccctagatgtggtatgttgaattcagtacatgatatgcgaggttgttgagaaaattctgtatatataccaagtataaaggctatagattcaataccttcatagtgcaacaaacacagagttgcaatgggctctccaagcatttatggctgataaaaaaataccatccaatcaagtgcaggtggatg

SEQ ID NO: 212893 - DNA, 422 bp, Glycine max
  unsure (1)..(422): unsure at all n locations
agcttatgaagaatttctaacaaggctnggttttaagcacctcgtaacctctgttgaacatccccagaccaatggtcagacaaaggcaccgaatagagccatcctcaaggccctacgcaccactctcaactagtttaagggtctatggaaggaggaactccccattatacattgggcatatcacccagacaacgaccaaggaaactcgtttccaactcacatatgggacatacgccataatccccgtcgaagtcgaggaactgttgacaagggggctattgttttaagaacaacacaatgaagagaacatgcgggtggaactagagacaaaggacaaagtcttagagatggccagaatcaaagaagaggccaccaagctccaagcatctagaagatatagtacaaaggttcagccatgagtc

SEQ ID NO: 212894 - DNA, 461 bp, Glycine max
  unsure (1)..(461): unsure at all n locations
tattacgtgacactatgaaactcagcttgcggatttgtcttcgcgtgaaagatcaaggggtttgaaagagcaaatctgatcatcctgctttgatgaatgcaaaaactggngcaaatgaagaggatgagaatgagggaaaaacccttgctatgactgccattcctacacggtcaaatttcccatcagcccaataatgtcattactcaacccataacagttcctttcacccaatcatccataaaagccatccccaaatcagccataatgcctgcctgctcagcacacgcccaatgcccaaacaccacctatagcgcanaccaaaaaggaattttgcacaaaaagcctgtaggattngccccacatttcggtgtcatatgctaacttgctcccatatctacttgataatgcaatggtagccataagccctgccagggttcctcaacctccattttttgaggata

SEQ ID NO: 212895 - DNA, 218 bp, Glycine max
agaccacaacctacaaaggctcaacgttcttctcccctttatccttacttcaatttcgtgctcccccctctctctttctcgtcctctttcttttcctccattgaagcatccttccaagcttcttatccaacgctcattctggtggtgaagctctcttttccatgggttataccttaatggatggcgcctcctctcacctcttctactttgtctttcgc

SEQ ID NO: 212896 - DNA, 421 bp, Glycine max
  unsure (1)..(421): unsure at all n locations
tcaacacatggtacgcaacgagagaccaangatncgnaattttcttcacccaagaccctactatagctagaacctggtatgtactctctttcctactttaacatatttcccacttgtaaaaaataaaggcttttgctgaacaggnctcaatgacgcacactcgactacccatgtaaaaggatgatcccctgtaaagtcagatcattcatgaaatcctcacctcttcatttaatgcgccacacctaacgcttacatcgtcatattacatttcatcttacccagcacgtggcggaaaccaactaacaatctgctgctcatcttgagattcatgacctccgctctttcactcaagcctctctccattctgatttgcatacaattactcttaataccatcacaatacataaaaaaacacaatgct

SEQ ID NO: 212897 - DNA, 349 bp, Glycine max
acccaaagaatatcactcaacctgttgcgggcagggggtaatttaataatattgatgatgatactttgaattctttttttgcaaaacccaatgattgtagaagaggcggagaatttatgttcttattcaagattgcactcctgaggcctgatcctcaagagatagctgctatagctctgtatcctagggaggggatttgagctgaatgctgatggtcttcccttgaagatcttaaggaagaacatgacttctctttcttagacatggagtgttcttttttatagaacattggcctgactcctacacctctaacataacattgaaaccgtccattttatctatgtgatca

SEQ ID NO: 212898 - DNA, 424 bp, Glycine max
  unsure (1)..(424): unsure at all n locations
aaacaagagttccaaagaaggtgtatagttttttccaacattaacaatgagtaaacgggtcaacaatttcaaaaataaaatcatgcagagtttaactgtaacttgtcagatatgtaatnttctaaattatatattaaatttatatgattttaatatgcatacatttatcctcatattataatagttattgtcaatatttttttattaaattggccccactaatctaaggtcctagatcacccactagtagacatggacatcttgaattgatcttataattactataatattataattaaaaaaaaaactgtcaaatattgcatctagcctaacacaggtgaatatattacgaatgtcatccatcgtggtaaggtagaaaaaaatacaacattttccttacatatgcttgacgtttaaacaagtc

SEQ ID NO: 212899 - DNA, 398 bp, Glycine max
gcccatcgacttcagcgaatcgccgcgaatccctagattacgctccactttctctctgaagatgaaggtgacactggcattgaaaatccagcatatgaaaattggtagcaacaagatcaagcgctcctcacatggcttcaatccgactctctctatgtcgattttatcgcgagttctaggatgcaccgattcctatgaggcttgtgaatgcattcacgattatttccacaagaaaaacaatagccacagcttgtcaacttcgcactcagcttcgtgctacgacacttgcaggcaaatcaatgcttgaatttctgtcgcaaattctagcaatttctgattctctcgtttctattggaagcccagttatgcttcaagcgcatattgattctattcttaaa

SEQ ID NO: 212900 - DNA, 116 bp, Glycine max
ggctatgctacctctcacatctgcatatagtgatgccggcttgctaccttcggcacctccacatactgcaattctgtgtgacgactgccaaaaggccggaactccctaaagaacgt

SEQ ID NO: 212901 - DNA, 448 bp, Glycine max
  unsure (1)..(448): unsure at all n locations
tcagcatcttaaacagagggctagaagagcgggagtgaagacttcataggagacctgtgcagcaaagtcaaacagctctaacagatactaaatgactcggagaattctataccagctcaaccttctgaacaacaagtccaggagctcaagataacccaagctgacctttggggaaaagctactatgcaggagtctattgtgaggcagaaatcaagatgcagatggatcaaagagggggacaacaacacatcctattttcatagagctattaatttcagggggaggagaaatgctntgaggggaatgcacattggtgacacctacgtggaaaactctaacactataaaggctgaaatccttcatcatttttagaacaggttcaatgagcctcacttgagcagacctaatctagatgggggtgctnttaaaggctgacttctactcagag

SEQ ID NO: 212902 - DNA, 422 bp, Glycine max
acgcgctgcaagctgaaattatgggacccatacatgtgttctatgtggcgtcgttctatggtgcacaacatgcttatcaacatacacaatgcccgcataaacccaccatactctgttgcccgacctccactgagctcacgtactcccacgtagcccatcatcctcgtttctgtcaacaacgggttcccatctatcctataaagcttccacaacatccaagcaaaacaacgttcatacagcacaagctatcacagccaagcaaaacagagcaaatgcagaaaactctgctcaacacatcaaccaaaatcacagcttttctcacgtaaagaccacagtaacaatttcttcgatccaattcgctaaccgttggatcgactccaaaattttactggaagtctatagtgtataagcctgccttttga

SEQ ID NO: 212903 - DNA, 354 bp, Glycine max
acaattatagtcgttggctgaataccctagccactcaagtgtatcacacagatatggctgttctttaatgaaacactcttgtctataaccactctaatttcccttgagttcttaggcgaatcaagagattatggccatctcaaagaacaattcaccaatatgtgtaaggtaatgctagagagaccacgaaaaggctaaccaagatgaacgctaacaatgtttttaggcacagatgaacgatataagattcagaacttatgaattcatgtcacaatccttcatgcaaccaatatattaccttacagagatgttttttaaagctcttcaagcatgaaccattcagcccaaacttat

SEQ ID NO: 212904 - DNA, 109 bp, Glycine max
  unsure (1)..(109): unsure at all n locations
ccccccccccgcntccccactccgttaactctcctcccacncccccccccccacccgacatgatgctcatcacccccctnaaacaaccccacaacgcccaccccaaaca

SEQ ID NO: 212905 - DNA, 376 bp, Glycine max
  unsure (1)..(376): unsure at all n locations
cggattaattcngcctggcgagggatcgaaggcttaataatttatgctactacatanaacacacgagcacgattgattagagaaatatatttctatgcattacctctgttgttagaaagacaccacatttctacctactgctgtcatnttatttaccttgcattttatagcttttagcataaaagtttagtttaaattctatttgaaattatcactcatacatgttctctcaacaatgcttcatttctgaacttaattcagactaacattagttccatgtgttcgatactcggattcatctatcttcatttttaaatacttaacgatcccgatcgctttctggcaacccgaatttcccctgaatatatttggacca

SEQ ID NO: 212906 - DNA, 300 bp, Glycine max
cctttgttccacacacctttaagatccctgaattctttggtacttctcccaatatataaagaaaatacaatgtagactttgcctgattcaacagtaccacaaactgcaaaccctatgccatgaaaaactcttagatttatgttttgcaatgttatattatgggaaaatgaatcccaagagaaattcccatcaaccactttaattgctatatcaaaactaccccgcggaagcttcttcacaacatcagatagcatctcatccagacgaaggaaagatgcaattcctgccagagaaacctta

SEQ ID NO: 212907 - DNA, 408 bp, Glycine max
  unsure (1)..(408): unsure at all n locations
ctgcaagcggtatttattgttggcttcctccatattgaacagaatgggggtgctagaagaaagggaagtgaatccacaccaagaggaaacagaagttatgaacttaggtgttggcgaagaaagaaaagaagtcaaggtcggcacttgcatgtccgcaaacgtccgagatgaattggtagctctattgtgacactaccaaaacatncttgcttggtcctaccaagatatgcctggtttaagctcggacattgtacaacgtagactacctctaaatcccgagtgttatccggtaatgcacaaaatgattaaaatgatgcccgagatgttcctagatagaaaagaataagtgaagaagcaattcgatgttgactttttggctggtgctnatacccggaatgggttgcaaca

SEQ ID NO: 212908 - DNA, 394 bp, Glycine max
  unsure (1)..(394): unsure at all n locations
ggacacaaaaactcagcttaaanngaagaaacgtgagaactgctggtatctataccaccatggaatcgataccaatgaaaattgaattcaattttaataactattataattattttggccactggtaatcattaccacagagaaatctctgaaaaaaacattttgcttaaacttttggccaacctttgcagtttaatttgaattcccttctaaaacactaagatcttttgatgttgatcttgattttggattttgcttgattaactgagaacaattttttatggttaaacatacgatcattgacatatcaacattaagtaagcttgcttctcagctcctccttctattaatgagctagtgtgatttttttatactacctattcaaaagttcctg

SEQ ID NO: 212909 - DNA, 413 bp, Glycine max
cagctggccacccagctcgcccatgcgagcattgttgcttcctccaaaagcaacagccttctggaggaatcttctggagggcccaagtgggcctggttgctatttgcactcccatttttactaagtacaccccctgcctttttttggtgattcttttttcgtaaagttacggaaacttacgaatttcgtaacgatacttgttttctttccgtaatgttaccgaaccttgcggattacataatcatcccctttttgacttacggaatgttacggaacctcactaattgtgcaacgatgcttccatttgatttctggtgtgtcacggaaccttacggattgtgcatcaatattttcttttgttttccggcctgtcccggaatttcacaaattggcttatgatgggtgccaagcac

SEQ ID NO: 212910 - DNA, 320 bp, Glycine max
ggatctcatcaattgctttttggagaaagagagctcaccaaagcaagtaagtgacagcttcactttctcttattgtttaaaatcatatctttacctgtgcaaaatttatttataaccttgtcttgttatttatgggtcggttactaaagacggagtgaaagcaggcatatttcccactcctatattacaacgggctgggatagacaaagtattgagtgtatataacacaaaaatcaggtacggttatgatgataataagattcctgggagaggcttttgtgaaatcaccaacttaagataactgccttatgccactgaaa

SEQ ID NO: 212911 - DNA, 406 bp, Glycine max
ccttccagaatacaaagtgaagatacgtgcataacaaacttcttgatatgtcaaggaattcttgaacacaaccacacatggttgttacgatcagaaaactgtgaaccacaggaaccttggatcctaataacacagcatctgttaactaccaggtttcctactccacctatttgcagatcttgatgaacttaaattcgagtcacggggctctgagaacctatcatttctagttgcagatctaggtgaacttagatttgagtcacggggctccgagaacctatcatttctagttgcagatcttggtgaatttagatgtgagtcatggggctctaagaacctatcatttctagttgcagatcccattgcatcattcctgccacctcctctaccgtcttatgtctctttg

SEQ ID NO: 212912 - DNA, 372 bp, Glycine max
tcagcttctctttggcactatctatgctgtgtgcaggtgttattgaagctcgcacgtttacgtgatgtgatgctactggggaggcactcgaattcgttgccacacctcaaggtgatggcactcactttttctgaattctgcacaatttgtgaagacaatttgtcacaattttgggaatgagcttggttcatctgagtactcatctggcccatctgaattgtcagactctaaataaaggctcttgtctcttgctgaaattacatattctggatgcgcatttgcctcactaactcttctaacgaaggctgaggaggagcctcagctgcttgttgcctttgttgggactgctgcatcgcaggaggaacatatggc

SEQ ID NO: 212913 - DNA, 453 bp, Glycine max
ttgggatgagagctataaatgaagcattggttcctcttgtaaaggatccattgatataaaattcatccatgaacctcatgaaatctggtttcaaaacctcccagaaatgtttaatgaaattgaaattcaagccatctgggccagggcttttgtcccccccacaatcccaaactacagatttgatctccaattcagaaaatctggacacaaggctttctttatctcttagatcaagagaagagaagcgaacaccatccaatgctggtctattagaacattcctccgaaaatctgtccttgaaatagaggatagctgcatttttaacactgcaaggttcatgtacccacacaccatccatgaagataccttgaatagcatttcttcttcttctatgattgatcaatctatggaaatacgtagaagtcgtgtcccttcttttaccacttaactcta

SEQ ID NO: 212914 - DNA, 418 bp, Glycine max
agctggtgttttggtacctcacatcatcatctttctgctggtgctactttgagttccatgatgtggatggccatgtagatgatagcaaaagggctttatgtgaccatacttgccacagtagtgacacctccacttctttcttttgctccttttctgctgcgttccatgatgtcgagaccgatgttgtgacatcgtggctccagtgctgtttttggcaggaacaaattctgtcatggttgttctgccagcagacttaggattaaatccaagtcctctctggtttccaacattctttacaagctgcagcacctcatcaagcgtatctgagcctttattcaacatctttattgattttgtcatgttttccagtttagagttcagaaaaccaacttctcctttaagctcagagatctcctct

SEQ ID NO: 212915 - DNA, 440 bp, Glycine max
  unsure (1)..(440): unsure at all n locations
ngccaaaggtcgaaaaggagcttgtccgaacaattgacctttaccaaagaaaacatgtgggccatcatcgaccaatacaaggaaaagttaagcctagcggtaactcacaaacaaaggctagaggacgagtacgtgaaggtataagtcctgcaagtggaaagggaagcaagggaaagggtgatcgattcattacacagagaagcaatgatgtggatggataggttctcctttactgaaattctgatactggggacagatgtcgtacaggatgtcacgacatcgcgcttcagaacatgcagcttgtatatgaccgtatgaacagattaaacaagtaaataacacaagagaattgttaacccagttcggtgcaacgtcacctacatctgggggctaccaagccagtgaggaaatccactaaaatagtgttagttcgaagatct

SEQ ID NO: 212916 - DNA, 208 bp, Glycine max
agctatgctactgacaccatatataaccacatcctgagatatacttaggagagtttttggcgagaggagacacgttcttcgacaggagacatgttctggggttttagagattccagtttttactgtggatgcgcattgctcacgtagaatgaagtccatgtcatgcaaggttgtttccgcttcaatctactatatcatttcctactga

SEQ ID NO: 212917 - DNA, 511 bp, Glycine max
  unsure (1)..(511): unsure at all n locations
gacgcgtatgaatcatgctattacggacctatgaatctcaagcttatagtgctcgtcctgcacacgaangtcataggtacgcgataagtatagatgacctcccactctcgtaggatatgatgccattatgctttctacgataacacctggcataaaaggcgagtggaggaacgcccctgcatttacgcatcttagcatatgtgtataatcgtttacggactttaatattactctataataaggccctacagctttaaatggatgcatcttcgttcacgcttcattgtttaccgcatcttacctgaagaatcttggacctatattactctgatcctggtgtgtancctatctgatatgcttacatgtatacttctttttctaaaaagttgatccgttgaccacctcgctctatgactattacctgtgcccgtctatagactactctgcaatgtatcatccggggataatagatgctgtgtggactttctgtaaatagacgaccgtcgccatg

SEQ ID NO: 212918 - DNA, 267 bp, Glycine max
tgcagagagtctgtgataggctcgcgaaagtgtgaaccacatcagatcagaacgtgaacgagaaccttctttgctttgcttttttttctctatctctctctttctttctgtgtgtctttcttacaccaaagattatcttctttattttatccaaacctgatcatctaagatgcatgaggcagcaaatcattaatctttaattaatttatttattaggtgctttggattttctttcttttgtgtgctttcagcactaccaatgatgat

SEQ ID NO: 212919 - DNA, 551 bp, Glycine max
  unsure (1)..(551): unsure at all n locations
gcattgaaatcgtgcccctgcgatctacgtgacactatataagaccttatgcttggtgcaagcttatcgtctatatcataaacaactccatcgtctaaggtatactatgtgactaactacgtgaggcatacctnctgtgcacggcgatgactacgcttctcactgaacctctcgttatctctatttgtagtactactggtctcgtggtccgctcacactctgcgtacaataaatatcgtcctcatagttgccttaaatttgaatcatccgacaaagctactgctgctaaagggtttcgattcagatgagctactataacccggattatttcgtgaagtgcattaccaagataataccttctgctccttacttatacgacgtgaactgcgatccagtattggttcctgcagatgaatagtgactggctttttactatcgctgactagaggtgaatgtgatgactgacaaagaatatcttaccgagatatttctatctacaggtattgaatgcccatcttttgacaatgttcaagacgcccttattaaaacct

SEQ ID NO: 212920 - DNA, 261 bp, Glycine max
tatgcactcttatgtactggaactagtgagtatattcttcgacatgtattattttagatcataagaaccatgttgtgaagctgctcagtcggggtattttggcaatactcttgttcaatgccaaatatggctattgaccactatgacatccaataagagagtgaccaattagatagaggagaaggatagggcgaggggaattatgtgggacaataaaatgccaatctacaaatagcttattgatagtgatgaacaagactg

SEQ ID NO: 212921 - DNA, 597 bp, Glycine max
  unsure (1)..(597): unsure at all n locations
caatatcactacactgtgctcctacttaactctaatattaganttacattntaactatatcttatcacaacatgcagnctttgaaatcgagttcctaccagtcactatanacaacttaagctacactaactatatatgccacgtctaatctacgataccattgtactgaagttgtctgaccacaatcgattcaaacattgttgtggnccaagtataatgtatatcgacacctctagctctccttcttgcatcttactcatgctgccccaaatggtattgctgcatcacccatatgtttaatgtcaagaatgtatacccagtgctctgtaccaaataacgcgaattgatcattatgatcagatattacatggaatcgatgaaacatcttcgatgctttcattgagtcccatatctctgagcgaatgcataagacattgaactatcgaattatacgacccatgaagacacttatttacttgtaacccacaaaagtgtgcgcttgaacatgttaccaatctgaacgagacaacgttttactctcagtcgtattggtccttgcactaacatacgctggagattagaacaatatctcttacn

SEQ ID NO: 212922 - DNA, 197 bp, Glycine max
tgaatcatgagccgttctgagagcttacgacgatattgtgagtgattgttatatcctatacgtgcaagagacatcctcaccacttgcatattttcaatcttacaccatgttcttctatctgttgtaaagaccgctacctattaatctaaagctaaatcctctgtcggtacttccctataggcacctgctgcaaagat

SEQ ID NO: 212923 - DNA, 335 bp, Glycine max
agcttgaggagggcgtcatccacactcctcttccttccatctaaggggtgattatattttgcctcattgcggatgatagacgtctccattaagcgcgtgatattaatcatagacatatatgcgactaacatatcccatgctagatacaagatcactttctcatagataactcatttcaaacaacattgccagctactacggtaagaaatgaccaccacaaatgctcatttacatatgcagttctatataacatgaacgcggtcggccttgtcttaaaatataaatatttttctttcccaatttattttctctctttacctacatccttttttccc

SEQ ID NO: 212924 - DNA, 92 bp, Glycine max
gggcacgaggtggaagcactacctatcaactctttttgcatataggattctactgatatcactgccaaatatcgttatcttgaataagattg

SEQ ID NO: 212925 - DNA, 424 bp, Glycine max
agctataggaatatgatttctatacacaagttattcgtctaaagcgactaacacaatcccccaaatttatagttttacttgtcctcaagcaaagaaagaacaactcacttgcccttaagtgataaagacagcggccaatcaaaagaaaatggtgtttgattcatcaaggacatcaagcatatgaacttaataccatggaatgcttaaaacaattacttctcacaagcatgtagtttttcaaagataagagcacaagtattagagtcacagctgaaataagctagtaagcatgacgaacatcaaggaaggatcatcaaccaaaacctcacagtcattgtttcactcaaactcaagtgtttaggcttattccttcataaacaaccaacacaagttccaacctttgcatttcatctcctatcataca

SEQ ID NO: 212926 - DNA, 466 bp, Glycine max
  unsure (1)..(466): unsure at all n locations
tctccgtcttttccctataatagggagcacagggaagaattttgacgttcaaccctcctggtatctgaggatcacttgaaattagtgaaaaaaaatcgtttccgtgaagaaaatccaagccgaggcgcttccgtaacgcgtctgaaacgtttccgtgggtgattccgtgaagattttccgccatctatcgttcgttcttcatcgttcttcgtcgtcctgcggtcttcaaccgataagttcccgaaatcgaacttttcaattcattctatgtacccttggtggttcccacttgtttcgcgtacttttattttcatttcatttactntctgtatccccttttgacgtgctttagtcatttatttaagtcattgtctcgcctaatcacaaaatataataaatctccaccgatcatttaaattgtaacatttgttaatttctgttaaaatgaaatccgaccgttcggtca

SEQ ID NO: 212927 - DNA, 447 bp, Glycine max
  unsure (1)..(447): unsure at all n locations
agctttcaactgaacttacaatgttccaattgatttcaaaatgttgtaattgattacaatgttttggtaatcgattaccagtgtgtttgaacgttgaaattcaaattcaaatgtgaagagtcacatcctttcacgaaaatgctntgtgtaatcgattacactgatttggtaatcgattaccagtgatagtttctgagcaaatcaaaagatgtaactcttcaaatagtttttgactctttcaaattggtttaagtttttctaaaggtcataactcttctaatggttctcttgaccagacatgaagagtctataaaagcaagactttgttttgcattntataaacatctttccaatcattctttagacaacaaacttttgccaattgctttctgagtctctttgaacttcttcttcttcttcctttgtgaaaagctntctaaagttgat

SEQ ID NO: 212928 - DNA, 418 bp, Glycine max
  unsure (1)..(418): unsure at all n locations
ngatcaaaacaattatctaatcattccaatccactcaaatcatacaattgcttattcaaatcatactcaaacactcatttcatgcaaaataatccactgcatatcattttcaatcaattcactgttcaaacacacttttggtacaagaaaacaactcaaagtgctaaaatttaaataactgaaatataaagcaaactaaaaagcaactaaatcctgataaactaaaatgatcatgcttttcacaaattaaactaaacacaatttaaacatcctgctcatactatggctgatgttcattaagatccagtgctggaactgctgatgaatcctggataggctgctttggctgcgtgactggtgcacatggatgggtctcctcacggatatgtacacgagatggctcatggatctggtttat

SEQ ID NO: 212929 - DNA, 118 bp, Glycine max
ataaactaacttagaattccaatgaaatacagcgaatgtatgattatcggtaccgattataacaagagctgctatgaataggaacatatgccattatccacgacatgacttatgactc

SEQ ID NO: 212930 - DNA, 365 bp, Glycine max
tctagcttcttaaggaagtcttctcaagaaagcttctccaggaagctacctatcctataaatagaagcatgtggtacacttgttgtaactatgatgaatgagagtcttgtgagacacaactcaaagatcaacttctctccctttttctttcttcaatttagtgctcccccctttcatcttctctcccttgttcttttcctccattgaagcatcctttccaagcttcttatccacggctcatcttggtggtgaagctccttcttccatggcttattccctaatggatggcgtctctctcacctcttctactgtggcttctgctacatctccatggcggaaaatcaccattaaaggacctcattgaa

SEQ ID NO: 212931 - DNA, 589 bp, Glycine max
  unsure (1)..(589): unsure at all n locations
cgcatactgcctgtgcgtntntcacnctatntgatanactcgttntcacttttanaantaaannnctaacccactaacaaacagatggannttganattgatgtcattagctgacactatacaatactcaagactggctaatcaacctgacgttgatacatacagaaatcaactctctaatttgatgtaccaccgatacatcacccatgctgtaatggaaaatacttattcactgacacaacaacgctaagtctggaagaagttgaaacgacgtactcaagttatatacacacaagcgcagccgcatacctcgactaacaagtggaagaatgcgttgaaaaatatccatatcctatccttccacaacaatgtctttaatggtatgaccacttcttctggtcaacatatccttccaaagcccgttagagagcatttgccgaatgcttctcaatagaaatggtatctacagttctcgagaacccagagacaaccgaaagaattctttaatttcatgaggtcacaacgatatgttccccctggctttgagtgagaaaccctctcttcttgttatgtacaccccgcgaccgcg

SEQ ID NO: 212932 - DNA, 417 bp, Glycine max
  unsure (1)..(417): unsure at all n locations
tagcttcaccataaaaaatggtgtcatccgctttctgttcgatgctgatcggcacataattagcaccaaccagatagcctttgaatagattattctcctcagccctgctcataacccaatcaaaccttctgcgagagataaacaagaggcgactaaggatccccttggcgaatgcccttttgagggataaaatcagaattcggacttcattcccaaaacagaaatagaggcggatatgacacatcctttcatccacttaacccagtgcggactataacctgttctccccagcatataaaacanaatagctccagataccgaatcatatgccttttcaaagtcaaccttgaacactangcatgatcgattgcttctcttatcggcatcaataaccctatttgctatgactacactatg

SEQ ID NO: 212933 - DNA, 308 bp, Glycine max
agggccctctaggcctaagtcatgttatggcatttattctaatactcgcaagctgtccgcattcaacaaatggtcatcatacatacacagactgctatctagaatccatttatacaaacttaagcacaaataccattgaggcattacaccgagcacttggtggacgcactattgggtaccaacaacacaggaatgggggaaaagtggcttgccccatcatcttagaacacgatctatgcctaaagccattccctcacacccctcatattatagaaacaaagcataaatttgccccaaattgtctcacg

SEQ ID NO: 212934 - DNA, 275 bp, Glycine max
  unsure (1)..(275): unsure at all n locations
agctntagccttaggttgttcaccatgttgctccccctatctctaacaatctccccttttttggctttgatgatgccaaacatgaattcaacattgagtgcatttgaagagtcttgagattggattggagaacttgatcacttagtcttatcctcaaaaagtcttaacacttaggaagaagataattcatcatcattatcatatatgccaatatatatatatatatatatatcaattcatcatcatgtatatcaatcaagaattcagtcaatatc

SEQ ID NO: 212935 - DNA, 444 bp, Glycine max
  unsure (1)..(444): unsure at all n locations
tctcaggaggtgaacttagttatgagaggggtgtgtgtagctaagctctagcttcttaaggaagttttctcaagaaagcttctcaaggaagctacctagtctataaatagaagcatgtgtaacacttgttgtaactttgatgaatgagagtcttgtgagacacaactcaaagttcaacttctctccctttttcttccttcaatttcgtgctcccccctctctctttctctccctttttcttttcctccattgaagcatcctctccaagcttcttatccaaggctcatcttggtggtgaagctccttcttccatggcttattccctagtggatggcgtctcctctcacctcttctcctttgtcttctgctacatctccatggtggaaaatcaccattaaaggacctcanttgagctcanagatccagcctccatagaagccccac

SEQ ID NO: 212936 - DNA, 362 bp, Glycine max
acctgccgcatgcaagctagatttgcgagttgatgttagtcttactttcactttggttattactcatttcattcaaggaaacctccaaagaataacgtcagattgattctttttgattattttattcaaagatattttgattattttattattatttcgctttttttggtttaaccgaggttacaatgtaaatgatcggttagattttgctttaacagtgattaaacgagattacaacgcacatgatcgattgacattcattttatcatttattacgcgagataacggcttatacgatcggctaaagcttggtaaaaacggaagaagatataaccgaacatgaacgagatgaagaccaaagc

SEQ ID NO: 212937 - DNA, 521 bp, Glycine max
  unsure (1)..(521): unsure at all n locations
tttccatttatcattttcacagtagttaatcaacnacaaagtggttgaatcgatctcatccgaacataaactaacttaggtggcccgtggcaaattaaagggaactgtttattcttaatcgaggaaaggccgtatcgcacttcagaataacggtaattcatactatacaatcggatcgccatttatagagccatgatacgccatatttaggcatgtatgctcgatgaccgcttaatcgagtaattgttgtacaaccattgtgtaagacaacaataggatgggggcaaagaggctcgatgcaacgactgataacagaatctaagtatatatgaagatcctgccacctctctattaaagaagcatacactaatttgtctcaaattgctgcgggagtggccagtcatagaccatcatagataaaagctcatgggaattataaaccaacggatagcgttactgttggagtgacaaaaactaaaagggatcttatagaatatgggggctagggcaaatatcaaaac

SEQ ID NO: 212938 - DNA, 472 bp, Glycine max
  unsure (1)..(472): unsure at all n locations
agacatctgaggcatgcaagcgttgccaaaatagcttacatcagctctgaaaaatcatttnttgaagaggataagtcataagtgactggctaatcagcttcacagatatacatgtatatataacaagtagtaacaatgtgctttacctggactttatataatgaaacaacttccacaacaacaccaatggacaaaccaagttcaactacaacaaactaattcagcttcacctggagttgatataatgagtaatggctttagaagaactcaaagccaaaccaagttcaagtacaacaaattaattaatctttttctcaaccaaagtatgtcaaactacttgttggatattaaaagtgttagttattcatgtgacaggcaaagagagttgttagacaataattcttgtttaaaactgtcaatgaagtattgcggcattaatttgatacacactgatcaataacaatcgatacat

SEQ ID NO: 212939 - DNA, 572 bp, Glycine max
  unsure (1)..(572): unsure at all n locations
atacttccacgttcntccnacctntaatctaatcgtaataactntacttcgaacanatncaaaaaaacacgagatgaattgatgaccttcagacaccggcactatnaacatgaagctgatgctgcgacagatggagacaatcaagtgtatgatgtgatttcacaccatcatgcggcacagacacggcatgcacatctgaattcgatcgtcttggccttgacgagctgaataggcgagaaagtccagcccgcctcaagatcatagataatgggtgtgatgttaccttatatcatgatacgagcgctgacagactgaaagatgggaggccgacttttgttgtgactacttaaacttcctagagaaaagcactgatcaattgcatagtacgtggaaagaaagtagaatctcttccatcgaaccatcacatgagtgatcgcatcccaagcaataacacccatatagggaacggaactccaaactttagtcacatcctctcgggcatgactcatggacggaaaacagtttcagtgcacagttggatagcgtaatgaatgaagcgaggacaaacctcc

SEQ ID NO: 212940 - DNA, 537 bp, Glycine max
tactactgaatgtatcaattattcattatatttatgattctatacagcggatgaatggtcatccatccgacttaattataacttaacttgaagagatgcactgactaaagggaggagttaccatccatgtgtcatcgattacacattgtcagaatagaattccaatatgtaagactcgtgtatatttcagctgtggtaactgagacaacttcatggaatgggatacatgccttacacaacttatagataaacttttatcagctgtttttgcaagagatttggcgcactggcaatctgattacatcctctgttaacagatcactcgatggagaatcctctgcacacatattataccttgcatatattggcggagactcttgttgttccacgtggaattccctccgtgaagcctagacactctcttgaagacgtttcttgtatgctacaggatcctcggcggtgaattaacacttaagacgagctcgatgatcttcgaataaacttcgtacactcatgaccacctcgcatgctccatcg

SEQ ID NO: 212941 - DNA, 613 bp, Glycine max
  unsure (1)..(613): unsure at all n locations
ncacttcgccatctgantgtacacantactctatagatttttaaantaaatatataanntcntctacacacgcgcgagagaatgagatcgatagcctngcnaatacgtgacactatagaatacacacgctagangatttgtatacgaatatcaacacactactgcttatcttttatcacactagggcagtagattacacaaatgtaacactctaatatcgctaaatcgagtgacgctgaagtactttctntgtcttgtacgcggagggcatagactatctaactcaaaagtcaactcgactgtactgacgaaccacatattatgcaaacgtccatctaaagccgttttatgatacagctaaggccactgataatactgccacatcatctcaaagtccaatactggagaagcaacccactcgaaatacatacgagctaatattcagtcgccaatccgtatggcgcattcatttgtaacacgctctcttaacactaaaaatctttaaagctggacaattgaatgacaaggatctcatctcagtaaaaatgatacgaaacacatgagccaattgcataaagtataaaagctcatgaaacctgcttaatatcgaatg

SEQ ID NO: 212942 - DNA, 350 bp, Glycine max
tcacctgccgcatgcaagcttcccttatcgatattgccgtatgcaatacttaacatcagtataaacaatagatgtcagtggatcttaggtattccacctttccatcaagcattaatgccttttttggagcacatgcattaatatctgattaacatgtgttcatgctatttgtagaaaattgtatatcattgtacattgtatcaatatttttctcaagattctctagatacttttctcaagacatcacgattgacaagtcacaagtatacacaatttataaataaaatggtgaaaggcatcggaggaaaccgaaaaagttacctaatagatggacattttatacagtcttc

SEQ ID NO: 212943 - DNA, 460 bp, Glycine max
tgaacttgcctgctaagcgagagtgcgcactgagctcggattacactctgagcgagctgtccaattcttccaactcttcttcaattcttgcatcaattgtcctctaaagcacttgaattcttcttctttcgacttctgctaataaaaaattgcaaagatgataatttcttcgttatttcattcaaaacaatagtaaagtgaacaaattacaatcattattagtcaaaattgactatcaagttaactcagatttcgcagatatcaactcctccaaattaaaacatttgcttgttctcatgcaaaagacaagttctgagtgtgccaacacatgagataactatgaatccattaaaacatttgtcttgatcttgcgatggaagcatgaacgaatacacatggagatgaaaaatgttatcacataaaacttcatcaatgcaaaatacaacacttcattcctcac

SEQ ID NO: 212944 - DNA, 436 bp, Glycine max
  unsure (1)..(436): unsure at all n locations
agctattgttgaataaatcgactcccatattgatccgcactaccaatgataataaaataatcaaatttaattcttcagggtgacagcatataatgaccaatagcaaacaatatacctgaattcaacaacatgacccgcaatttcagagagctcaaaacactttgttttattggttttaaactcttccaacagagaagaagcaaaactttcatcaatgttcccagtatctgcatgccaaggtcccatgaccccggccaaattcctcattccagaagcaaaacgcatattcagttcattgtgcctaacaggacttgcagatccaactggngaagtggatacaacagagtttgccattggacttcctgggtaagacatcccgacaccatatgcaggatttccataataaccatgaggagtggagctgcctgattaccac

SEQ ID NO: 212945 - DNA, 438 bp, Glycine max
  unsure (1)..(438): unsure at all n locations
ntgcacgaagttacttggtaaaactatggcacatgttttcgggtagaattgagacttgtgaatgtaatgcaatttctgtaatgatattgataagtagggcctattagagtaggaaggccattatagcatgtttgcccgagtaccagtatattgagttattttctctaaccaacatgtattatgcattttgttaggatggacccaaagaggtccaaaagaaggatgtttaagtggctcaaagattataaaagataatgttttttatttataaattatagttctttatttaatttatattaaaataacatgatgttgagacttggataattattatccattgattaaatgtcccttagattatatatgtatattcatctttacctattatcatttattaatgaaatatcaagtttatcttattctctgtatagctgtatg

SEQ ID NO: 212946 - DNA, 457 bp, Glycine max
  unsure (1)..(457): unsure at all n locations
agcttactatcattggctcaagttgtgaataacctatgtgtgcttttctataagggtacttaggattcaatgctttgtgttgattttgaaagcctagcatctatttagacacataacaataatatgaatacaaattattaagataattaatactataatttagatgactaaccttaccttanattcgatgcattggcgtttagcaacaaaagctttccattgccccttggatatgaatggatacatttgtggaggatgctcatcaacactaccattttcatcataaacattattctttgttaagtaggttctaaaatttctacaaagtttatttgcttctttaagaacccatctttgacagctattatcaacaatgaatgttgtctacaaaattgatcttaattgatcaagtatgtttgtataagaatcatanaatatgtcaagtatgtatagtacc

SEQ ID NO: 212947 - DNA, 444 bp, Glycine max
  unsure (1)..(444): unsure at all n locations
tcatattctgaacaaggaagataactcaactgtntcatatgatcacaaactcattatagcaatcaaacaagacaaacaaataaaattctgttagtcatcatataaacaagttaaataaaagagaaatttcaaccaacttaattttaaaagataatggttttgatgttaccttttttcatgattcaagtgcttagatctttaaagatggaagtcagacttttgtttttcttacttaaacttcttgagagatgttctcatcactttcatagtccttggatagaaggtcgatctccttcttcgaaccatcagatgagtcattgccatcccaagcaatatacgccttcttggatcatctttctttataacttttcttctcattcttctcgggccatgactcatttgacggacagatcgtctttatgtgaccacgttgatacacttata

SEQ ID NO: 212948 - DNA, 417 bp, Glycine max
  unsure (1)..(417): unsure at all n locations
agcttatgctgcanatatttacaatagacctcctcaacctcagcagcaaaatcaaccacagcagagcaattatgacctttccagcaacagatacaaccctggatggaggaatcaccctaacctcagatggtccagccctctgcaacaacaacaaaagcctgctccttccttccaaaatgctgctggcccaagcagaccatacattcctccaccaatccaacaacagcaacaaccccagaaacagccaacagttgaggcccctccacaaccttccctcgaagaacttgtgaggcaaatgactatgcagaacatgcagtttcagcaagagaccagagcctccattcagagcttaaccaatcagatgggacaattagctacccaattgaatcaacaacagtcccagaattctgacaagct

SEQ ID NO: 212949 - DNA, 465 bp, Glycine max
  unsure (1)..(465): unsure at all n locations
ntannaattgaattanaatgttctgtaactattggtaatcaattaccatccatgtgtaatcgattacacattgtaagatttgaattcaaatttctaatgactgttgtaattattttcagctgcttgtaattgactacaatcctcatgtaatagattacatgccttcaaaaatattcaaaatcatttttaaaagcgttttaggaagtgttttggccactggtaatcgattacatcctctggtaatcgattactagagagtaaatctcttgtaaaaatattttagcttaaattcattggccaaacctcttgtcgtttcaacttggaattcccttcctaaatcactagagattttcttgatgatgtatcttgaatttcttggattcttgtcttgaattaaacttaagaagtgcatgatcctcttgcattaaacttgagaagcacatgatcacgtggcatcatcaaaac

SEQ ID NO: 212950 - DNA, 429 bp, Glycine max
  unsure (1)..(429): unsure at all n locations
agcttggttcgaggtacttacccgttgaagatcgaagaacgaatgaagaacgtcgaagaacggttgaaacctttgcgaaattcttcacggaanacgttacggaaacatttcggaagcgcctcggcttagattttcttcacggaaacaatttttctaagcaaattcgaaagagagagaagtgcctaaggggctgaacccttttccttctcacttcctcccctatttatagcaaaataggggagatggttgccgcccagctcggccaggcgagctcagctcgcccaggtgagccaggttgcttcctccagaagcaacagccttctggaggaatcttctggaaggcccaagtgggcttgggtgctatntgcacccccatttttactaagtacaccccctctgctttttttggtgattcttttttcgaaagta

SEQ ID NO: 212951 - DNA, 461 bp, Glycine max
  unsure (1)..(461): unsure at all n locations
tgttgatttcttcaggatgatcaacacaatattgcatttgctgcttcaattttggcctgcagatttcacaaataatacatttactatgcttatttggtaggtttaaattttcatttttttaagggaggtataattttttattaaaagtcattgtatttttttagaattttattttatgtgaggtcaacttaagttttttattttacacaaatgtaatttattttattgccatattatccaattcattaatttgatttagcaacacactgaatttctataagtgttaatatttagcaacatattctctagcacatcttttatatcacacattctattatagattaaaatttattacaaactaaaaaattaacagagaaataactcattaaataagaagtgagactaacaaaaattgtgattnntaataaattctaatcaatctttaataatatatttaaatg

SEQ ID NO: 212952 - DNA, 380 bp, Glycine max
  unsure (1)..(380): unsure at all n locations
agcttgccgccacggagtttttcgactatgctcttgtgtggnggaacaagctacaaaaggagagagcaagaaatgaagagccaatggttgatacatggacggagatganaaagatcatgaggaagcggtatgtgccggctagttactcaagggacttgaaattcaagctccaaaaactaacccaaggcaacaagggggttgaggagtatttcaaggaaatggatgtgctcatgattcaagcaaatattgaagaagatgaggaggtaactatggctcgatttcttaatggtttgactaatgatatccgtgatattgttgagctgcangagtttgttgaaatggatgatttgcttcacaaagcaatccaagtggagcaacaa

SEQ ID NO: 212953 - DNA, 400 bp, Glycine max
tgaatcggacatccgtgtgaaaagttatgaccatttgaatttctcaagagcttccgtagttcaatttcgagcttctcgacatattatgcgcccgaatcggacatacgtgtgaaaagttatgaccatttgaatatctcgagagcttccgatgatgaatttcgagcgtatcgatatattatacgcctgaatcggacatccgtgtgaaaagttatgaccatttgaatgtctcaagagcttccattgatcaatttctagactctcgacatattatgcgcccgaatcggacattcgtgtgaaaagttatgaccatgtgaatttctcgagagctttcgttgtgcattatgagcggttctatattttatacgccacaatctgacattccagtgaaaaggtattaaca

SEQ ID NO: 212954 - DNA, 409 bp, Glycine max
  unsure (1)..(409): unsure at all n locations
agcttatggtaagatctgcgacctacccatggtagaggtctccacagaggccattgtctgcctcgcccaatattatgaccagccggtgaggtgcttcaccttaggggactttctattatcacccacggnggaagagtttgaagaaatcctgcgatgccctctgggaggaaggaaaccatacctcttctcgggattctatccctctttagctagaatttccaagatagtccaaatctcaacgcaggaattataccacagaaacgaagtcgaatatggtgtggttggagtaccaaggaaatgtttggaagtaaagcaagagtcttggcaggtaaaggcgaatgggccccgttcatggacatcctcgcacttatgatctttggaggggtcctctcttcacatgtggatgggt

SEQ ID NO: 212955 - DNA, 425 bp, Glycine max
tcgtcctcagatccctcttattggacaaaacttaaccagaaccgcattaagacataacatactagaaactacgtttctgtaccccgatgtttcatgaaaacacgataagctagccctgtcctatcacgttctaaggatcaaaccatttcccaatggtgagtgatcctaactaagcatgcagttacgtgatcaatgcaaaggcacactagaattaagtactgatagcacagtgaacacataaaacatcattagatagatataaaagtatttacatcaaggtccccatacgaagaaccaattgaggatttagctctccatagtcgggaagctttctttaccacgatgagaagagaagatgaacgattgaagaagttcaaattgtggcgatgtctccttcacctctaaaaccttacatctctcaaatc

SEQ ID NO: 212956 - DNA, 363 bp, Glycine max
  unsure (1)..(363): unsure at all n locations
agcttgtttaacccagatgaanacatagtgtttaacgtatatcaaactatatttatacgtgcttgcaaacttgatagatgctggatttttccactgtaagcttacttatccaaactttaattaataatttgaaggcaaaaaatagcgttgacttggacaactattgtgacataacgctgggagagcaagataagcatggtgctagacgaatgatgaaattggcattgctatgtgtggatgtgactagtagaagaccatcaatggcgcagattgtgcaagagttggagcacattcaaagagaaattgctccagtgtattctcaattcaacgaggagattggtgccgtgactctatggagtgagc

SEQ ID NO: 212957 - DNA, 435 bp, Glycine max
tctgcttgtgtgtgcatggatcatcaagtgtggctctgtataatatgcattctgcggactcccaacatagcaccattactgtgcataaaggatacaaatagaggttcatttgttggataattgcaaccaatgctatatgaaatcatcgcctaatacaagagccgtatctaccgcaatgagaacgttgcggtcatactaattacaatatgagacaacactatttgctttaatcaacgattatgaaaatgaatattttactaaccagagaacctctttttgataaaaattaaacccatgaacctaaacgcatcaataatacagcactgttatgtgatatgcctggatcacttgcttcatatttactcaccatgaattactttctataatgaagactagagaagcattccatcagcttcttatgctggactaaaatat

SEQ ID NO: 212958 - DNA, 465 bp, Glycine max
cacctgccgcatgcatgcttattgaaataaagctagaaagatcttataagaaagtcacaaaccacttctataaacccatgtaagcacttctaaatgccctccacatctgagattattgcagtgggattctgttcttcaaaaactctcttgatcctatctccagatgtattagaatctcctgcttgccttgctttataatgtcaaattcacacagctattaatgaattagtatctaaaatggtattattttctgcacacatgggcgttgaattgcattgatgtcacgcatgtaactttaaagggttttaatgagagaaccaacgtcatctccatttatagtactctaattttgtagcagcataagtgaatctttttgcattggaattgacactaccaatagagaacttcttcatctttatgaacactatacatctttcattgtctcttattctttaatggaattaa

SEQ ID NO: 212959 - DNA, 434 bp, Glycine max
  unsure (1)..(434): unsure at all n locations
ngggtgatgttgcgcgtactgatgggtaccatgaggtgtttgctggggtttgacccacgcgggtgttgaagagacggcatgggcatctccttccttcctttttgcccctgttgccccaattctttcggcattcacgtttgtggaggaaacgtaatcaaactttcctctcttcaatccaacctcgattctttccccggcaaacaccagatccgtaaagctggacggcatgtaacccactagcttctcatagtagaacactggcagagtgtctaccatcatggtgatcatctctctctcaaccatgggaggagctacttgtgccgccaaatacctccatcgctgtgcatattctttaaaggttacaccctctatctcgaacatattctgtagttgagtacggtcatgagccatatcagaatcgtactgatactatc

SEQ ID NO: 212960 - DNA, 335 bp, Glycine max
  unsure (1)..(335): unsure at all n locations
gagcttgagctaggatattgcgattagtgacgttgcggtgtacgactccctccccggataggtgcagaattctttcaagcattgtgcgactattttcccagaggctctntgagaagataggaaagctagaaactcccaggtctttattaacaaaactgtgccacggtggcagatttctgccttggtggataccatcaatagtgcactcaagggcaaggggatgctttgtcctccaggagtccgagattggtgcagagtattctcccttcttccctgcgggaacggtttatgttgaaggtagctgcttgggtccacacgtttgtcgggctttggcg

SEQ ID NO: 212961 - DNA, 452 bp, Glycine max
taggcttctcttttcaacctatatttgttgagtgggccaactcattgtgatctattctttacaagtagaaagaatagcaagccataacttattgagccatcctgtttgacatctctaattgtatcaatgatcttatcttacaatatattgttttctttttctattatactttttatactacaatataaaatttctcttaaagaatatagggtaaactatgtttttaaccactaaactttttcaaaatttgatttttagtacataaataaaagtttttttatactagaaaacttttttttatattctgaagcgtattttgtagaagtaaagatattttgatgttctgatgatgccaaaggaacgcgctttttgagttttattcaagacaagaatctaagatatccaagaaattcaagaaatatgatcaagataattcctagagtcttaggaag

SEQ ID NO: 212962 - DNA, 419 bp, Glycine max
  unsure (1)..(419): unsure at all n locations
ttacagtcacctgcggcatgcaagctagagatgaggaagtgtagaagggtgattcttcctgctnttattcgttgtctcacaaagtggtacctggagatatgtcgcggnggtcaggagaccttgnggacgtcaggtggggtgctattgcccaaaaccaagcttgaccaatcccgacccaacccgggcatagtcagttagtgagaacctgtgatgtacctaaacaggcgagctcctggcagtcaacagataaaaggaacaaagaccacaaagcatggaggcttgtgtggtggctggccagctgtgaatcttgtgtgatatatgggttatggcctctggtaatcgattaccaagggtgggtaatcgattacaaggcttaaaaatgaagacaagaggctaagatggtctttggtaatcgatta

SEQ ID NO: 212963 - DNA, 471 bp, Glycine max
  unsure (1)..(471): unsure at all n locations
ngaagtctgcgtagttctgtgaggacttcattcagaagagaagtggaatcacccctttgtggtggaggagatggggtaagctcgtaaggaataggcagaggcaagtcttgtttgtgaatccactgaccatcaacatcatttcggtaaccaaaagagctaaccacaccagccccaatagaaaaatatctcttaaccttcacatatggttcatcgtccaaaggaatattgaaatgatgaagaaaaagagtaacaaggtggggataaggtagaggtgcattggcccgtaatgccttatgcatccggtaccgaactaaatgggcccagtcaatctgacaaccagtttgaaaggcccacatcagaatcaaatactcctcagaggcttgagcatggtttgaagaccggtgaagcaaaatacgaacaatgatataatgcatgatgcgacaatcaaaagttaatgacccagcacgtaat

SEQ ID NO: 212964 - DNA, 575 bp, Glycine max
  unsure (1)..(575): unsure at all n locations
aatcaccacgtgaccgaacgaagaatctctnttccactctacctacccacaaagccnataggannnnnnnatgaaccctttgagacccgtgacaccagagacgactgcagcangcagcgtcttcatatttcgataagaaagggttgtattcgattatccttcatccttcttcctataatccgagactccttcatccttttatcttccctgattctcttttagacttcttattctctttttgttcttgtcaaaggacgtggtacgataaaaaactcgaacgaaactacttaacaaaaaaaagaaccacaagttaaatcgcaggaaattatcacaatgatccctgatatctaacaatgccaaaatcggcccaataatataactaaaaaacaacatgatacactcatgatgtgatataataaatgcgcactcatactaagaaatcttgacattttcacttagaatattagctccataccctcatctatacccgcatcctcaccatcatggacaactatgtatgggtggccaacaatggcttatcacaacatcagcaaagatcagagagatctttggcg

SEQ ID NO: 212965 - DNA, 458 bp, Glycine max
  unsure (1)..(458): unsure at all n locations
ngagaagttgcatcaacaagctgaccagataatgcataacattatcaatgagcatagagaggctaagtcaagtgccacaggagaccagggagaggaggaagttcttttagatgtgctcttgaagaaggagtttggcttaagtgatgaaagtatcaaggctgtgatctgggtaaggatagacattttccaccaattttattgcatgatagaaaaatggagaaaagtatgctttactgccttcacactttagtttcaaaaactattttgtattttctaaaatgattagtaatcattttgtcattcaaaatttaataggttttgcaaattgctttgaatataagtgtttaaaaagaaaagaaaaatataaacagttaaggacatattttctcatcctctttctgtaagtgctttattcaagtatctagaaggcaaacttttaaaaattagaaatgtgatat

SEQ ID NO: 212966 - DNA, 354 bp, Glycine max
agcttgaaattgaacaacggaagctctcgatttaatcgagtggtcataaattttcacacagatgtccgattcggggaaataatatatcgagacgcacgatattgaacaacggaagctctcgagaaatttgaatggtcattacatttcactcggatgttcgatccggcgacataatttatcgagacgctcgaaattgaacaaccgaagctcttgacaaattataatggtcgtaacttttcacgcgaatgttcgaattcgggacataactcatctagacgctcgaaattgaacaacggaagctctcgacaaatttgaatggtcataatgtttcacacggatgtccgatctcggaac

SEQ ID NO: 212967 - DNA, 220 bp, Glycine max
attcagaggaatacagtctatctcccttatcttagtgagagagaggctcctacatacttgagagatccacgcacactctgcctgtagcaaaggactttcacaacctttgagtgttgccctcgctggaaagagtgaccctttccttccaagcatctccacccttggtctttcataccacgattgcataacattcaccactgccctagattatctcgtgaaa

SEQ ID NO: 212968 - DNA, 252 bp, Glycine max
  unsure (1)..(252): unsure at all n locations
agcttctcaactaggtgggcttagttattataggggtgcgtgtagctaagctctagcttctcaaagaagttttctcaaagaagtttctcgaggaagttttctcaagaaagcttctcaaggaagctacctagtctataaatagaagcatgtgtaacactttttgtaactttgatgaatgagagtcttgtgagacacaactcanagttcaacttctctcctccttttcctccattcaaatagtgctcccccccc

SEQ ID NO: 212969 - DNA, 372 bp, Glycine max
aggaaacctctagacgaatcctcttattgaagcttctagagaaagctacatgacgctgcgctcgtataaacgctgcacagccttcgttaaccattggatcttttcgaaatttggtctgaaaattcacatgacagttgtccatgatctgaccgttgggatctttgagaagacgtttggagtgtgctagaagcctcttaatgaaccttttggaggaagcctcctaatgaagcttctagagagacctacgtgaagctacctcattataaacgcttcccagccttctttaacgcgtggatcttctccaaattgggtctgaaacttcacataacaattgtacatgatctgaccgttgggatctatgagaagatgtct

SEQ ID NO: 212970 - DNA, 443 bp, Glycine max
  unsure (1)..(443): unsure at all n locations
agcttgaggttattccacaagtaaatgagtagttggatgagggtttggttcgtaagggcttaactccttgtgctttgttggtatccaaaataggtattatgaggcactgaatccctatgataggtggtatgatgaatgtgttgagtggtgcaaccctcttttgtaaaatcactcatgcatccaacatcttcatgattcacatacatagggactcattangtaggtttgttcttatttttagtttcaatacaaacttaggtgctcatgcggaacaccttangtttgttgtgctttttggtaggaataatcaacatgaaaatacagaaaaaaaaatgtatgttttatcgcattactttccttaatttttaaatagggatcatggggttaccacaaaccctaagagaataaaggtcagtcctgagtgggccattccaccaagtata

SEQ ID NO: 212971 - DNA, 414 bp, Glycine max
  unsure (1)..(414): unsure at all n locations
ntgatcatgtgttcaatttaatatattggtaaaactacaatattgtttctatatagctgttttcactccagaatgtttctgattcttgatctttctcatgtaatcattcttcgtaaacgtgtttcattggagaacagacgcacatgacaacaaagaacctttaagaaccactaaaattcaatgtttcacgatggagtggctctaaacactacctgcaccctctcatttctctccctccgcactctacttcctcgtccatcggctccacatgcaacccaccatcgcggatgctttcatcttcgccgttgagctctaaactcagtgctccgagttggatcactcactcaacgagttgactcaacaacttaaagtgggtctcatcacatacagtctacttctttgacaaaattcatg

SEQ ID NO: 212972 - DNA, 451 bp, Glycine max
  unsure (1)..(451): unsure at all n locations
agctnttactctcttgtgcttgtgcctaccgttgtgcttgtgtgcattntttctgcgtgtgctttgagtctattctcctgcattcttgctctcatcttacatctttcacctcaatccaagtaagctttttatgttattttaattttccttcagaagcttaaaccttagggtagacaatttatangcttttagtttcatttatggttagcttttgtgttttcagtttttagggtttacaatgtagggtttagttaggtcttagagcctaatagaggtaatgcctataagaggcgtgaagaccccccatttttgctggaaatcacgatgaaccgcgctagtgcgccagctgcgcttagccaattcatcgcaactgtcannattttatatttccagatgatcgcactaagcccgaccatgtcgcactaagcgcgttcagccttctgatgagttc

SEQ ID NO: 212973 - DNA, 119 bp, Glycine max
tgcactatcacacatgtgatcattagcaacatatattatatagttcctaagatctttcgacaacatttataaaatgttgccaaatatgaataaatgttactaatatgtttttgcaacat

SEQ ID NO: 212974 - DNA, 451 bp, Glycine max
  unsure (1)..(451): unsure at all n locations
agcttcgacaccctaatgttgttcaatttcttggagctgttactgacagaaagcctcttatgttaattactgagtatctgagaggagtatgtgaatgcatataactagacacctaggttctgatgctctgaacttatgcaatcttatgctntaagattaaactctactaaatctctatttcatgcccatttttagggtgatcttcataagtacctcaaggacaaaggtgcacttagntccttcaacagccatcaatttggcttggatattgctaggtatggtgtgtcataccttaagtttcctttatntttctttntaaaatttttataaagagaacaaacagaaaaccacanaacangagaatcattaacccatagatctcttcaacctctccatanatctggtatatanatataaaccactcctaaataattctcacacgtcagttact

SEQ ID NO: 212975 - DNA, 411 bp, Glycine max
tgtcctccccgccctctcccaacactccattgttgcttccattctcccccaaagttgctggtatgtgattctattaattatttcaaatttatttattctttataaatcgttatattttatttgttgcatgctttttttttgcaggtggtcatcttgtgtacaaattgctgttagtttaattcgcttattattttagttattttttattaattatataacaaagctgttatttgtgctttaatttttagaatataaatttaattatgattcatagtaaatattactgtgataatgttattatgcgtatttaaaaaacgaaggcttattattattatatatgaaaaatatatatatacgtgtacttatattattttctgaaatatgagaaattgacgaaaataatatatatat

SEQ ID NO: 212976 - DNA, 448 bp, Glycine max
  unsure (1)..(448): unsure at all n locations
agctngaaggggtgtaacccatcattctctatagtagaacagccggaacgngtctactatcattattatcatctccctctccatcattggagatgctacttgagctgctaggtcccttcacctctgggcatattccttgaacaactcatgctccttcttgcacatgttttgcaattgcactctatctagagccatgtccgagttgtattgatactgcctgatgaaggcagccattaagtcttgttaagaatggactcgggaaggttccagaatagtataccaggtgacgactgccccaataagagtttcctggaagaaatgcatcaacaatttttcatttttcgagtatgcccccattntccctactgtacatttcaggtgattcttggggcatgtagtccccttgacttatcaanatctgcaccttgaacttcggagggataacgat

SEQ ID NO: 212977 - DNA, 438 bp, Glycine max
atatatcgcaccatcactctattcacttattctagaataatatgagtacctattctgagatgtaagaagtcgaaattatgaatcacaaattgattcctaaactaaacttaaggaagtacatatatatcatatatgaaattgcaacctaaaacaaatggatgcgattgcgtcaataaataaatatatttatattacaaatcaagatcgtatctattattgaaaacatatatgcatatatgatatatcactacttttatttcaatgcacctacaaggaattctagcacgagagatttggccatgagaacttgtaccctgtaattcaaatcaaagcacatattccatcgatagaagatttttgcaaatctactaaaacaattgcgcattctaattctcagcggattgcgtctatgtataggacccatcttcacgaaaatca

SEQ ID NO: 212978 - DNA, 227 bp, Glycine max
aacaacaccagcatcgagcacatgaccgagcggcaaaccccctgaaactgtcatttgatatttaatagagtaacggctctatgtgaaaggctagagggaaaagacactaacgactctttgaactaaacacatttgcacccaacatacgagtcttattcttttaccctaaaatggcctctgttcatgagagagctagactcctaagaactaacaatcgttcttctatc

SEQ ID NO: 212979 - DNA, 551 bp, Glycine max
  unsure (1)..(551): unsure at all n locations
tctcatgatctattntctaaantttttctcgtattcttatatttccacananacctccctcagcagctagncatganatcgtgttgatggcgtatcttaactactcatgctttagtcttcaagcttgagcgtcatcgaagtgtatgagaatgtatctgtcatactgttgaaaggtagagaccataccgaagagtcaagacttagcataagacactgtcgagcaacttgatatatcatgggccttagtcgtcgagcacgtcaaacgtttgcacgattgaaaggcctagagcttccgtgttctgcgaatgaagtgcctaaagtgtgaggtgcatgcaaacgacattccacagcgaggatagattctatgaatttgtgatcacttaccaatggacataacgaggtttaataattactgagtccacctggcgatgatcaagacgaatagttgcatgatgggatccgaccaacatacttgaggccagatcagggataaagcttggaaataaatgcaacaagggatggcctatggtggtagacgatgcccacgagcc

SEQ ID NO: 212980 - DNA, 366 bp, Glycine max
  unsure (1)..(366): unsure at all n locations
agcttgtgcctcttcacatctgaaatatgaatgtagcatatagatccaaagacccttaggtgttntgctgatggcttcttccccgtccaagcttcaattggagtcttgtcttttacagacttagttggacatctgttgagtatgtaaacagcagtgtagactgcttcagcccagaatgtcttaggtagtcccttctccttgagcatcgatctagccatttccataattttgaaattctttctctcggacactccattntgttgaggagaatatgcgactgtaagttgtcgctcaatgccttcatcctcacaaaatctttcaaactcgcgagaggtgtactctntgccgcgatcacttcttagtact

SEQ ID NO: 212981 - DNA, 394 bp, Glycine max
tgcgggagtttgtgatagcgattatgacgttgatgttgatgatagaaaagcactaccggatttgtattgtttatgggcgaatgagttattacatggagatctaagaagcaaggcattgtgacactttctacttgtgaagccaagaatgtagctgcaacttcttgcacatgtcatgccatttggctaataagaatgttggaggaacttcagttgttgcataaggaaagcacaaagatctatgttgataatagatctgcataagagcttgccaagaatccggtgttccatgaacgaagtaagcatatagatacaaggcgatcattcattagagagtgcaataccacgacagaacgagaactgacttatgtgaaaactcacgatcaagttgcggata

SEQ ID NO: 212982 - DNA, 199 bp, Glycine max
tgtgataagctagaaccttatctatccacacgcctatgataacttaattaacctccctatagataattacggatgaatacaacgatacatagaatctatcatccggcatacctactattaatatatagatatatatatcagggtgttactactctctcaccctcttagaaaatatgcctctaaggataccttactcaga

SEQ ID NO: 212983 - DNA, 359 bp, Glycine max
ttttcatctatgatccctaccctagaaatgggctacgcttctttctttcctttctaaggtgacctttctcttgtcggcatgtgtaggcttgtaacctagaccgaagcttccacaattttcaacaacctccccaagctttctgtgccattaccattctgagctcatacccatcgctcaacataacttgggccaccatcaaggaggcaccagatagacgcggttgcagcggaggagcctccacataagcattgctcacaatttctaatgcttgaaaagatgtttccaatgactctgtcacagcttgcacataaggcgtagaagatggacaactcactagtatatcttcttcccctgacact

SEQ ID NO: 212984 - DNA, 461 bp, Glycine max
tgtaatcgattacacacatactgtaatcgattaccagaggatgtttttataagacattctcaacagtcacatctttgtatctggttcttaagtggccatcataggcttatatatatgtgactagagacacgaatttgaaaaaagtttttcagaacaaaaaaggtcttatcctcttaaaaagcaaaatcgttttatcctcttacaaattccttgtccaaaacacttgtgattcaataaggaattatttgagtgctcaaattgttcaatttatctctttcaagagagatgtcttcttctcttcttcttcattctgaaaagggattaagagaccgatggtctcttgttgtgaaaggattctaaacacaaaggaaggattgtccttgcgtgtttagaatttgtaaaaggactttacaagataatggaactctcaagcgggtgcttgtggactggacgtacgcaca

SEQ ID NO: 212985 - DNA, 227 bp, Glycine max
  unsure (1)..(227): unsure at all n locations
tactttgtcttcatttaactgactatgcgcttggcggtcacgctcaacatagtactttcgacacctactatacgttgatttcaccaatgctgttatgggaatgttgtgacaatcctttaaaaccttattgatacattctgacaggatcgntgatatgaggccatatcgacgtgcgtctctatcgcaagccatcgaccatttatcctttgagatgcgagcaatccata

SEQ ID NO: 212986 - DNA, 446 bp, Glycine max
  unsure (1)..(446): unsure at all n locations
ggttcttgattntntcgaagttctttaacaaccttanaacattatacttgtccttcatttaattgtctttgggcttgtcaaccacgatcaacaaagtactttcgacacctactatatgttgatttcaccaaggctgttatcggtatgttgcgacaatccttcaataccttatttacacatttggacaggttggttgtcatgtgaccatatctacgtccttcttcatcataagtcatagtccatttttcctttgaaatgcgatcaatccatgttgctatggctagactcaattgacgaaatttttctaaattttgatcaaatatatgcttgcaaggagtgtagcctgcataaaattagttagcaataacaattttaagtatatatgaaacttacattaacttcatattataaattaaatcttacccaattgtttcaacatttctttt

SEQ ID NO: 212987 - DNA, 395 bp, Glycine max
  unsure (1)..(395): unsure at all n locations
atcctcagagacacctgaggcatgcaagcttcaacattcaaattcgagcgtctcgttatattatattatctagtcagacatccgagaaaaaagttattgacgtttgaatttgctcagagcttcaacattcaatttcgagcgtgtcgctatattacgggactatatcagacatccgagtaaaaagatattgtcgtttgaatttgctcagagcttcaacattcaatttcgagcgtgtcgatatattacgggactcaatcagacatccgagtaaaatgttattgtcgnttgaacttgctcagagcttcaacattcaagttcgagcgtctcgtatattatacgactcaatcacacatccgagtaaaaagttattgtcatttgaatttgctctgagcttc

SEQ ID NO: 212988 - DNA, 468 bp, Glycine max
  unsure (1)..(468): unsure at all n locations
ntaggcaaattcaaacgacaataactttttactcggatgtctaattgagtcccgtaatatatcgagacgctcgaaattgaatgttgaacctatgagccaattcaaacgacaataactttttactcggatgtctgattgagtcccataatatatcgagacgctcgaaattgaatgttgaacctctgagccaattcaaacgacaataactttttactcggatgtccgattcagtggtgtaatatatcgggacgctcgaaattgaatgttgaacttctgagccaattcaaacgacaataactttttactcggatgtatgattgagtcccgaaatatatcgagacgctcgaaattgaatgttgaacctctgagccaattcaaacgacaataactctttactcggatgtccgattcattgacgtaatatatcgcgacgctcgaagatgaatgtcgaacctatgagccaattca

SEQ ID NO: 212989 - DNA, 439 bp, Glycine max
  unsure (1)..(439): unsure at all n locations
acccgggattcttagagtcacctgccgcatgcaagcttatggtaatcangagttagttcctctctcttaaggaaaaactcaacattattntcattggatttacataatgaanaattgtcctaatgataaggttgatcacttcaaggctcatctagttactaatggtttcactcacgtttatggtgatagcttttcacttgtcaccaagatgccatttgtttgtctcttccttgccatgactcccatgtgttattgggctctatttaaactagacgttaanaatgtctttctacacaacgaacatggagagaaaatttatatggaacacctcattgtttttaggaggagtctaatttgggttataaacttcattgctctctttatgggttaaagcagtcttcctgtgcttggttccaagggttagtattggtattcaact

SEQ ID NO: 212990 - DNA, 472 bp, Glycine max
  unsure (1)..(472): unsure at all n locations
tctcagcggcttcagatgcaacataaatatgccaatgacacttataaattnttcaaaaaatatatcgaaagtagatattatgcaagcctcaagagggaggtatatgttgagaggaaagtgaatctcacggaaggtgaattcactgtgattcaagagatctttgaggataaagggtggactaaattgatggaaatagttatctataatgaaccccttgtcagagagttttatgctaatgtcatctttctagatggtttcaatgaaaggaagtcttgtgtcacaggcataattgttaaatatgactaagcggccatcaataatctttttggctccatattgagaatagggaaaagccaacaaacagactatgaggagtgtataaacaaagagaaaagaatatgattggtgaaaaagttttgtgcattcccaataggcatatagagacaaactctaaaggaaaacctatgagagt

SEQ ID NO: 212991 - DNA, 428 bp, Glycine max
  unsure (1)..(428): unsure at all n locations
agcttaacaaacttagaaatcttgtggtcatttattccgaaatatagggggagtaaacgcacattnttatctatatacaattgtttgttgcttgcttgaatcttgatttcacgtattgtattgtcatcatcaaaaagggggagattgtagatgcaattgcctttggtgttttgatgatgatcatgatgatgaaattgatgcaaatgggcttttcaagattaaattcaagacaatacttcaagattacaagtcacaacatcaagatggtcactagtaaattaggaagggaattcctaattgaattagcaaaaggttaggccaagtaatgtaaattaagaagtgtatttcagaggttntactctctggtaatcgattaccagaggatgtaatcgattaccagtggccaaatatattntataacagctact

SEQ ID NO: 212992 - DNA, 300 bp, Glycine max
cacatactgtgatccatcaccataggattctatcaggaaacattctccacagtcagatcgatatatctggctgttatgtggccatcaaaggcttatatatatgtgactagagacacgagcttgcaataagctatacagaacagaataggtcttatcctgttaaaaagcgatgtcgttctattctcttacgaattccttgcccaaaacacttgagattcagtaaggagttatatgagcgctcaccattgacatggtatctctttcaagagagaagtcgtcatctcttcttcttcactctga

SEQ ID NO: 212993 - DNA, 363 bp, Glycine max
  unsure (1)..(363): unsure at all n locations
agctntggccaaaccccagcagcagttgttttcttagagacttgtcttagcaccttgtctttgagactgaggataattacactgtgtgccttttgcagtagtgctttcttatccccatcagccatcatcttttcaagtttggcttctccatcaagtgcttccaccaggccctgctgaacaagaagagctctcatcttcaatcgccataacccanaatcattntgccctgtgaatttttcaacctcatacttggccgagtccatttcttgaatcgaactcaaaaatcgctccacgctcaccgcaccaatttggtgtgccaagatcagaatttagttcacaaaagagtgagtttcttgtatgaac

SEQ ID NO: 212994 - DNA, 417 bp, Glycine max
acacgtactgttgtctgataccaaagtactctttctgataacaggctcaacagacacatcttgttatgtggatcttatgtggccgtctaaggcttatatatatgtgactatggacacgatatcctaaggtgttattcagagcatgagatgtcttatcctgttaaagagcgaagctgtgatatcctcttacatatgccttgatcatgacacttgtgattaaataagggattatttgagtgctcgaattgtccaatatatctctttcaagagagattacttcttctcttcttcttcattctgaaccgggattaacagacccgcgttctattgctgagaaaggatgttaagcacaaaagaatgattgcccttgtgtgtatatgattagtcagagggatctacatgatagtggagctctca

SEQ ID NO: 212995 - DNA, 358 bp, Glycine max
  unsure (1)..(358): unsure at all n locations
agccttctacttattaattatcataatttagtttanaaataaccaagtagagaataatatataaattatatatttttatggaattatttntgtgaaataaatttataagttatagattcaaatgtatgtctcttttcgtatattaaaaaaataatatctatctatactattataattcanaattaatttgattattcaatatacaaattcaataagtattntatcaattatttgaactatcaattaagtaaactaacacatantttgaaattactaatattattatttttctattntactcctannatttaaactcantttttttatggtcttcgtattaatcctataatatagaatc

SEQ ID NO: 212996 - DNA, 492 bp, Glycine max
  unsure (1)..(492): unsure at all n locations
gcattacggacctatgaaactcagcttagcagcttattgccataattcacaaacctagattccaaataacagcaactcanagtagttattagatagcatggaatatatttcatttttataaaaaataaatactatttaagagaaagttaaggatacaaatataagaggataagatatcacccctaacagagcaaaacaaatgtagttatttgatttagtacataattacatcactgtaagtgatgtatattcacttacgttttagcagcctgcctgcccttaccaattgcagcaccgaaatatctctagaacaattaccaaatgaacaaatcattacaaaaataccacatggaacttccaaaaaggaatatcaattgcatgtgtaattataaagaagtctggaagttgctatcaaatgacaaaaagtagctcacatagganacaccggaaggttcaaccatgtacaactgtggtccatccctgtcataacct

SEQ ID NO: 212997 - DNA, 341 bp, Glycine max
ctcgaaatggaaagttgaacctatgagccaattcaaacgacaataacttattactcggatgactgatagactcccataatatatagagactctctaaattgaatgctgaacctctgagccaattcaaacgacatataactatctactcggatgttcgattcacaggggtaatatatcgtgacgctctcatatgaatgttgatcttatgagccaattcaaacgaccataactatatactcggatgtatgattgatccccgaaatatatagtgacgctcgaaatcgaatgatgaacctctgagccaaatgaaacgacagtcacttttgactcggatgatcgat

SEQ ID NO: 212998 - DNA, 437 bp, Glycine max
  unsure (1)..(437): unsure at all n locations
agcttgactgacaactggagtcacatataggtacaaagcaacaatgatgttaaaacattgaggaactctgtttcacctaggaatgaccttacctcatatttagtaagaaaattatgtgcaaaaaattcatgcattatttaaggctcttaacaatccccaacccaccatgtttgagatattattatttgacagttattgactgtgcttgtacaaatttcaaagccacacaacagattttacaacatggctagttttggttctgaaccaccacccatcacgtagtctagcaattgacatataagacaactttggtagaatgtgcaaaagttacagcaataagcataataattaanaatgttaatagacaacaatttaccgaaacaccagcaggagggtcacgataaccagttagaagtgcatacacatagttctgacca

SEQ ID NO: 212999 - DNA, 455 bp, Glycine max
gagtttctgatgaattcttttaccactgattgatgtctatgggatctaagtttcagaaagacccattctccaacttcaaaacacaagtccctcctcttcttgttagcataccttgtcatttgttcctgagctatgagcaagacgtgagttgagttgaatcaaagcctcatctctttcactcgactccaatgccgcagcagcaaccttagtctcattatacagaaatctcaacaatgcaagaggttgcctcccatataccacctccaacggagtcatcccaatagacacatgataggaagtgttgtgccaaactcaggccaagggacccacaatgaccaagtctatggatgatcataagcagagcaccgtagataactatccagacacctggctaccacctgcgtttgaccatctgtgtccggatgatatgctgaactcattgtcagcttattacc

SEQ ID NO: 213000 - DNA, 446 bp, Glycine max
  unsure (1)..(446): unsure at all n locations
agctntatacaacanatatactaagactcattcttatatgcaatgtggtaccatgttagtgaaaaacctcgttggactcctaggagtacatgataagacagaccacacactagtaagtcaggtcactctcactaggtaaaatcatagggagaccagtcagggtcactctattttgtgagaacactccaaccatatgagatcagcataggcttcaaggaacattcaaaccgagtgtatttagccccaaggcctacactccaaagagtccgtcatgggcctctccttctgggtcaggtccaacccagaaaaattttagcacgcagactctatctatgaactgtacaaaacacacgactcctcaatggttctcaaaaataatttaactcgtcgcgcctcanagtgattaaactcatcgagttcccacagtggatcccatcataatattc

SEQ ID NO: 213001 - DNA, 412 bp, Glycine max
  unsure (1)..(412): unsure at all n locations
ntcttgaganaacttccttgagaagcttctttgagaaaacttccttgagaagctagagcttagctacacacacccctctcataactaagctcacctccttgagaagcttccttgagaagattcctaaagaagctagagcttagctacacacacctctctaatagctaagctcaccttcttgagatgagaagctagatcttagctacacactccctataatagctaagctcacccccatgacaaaatacatgaaaatacaaaaaagtccctactacaaaaactactcaaaatgcctcaaaatacaaggctaaaaccctatactgctagaatggccaaaatacaaggctcaaacgaaggaaaaacctattctaataattacaaagaataacaggctcatacttagcccatgggc

SEQ ID NO: 213002 - DNA, 387 bp, Glycine max
  unsure (1)..(387): unsure at all n locations
agcttgtaccagttgcaagcactcagactccaccacaaacgaggtaaaggagaggtcacgagccatttggatcacccatatcttanaagatagagcatcttataactttntatattttatttcccttccatccttaaaatatgtaggggtaaacatgctagtttgtttattcatggacatatgcataaaaatatagtgtagaacaagttagccaaacctctatcattaatcaagcacaagacanttattatttaacattgaatntatactatagtgaattgttaaatcanatgacaaatgagtccaccaaatattggttttcacgcaatactagttgtacactttgttatatattatctgnaaatattatgtaatcgagtttttctc

SEQ ID NO: 213003 - DNA, 385 bp, Glycine max
  unsure (1)..(385): unsure at all n locations
agaaggaagaaagaccactcttggagtgggttcagacgccaaggaaagagnaataaggaggctcaaagcccaagtccagcatttggatctggattaagacatagagtcaaagatgatagaaaaacaaaaatctatgttagatccttactcctttttagcccctccttctcctactttctattctccatcccaaaatcctctagattacttttttcccaaagctagtccatcatggtctttacctatagcttctgcttataagaaaaaaacagaaccaccaaagacaaaacctaccaaattaaatatctctttccaagagtcagttgaatctcccacaaaattagaaaacactctaaagaaagatacccatgactnttaagattct

SEQ ID NO: 213004 - DNA, 186 bp, Glycine max
aagacagcttagcgtctaactacagggtccatgcgcacataacacatagttatgctcagcaaccaatcgcttaaagtgactcatgactgtctacaacaaatacgcacaagcctgtctctcattgcagaactggtgaatgtattaatcattttggcgacatggaaagcctcacaaacggtatgttct

SEQ ID NO: 213005 - DNA, 431 bp, Glycine max
  unsure (1)..(431): unsure at all n locations
tgaggcatgcaagcttctctttggcctaacttctcttttcgtgtccattgttttaatgctagtttctttntgcgctgctcatttctttgtgcttaaggataagtacaagaacatcttattccccatttatggtgccacttgcttgcccgtgaccttctatgcagtgattcaatttccgttgtatgttgatctacttaaagctatttttaagaaggtgccacaacgcgccaaaagataagggttgccatttttggttcttcttactccatcctccttgatcaatntaaacagatcactagtttaattggaatgtttgtaccagactaatgtcttatctgtatttaattatgtctggaaaacagtataccaatttcatagtttggtggtggaatttgctcgcatttatatcatctcattattaatagccatca

SEQ ID NO: 213006 - DNA, 462 bp, Glycine max
cttgtgaataccaacatccaatgtgctgagaccctgtgaatgtctagaatggagataaacaactcacacaaatgtttctatctaagttagttatcgtccaatgatcacagagtacacgtatacacatcatgaagttgatcaatgttctagaaactgtttattttcattccctcataatttttgaaatgctaatcatttgaagttcaagtgtatattgagacaggttggcaaaaaggtatattctctgcagactgttgctaataaaagtagtggaaagcataatggaagggataatactatttttacctttctctctccatctcaagttgccatgttgcatcattaccagctatgagagaacaaatattttcgtgaaggcactaaattccacaacggtcacatatttctagatgaccaagcgcatcaagaaacaacttttgcaatctgtggtattgaagtgct

SEQ ID NO: 213007 - DNA, 513 bp, Glycine max
  unsure (1)..(513): unsure at all n locations
ganatgaatcatgcattacggtcactgtcactattcaaactcgaggctgcggctataccttggacaaacaatgccgtgcttttgtatgcaaccgcacatgaggcggactgtagtaccgtctccgctacactaactgtatcggagcgcggatgcgctgctttatcctctataagctttctgggctttaacatgaacctccggatggataccatctgatctttcaacgccgataaccggtcatcatctattcctgcacaccctctttattactccatctttctggatcgagcggtatactcggtgcctggcgttttcttatttatcatgaatattcctacagaagatatactaatgtgaagtatgcctcctcccacaagcgatattgaaagtgaatcgatcggagcacatggatccacccaaaggtttttagcaacgtgatgagatcagacactctcttttatacataaacatagcttcttctagccaagatataccccggcgttactgagaccg

SEQ ID NO: 213008 - DNA, 329 bp, Glycine max
agcttgctctctaagctatttatccaaggcactctgttggtgtgaaagctcctccttcaatggcttattccctagtggatggcgccttctctcacctcttctcctttatcttctgctacatctccatggttgaaaatcaccattgaaggacctcattgaagctcaaagatgcagccttcatagaagcttctcacgcaagcttccatcactactggaggatccccatgaatccttctttccctaacaagggaagacccccaatagaaggcatagccatggaagctaagcagcgtagcgaaaggaaccttcctttcctcacgtgtatgatg

SEQ ID NO: 213009 - DNA, 460 bp, Glycine max
  unsure (1)..(460): unsure at all n locations
nttcgattcattctatgcacccatggtggtccacattgtgtttcgtgcanttttattctcgttgtgtttactttttataccccctgttgacgtgcttaagccattttacttaagtcatttctcgcttaacttaaaaataaaatcaatttccaccgaacgtttgaattgtattatccgttaacttcgattaaaatgaattccgaccgttcggtcgtgccgtaaccacgttggaaatcaaaaagaggtaaaaaataatataataataaagaaaaacatcttttagtaaaataaagcggaaaatcaatcggacgttttctctttgggatttctcattcttaatcgaattgattaataactaaagtgaaactaaggctaaaatcaactcgcctagtcaagctcgtccacaaaaataggcttttgaaatttgtcatttcaatttctcactaagtaaaatggatca

SEQ ID NO: 213010 - DNA, 471 bp, Glycine max
  unsure (1)..(471): unsure at all n locations
agcttgtgagtgtcatcatccacactcctcaaccttccagttaaggggtgatgaatatttgcatcattgaggatgaaagactaaaaaattaagtgtatgatattaatataagaaatatatgtgactaacatatcacatgtaagataaaagatcagttaaaaaagataactaattaaaaacaacatgacaagctactaaggaaagaaatgaccaccaaaaatgctaatttagatatccagttatatataatatgaatgtgtttggttttgtcctanaaatataaattaatttttctttacagaatttaatttctttcatttacctacatctttttttcccagtctaaatatggaggagaagggataaactcatcacctctacttgtacatnagtatattggaatgatgggattgtgttcatcaaatcatanaactgtagaatcacgatgatgtcttagaagtatgcacatga

SEQ ID NO: 213011 - DNA, 465 bp, Glycine max
cctgagattgagagaaaatgattattaaacacaaaatggaagtactaagtatttattacctatacttaatagaaaatacttataacactacaaaataaccataaattggaagagtttgatacaatttacacaagttttatacacaaaagttagtcgtattcatcgactaacaggtggaagaatgcgttgaataatagcactatagttaccttccacaacaattatgtcactatggatgtacaagttcttcttggttaacatatccttcaaaaatttggcatagaagggcatttgctgaagtgcttctccaaaaggcaaggtaatttccagtttcttgaagataccaagaaatctagccaaatgtcactctttatcttttcatgagggtaccaattgataaggtacctccttgcattcaataggaggagcctctttcttcttttctatgttagcctcactcttacc

SEQ ID NO: 213012 - DNA, 448 bp, Glycine max
  unsure (1)..(448): unsure at all n locations
agcttctagagagttctacactactctagtgttctctaggacgttctaganaattctacacttttctagagagctctagaattttctagaacctctccaattaaggagggatcccaacacatctccccctcccgacttaattggggggtagtagcaaaccggcaccttggataccttatgtcaatgtgctttggtcatcatgcaaggattgcttctcttcttgcatgactcttctccactccaccaattcataggtgttattctcatgcacggattccatctcttcttgcatgactattctccactccaccaattcataggtgttattctcatgncaggattgcatatcttcttgcatggctcttctccaccaccaattcataagtgttattctcatgcaaagatatcatctcttcttccatggctattctncactccaccaattcat

SEQ ID NO: 213013 - DNA, 380 bp, Glycine max
cgaaactaattttgatatgccaaataaggcagagtttgaacatggtctgttaaggtatgatgccataacttgcagacttgaagctatgtttctgcggtatttacatcattatattttgatcttgttccaatcaagcgaattatcaagctcgcataaggaaataaggttaggtagcagtagtggcgatattaattgctcattgcttgttggctatatagaatataacatgcctactttttgtactatgtatagaagttagaagtgcaccttcctttctctcttctgcctcaaaaagccaacatgatatggaggagaacatattctaatttatgacatgtaacattaataacaacctatagtgctgacagattagtctgctt

SEQ ID NO: 213014 - DNA, 423 bp, Glycine max
  unsure (1)..(423): unsure at all n locations
agcttgnngaggatgatggngacccggtgtttagagaaacgaggatatgggctacgtgggagtacgtgagctcagttggaggtgggcaacaggggatggtgggtttatgcgcgatttgtggatgtagaaaacttgttgtgcaccatcgcccgaccgccacctagtaccacatgtgatgggtaccccataatcctacaagcttgagatggngaagtgtagaagggtgaaacttcctgcttttattcattgaccacagagtggtacctggagatatgtcgcgggggtcaggagaccttggggacgtcaggtggngtgctattgcccanaaccaagcttgaccaatcccgacccaacccgggcatagtcagtcagtgagaacctgtgatgtacctaaacaggcgaagctctggcagtcaacagata

SEQ ID NO: 213015 - DNA, 460 bp, Glycine max
gcttaatggctcaatgagcaaggggaaatgatagtcaatcaacatgtaaacatacccttttctataggagactactatgatgacgttttatatgatataatccttatggatgcagggaacattttgttgggtagaccatggcaatttaacaagaaagacatccacaatggtctcaccaatgaaataaccctcacccatgtaagcaaaaagctcaaacttgttcccttgacaccttcacaagtggttggggatcaagtacaaataaaactcaaatgggatgaggaaaataataaaataaagactagaagaacaacctttaatggttaaggaggagtgtaaggaggtaggtgtctcctccaataggttagctaagaagaaaagtcattctgcaataaagacaaacattaaagacactttccttcttagacaacctccacatattctcctttgtaaaggacac

SEQ ID NO: 213016 - DNA, 334 bp, Glycine max
agcttctataccaccccgtttctctcctcctttggcaacatcaaaaagccaaagtgcgtggtaatcaacacaagatgatataactaaaggtcacataatcaatcataagtcaaaaccaaatataatccaatcattcataagtcaaaaccaaatataatccaagcataaaagactaagtaccaaataccgaaagataacgaaagttcagaaaatgataacctaaaaagcatagccaaatacacggcttacaataaaatagaatgataatctataactaagaaggtggtggaggtcaaagcaccgacgaagataagtcacatcctcttcaagctgg

SEQ ID NO: 213017 - DNA, 447 bp, Glycine max
  unsure (1)..(447): unsure at all n locations
tgcggactatacctttgaacaaacactgccgtgtttctgtctcagcccggatttaaggcggactgcagcaccggctccgcttcactaactgtattggaggcggctgccgtggctttatcctctatagttttctggagttttaacatgacctccgagatggaagccatttgatcttttaaggccgatagatcggccttcatctattcctgcacgccctcttcattatacatttttctggatcgagtgttataggggtgccttggtgttttcttagttatgatgaaattcctaaagaaataaacaaaggtgagtatgccaccaaaacatgaatatgtaaatgaatgatcggagcacttggatccacccataggttnttatgtaacgtgatgagtccagaacttctcattgtataaaaagaacagagctttcatctatccaagaatatac

SEQ ID NO: 213018 - DNA, 379 bp, Glycine max
  unsure (1)..(379): unsure at all n locations
agcttctggtgggacatcttgacttgctntccaatctgacattcaccacagattctgccttcttctattntcagattgngaatgcctctaacagcacctttgtcaatgattntcttcatgcctcttaagtgcagatgtccaaatctttgatgccatattctgacttcatcttctttggaggatagacatgtggaggagtaactggtttcttgaggtgtccataggtaacagttgtcctttgatctgctgcccttcattagaacttcactcttctcatttgtcaccaagcattctgactttgtgaagtttacattgaatccttcatcacacagctgactgatgttgatcaaagttgcagtcagtcccttcaccagcagta

SEQ ID NO: 213019 - DNA, 440 bp, Glycine max
tcgaagggaagagagagaccaatcacgagcacatagcatggtcttaaaagaggagttagctgcttgctcaaggtccaaaagaagcttgtctcagcgtttatgcgagacagagaccaacatgttagccatcgtcagcaagtaccatgaagaattaaatctagccacggtccacgagcacaaagtggcggacgagtatggacgagtgtacgcgaaaaaggaggctataggaatggtgatcgactcgttacatcaagaggcaacaatgtggatggaccgattttctcttactttgaacaggagtcaagaactttctctattgctagccaaggccatagccaaagcgatagcgggcacctactccacccccgaggagatccactgacttatcagttattgtccgcatatgatagacttaatggcccatataattagaaaccact

SEQ ID NO: 213020 - DNA, 89 bp, Glycine max
atcgattgaaaacaactccatataatgaacgctataccaaggttctgacgaggatctaggactaccactgttcattctacgggccaaaa

SEQ ID NO: 213021 - DNA, 455 bp, Glycine max
tctatggacactgaatctttgaggtccttcaatgatgattttcagttatagagttatagcagaagataaaagagaagaggtgagaggaggcgtcatctactagggaataagcaatggaagaagaagtttcaccaccaaaagagtgtcttggataagaagtttagaaaggaagcttcaatgaagaaagataatgagagagaaaaaaagtggtgtgggaatgaaggaaagatagggagataagttaaactttgaagtgtgtctcacaagactctcattcatcaaagttatgacaagtgttacacatgtttctatttatagcctagcacgggaaactttcttgagaagctagaggaagaaagctttcttgggaagctagagtggggctactcacaccccttcaatgttaagttcaccccatgctaaaatacatgaaaatacaatgggaagctttcttg

SEQ ID NO: 213022 - DNA, 393 bp, Glycine max
  unsure (1)..(393): unsure at all n locations
agctaagtctatgatgtacttcccttcggtctgtatgactatagatatgaactgcgacgctgtcaacttnttagaatgacaaatcaagggatacaaatcacttttgcccgtggttattgaatatttatctgattttcagtgtccatgccccctacatctcattttacagatagtatataaccttttttttttctttttatcacattctgcatatgtaccatagaagatgatttcctgtgtatgatcaacgaccctgcaacaatttaaaaaccccttactgtacttgtttttaaataggagcatttaatgattgctacttttctactaacacacttatttaaatcagtttttacaacatgattaattttaaataaacttactgcttcatatcat

SEQ ID NO: 213023 - DNA, 138 bp, Glycine max
tgatgccgaacaaacatttactaatcgacatcatccagttgttatataacgagtgaatagaataaacaatggccggtgatgatcgatatatggtctatgctgatatctgatcaactacattgccgcaatttcttatac

SEQ ID NO: 213024 - DNA, 451 bp, Glycine max
  unsure (1)..(451): unsure at all n locations
agctngaacaatatagattaatctaacgactataaatcgtggtgaatggcatacagtcagtacacaaaaaaatatttagccctaaagaccaggcttgtaatgtatataagcttctaaaaatatacatgagttgaacagcaaaagtctcctagggtcttcaacatggtatttgcatcaaatgagaaacaagaaatctccaaatctcaaaaatcaatcctaaaaatagttaaacattaacaaaagagggagaatctttcctgacctttccctctgccgattagcactatcaatttctttacttttagggtatgtttggtttaaaggaatgaaaggcgtgttaaagtgacaagagatgaaagatttgaattaaagtagtgtatagatgtgcaacccacaccaatttctaanattttcatctcagatacacccaagatgaaagaaccaaacacta

SEQ ID NO: 213025 - DNA, 462 bp, Glycine max
tctatggacactgaatctctgaggtccttcaatgatgattttcagctatagagttatagcataagataaaagagaagaggtgagaggaggcgtcatctactagggaataagcaatggaagaagaagtttcaccaccaaaagagtgtcttggataataagtttagaacggaagcttcaatgaagaaagataatgagagagaaaaaaagtggtgtgggaatgaaggaaagatatggagataagttaaactttgaagtgtgtctcacaagactctcattcatcaaagttatgacaagtgctacacatgtctttatttatagcctatcacggtaaactttcttgagaagctagaggaagatagctttctttcgaagctagagtggggctactcacaccccttcaatagttaagtttcccccatgctagtatacatgaacatacaatgtgaagcttccttgagaagc

SEQ ID NO: 213026 - DNA, 309 bp, Glycine max
  unsure (1)..(309): unsure at all n locations
taattaaattctgtcactactacanttttacggccgcagaatgtcggtgttagctgaaattnttttatgacagaattgcgaatcggaattcaggtgtatttcgaataattctattataaataaagcattaacgtataacaaataagaaatttataacattaatttaaaagtactaatgattttattaaactgtaagccttagtaataaataattaanaaaattatttatagaattaagaaataattttttattaaaaatatcatangattacattaaaagttataataaaaaaagcgtattcataaaac

SEQ ID NO: 213027 - DNA, 272 bp, Glycine max
atgacctgcaagtcgcttacttatatctcttacttcgttaagaagacgtagcttgaaacaactacatgatcagctaagataattcaatctacacgctgactttatcaaatggtcaatgtcaacgcacgctgcgcaccatatagctaagacaagctaagtatctccttcttaaaacaacattttcacctacatatccgactattcaccagatgtcaagcgagtatcctgctctagatatgtaatgatgcactaatttaccataggaacagctt

SEQ ID NO: 213028 - DNA, 335 bp, Glycine max
  unsure (1)..(335): unsure at all n locations
gcaagcttctaaggaagttttctcaagaaagcttctcaaggaagctacctagtctataaatagaagcatgtgtaacacttgttgtaactttgatgaatgaaagctntatgagatacacttcaaagntccacttctttccctcttttattccttcaatttcgggctccccccttctctctttcttttcctccattaaagcatcctcttcaagcttcttatccaaggcaattcttggtggtgaagctccttctttcttggcttattccctaggggatggtgcctcccctatcctcttctcctttgccttccgctgcatctccatgatgaaaaatcac

SEQ ID NO: 213029 - DNA, 555 bp, Glycine max
  unsure (1)..(555): unsure at all n locations
tcttgtggcatattagattatgagtggtcgttttgattatacnnccacattataggcttgattcatgcttacggaacttacatactcaagctcaacggtgacgccgatctgcattgaataatccacatcttgcgttgtcattgagaagagagagagatacaagtgcgacgcaatagtattaagctaccgaatgaaattggagggcaaaaagcgcgaaatcttttttacaaactctgttctgtaatcatttttgatataatgtggagggagtaatatgttttacagcagacataaggacgtacggcgtattaatgaattaatgaccatgtgtagtctagaagaagaaaggcttgtaaggagattggcgagagggattgttgtaaagaggtttggaaaaaacaaagaacctaggttaaacctaagagaaatggactggtgcaatacctgcttaaactgatatatagaaggctgcaaacgtggtttctttatacgataaatggcacaaatgaagaatatattgcgcacatgccatataagatttgataagaaaggaag

SEQ ID NO: 213030 - DNA, 370 bp, Glycine max
agcttatccttatggctagcctccggacttcactccccgtgccactccggaagatttaagccaagcccctacttttgaggggcaactcccgccttatgacgactatcccgggcaagatgatgaggaaggagatacccatctcggccccctgctccacctcaaagatccatccccacatgaactaccccaaccaaacatagtccgccatatcccggcctcacccacacccgtaaaagaatctgttcccttcgcggaagataagggaaagatagaggcgcttgaaaagaggtaagagcagttgagggccttgcaattacccattctcggatttagccgatttatgtctcgtgcccaatatcgtcatttcctc

SEQ ID NO: 213031 - DNA, 486 bp, Glycine max
  unsure (1)..(486): unsure at all n locations
atgattcgatgcctgcgaaacctgaactattaagactcagcttgtgtcgggtacctacccggtgacgagccaagatatatgtttaacgaatgagaaacgcccaggagcggactatgcctttgcgaaattcttcatcgcaagtgttacagatacgagtgggaagcgcctgagtttatactgttcttcacggtaaccgatgtacaacgcnattcaatgagagggaagngccttacgggatgaacacattgctacttcggttactcacctatttatagccaaataggggaggtggttgacgaccacctggcccacacaagccagagtgtttcttgcatagatcacagtcttgttgaagaatatattggaaggaccatggagtctggggctatttgatccccattttttaaagacaccccactgtctattcgggatccttttacgaggaacgggacaactagttcaactaaaccggtctttagaacggct

SEQ ID NO: 213032 - DNA, 466 bp, Glycine max
  unsure (1)..(466): unsure at all n locations
agctcttcacagcaaaagagtaaagctgttctatgtcatgtttatcccgactaaanaagcattaaaatattgaccatccagacctagaagatgaactttcgcagaatttatggggtcgggaaatcaagaggggtaaagagaatcaaggtgaatttcttaaaccttaatactagacaaatcagacactagtactaaggcaaaacgaaattcaatgacccatcatgtcatttagtgcctaattttctacactgttagattaaaggtcaaaataccattattctgctggtcacggattcttatcatatgtaatgtgaccacaaatagtcactaaaatagttcaccttggttgtgttacaaagctatgtaattactatatgtctgaccatatgaccaacctgcttgttgagcccaaacaatacattgcttagtatgagttaattatatacaattgccatttgaatctgga

SEQ ID NO: 213033 - DNA, 406 bp, Glycine max
cgcgactatgaattggaaggctcttgaggcaattcaccattgttaactgcctcacaatagatctgctggcatgaaaaaaaatagagtacgcatttcactaggaaaacttcagcatgcactgcagcattctatagacaaatctcgtacaaacgtaagttattaagcttatatatctcacattgagcattccttgactatatgaatgtccaaagagaaaaacatatgccaaagggtgtatatcattttactcacttcatgtttgcctgtgtcaatgccattgcaagatgctagaaagaagtacgagttagggtcccttgctaatgaactctgtattctggatacaggctcagcaacagttctgaattccagtgttccaacaccagttgaagctattaaaggagtaaag

SEQ ID NO: 213034 - DNA, 388 bp, Glycine max
  unsure (1)..(388): unsure at all n locations
agctttcaccagatcatataagataaatgcattcaggcaatctgcagatatatcctcccaaacgtcaaattctccgcctatatattcaacctttccatcactggcacgtggagtgaatcttcctccatggtgcaatactaaagttatattgtcattcattctacacaatcagaaaccgcanacatggtcagatattatgaaataaaaaaacctacctcanaaagcgtgaagacattgacattgtcaaaaaccgcgaagacacaatcaaaaaccaaaaacattgtcatctataaaaacagagcatcataaacgaaattaataaacgatcataaacctccctacgaagcgcgaagacaatgccgcagatgaaacccctcgaacatgtaaa

SEQ ID NO: 213035 - DNA, 465 bp, Glycine max
  unsure (1)..(465): unsure at all n locations
tcagaccaaagcaacatataatctaggtatccaaaacccctcaatttaatggattatcaaggtttgagaagtgaaattgagaatgatgcaaatttgggctcaaactctcacctcacacaagtctataacatcaatctaaacttgctcaaactggatttgcacctaaaattccaccgaatcaaaatttgactcctcaacacccaattttaccctataaatggctctttgctcactatggccatttggttttctctcttgcacaacccangcttgctcataagtcctaaatgacatttcaaactatgattaactcactttaacctccaaataccactaaatccagatttggccttctgactctcaaaaactcactctttgtccactcataacaccatattctcactttctaaccctaggttaactctacccttcatccctagcagttgctcataagcaatttcagca

SEQ ID NO: 213036 - DNA, 431 bp, Glycine max
  unsure (1)..(431): unsure at all n locations
agcttctggtgggacatcttgacttgctntccaatctgacattcaccacagattctgccttcttctattntcagattgggaatgcctctaacagcacctttgtcaatgattntcttcatgcctcttaagtgcagatgtccaaatctttgatgccatattctgacttcatcttctttggaggatagacatgtggaggagtaactggtttcttgaggtgtccataggtaacagntgtcctttgatctgctgcccttcattagaacttcactcttctcatttgtcaccaagcattctgactttgtgaagtttacattgaatccttcatcacacagctgactgatgctgatcaagtttgcagtcagtcccttcaccagcagtactttgttcagactangaangtcatcatgaactagctttccatgccaatgatc

SEQ ID NO: 213037 - DNA, 453 bp, Glycine max
taacatgagattccaacaccttgaattctcgcaaacagcttaccaaaaactcacatgaatgtgaatctcatgatctcacataaagtctaatctaatcattaaataacatgatctcaaccacgtcttatatcatcattaagaaatcaaccaacacaacccaagatattcattaatcaacataattatctcatcatcaatataatattctcaacaacaacatgatatattagccatagtacaaggatagaccaaaccatgaataataaatgtgcgtcactataccattgtgacaactttatacctcatggttaaggttatcaaaacatcccatacgtcttgggttactatctccttcattatctattatgtggctatgaccttcatagcttatagacatgataaataaggatatactaactcagttaagttggttcttgtctcatgtgaaagcta

SEQ ID NO: 213038 - DNA, 268 bp, Glycine max
agcttcttatccaaggctcatcttggtggtgaagctccttcttccatggcttattccctagtggatggcgcctgccttctcctcttctcctttgccttccgctgcatctccatggtgaaaaatcaccattgaaggacctcattgaagctcacagatccagcctccatagaagctccacaagcaagcttccatcactccgtgacaaaattaaaccctccaacatccctaaatcatcttaaacatagccagacctgcatgaaaaatcccg

SEQ ID NO: 213039 - DNA, 382 bp, Glycine max
ctaacaagcactctggtcatgaaatttccctctcttcggctcaccagtgtgaaagatgtgcgtgagtagataatgcaaatgcaagatatttcaactcaacttaagaaattgtgaggttaatatgcttgagtccttcctgataaacttcattctgaacacatttctgctagaatatgggtcgtttaagatttcctacaacatacataatgacaaatggtctattaatgaattaatgaccatgtgtattctagaataaaaaatgcttgtaatggagacgggtgagagtgtattgttgtaaactgcttgtgggaaaaacaaagatactaagtctcaagctaatcagaaagggactggtagaataccacctttagctgatattgag

SEQ ID NO: 213040 - DNA, 260 bp, Glycine max
  unsure (1)..(260): unsure at all n locations
agctnttcaatcaatctttggctagctacattagtgcaactacccncatcaataatcaaagagcatattttccccatgatcatgcacctagtatgaaaagagttcttcctttgagtttcatctctatcctttcatgcactccccattaacctcctaaccatcanaagattaccttccaggggttgtgcatcacattcactttcactctcactagaagaactagaagagctagaagaagatgcactagtgatatccccatt

SEQ ID NO: 213041 - DNA, 466 bp, Glycine max
cggttcgaggtacttacccgttgaagatcgaagaatgatgaagaacgaatgaagaacgtcgaagaacggtcgaaacctttgcgaaattcttcacggaaagcgttacggaaacgtttcggaagcgcctcggcttatattttcttcacggaaacaatttttccaagcaaattcgaaagagagagaagtgcctaaggggctgaaccattttcttcttcacttcctcccctatttatagcaaaataggggaggtggttgacgcccagctcgcccaggcgagccaggttgcttcctccataagcaacagccttctggaggaatattctggagggcccaagtgggcctgggtgctatttgcacccccatttttactaagtacaccccccactgctttatttggcgattccttttttcgtaaagttacggaaacttacgaatgtcgtaacgatacttggtttctttccgtaat

SEQ ID NO: 213042 - DNA, 337 bp, Glycine max
  unsure (1)..(337): unsure at all n locations
agcttcaacctttggtgcccatttctgctccaaatcgcgaaaggagggcattttcgaagtcgtgatgtgcgtgtctacgagtgggacttcgaaatttcaggtttgggtggacttctttctctcttgattttcgtgggtatggggttttgggaaatatgatgggtagtgttgctaagtttctgcttcatgatagttatttgtgaaggaatttgtggaaagcatgttgaaattgccatgtttggatgagttaaacatacccattctgttntagggtttttatgatgatgctcgtgatgttcatgtgctgaaatttcttatggaaaactgttagagatga

SEQ ID NO: 213043 - DNA, 451 bp, Glycine max
  unsure (1)..(451): unsure at all n locations
tgcgannagcccactccatcattaggatttgttcctgccatctcaaacaaacaaatcaaacataacaagacaattatagttgttgtttgaatacctcacccactcaagtgtatcacacaattatggcttttctctaatgaaacactcttgccttttaccactctaattccccttgagttcttaggcaattcaagagattatggccacaacaaagaacaattcaccaatatgtgtaaggtaaggctggagagacaaggaaaaggttaaccaagaaaaaggctaacaatgtttttaggcacaattgaaggaaataaaattcagaatttaggaattcaagtaacaatccttcatacaaccaatatattaccttaaagagattatttttaagttcttcaagcatgaaccattcagcccagattntctttttttctttctaatcttgcttatatga

SEQ ID NO: 213044 - DNA, 346 bp, Glycine max
agcttctatgttcaatatcgagcgtttcaattaattatgtgcctgaatcggacatccgagtgaaaagttacgaccatctgaatttcttgagaacttctatttttcaagctcaagcgcctttatatatcatgggcctcaatcgtatatccatctcaaaagttatggtcgtctgaattggacaagagctttcgtgttgaatttcgagcgtctcgatatattgtggacctgaatcggacatccgagtaatattttatgaccatatgaatttccctacaacttacagtattatataaggagcgtctctgtatatcatgggactcaatgcgacattcatgttaaaagttat

SEQ ID NO: 213045 - DNA, 418 bp, Glycine max
tcattaagaggcttcctccagaagcttcctcgtggcttctatgagaagctttctcatgaggcttctgtgagaagctagatccttatctatccacacccctctttgaacttaattaacctccttaaaaataattacagatgaaaataacgtacccaataatcaaacatcaaacataattactaataatatatagatatatatatcagggtgatacagctctctcacccttttagaaatgttgtactccaaattgaccatactctaacaatgaatggcgagctgctcgcatctaactatctaagttccacgtggcatattctcctgatgcacctgcccaaatcaccttgaccaacggaatcattttgcctctaacgtgttatgttagcctatcctcgaacctcagaggcaatgcttcata

SEQ ID NO: 213046 - DNA, 350 bp, Glycine max
  unsure (1)..(350): unsure at all n locations
agctntgatggtgtcgagaagaaatcacatgtttgtcatcatcaaaaaggcggagaatgtgaatgtatgtatacatgattgtgatgatgtcaaagaagaatctaacaaggctgcttcaaatgataagcatttgcttcaagaataattcaagattgcttcaacaaacaaagccttgtttcaagattcactaaagaccaagccttggccttaaacaaagtgctttcaagacatgcaaggctctggtaatcgattaccaggaagtgtaatcgattatcagaagacagggttgagaaataactgttgaaaaatgtcttgaatgtgaattctcaacatgtaagtcgataccatat

SEQ ID NO: 213047 - DNA, 508 bp, Glycine max
  unsure (1)..(508): unsure at all n locations
ctgacttcatttgccctccngtgacttacctgacactatctagaactcaggtctggagaaatacacggtctggagatatgaactgttatgtagtttagagcaacgagtgagaacgctctgaggcattgttacaatcatctaccatctcgtttgctgaacgaggaggaaacacctcggcttataatttgcctaccgtagctaatctttctgtggatgctgaatgaatcatggaggcctcatgcgccgtccctggtcttgattaccttggcctacgactcatagccatatgcaggtggttgttgacggccacttcgtgcatacgaggcacggggcactcttcttctctgaagactgatgggagacgatatcgacgatcatagtgatcagggagctatgtgtagctcgctttcatattgcaccccagagtgcattatgagggacttattgatccccacaaaccagtaaactcctaatttctgacccgatactcagaacgagcagaccatcg

SEQ ID NO: 213048 - DNA, 450 bp, Glycine max
  unsure (1)..(450): unsure at all n locations
gcttatcgtaatcgattagataattatnttttagacaatgactgggtttttatgagtctctactttaatcaattaccaggtgatgtaatcgattacttctctcttaaaagagtttctgaagtgatcaataacactttatcgattatatgaagaatctaattgattacattgttcttgaaagttttccagattgtgcgaagaatactttaatcgattgaaatgataatataatcgattacttctttgaaataattgattacattgtatatttaatcgattacatgcgattataactattttctctataaatagccaccttgtgttctcacttcaatgtggaaaaattaagtgtgaaaatatatgagttgaagtaacagattaagagaaaagaataaagtgcttagatacaatgtgactcacaacttctaatctttgattatgaagatcata

SEQ ID NO: 213049 - DNA, 468 bp, Glycine max
  unsure (1)..(468): unsure at all n locations
tgtgcaatctanagccagtcagtttccaagatgaaattntggaaaactggatcccttgttacttgaagggtccatctcatggacaagaacttcagcaattttggggaaaggaacataaggaagttggctcgtggccgaggccaagacgtttccttctaaatcacgacaaactacgcccatgccaattccaataccgttcttgcaagcggcatcaaagtttaattttattaattgctgagggtggacaccatctattctgatgagtcactgttgtggcggctctaaagcactgtgtctcggcaaataacccaataggaacgatcaataactaagcttatggcggttttcttttgctgaaagatccaattattccttcttcgccagattgaccataacatcccaaacatctgctgtgcaaagccctctatccttggtttctaagcatcataccagccatgtattaaacga

SEQ ID NO: 213050 - DNA, 356 bp, Glycine max
  unsure (1)..(356): unsure at all n locations
cattgtgcatgtccctcaacctatccacattgtgtacntgaacctgaccctgaacctcacccatgttgtgtatctcacaccctaagatgcatgttcttgatattacgttacaaggcatcaaaagtgtttgcacgcgcagccggagaatgtgttcgtcacctgcggatcacggnggtggagctctgtgagaggcttcaaaccattggagaagaactctctgtttatgcaaacaatttgggcgtcaacttggagttctcggtggtggagaagaatctggaaaatctgaaaccagaggacatacaatggagggaagaatacgttcttgtggtgaatagcattctgtagctgcattgcat

SEQ ID NO: 213051 - DNA, 377 bp, Glycine max
tgtatgctttgtctcttgcacagtatggtaaggtatgcgacccagcatttctgacgcgatgataatgggtgaaaggggatatagagatatatggtataaatagcgatacgaactgctaccactgcaaaaaatgtattgtccctaattgctcactctgtataactcactacattactctctgctctatatccataatttcaatcgcttagtggagctatagatggcgctttggccaatttgatcattaggttgtctgacctgtaaattcattggtaatcatagacttactatgagatatgatacccctagaaagtaccatgtacgtatactaaccactgtcatgataactggcattctgactctcgaaagctcactga

SEQ ID NO: 213052 - DNA, 379 bp, Glycine max
ctgcagcttacttatgaagggtattccctctcgagctctttttttttttgagatgattcattttcctcttccatgcaatttgtggtgattcttgtttaacttgtgaccgtttataatcctaaatttattactaccacaaattattatatgtaagtttagatttactaaaatattatttgggaccaaaattttacatattttaattctattaggacaaataaaaattctataggaacaaaattaattttttttctatgttataaagaataaaacatattttaacctattatttataatacctatattgggtatccatgaatagttttcctattttttatggcttagaggtcaacatgagagagggtgtagtattgtattg

SEQ ID NO: 213053 - DNA, 496 bp, Glycine max
  unsure (1)..(496): unsure at all n locations
ttacgtgacactatgaaactaagctgaatatgctgaagattacagttgctttaggagtataaaccacatgttatcaacaccaaaatatcagtcataaataaatctttgataggatgagcttcaaactgtatgctttaagaagaagaaatatatataaaaattaaaaacataccactgagaatacttttttgactgcttaataaatcatgtggaccacatccaccttcactggtagttatctcctaggtatagccctggaaaagagaggcagatctttatgcattgcatatcattacatagtaaatacaagtcactaatcttctacaaaaattttaatttattatgatatcatactatcatagtgatgaaaagatttatgttttgactgattaacaacattttaaaattagtgtgcaatatgaggaacataaaggataccgagaaacaaagaaatacctaatatntgacacaataatacagaccgaagtagaatata

SEQ ID NO: 213054 - DNA, 259 bp, Glycine max
  unsure (1)..(259): unsure at all n locations
cccttcaagtaacgaagaattctttttgcagcttttatatgagaagaggtaggagcctccgtanagcgacacacaactcccaccgcatatagaatatcgggccttgtattggttagataccttanactccccacaagactcttgaagaccgtggagtctaccttctctccttcatcanactttgataacttcaagccaccttccatatgtgtgttcacgggattgcaatcaagcatattaaatttcttcaacacttctt

SEQ ID NO: 213055 - DNA, 487 bp, Glycine max
ggacacttaaatactaagcttaaggttatgacttcatgttgctcaccctatctctaagacacacaccacaaattctcctcatgtcagcctttgcctttgagttccacccatattttagtgcaaaccaagaacctgagaagattatactcattctttacggctgggttaggttgagtggattggaagcaagaaaaaaatactccctccgttactatttacaaaagggtgttgtcgaatttaagctaattaagtattaacaagtactaatatcaattaatgagacattaggaagtaacagtaacaattataagaaatagtatcaattatcaatcatcaatcatcaatcatcaattgatatattatcttatgtatagatcataaaataagattttatcacataacaatgactatgttcggaaaaattaattagaaactacaaatctagctaataactgacgggtgtatatatatatatatatatatatat

SEQ ID NO: 213056 - DNA, 351 bp, Glycine max
  unsure (1)..(351): unsure at all n locations
gagagacctgaggcatgcaagcttccaaattagtgtaccacactaccgcttctccggtttagctatcttgaaagaagtgtattaatagcttttcatccttagagtgggcgcccatcttacggcagtacatcttgagatggtttttgggacaaggctgccctttatacttgtcaaagtccgacactctgaacttcggnggaataacaacatcgggtactaagcaaagatccgtcatgtctgcgaacggatagtccccaaatccttccacggccctcaatctttcctcaaggagatcgaactgtctcctttcttcaggtgctgagggcggtccttccgtggacaaaactattg

SEQ ID NO: 213057 - DNA, 267 bp, Glycine max
agcttagctacactcacctgttcatgaactatgctcacctccttgagaagcttccttgagaagctagagcttagctgcacacacccatctaaaaactgagctcacctccttaggaagctagagctcgactacacacagccatctaacaactaagctcacctcgttgacttaggacatgcaagtgcatatggccacaagacgtgcctactacaaagactagctgaaaggcccgatggaacaacgctgaaaccgtatactactagaatg

SEQ ID NO: 213058 - DNA, 418 bp, Glycine max
  unsure (1)..(418): unsure at all n locations
agctgttcgcacaacttacggttaaatctgtgacctagccatggcagaagtctccacagaggccattgcctccctcgcccagtattatgatcagccgttgagatgcttcacttttggggacttccagctatcacccatggtggaagaatttaaagagatcctacgatgtcctctagggggaaggagaccatacctattctaagggttctatccctcattagctaanatttctaagatagtccaaatctcagcgcaggaattagaccacagaaagcaactcgaaaatgcggtggttggaataccgagaaaatgtgtggaggcaaaagcaagaatcttggtangtagaggcgaatgggccccgttcatagacattctcgcactgttgatctttggaggagtcctctttcaaatatggatg

SEQ ID NO: 213059 - DNA, 459 bp, Glycine max
tgcttctacaacctaagcacacttagtggagaatcctggacttgatcttggattagtgggctaaaccatagctaaatttcactaatcataattagtgaaattttggctccaaatttggctccacaaattcaaattcaagtgaaatttgaatagaaattcaaatttccctccaattttgtgtgacacttaagctataaatggaggccttgtgtgtgcagtttttcaacttgatcatttgagaattacacttcaaagttcatacctcatttgaggcttgaaatttcgtgctccttctctccttctccctccactcatcttctcctaccttcaagctcttatccatggcttcctatggtggtgagcttgttcttgactcatcttctcctttaaagtgacatttccaatcatctttcttacttctccattctgctgccattgatcttcaagaagtaaaggact

SEQ ID NO: 213060 - DNA, 341 bp, Glycine max
  unsure (1)..(341): unsure at all n locations
agctntcaccagatcatataagataaatgctttcangcaatctgcagatatatcctcccaaacgtcaaaattctccgctatataatcaacctttccatcactggcacgtggagtgaatcttcctccatggtgcaatactaaagttatatggtcattcattctacacaatcagaaaccgcanacatggtcagatattaagaaaataaaaaacctacctcanaaagcgtgaagacattgacattgtcaaaaaccgcgaagacacaatcaanaaccaaaaacattgtcatctataanaacagagcatcataaacgaaattaataaacgatcataaacctcccta

SEQ ID NO: 213061 - DNA, 441 bp, Glycine max
  unsure (1)..(441): unsure at all n locations
tcagaccaaagcaacataaaatctaggtatccaaaacccctcaatttaatggattttcaaggtttgagaagtgaaattgagaatgaggtaaatttgggccaaactctcacctcacacaagtctataacatcaatctaaacttgctcaaactggatttgcacctaaaattccaccgaatcaaaatttgactcctcaacacccaattttaccctagaaatggctctttgttcactttggtcatttgtttttctctcttgcacaacccaagcttcctcataagtcctaaatgacatttcaaactaggattaactcactttaacctccaaataccactaaatccagatttggccttctgactctcaaaaactcactctttntccactcataacaccatattctcactttctaaccctaggttaactctacccttcatccctagca

SEQ ID NO: 213062 - DNA, 411 bp, Glycine max
  unsure (1)..(411): unsure at all n locations
agctgtagttgtatccctacttttaagggtattctngcatgctgattggtttttattatcttgtgcctagctntttagttatcatgcatattgactattgagctcctgttaggtcttattgcgctacgattggttgggtcttgttggatcctttggttgtttgggttggatccaaaacatataacaaatattttttttggtacagctgataataatactaaaacttcattntatcttagtttcgtcatgcagtaaaataaaaaaaatcttagtttcgtcacatttcattacatcctaatactaaagtanattcatataataattacttgtttctaacattattttctacgaatccctaaaaaaccatgtatgtattttatattctcttccgttcctacaagctatttttgc

SEQ ID NO: 213063 - DNA, 432 bp, Glycine max
gttccaacatccaagcataacaacattcaaacagcataagctatcacagccaagcaaaacagagcaaaggcagaaaactctgctcaacacatcaacccaaatcacagcttttctcacttaaagaccacagtaacaattcctttgatccaattcgttaaccgttggatcgactccaaaattttactggaagtctatagtgcataagcctacattttgaccgttgggatctactagaaaacatccagtactcattctgtactactctttccacagcgaaccacacacaagcattttctgcaccaagctaaaatcctgctgcacctattttgacagcaaaattctgcataagtgcagatttcgaaaatcacactttccctcatccaatcttgctcaaaacagatactacaagtcccaaatcatgtatcatacatg

SEQ ID NO: 213064 - DNA, 383 bp, Glycine max
  unsure (1)..(383): unsure at all n locations
agcttctttnggaccttgaacaagcaatcatctcctctntcagaaccatgctatgtgctcgcgactggtccctttcttcccttcgcaacttgagttcattattgctaccccatagaagctccgcgaaattgttccggccatactcttccttgcgagccctcttggtctctttttcaagggctcttgcggtaattgcattctcttcccgtaacccggcgcactccttccgaacgtgtgtagcagccaacttgaacttctccttggcgagttntgcctttcctaactcgctnttgagagcttggacttcctcgtcctcttccggtgcttcaaaattctcttcgctgacgacttttaactnggcgagccaatctaaacctcgtatg

SEQ ID NO: 213065 - DNA, 416 bp, Glycine max
tccattggttgagttttgcttcccttttcacgctctgtttcactccctacaagtaagtgcactctgccttggttatttggctctccattgttgtgttttggtgctttagttgctcatattatgcgaaattcgcgaagcaattcacatatgaaaccatacttgttttcgctaaattaaggggttgtaagggatggccttaggcctatgttgcattctggagtaatggggcatgccacattgcccccattctcttgctattcatgcctaaacatgtgcccaccaagtgctcggtatagggacaacatgtagaggttaaaatgagtgcctgaatgcgaatctaggcctaggaacccaagcttttgatttcaatacaagaaagcgtaaaaatgagggcattatgataggaatttcccttt

SEQ ID NO: 213066 - DNA, 407 bp, Glycine max
  unsure (1)..(407): unsure at all n locations
agcttggtctaaaattcctcgaaaattagctttntatgattatatcggaaataatccagcaaaaggggggttatttagagcacgttcaatggacaatggagatggaatagccgtcggttggttaggacatcctgtctttagagataaagaggggcatgaactttntgtacgtcgtatgcctactttntttgaaacatttccggttgttttggtagatggggatggaattgttagggccgatgttccttttcgaagggcagaatctaaatatagtgtggaacaagtaggtgtaattggtgagttctatggtggcgagcttaatggagtcagttatagcgatcccgctactgtgaaaaatatgctagacgtgctcaattgggtgaaatttttgaataaaatcgtgctac

SEQ ID NO: 213067 - DNA, 462 bp, Glycine max
tacttatcttatagtttaggtgctttatctgttattggttctattgcttgatgctttgtctggtttaataataccgcttatcctagtgagttttacgggcccactgggccagaagcttctcaagctcaagcatttacttttctagttagagaccaacgtcttggggctaatgtaggatctgctcaaggacctacaggtttaggtaaatatctaatgcgttccccgacaggagaagttatttttgggggagaaactatgcgcttttgggatttgcgtgctccttggttagaacctctaaggggtccgaatggtttagacttgagtagactgaaaaaagatatacaatcttggcaagaacgccgttctgcggaatatatgactcatgctcctttatgttccttaaattccgtgggtggcgtagctacagagattaatgcaggcaattatgtttctactagaaga

SEQ ID NO: 213068 - DNA, 399 bp, Glycine max
agcttgttcatatagtttcaacctgaggttctttaaagacttagtaaaaatatcagccaagtgctacgagatctatctttatgtgtttagtatgttcatggaagactaaattagatgcaatgtgaagagagcaacttgattttcacaaataagcttagtgtcttgagtgtctccaaactttaattgttggagaagttgcctaagccatgtaatttcgcatgcaacttctgtcatggtatagtattcaacttcagcgctggatctcgcaactatatttttgcttttgcttctccatgagatcaaattccctccaagcagaacacaatagcctgaggtagaactcctgtccaatcagcactagagtaacaaacaattttgacattgtcttcgtcttcatat

SEQ ID NO: 213069 - DNA, 409 bp, Glycine max
tagagagagaaatgcgtagagagagaaacactgtgtgggggagagataggtctagaggaaaggcatttcaaagtgacggagagaatcctatggaggcaacccgacggctttatgccagagacataggaaaagcccatcaacactatgttgtgacgaactggagagataatatggatatcacatactgttattttacccattttggagatgatgttacagaaagggagctatggtatcatttcaagaagtggggagacgcccgggagatcttgataccacatccgtataaactacatgggaagaaggtatggacttgtcctattcaacgggatacgatatactagatacaccgtcaggcagctggataacacattaaatcggcgggctgaagctatatgttaatatccct

SEQ ID NO: 213070 - DNA, 431 bp, Glycine max
agcttataactgacatatgccaatgcatgctctttccacactacgtggtggaacaataatgtgtcatgatgccaactcaacactacatgcattgggaagaagaatgatcgatttgcaagtaattaatagtagtatatatattagggaattgtagtcttctgaaaaatttcttaactttttttatcatcttatttttaaaatattagacttaatttcacttttttcttttaaatattatgatagtataactttaatccttttatttttcattatggtcaataacttggataatttttttccggaaccaatgggattctaagagagtaggagttataaagtttacctgatgattgtgaaaggagattaagcataaagagagaaggagagataataatggatttgaatctctcattaccttctaaaaataatat

SEQ ID NO: 213071 - DNA, 436 bp, Glycine max
  unsure (1)..(436): unsure at all n locations
gtctagctnttcattggtgtattttgatctccttttggtgctctaaaatgtgggaatgtgctcaaatatgtggggcaattctggtttgttttcttgcttgtttgggttggattggaggtttgtatgggatggccctatgcctataatgcattttgaagcaatgggacatgccacattgtccccgttctcttgctattgatacctaaacgcgcacccaccaagtgttcggtgaaatgcctcaatggaattagcgcgtgacctttgtaaggaaacaacccatggggcattttggttcgcacatattttctatttttcgggacatgcattcattcccgataaaggttacagtaattgccccacatatatcctaagcttaggaaccagagtgttatgctatagaacacactacgaggtgcatattgtgtaaagttaccct

SEQ ID NO: 213072 - DNA, 442 bp, Glycine max
  unsure (1)..(442): unsure at all n locations
catgcaagcttaccaccttcaggaatccagctatgattccaaaattgaatttgagctctatcgcctatcggtccttcataagtttgttgcaccttcacccaactgttacaaatccctttccacaaattagaacccgccctattagtatcaataatgggtaacatgtcatcaccacacttatacttcgctctcatgatttgaacccttaggtcctctctactcaacataatgcccaaccaatcttcatcatatacgaagtgttaaccatcctagatggatctaggaaagtacacagactgcattgcataggagggtaacgcttgaagaacagacgcaacaatttatatacatatttataaagaaaaacaaaaaatctctctctcctacacatttatcacatcataataatgaagtnaaatacactattgtatgtgtatctctt

SEQ ID NO: 213073 - DNA, 548 bp, Glycine max
  unsure (1)..(548): unsure at all n locations
ttacatatgatcatcttattatcatcatttattctcctaaataancactactaccctgaacgcngtganctcgtgttcantcctgtctctattgacacacaagctntacacatgggcactaggctcacaatcactgtgttctatacacatagatggacgtgtcgccacagatacttgagagagggcgagtgaggtatagtcgtatagcttttctacaatgcatatagaactctatatgactcatgtctcatgctatcataccgtgacgtttgagagacctctaacatgtaggtcttgacaaactgtcgacataacatcggcttcacatacctctatttcacccatcattcaaggatgatacacaaacgggctatggtagagattaacacattggagattctgggagactctctcccatccgattatccacacgggaaaatgcttggccctgttattcatcggtactatattcaatacactgtaggtcctggtaacccttattgtcggcgtacctatgaaaacccttagttcgcagtacaacaccgacg

SEQ ID NO: 213074 - DNA, 201 bp, Glycine max
agcttgtgggagtactgagactcgcggaaggtttacgttgtgttaccagtctacacatgccgacaagaggagggtcaccctagataggaaggagagaagcctggcccatctaccatggcgaggactacaagtggaatgggtcctcattcgtcaaatcattgaaagctttgtcagtgcatgacggatgtgcgaggatcaagt

SEQ ID NO: 213075 - DNA, 579 bp, Glycine max
  unsure (1)..(579): unsure at all n locations
catctcctatatctcttactttctatttatatttcataactcctnaacaacaacatacgacatgaatgagtcctgcggaccctacactactcaagcctccgtcttctatatcgacagtatatatcatgtcgtgcgccttacatcaccactatggcataggcaacacgcatacctctggagagcacacacgtggtgaataaccactcttgccacggagctcttgatcatggatctaatcaccatatgctgctactcaacctgctccttgctaatgtctacgcacctcacgaccggaaagactacagacagcacttagctcgagttcactataacagtaacgcttatgctctctcaaagagccgactagtacacctgtctacatgggcgagacacgatagtgatatcagatattatatatgtcgctaaacatatcagctcacagacagaaagctgaacacctggatgcgtaactgacctgacaattgcacagcctgggctccggagcctatgaccacacagtctcatacctcaagtcgcgactcacatgctaccacatgacaagagatcgacctcatatgg

SEQ ID NO: 213076 - DNA, 248 bp, Glycine max
tatgacgacgctcgtgatgttcatgtgctgaaattgcctatggaaaactggttgagatgaagggtcaaactaaccttaggctagaaagggagaatgtggtgttagaagtggaaaaagagtgaattttgagggctggaaggccaaattctggattggtagtattagacgctagagtgagttaatcttaacttgaaatggcacttaagacttatgacgaaagttatgctgtgctacagagataaaaaatg

SEQ ID NO: 213077 - DNA, 567 bp, Glycine max
  unsure (1)..(567): unsure at all n locations
actctattgataattactatctataattcaanttttgtactactactactctaccataccactacagcgcttgaatcgtttctgtaccgtcctatacatgctcatgctggaggcatatacatggaagatgctatgatgccattcggatattcttctggagctctataaagcggaaagagcgtacgctatatgagaggcacatgtggtacgctttgtagcttgtgagggctggagagacggactgtatagatggccctatgccttatatcgcctttagaagcacagggacatgcctcatctctcccgttcattcgctattgacatcaaagctcgcactcatcaattgttatgtgaagcgcctcattggagtagaagcgtgacctttgctgggaaacactctatgggacgatgccgtctgacacatcttctatttatcgtgacgtgcatcctctcccaaaaagttacaatgtatgaccatatatatctcaggaaccaacctctattatgtctcgaaccactacatcggcgagtcggtaagtgaccttttatgccgctacacattgagcc

SEQ ID NO: 213078 - DNA, 406 bp, Glycine max
  unsure (1)..(406): unsure at all n locations
agctngtcaccaatgtgagcatcaacaaggacaccagactcactcctgcagctgttggcaagggccctccctacttcactatcatcatctggctggntcaccacaagaggacttccacctttganaacctcaagcttgtttatggcaaatgaaccatcagcttcaaccacctccttgaagtcttgcaggcttggtgcatacactggaatagtgaaactgtctcttttctcactgctaattaatccctgggattaagaatatgaattagtacatgtaccttagacatatcaatacataaaattaacaatatactggatgctttaattggttgaaaaatgcttaaaggagacaggaattgaccattctaaacccaaattgaaaaacagaaaactaatgacctcataac

SEQ ID NO: 213079 - DNA, 244 bp, Glycine max
tgtcttttttggctcacgatcttgatacatattgcatgcgatacttgtcttgacacgctgtatataatgatgatatggatctgcttgggaatgagccgaagagtttgagtcattttagaattgttggtgacagtcctttcaccatgtatgaaattcaggtaaagaacgacttatactgatcaacatactgaattgggaccacaagatccttcaatatgctttctgactcttttactaacactta

SEQ ID NO: 213080 - DNA, 348 bp, Glycine max
  unsure (1)..(348): unsure at all n locations
agctctatanacgcgggtctgggagacaaatgtatagtgttcgcgatatgcgaagatgatgttctgagtactttggatttggtacgaccatgccctcctgatttccagctgggaaattggcgagtggaggaacgccccggcatttacgcaatgagcataatgtaaacctttacggttttaaaagctctatagttgggcctaggctttagagattttcctttgataaggctttgtgtcttttgtttttgaacttataatacaaggatctttcttcatctgttcctgggctctacccattctcattcatttgcatgtttacttctttttctgaaatgacagatccgatga

SEQ ID NO: 213081 - DNA, 378 bp, Glycine max
tctatactatatacaagaatgaagctctgataccacttgttggacaagtggcctcagatatcttaagaaggggggggggggatgaataaccacacttcccacatagctcttcataaagttactaatcaccataagcttctattcaacactcctcttgctaatgtttctgacacgacttataggaaagctcacacattgcacatacctcatctcccacataacattctatgtatgcctctaaaattccaggactaagacacctgcctaaaacggagattaacgagacgaatactagatattatattgcttgcattccattacatcattacattcttatatatatgcacatgaatgctgaattgctactctaattcctct

SEQ ID NO: 213082 - DNA, 374 bp, Glycine max
  unsure (1)..(374): unsure at all n locations
agcttgtanagtttagtcaacttttagaatttgatttatatttgtatttaattatattttggacctatttttggacttgtaatggtttgcgaccttccattgctatttttaagtcttttaattattatattattagactacgacccttctgtttaactctatgttattctttctgctgcgtacaaatgtgaggtgaagtcccacattgtgtcaaagtataaaggttgagcaccatataagtgaggagaaaacccatatacctgaggcctatgggtttgggatagagcgtggtgtcacgtcaccttatgtggtggctcgtggtccacaggtgtatcccttgaatctttccaataatttgtatcatagtcaatggg

SEQ ID NO: 213083 - DNA, 305 bp, Glycine max
tcgaactgacaatatatatcatctgagcctctttttaccactaggatcgtgaattggatatttctgtgttacacacactaggtgaaatgagattctcgctccggaattactcgccttggattctttccttatctgattgtcccttctctgaatctttctaaactccactcccctcactaccagaaagactacaaacagcacgtagcaagagttatctagtctctagcacttatgctctctccatgatccgaatagtccccttatctacatgaacgtttgaagagagtgatataagatattattta

SEQ ID NO: 213084 - DNA, 292 bp, Glycine max
ggcatattctctgtaatgtccatctagttagcgacctgcgctctagatagatacatgtgtaacactagatagaaatgagagacttgtgagactcgcttcggggtgcagaatatgtgcataagatccttctattaccacgccacttactatttgtctaactcgcagactatgactccagtgaagcctcctctcttagctccctacaccaagaactatatctgtggtgaaactatttactccatgactgattatatattgggtggagatatatctcaacctgttacctgtacct

SEQ ID NO: 213085 - DNA, 403 bp, Glycine max
  unsure (1)..(403): unsure at all n locations
agcttgtgagagaaaaactattcggcatttacagnaatgtttgagtagctcaagcctattccaactagtcccattctcccagacaacataacagacattgacatcaaaatctgattccgaaaatgctcaagcctattgtcttactacttccattgaaatgatatttatggactttgttagagtgaattatngtatgattgtattctgatgaattttggattacaaataaataagttagcatgcgtattatagaaaatttatggacctctattatggtctcaaatggttcattcctgtganagctccatgaatgatattatccaggactttctatctgtagtctcttgttgcggattgcagaaagttattatcttggtagatcttaatgtgcaaagctagtttc

SEQ ID NO: 213086 - DNA, 480 bp, Glycine max
  unsure (1)..(480): unsure at all n locations
tacggacactatgaatactaagctngacaacatatggactggaaaatggatttgaatcctgtattttgtggctcacgatcttgattcatattgcatgcgataagtttctcgtcacgctgtatattatgatgatctggatttgcaagggtaagagccaaagtgtttgaatcattttgaattgatggtgagagtcctttcaccatgtttgaaatccaggtcatgaacgagttatcctgtttaacatatgatttgggaccagaagattcttcaatatgctttttgactcttttactcccaattatcaactgttgttgaaagttacgtctcttcttacctgttgaaaaaaagccagtactgttacagctctcaacacttgaatggctgtcattctcctcccttgataacattacattcgcatgcccatcggataacgattattccttgcctttgtttattgccatatgaattatgctatgacat

SEQ ID NO: 213087 - DNA, 420 bp, Glycine max
  unsure (1)..(420): unsure at all n locations
agcttgtttgtccggtgcagcagtaatgatggctcgagttattgtggngagcggnntacgaacccgaatgggtttaggcaaagacaacgacggcataactagcctgataaatgccaaaggaaatcgtgggaagcatgggttacgctataagcccactcaggcggatataaagaggagcgttgccggaaggaagagcggaagtcaaggctcgcggttgagacaagaaggtgaaggaaacccaccctgccacataagtaagagctntataagcgcgagcctgggggacgaaggtcaagtcgtcgctatatacgaagatgacgttccgaatacgctgganttggtacgaccatgcnnctctgatttccaactgggaaaatggcgagtggaggaacgccccgacatttacgcgacgagcataat

SEQ ID NO: 213088 - DNA, 471 bp, Glycine max
  unsure (1)..(471): unsure at all n locations
tcaagaaaaagatggcctcagcanattccttatttccagaagggaattctatcaatagacctccaatctttaatggagagggttaccactactggaaaacccgaatgcaaatttttatcgaggcaatagatctaaatatctgggaagccattgaaatagggccttatatacccaccacagtagaaagagtttcaatagatggtagttcatcaagtgaaagcataaccatagaaaaacctagagatagatggtctgaagaggatagaaaacgagtacaatacaacctaaaagccaaaaacataataacatctgccctaggaatggatgaatatttcagagtttcaaattgcaagagtgctaaggaaatgtgggacactcttcgattaacacatgaaggaactacagatgttaaaagatctangataaatgcactaactcatgagtatngaatatttagaatgaatacaaatg

SEQ ID NO: 213089 - DNA, 418 bp, Glycine max
  unsure (1)..(418): unsure at all n locations
agctacagaccaaagcaactcanaatctatgtatctaaaacccctcaatttagtggaatttcaaggtttgagaagtgaaaatgagaatggtgtaaatttggagcaaactctcacctcacacaagtctataaccttaatctaaacttgctcaaactggttntacgcctaanattccaccaaatcaaaatttgactcctcaacacccaaattttaccctagaaatggctcttgccttcactatggtcttttgtttttctcctttgcacatcccaagctntcccacagtcctaaatgacatttcaaactaggattaactcactttaacctccaatttctactgaatccagatttagcctttcaaacgctcaaagcatcacacttttccactcataacactacattctcactttctaaccct

SEQ ID NO: 213090 - DNA, 358 bp, Glycine max
ttggactcggatgttctgccgagtcgattaatcatgctggacgctagagattgtatacagaacctctcacctaatctaaatgacaataacctttctctcacaagtgtgattgtgtcccgtaatatatctagatgctcaagattgtaaacacaagctctgagccaattcaaagcgacaatagcttttgactcggatatccgatggagtcatttaataattctagacgctcaatattgaataccgaagctctgagcaaatgcatatgacaatgacttttgactcatatgtccgattgagtcatttaataatttgagaccctctatagtgaatgcacgagctctcaccaaatttaaatgac

SEQ ID NO: 213091 - DNA, 413 bp, Glycine max
  unsure (1)..(413): unsure at all n locations
agcttanggacaggtactagcaggtgctagtattctctaatttcgttgcttaaaattcctgcttttatttattagtttggttccttgaatcttattttaatttgcctagtgtcataccctaatttcatccgtgaaccttcatttgctaacattttgattcttgctagccgaatngagctacttaacaccattataagaaatgggcaagaaactcatagtaagggcaaaatggtcgcctgggcccattataagacttatgggagatgcaaccagcttgcctgggcgagcaagttgcttttggagtaagtcaccggctctgctgggcggcaagctcctccctctatanttgtacaaataggcgtgggaagcagaggggaaggggttcaacaccttactgagctattccactgaaa

SEQ ID NO: 213092 - DNA, 489 bp, Glycine max
  unsure (1)..(489): unsure at all n locations
atgaatcattgaatcgctgcatgaccggaccttataatctcagctgcacagtatggcctcatgagactacttctttcccgagggagatactataaatcaacctcctagcttgcgaggagtgtgttaccacgactggaaaacccgcgtagcaatatttatagaggagagacactaacatatttgggcatccataaaagatggagcatatgctctctctatgttagaccgacagtgaaatcatagagtaacctagagcacactggactgaggaacaagaagaatnactactatataatttaaatgctatacatataattacaaacggcctatgaaaggatgaatactttttggctgaaaaagaaaagcgctatgatatggctataccttcaatggccgttacgcacacataagtacaagatctggataccacttaacacggaatacaacccttggaagagataatgaactttcatgaatggccaaggattt

SEQ ID NO: 213093 - DNA, 388 bp, Glycine max
agcttctcaaggaagctacctagtctataaatagaagaatgtgtaacacttgttgtaactttgatgaatgagagtcttgtgagacataactcaaagttcaacttctctctctttttcttccttaaatttcgtgctcccccctctctctttctctccctctttcttttcctccattgaagcatcctctccaagcttcttatcccagactcatctgggtggtgaagctcattcttccaaggcttattccctagtggatggcgccgcctcttacctcttctcctttgtcttccgctgcatctccatggtggaaaatcaccattaaaggacctcattgaagctcaaagatccaccctccatagaagctccacaagccagctttatcatcctc

SEQ ID NO: 213094 - DNA, 459 bp, Glycine max
  unsure (1)..(459): unsure at all n locations
tctggtgggacatcttgacttgctntccaatctgacattcatcacagattctgccttcttctattttcagattgggaatgcctctaacagcacctttgtcaatgattttcttcatgcctcttaagtgcagatgtccaaatctttgatgccatattctgacttcatcttctttggaggatagacatgtggaggagtagctggtttcttgaggtgtccataggtagcagttgtcctttgatctgctgcccttcattagaacttcactcttctcatttgtcaccaagcattctgactttgtgaggtttacattgaatccttcatcacacagctgactgatgctgatcaagtttgcagtcagtcccttcaccaccagtactttgtccagactatgaagttcatcatgaactagctttcccattccaatgatctntcctttatagccatctccaaatgtcacat

SEQ ID NO: 213095 - DNA, 443 bp, Glycine max
  unsure (1)..(443): unsure at all n locations
agcttatcgtaatcgattagataattattttttagacaatgactggtttttcaggagtctctactttaatcaattaccaggtgatgtaatcgattacttctctcttaaaagtgtgtctgaagtgatcaataacactttatcgattatatcaagaatctaattgattacattgttcttgaaagatggtcagattttgggaagaatactttaatcgattgaaatgataatataatcgattacttctttgaaataattgattacattgtatatttaatcgattacatgcgattataactattttctctataaatagccaccttgtgttctcacttcaatgtggaaaaattaagtgtgaagatatatgagttgaagtaacagataaagagatnagaacaaaagtgcttagatacaatgtgactcacaacttctaatctttgaatatg

SEQ ID NO: 213096 - DNA, 479 bp, Glycine max
  unsure (1)..(479): unsure at all n locations
aagcttgtgcaatctanagccagtcagtttccaagatgaaatcntggaaaactggatttcttgttacttgaagggtccatctcagggacaagaacttcagcaattttggggaaaggaacataaggaagttggctcgtggccgatgccaagacgtttccttctaaatcacgacaaactacgcccatgccaattccaataccgttcttgcaagcggcatcaaagtttaattntattaattgctgatggtggacaccatctattctgatgagtcactgttgtggcggctctaaagcactgtgtttcggcaaataacccaaaaggaacgatcaataactaagcttatgggggttttcttttgctgaaagatacaattattccttcttcgccagattgaccataacatcccanacatctgcttgtgcaaagccncctattcttgtgttctaagcatcataccagccaagtattaaacgatgtgc

SEQ ID NO: 213097 - DNA, 374 bp, Glycine max
agcttgtgtacttgaataatagaataaagaatctgaacaaacttattcttaatttttttttctcaccctccatttattctttttacaattggaccatatgtcgaaccatagggctcttgtgaataattgataggaccgctgttgttcaagggagggcttgttgctaggacaatattattgctatctatatcaacattaacaatcaatgatttcttggacaaatatcatgcagactgaaaactaaacagtgttaataaataaaagaggactttaattgatcctcttttaatcttcattatttgtggcactatgcattggacctaaataaatatttatattactatggcctacaagattgtatacatattccattg

SEQ ID NO: 213098 - DNA, 459 bp, Glycine max
  unsure (1)..(459): unsure at all n locations
actcaagcttatttaacggccnctacactattattttccaagtttctttattgaaattatgtgttattaatattaaatttaaaaaatggcataaaaaataaaataaaaaactaattgctctttaaaatgctttttttaagttcttaactaaattatgatgtacattcttgcaaaaaaaaaatcctttattgctacctttttaaaatagtgtgttggaggatacccatgatttctaacttgagaccaaaaaatttcatgcaatgataattgtattaacagtatatttttaattatattttgataatttatataattcttaaagaaaaattatgaatatataagcttgcatcatttttaaatatgaagtatattaaattacaacccttagttttttttaggtcttacaactgttagtctttacaaagttgtattttcaggtagtattgagttcaatctttg

SEQ ID NO: 213099 - DNA, 315 bp, Glycine max
ttttttattcatttaatcttgtaatgattgcttccttgaaacggaaattctttattgaacaatattgctacatattggcctatatctgtaaaaccttgctatttccagctatataacaataatcagtctttagcggcactcacctatatcaccggtaaaagcttctacagcctaaattacgccagttcaatttaattgcagctcaactatttagcagccatatatatttgccgctcaccgaaaggtattcttggtgttgggatcatcgagtctgctaatatgggtacatcctagtcttttaacatgcataaaata

SEQ ID NO: 213100 - DNA, 221 bp, Glycine max
atcaatcctattatactttgcaaagacaaccaagtaagatgagtcattctgcctcgtcaaagtttaattataagggatggccataaaacttaaaaaactggagaacaatcaccacatgcattgcacctcatctgcgtatctttttcgctcacgagctgcataagaataacccatgtactattgcaatccttcataagaactgaagaatccatgttagcatc

SEQ ID NO: 213101 - DNA, 181 bp, Glycine max
  unsure (1)..(181): unsure at all n locations
tccctttttttttttcnntcctggctcgtttctcttctctgcacacctgcgttccactatccctgctcatcccttccattgggataccaaagcccacgatcccttcacagtggcacttatggcaagggctacgcgattttctaccatggcgattacacgaatggggcttatacaattgttg

SEQ ID NO: 213102 - DNA, 373 bp, Glycine max
agcttgtaaggcttggatcttcttcatcaatagagtcatttgcttcttgaagatcaatggcagtagaatggagaaggaggaacggtgattggagatgccactttgttagtcatcttatacgactaacttttgtatagaaaacttttacaaaatgtatatattttccccaatttatggttatttttgtaggattctaaataaattttgctttgtttttatctgtgctcagtagaagccttgtgtatggaattaatgtcaatttctcttcaatttcaggcaaaaaggagttattttgaagaagtgctaaagttaatgtctcgctaagcgagctcaatgcgcttagcgagtgtcatcctctaaccaagtcatcaat

SEQ ID NO: 213103 - DNA, 456 bp, Glycine max
tgtcaattgaacacatcaatagccttgcatcctttctcaccattttctctccaaaaatcaaaacttggaacctcattcttccccattatgcatgagatcttcaaggaggaagaggccacaattttcatcttcttccaagctccatcatattgttttgactttttctctcaaagccttggtaagaagcccttaaacctttcttttccttctaatttctttctcatttttatgaaaaattcttacttgaggttccaaatttatttttcatcctttggaagcttgagacttcaacatctaagctttttttccttaaccattttgtggaagcttcactcaaggtaaggggagtctttccacttcttaaaccctaaccttgttgcctttggaagctaggcttcattacatgttgtgatgtttaaaatttcatatctgcggctggacaacccaatgtgattc

SEQ ID NO: 213104 - DNA, 418 bp, Glycine max
  unsure (1)..(418): unsure at all n locations
agctttgagaaaattgaattgacaataactttatacacggatgtccggttgagtattgtaatatatcgagacgctccaaattgaaaacggaagctcgtaagaaattcaaacgacaataactttttactccgatgtccgattgaatcgggtaatatatcgagacgctcaaaattgagactagaagctctgagcaaattgaaatgacaataactttatacacggatgttcggttgagtcccgtaatatatcgagacgctccaaattganaacggaaactcttagaaaattcaaacgacaataactttttactcggatgcccgacatagtgtcataatttatcaagagatgctccatattgaatacggaagctcgtatcanattcaaaccgacaataactcttgactcggatgtatgattg

SEQ ID NO: 213105 - DNA, 378 bp, Glycine max
  unsure (1)..(378): unsure at all n locations
ntgggatctcaatttgagcgtctcgatatattgcgagactcaatcagatagtcgtgtataaagttatcgtcgtttggatttgctacgagcttncgttntcaatttgaagcgtctctatatattacgggactcaatcgggcatccttgtataaagatatcgtcgtttgattttgctacgagcttcccgtttcaatttgaagtgtctctatatattacgggactcaatcggacatccctgtataaagttatcgtcgttgaatttgctacgagcttccgttttcaatttgaagcgtctctatatattacgggactcaatccgacatccttgtataaagttatggttgtttgaatttgctacgaagcttcatttccatttcg

SEQ ID NO: 213106 - DNA, 361 bp, Glycine max
agcttaacaaacttagaaatcaagtggtcataaattccgaaatatagggggagtaaacgcacatttttatctatatacaattgtttgttgcttgcttgaatcttgatttcaggtattgtattgtcatcatcaaaaagggggagattgtagatgcaattgcctttggtgttttgatgatgatcatgatgatgaaattgatgcgaatgggcttttcaagattaaattcaagacaatacttcaagattacaagtcacaacatcaagatggtcactagtaaattaggaagggaattcctaattgaattagcaaaaggtttggccaagtaatttaaattaaaaagtgttttcaaaggtttactctc

SEQ ID NO: 213107 - DNA, 352 bp, Glycine max
  unsure (1)..(352): unsure at all n locations
ntntggagtagaaacatgggaccaactcattntatttcataaaagaagtcgtatccagtcaaggtctgagagaccatacaagtttcctaacgatttctaattatgtgggccattaagtctatcatatgctgacaatagccgagaagcccatgaatctcttcgggggtggagtaggcgtctgccatcgccttggccttggctaacaagcggggaagttcttgactcccgttcaaggtaagagcaaaccggtccatccacatggttgcctcttggtgtaaagagtcgatcacccttcctctagcctctttttccgcatatacttgagcatactcatccgcgattctatgctcgt

SEQ ID NO: 213108 - DNA, 430 bp, Glycine max
  unsure (1)..(430): unsure at all n locations
agctntcataagtgaaattaggtgcaaccatctccctaagagtcctctcacgagttggaggttgagccatgttctcagtatgaaaattagtagttgaatgctcaaaatcagaatatttagaatcaccagcaacataatgctcaaaaatgcatagaacgatcaggatgcacaccattcctaactaatctatgaaaggttctatctatttcaggatcaaagggttgtaaatcacctggatttcccctagtcatgcactatatgccgcanataatgtgttcttaaataagcaccagcggagggttaaaactacaactatagtcaaatgatatccaaatgagctgaaattttgtgaacaacaccctaanatcatgnaaagatagcacaaaaaatttcaaacanaaaataanattctaactatgaaaactactta

SEQ ID NO: 213109 - DNA, 394 bp, Glycine max
  unsure (1)..(394): unsure at all n locations
ccttggatcttcttcatcaatggactcctttngcttttgaagatcaatggcagcaaattggagaaggaggaaaggtgattggagatgccacttcaaggagaagatgagtcgagaacaagtttatcaccatatgaagccatagataagagcttgaagattggagaaggtgagtggacggagatggagagaaggggcaaaacatttatgccaaatgaggtctgaactttgaagtgtaatttctcaaatgatcaaagttgaaaaaatacacacataaggcctctatttataacctaagtatcacacaaaattggagggcaatttgactttctattcaaatntcacttgaatttgtggaacccaaattggagccaaaatttcactaattatgattagt

SEQ ID NO: 213110 - DNA, 331 bp, Glycine max
  unsure (1)..(331): unsure at all n locations
agcttcaagaaaaagatggcctcagcaaattccttatttccagaagggaattctatcaatagacctccaatctttaatggagagggttaccactactggaaaacccgaatgcaaatttttattgaggcaatagatctaaatatctgggaagccatagaaatagggccttatatacccaccacagtagaaagagtttcaatagatggtagttcatcaagtgaaagcataactatagaaaaacctanagatagatggtctgaagaggatagaaaacgagtacaatacaacttataagccaaaaacataataacatctgccctgggaatggatg

SEQ ID NO: 213111 - DNA, 387 bp, Glycine max
  unsure (1)..(387): unsure at all n locations
tctttggaccttgaacaagcaattaactcctctntcagaaccatgctatgtgctcgcgactggtctctttcttcccttcgcaacttgagttcactattgctaccccatagagctccgcgaaatttgttccggccatactcttccttgcgagccctcttggtctcttgttcaaaggctcttgcggtaattgcattctcttcccgtaacccggcacactccttccgaacgtgtgtagcggccaacttgaacttctccttggcaagttttgcctttcctaactcgcttttgagagcttggacttcttcgtcctcttccggtgcttcaaaactctcttcgctgacgacttttaacttggcgagccaatctaaacctcgtatatggactttc

SEQ ID NO: 213112 - DNA, 431 bp, Glycine max
gctttctcggggccattttctgcgaaggcaaacatttggaaagttagttttaccaagaaatgctactcttaaaacaaaaatggcatacaacctcctccaataaacacaaacatcaatgtaaatttagagcaaactcatgcacatacttccttatgaacattcactcgcacaagatattcttctacccaaaaaaatgcacccatgcgcaatcaaggaaccttcgttacctagattatttatatgtacttccaaggtgtatttgctacctacatcacatgcatttccttggctaaatttacatacatgcatactcaaagcatcttggctaccaaaaattgcacacgtgcacattctagtatttctaatacctatgcatatacaaactttgtgatgaatcttggctatctacacaataaagtgctacatttcat

SEQ ID NO: 213113 - DNA, 321 bp, Glycine max
  unsure (1)..(321): unsure at all n locations
tcttagtctcagatgatgcagctgagnttgtagctacctcatgcactcctctaatgactatggcatcatttctggcgctaaactgctgagagttggaagccatcttctcaattaaatttctggcttcagcaggagtcatgtttccaagggctccaccactggcagcatctatcatacttctctccatattactgagttcttcataaaaatattggagaagaagctgctccgaaatctgatggtgagggcaactggcacacagttttttaaatcgctcccagtactcatacangctctctccactgagttgtctaatacctg

SEQ ID NO: 213114 - DNA, 436 bp, Glycine max
  unsure (1)..(436): unsure at all n locations
agcttcgaatgggcattgtttcatcctagtctccattgattactttactaaatgggttgaaactgcttcatatgctaatgtaactaggaatgtggtggttagattcataaaaaatgagataatttgcatatatgggttgcccagcaaaatcatcgctaacaatgccatcaacctaaataacacgatgatgaaggagttgtgtgaggattttaagattcaacaccataattcgacaccttaccaacccaagattatcaatgtagttgaggccaccaataagaatatcaagaagatcattcaaaagatgatagtgatgtacaaggactatcataagatgttgtcgttctcattgcatggntatcaaacttctgtgtgcacttttactggggcaaacccaatttcgttggtgtatgggatggaagctctccaccctttc

SEQ ID NO: 213115 - DNA, 457 bp, Glycine max
  unsure (1)..(457): unsure at all n locations
gatgtcagctctacttactgcattnntattttctgttattacctgatgcatcttgtttctacttacactaagaattgttttactttgtattttgaaattgcatatagttatgagtgaggactatgtgtgccccacactctgtttcctacattctagaattgttagctttgcatcattgtgttggctatcgattttatcgtgcaaagagtcgaggccaatcatgagattcagaaggaaaccatatagaaatgtaagatttattttacatttgtatcaatatgcagttatctgtgcaaattntggttgcattgaaatgaggttgtgattgccaattgtatcaaccacaattaacccatgtcaaatggcaatggttgtaacacaactgccaccacaatctataaccttggctatataagagacttgtaaatgacatgaaagtatttagtagtgtggagta

SEQ ID NO: 213116 - DNA, 378 bp, Glycine max
cgcttggaacggacacgagtatatacgaattatagacagctttatgtgctttctgacctttgcgaatatgacctaccgaggaatattccaccgaggccttatagtctatatctatatttgtaccttttctctgaactcacaatgtgttcttattcactactccattaccagacataaggaattggaacaaaacagcacatgtgcactttacttttctgcgatacgccaagccttgacagactatacacatgaagttatcgtatgacagagagtgatattgatatgaacaagactacatgcttactaactagagacacctgaacgctcatattttatagagcattctctatctagttgcgggcgatattactttaacat

SEQ ID NO: 213117 - DNA, 294 bp, Glycine max
gtgcaccacagagacataacaggctctgtattagcactaaaaggatcaattcaaaatgcttacataacttcaaaagtatatcatattgctagcccatagtaggcacatcgatattccacttggatcatatgtatctaggactcttcttgatcactcttggtttgaacaacgatgtgctgatcaataattcaaacatcttttttgctttcgtagatcttaccttgatgttatgccccttagccaaatcgagttctctctataccaagcccttaatttctgcctagcatgctatga

SEQ ID NO: 213118 - DNA, 214 bp, Glycine max
catgcaagctcgtacctctgggcaatatctttaaaactagtcacttatttagtgatgactttagaaagaatgttcacacacaagttgcttgaataatcgtgacttttggtaaagtatctttcgaaatcactcactggtaatcgattaccattaaagtgttatcgattactcattaacagatgtgactcttcactttgaatcttgaaaaccttaa

SEQ ID NO: 213119 - DNA, 443 bp, Glycine max
  unsure (1)..(443): unsure at all n locations
tccttccaaagaaatagganaaggttgctccactaaaattttatgtttgggaagggagagatggatggaaaaaagggttcaagcaaactctacagtacttttgctacaggaagttagaaggtgagatttggaagagcttatttgaactagtcaaaatggcttatgacattcgtataagatatttttattcaataaggttcacaactaagcttatggataagctntcatgttatcagtttattgaataagtgcttaattaagatgttttgtcagttgagcccttaaagactaattacaggtcattcacgtggagctcacaaactggagggctgagttgaattgagacagatgaaataacaggaaaaatatatttgttcaatacttaaggaaacaagtttacanaggcttatcagctaaaatatatgttcaagagttaagatgga

SEQ ID NO: 213120 - DNA, 442 bp, Glycine max
  unsure (1)..(442): unsure at all n locations
agcttattcgaagccccttgaattgattgtctgttcatgcatcctcaaccattgagttcggagccccatgaattgattgcctagcgctgttcgtgcatcctccatcatcaaatcttattcggaacctgatgagttgattgccattcatgcatcctccaccattgagtccggagccttacgaattgactgccaagctctgtttataaatcatctatcatcaaatcttattcgaagccccatgaattgattgccattcatgcatcctccaccattgagtccggagcgccccgaattgactgcctagcgctgttcgtgcatcctccagcatcttattcggagccccaggaattgattgtcgtttatgcatcctacaccattgagtccagagccnncacaattgattgcctagctatattcgtgcatcccacatcatcaaatctta

SEQ ID NO: 213121 - DNA, 464 bp, Glycine max
  unsure (1)..(464): unsure at all n locations
ntgcagaattggtcttcgccagtgaaaggatcaatgtgggttcgaaaagaggcttatttgatcatcctactangacgactgagaaaactggggcaaataaagagggtgaggatgagggagaaacccatgctgtgactgccattcctgtacggccaagtttcccaccaacccaacaatatctttactcagccaataacaaactttctccttacccaccacccagttatccacaaaggtcatccctaaatctaccacaaagtctgtctaccacacttccaatgacgaacaccacctttagcacaaaccataaacaccaaccaagaagtgaattttgcagcgagaaagcctgtagaattcaccccaattccagtgtcctatgctgacttgctcccatatctacttgataattcaatggtagccataaccctagccaaggttcatcaaccttcatttcttcgagaata

SEQ ID NO: 213122 - DNA, 445 bp, Glycine max
agcttgcacacaagattctccttggctggcacttcaaaaccttctggttgggtcttatagatgtcttcctctaaatccccatgcaagaatgcagttttaacatctagctgctccaagtaaagattctctgcagcaacaatactcaaaataactctgatggtagtcatctttacaactggaaaggagtctctgtgatatcaattccctgtttctactgaaaccctttcaccacaagtctcgccttgtatcttcttctaccgtcagattcttcctttagcctacagacccacctattttgtaacgctttctttccttctggcaatttagttaaagaccacgtcttattcttctgaagggatgtcatcttatctttcatcgctagcttccactcaatagtgtcattcccctgcatagcctcactgaaacattctggctcaccaacatc

SEQ ID NO: 213123 - DNA, 466 bp, Glycine max
  unsure (1)..(466): unsure at all n locations
gcatggaagagttagtcttnctacttttatttgntgaccatatagttgtacctggagatatgtcgcgggggtcaggggaccttgnggacgtcaggtggggtgctattgcccaaaaccaagcttgaccaatcctgacccaacccgggcatagtcagttagtgagaacctatgacgtacctaagcaggcgagctcttggcagtccaccaataaaagaacaaagtccacgaagcaaggaggcttgtgtggcggctgaccagctatgtatcttgggtggtttctgaaaattaccctctggtaatcgattaccattcgtgggtaatcgattacaaggtttaaaaatggagacaggatgttaagtagcttctggtaatcgattaccaattgtgtgtaatcgaatacacagtatgatagagcactggtaatcgataccagttgtgtgtatcganacacagtgtacctgtacta

SEQ ID NO: 213124 - DNA, 354 bp, Glycine max
  unsure (1)..(354): unsure at all n locations
agcttgtccgcataggttcttcgatctatccaggcctgtttatatgcactttttaggcataatcttataattaattatctaatttctctctttaggatttgttacgtataactcccaaattttgaattcagcttattccgctttttttttttataacgcggattttaaacatctagttatatctgacataaataagagatttttacactgtttatgtaataatataatttgtactacacagagtctatatatcaatggaacacatttaaaggctcatattttggttagtatgttacttttttggtagaaaaacgaaaatcacctganatcaacactaattatactgatatttta

SEQ ID NO: 213125 - DNA, 449 bp, Glycine max
  unsure (1)..(449): unsure at all n locations
tatacactttatatgtaagccctcattgtattcaacatattattgatatggaaatgatatgattttgctactgtaaaaaaaaataagcactaatattaattttgactacatcttcaaaaaccaaattatggttgtttttataaatgaagaaactaagactaattttaatcaattcttcgagaaccaaaaattcattttaccatcataataataattacttatacacttgtcgttttttttcttttcatgttgggcccataaacatattttttatatattaatcacatgcatcattcattatataagtaattttactctaattaaaaataaataaattctctgtagatatttaacataattgtatacatccaagactcaaattcaagatgattgggtntactcacataataataataataagaagaatagtgataataataatattgata

SEQ ID NO: 213126 - DNA, 403 bp, Glycine max
  unsure (1)..(403): unsure at all n locations
agctgtgaccattngacttatatgctccatcttgagggggaatgttggaattacacacattgtatgggtacttgttccacacattgcatgggtacttgttccaataaagaatagtttttttttatcagtaaaactaaatatattatatatataaatgatcaaaagtaccagaggtactagtacatagggatatacatcctcatatctagacaccaaaactgaggtattctagatattaggagaacatgtgttttgttctaattgtaacacccattacataagaaaaccttggctaatattgcttgaccattggtttagatgggttgagaaatgtttctcanaatgtctaagccaagtccaggtcaagaaaacagcttcatcaaacaatctgttagcatcaaat

SEQ ID NO: 213127 - DNA, 406 bp, Glycine max
  unsure (1)..(406): unsure at all n locations
tccagatatagcatacatagttagggtattatgcagatatttaagcaatccaagaatggatcattggaaagaaaccaaaagagttatgaggtatttgaagagaacaaagtattatatgctcacatacaaaaggtcaggtcagttggagatcactgggtattctgacttagattntgcagaatacctagatagtttgagatccacttcaggttacattttcatgttagtcggtggtgcggtttcttggcgcagtgccaggcaaacccttactacttcatccactatggcgacaaaatatgtggcatgctatgaggcatcaaatcatggaatatgattgagaaattttgtcacaggttntcaaattgtggaatgaattgaaagaccacttaagttatattgcgacaat

SEQ ID NO: 213128 - DNA, 407 bp, Glycine max
  unsure (1)..(407): unsure at all n locations
agcttaactntggagcttactgaaacaagttaaaacgagtttatttgtataaggttcttcatgaatattattttaataagctaaagaaaacttccaataactaagaaggtcactagtcatttacataaatccatataagctcttcatgaatattattttaataagctaaagaaaacttacaataactaagaaggtcactagtcatttccataaatccatataagctcgtacaaatgctcccttgaagataaatttgaggaacttgcctgtttcttcttttgtgtgattatagtctttatctttgaacttttgtctgaactatataggttatctgcaactcatatatgatatggaaccctatttcagaaaaggatgagagactctgcacctaccgggcacgaacttga

SEQ ID NO: 213129 - DNA, 436 bp, Glycine max
  unsure (1)..(436): unsure at all n locations
tatacattcaatggcatggatagccatgctaaggagcttatagagcttcttccaatagtgaataggtcttcattgaaaagggataagcctaacttctgataaaaaaatctactaatatgtttgcttccaattttttggttgtcaataatatgtttatttgtgcatgcttgtagttacctactactttggagcaggttgtttctaaaaaagttcatcttttagaagggaataaatattagcaacacattatttttaatatatatatatatatatatatatatatatatatatagagagagagagagagagagagagaagagatcanattgaattgatgtaactttgataacttgtacaccattctataacttcaatngaataatgttntcttaaaactcatttgtggatagaaagttcctttcacatagataacata

SEQ ID NO: 213130 - DNA, 408 bp, Glycine max
  unsure (1)..(408): unsure at all n locations
agctttngggctgganaactatataacaacaccaaggttctagtttaggcccctctctctctctctctctcttctctcctctctctcctctttcgnttggagtttgaggcttctcttcttcttttagacactttttcgttttgcaattccagttgttacttttcattttagcaataaaatttcgttctctattgattaatggaaggctaagtctccagcgttgttttctcttgaggatcaagcacagttctctttgagtttctattattactattaaattttgttcactttttcctcttcactaattactctaaaattgctgctattaattcatgcatgcttagtgcttgattaattgtctctgcgcttaatttacattcatgcttaatgatcgntcatgattaattg

SEQ ID NO: 213131 - DNA, 399 bp, Glycine max
  unsure (1)..(399): unsure at all n locations
tagataccaccagcatcaaggaattagggcggttgatggaacctctccaaatgcaagctttccgcaagacttacggaaagatcttagaattgaccttagcagaggtatccatagaagccattgcatcactcacccaatactacgaccagcctttgagatgcttcacattcagagacttccaattagtaccaaccattgaagaatttgaggaaattctaggatgtcctctcgggggaagaaaaccatatctttcatccgggtgtctcccctctntgagcagaattgcaactgtggtcaaggattcagcaagaggtttggacagcataaaacagactcggaacgacatggcgggcataccacggaggtacctagaagacaaggcgagaggtatggccgatc

SEQ ID NO: 213132 - DNA, 383 bp, Glycine max
agcttgttggtgagagcaatgtcaagaatgtcaccaacttcagccctaatagttgggcctggaaactgaccgttgattcccatcagaacgtgttccaagcaatctggttttctgatcatgtactccacatcaaacttgtagggtctcactattcctccgattgacaattctaccaaacccaaccatattatgcacccaacaaaaagagctttcaagctcattcttaattaattttgatcagagaaagcctaattagcaatataacaggaaggtatcaagtagtaaaacgaagctattgatgaacaaattgaaagaatatgtatagaggatcgaggatttggattggtggtaccattgccttatatatataagagagagagaga

SEQ ID NO: 213133 - DNA, 416 bp, Glycine max
  unsure (1)..(416): unsure at all n locations
ctttcttcttggttatgattgttggattcttgttatggcagctattggaattatggcaggtaggttatcttggatgtgtttgacattctcatcttatgttccttttgtaaccatatcgcttgaatgtctctcatcattagcctgcagatgatatagaggaggtaccagatttcactcttccatgcagctgtgatgaagagatgttggagaaaaattcagtgaaatgagtaatgtgataaattattntggtgaaccaaaggagtttttgttttgcagaatatcaaaagaatacaagtgctgttaacactaacccaagttcccagatcttgaaatggagataatcatcaatctgttgcataaatatgtgctaatntagtgtaaatattngtgtcaacattactttgttgagtttttta

SEQ ID NO: 213134 - DNA, 293 bp, Glycine max
agcttgtaatgaatatgaacatattcttatgatcacttatttctgggcagatttcactcattgctcaatccaactccttgcggcttgtatttccaaccctgattactgccttgtgcaaggcccgaggagtcacctcagattctcttaccttcgagtcactcagcctagccattaatttggcctatattaagaagaattgttggaacctgtatgacccttctgtcacttttccaaggacccaaaaatccagagctagaaaatctgaagacccatctctctctgtccccctactt

SEQ ID NO: 213135 - DNA, 366 bp, Glycine max
tggacttcttcatcctgtttcggagctttgaagttctcttcattgataatatttaacttggagagccaatctaaacctcgaggacgaactttcggccattcatgataaccaccaatgatgccattacgaatgcccctaagatctttatctattctccgttggatggcccaagagaggggattaagatggaacccacgcatgatgcatatgcgaaaggtacaatacagggatgtacatagtacgacaatattcacacacaaatataagcaaaagggtacatgacacttttatgcatggcacgggaaaaatggcatgcatcgtgtatgctccgtgccccttatttaagggacctatatgggagagagc

SEQ ID NO: 213136 - DNA, 374 bp, Glycine max
  unsure (1)..(374): unsure at all n locations
agcttaataaaagaacgcanagcataaactgaatcaacacgcacaggaagttcagaatcctgcattctggatacaacacactgcaaagccctccggaagttgttctggtctgagaagttaatatgggcatattgtcctgcaacccatgctgcctgtttttcacaggaaaattaaagtgtagtctaaataataattccatcgcatggttatattgtattttagaaggagactggaataataataaaaaaattgcagcatgcagatctttgatctctctggttttctccctctctatcctccctgttatgttcttccctctttttactttctgtctatcagttctctctcttcccacctanatcctatatcacatg

SEQ ID NO: 213137 - DNA, 449 bp, Glycine max
  unsure (1)..(449): unsure at all n locations
tgcagatgctctanggagaattgctgataaattgtagagcatggaggatccgaatagaatagtgtacataacaatttggagtcaacaatagtgattcccataatttatctcaggatagttcttagaagatgaacatcatactagttacccttttttttttaatcttctgtctgcattttgccacttttttgtggtttactactgcactaaggcattttatacacaaatttggaggttactgcattttatttattttcttctttcagtgaggttatatgaatctttcctcggtcaataatagcggttgtacagataaagttactattactaattaaggtacatttttattagaggtatctctttgcgggctcatgcaatnatttgcttctcttgtataagtcatctctccacacatatataatattttttgttgagttaaccttactatt

SEQ ID NO: 213138 - DNA, 345 bp, Glycine max
  unsure (1)..(345): unsure at all n locations
agcttgcttcttttggtgcatagaatgcatgcaaaaaaaaaatagtaagtgtcatgaatctctgacataagcttcaaccaattaacattgtttgtatgacaactgttgtagttggacagcaatcacacagtttgtccaccatggtatgctttatgttcctattggttatagttttagtatgctttatgttcctattggttatagctttggtgctggaatgttcaatttggagtccacaaaaggaggaactccatatggtgttggagttnttgctggagatggtacaagacaagcaagtgaaatggagctggagcttgcacagtatcatggcaagtatatatgaaa

SEQ ID NO: 213139 - DNA, 440 bp, Glycine max
  unsure (1)..(440): unsure at all n locations
cagcttgtagggggctganagatatgtaaaatgctaaaactaaactttntagttggatctatacaattcacccaacggttgtaaagagtccagggggctgaaagacgatgattatataatgcagaattttgagaatattgttgtatgattgtgctaatcctaattgtattgagaatattgctacatgattttgctgatcttaattgattctatttgtgttaattctgattgtatgtattaattcttattgtattttaattctattttgtatcttgatctcttgattattgggatcacttatttttaggatagatagttgtatcatatatgtcaggaaaagctataggagaaatcttagttaggtgggtggatgaccttgtatatatatctatcgattgtttctaatacaggcagaacaacacattctatttattgtattc

SEQ ID NO: 213140 - DNA, 351 bp, Glycine max
agcttggagaggatgcttcaatggaggaatttatagagggatagaaagagagagggggagcatgaaattgaatgaagaaaaagggagagaagttgaactttgagttgtgtctcacaagactctcattcatcaaagttacaacaagtgttgcacatgcttctatttatagactaggtagcttccttgagaagctttcttaagaaaacttccttgagaagcttctttgagaaaacttccttgagaagctagagcttatgtacacacacccctctcataactaagttcacctccttgagaagtttccctaagaagattcttatagaagttagagcctaactactcatacctctc

SEQ ID NO: 213141 - DNA, 449 bp, Glycine max
  unsure (1)..(449): unsure at all n locations
tgtaagattatggggtacccatcacatgtggtactaagtgtgagtcaggcgattgtgcacaacaagtnttccacatacacaatgcgcgcataaacccaccatcccctgttgcccacctacaacttagctcacgtactcccacgtagcccatatcctcgttactctcaacagcgggtccccatcaatactgccaagctttcacagcatccaagcagaacagcattcaaacagcacaagctatcgcagccaagcgaaacagagcatacgcagaaaactctgctcaacagatcaaccataatcacagtttttctcacttaaagaccacagtagcaattgcttcgatccaattcgttaaccgctggatcgacgacaaaattatactggaagtctatagtgcataaggctacattgtgaccgttgtgatctattagcaacctccaaaactcatg

SEQ ID NO: 213142 - DNA, 389 bp, Glycine max
agcttagaaatagaaagtacttttcagttttccaatgagttgaaaagacatttttgccgagttgttacgcaattctattcattttttgtgtgtttaaagcacttaacacttgatgacatggtatagcagacttggtcacttggattaatgcgttaatgagtacaatttttgggaaatttagcatacgcctattgttgagtgtagtatgatgcaatctggatttcttagtaacacttggctactcaggcctttgtatgacaatgaaagataagaaccttagtagttaatggctggtcttgtgcgttctgatttgcaatttatgcccgatcagtgatccttcacatcacaaaatgtggcttctatttcctcatattacccttgttcatact

SEQ ID NO: 213143 - DNA, 424 bp, Glycine max
gctcgaagacaagactatacgaggtatcttccttgggtataacaatatctctaagggctaccgtgtctacaacttgcaaactaagaaactcgtcatcagtcgagatgttgaagttgatgagtatgcttcttggaattgggatgaagaaaaagtgaagaagaacgttcttatacccgctcaactacctcaagaagaagctgaggaagaagacccaggtgaaccaccttcacctgcaccataacaacaagatcaaaaactatcatcaccagagtctactccaagactagtaagatctttggtggacatatatgagatcagtaacttggccatacttgaacttggaagctttgaagaagcgtcgaagcatgaagtatgggtcacggcaatggaagaagagatacagatgatcgatacaacaacacat

SEQ ID NO: 213144 - DNA, 448 bp, Glycine max
  unsure (1)..(448): unsure at all n locations
agctntgccaaaatagcttacatcagctntgaaaaatcaatttttgaagaggataagtcataagtgactggctaatcagcttcacagatatacatgtatatataacaagtagtaacaatgtgctttacctggactttatataatgaaacaacttccacaacaacaccaatggacaaaccaagttcaactacaacaaactaattcagcttcacctggagttgatataatgagtaatggctttagaagaactcaaagccaaaccaagttcaagtacaacaaattaattaatctttttctcaaccaaagtatgtcaaactacttgttggatattaaaagtgttagttattcatgtgacaggcaaagagagttgtaagacaataattcttggttaaaactgtcaatgaagtattgcggcattaatttgatacaaactgatcaagaacaatga

SEQ ID NO: 213145 - DNA, 428 bp, Glycine max
  unsure (1)..(428): unsure at all n locations
gttgcgcgtactgatgggtaccatgaggtgtttgctgggttttgacccacgcgggtgttgaagagacggcatgggcatctccctccttcctttntgcccatgttgccccgattcttttggcattcgcgtttgtggaggaaacataatcaaactttcctcttttcaatcctacctcgattctttcctcgacaaacaccagatccgcaaagctggacggcatgtaacctactagcttctcatagtagaacactggcagagtgtctaccatcatggtgatcatctctctctcaaccatgggaggagccacttgtgccgccaaatccctccatcgctgcgcatattctttaaaggtttcaccctctttcttgaacatattctgcagttgagtacggtcaggagccatatcagaattgtactgatactgcctt

SEQ ID NO: 213146 - DNA, 392 bp, Glycine max
  unsure (1)..(392): unsure at all n locations
agctttctagcttttcattggtgtattttgatctcctttntgtgctctaaattgtgggagtgtgctcaaatatatggggcaattttgatttgttttcttgcttgattaagttgaattgggggtttgtatgagatggccctaggcctataatgcattttgaaacaataggacatgccacattgtccccgttctcttgctattgatgcctaaacgcgcgcccaccaagtgttcggtgaaatgcctcaatggcattagcgtgtgacttttgtaaggagacaacccatggggtattttggtttgtgcatattttctatttttttggaatatgtattcattcccgaaaaaggctagagtaattgccccacatatatcctagtcctagaaactgaaat

SEQ ID NO: 213147 - DNA, 475 bp, Glycine max
  unsure (1)..(475): unsure at all n locations
tgttggacacgcggagattacgtcatcttccacgctcacattatctgtcatactcaaatttgagtcacgctgacgggcggaaatacccgagtggttatccgtataaacattcttttttgttgtctgtaagacgaanagcctgatagcaagcagagactaacgtcgttttctgcgcccttcgtcaatcgcggccgacaagtcccgttgacacgcggagatttacgtcatcttccgcgcacacaagatctgtcatactgacatttgagtcacgttgacgggcggaaatacccaagtggttatccgtataaactttcttttttgctgtctgtaagacgaanagcctgatagcacgcagagactaacgtcgtcttctgtgcccttcgacaatcgcggccgacaagcccattgacacgcggagattacgtcaacttccgcgctcacaagatttgcatactgacattngagtcacgttgac

SEQ ID NO: 213148 - DNA, 308 bp, Glycine max
  unsure (1)..(308): unsure at all n locations
agcttgctagtcatctttttaactcttgctcttanagcaggttatatggtttgactagccaagggatagacaatttgatcaaaggactcagatgttttccatccgacggatcggagtttgagtatttttgtgagttgatgataataattgggagttgaactagattagcgacctttgtttgcatgaggaggtggtttagtgaaatcaatctcaactcttttatccttagatatactacttctttatatcgcactccatgtgttcgtaaaactgccaanaatagctggttaattatactcgtggtattt

SEQ ID NO: 213149 - DNA, 411 bp, Glycine max
  unsure (1)..(411): unsure at all n locations
tgaagaaggctgagcaaacgggtaggcatataaaaggaagcacgagaactgcatataaaaggaagaaagcgctcctcgtgatggcgcgttgaacctgcaaacgcaagtcgtaggctccaatggcatttccctgcttcctgcagctgcagcagtctgctgcagcactgtgcaccctgtcacctgcatagctaaaacgccagtttgactggcgtttctggcctccatgcacaacgcgccagtggatgttgcacgtcccactccacgtaagtagaaggcgaagccgctgctgctactagcacgtccctctccacgtggcagctccttcacggaagcgccagtggtggtggcgccatgcatggcgttcacgtaccaaaagagcacncgctgagaataaagtttggaagaacccca

SEQ ID NO: 213150 - DNA, 325 bp, Glycine max
  unsure (1)..(325): unsure at all n locations
agcttttgttcctttntataaaaagagaagttctgaaactcatcacgttgtctaaaaaggccttgaggtggatctaagtactctgatcattcattagcatattcatgatttggtggcatgctcaccaatatttgtttctttagggaactcaccataactaaaaaaacgcaaaggcacccctataacacccgatccaaaagtaagatggataacgaagagggagtgcaagaacagatgaaggctaacatatcggccttaaaagatcagatggcttctatcacggaagccatgctannaaatcaaaaatcaataaaagacaatgata

SEQ ID NO: 213151 - DNA, 439 bp, Glycine max
  unsure (1)..(439): unsure at all n locations
tcaatagcatagcctcgtaagaggacatccaaagntgtcatattgagatgattctctctgtgaagtttgtcagaaagggaaacaagtaaaaagttcttttaaagaaaataaatgttatttccacttcgaggccattaaagcttctacaccttgacttgcttgaaccaaccaggattgcatccctttttggatgcaaatatggtctggtcataatggaatattacactagatggacttgggttaggttcctaacccacaagaatgagtcctttgataccttntataaatnttgtaaaaagattcaaaataaaaaaggcattngtatctctntaatcataagtgatcacagggaagagtttgaaaatgatatntttgaatgaaaagaatggtattcaccatatattttccactganagaataccaaactagaatggagtta

SEQ ID NO: 213152 - DNA, 331 bp, Glycine max
  unsure (1)..(331): unsure at all n locations
taacagactcaggaatgtcanaggttgatgcaatntcacctctcagttaccaaagccagacgctcaataccatcaaaatcagcatgttcaatagccaatattcccgcatcagctaagagctcctctggaaaattgcaaatcaactgtctgttaacaaaacagctgataccatgacctattatcttctgcaccttttctctcattatctctttctctgctgtttcaatttgagcaactctagccatagaatcaacacgaacacgtgcaccatatatcttcactttgtctgtgtccatggcaatgtttgccaccagtatctttgcattctcta

SEQ ID NO: 213153 - DNA, 338 bp, Glycine max
  unsure (1)..(338): unsure at all n locations
agctntgagcaaattcaaacgacattaactttttactcggatgtctgattcagtcccgtaatatatcgagacgcttgaatttgaatgccgaagctctgagcaaattcaaacgacaataactttttagtcggatgtctgatcgagctccgtactatatcgagacgctcgaaatggaataccgaagctctgagcaaattcaaacgacaataaccttttactcggatgtctgattgagacccgtaatatatcgagacgctcgaaatggaattctgaagctctgagcaaattcaaacgacaataacatttacctcagatgtttgattgagctctgaatatat

SEQ ID NO: 213154 - DNA, 417 bp, Glycine max
  unsure (1)..(417): unsure at all n locations
tgcatttggaattgcgaaagccccactccatcattaggattattacctgacatctcanacaaacaaatcaaacgtaacaagacaattatagctgctgtttgaatacctcacccactcaagtgtatcacacaattatggctcttctctaatgaaacactcttgccttttaccactctaattccccttgagttcttaggcaattcaagagattatggccacaacaaagaacaattcaccaatatgtgtaaggtaaggctagagagacaaggaaaaggttaaccaagaaaaggctaacaatgtttttaggcacacatgaaggaaataaaattcagaattaagaattcaagaacaatccttcatcaaccaatatattaccttaaagagattcttttaaagtcttcaacatgaccattcagc

SEQ ID NO: 213155 - DNA, 441 bp, Glycine max
  unsure (1)..(441): unsure at all n locations
agctcttgcgtgcaaacttatcgttcacgttcctctcattggaattgaatgaaaccccacacattaacaaagtcactttcaaaaagacactttcgttgtccccccctcactttttttccatacatgaagaaaatgaacggtttataatagattgggcatggaagttgacaggtgaaatcccaaaccccaattctcactatacccctttntttttcttttattctccaaacattacacaaggagttactaccaaattattattttcagtactgagagttggagggtctattttctgtccattaatacctgtctcatangccataccacttccatattttgcaacattntctcctcacttgttgcataacaccaaagaactacatatagttgtcattgcacaggtacaacaacctaactagctagctagctagacacacaccc

SEQ ID NO: 213156 - DNA, 432 bp, Glycine max
  unsure (1)..(432): unsure at all n locations
ctgtgtatcattatgggtttagagggccacaaaaagccaccaatgaaggaagaaatagatactttgattcgaagcatatttatttattgaagataatccggacaaaacctttgcacttttcctcacctttttaaattaattactattagaattactattttttattatctaatattatacgagattacgagcttataattactattggctcaaactattgtcaagttatttttttaatccacatttgatattatcttatatatatggntcaactcttaaaaaanaaattgtgtgtactcaactcttgcatatagagatttagtatttcacagggaacaanaattctatattaatatagaaatatataacagaaataaaatatccaaatgtataaagtagcaatttaatcaaatattatcatttcacaaagat

SEQ ID NO: 213157 - DNA, 285 bp, Glycine max
  unsure (1)..(285): unsure at all n locations
agctntagctttgtccccaaggcttcatgtatactggtccaaaatcgcgaagtgaacctcggatccctgtcagatacaatactagaaggaattccatgcaaccttattacttccttgatgtacaactccactagcttctccattctatacttcatattcactgggataaaatgagcagatttggtgagtcgatctactataacccacacagcatcatgtccacgactagtcttgggttaactagatacaaaatccatagatatgctctcccatttccattctgga

SEQ ID NO: 213158 - DNA, 111 bp, Glycine max
  unsure (1)..(111): unsure at all n locations
tgctcntaaattacattgatgtttggattatgggaggaggttgtatgccatttttggtttaagaataggatcccactggtaaaactaactttccaaatgtttgccttccca

SEQ ID NO: 213159 - DNA, 397 bp, Glycine max
  unsure (1)..(397): unsure at all n locations
agcttcttatccaaggctcatcttggtggtgaagctccttcttccatggcttattccctagtggatggcgcctcctctcacctcttctcctttgttttccgctgcatctccatggtgtaaaatcaccattaaaggacctcattgaagctcaaagatctagcctccatggaagctccagaagcaagcttccatcaagtggtaatcagagcacaagagcttcaagtaggtgctccttaaacctccattaattnttttgctttaccttttcttccattgttgtttcttcatttttttcttcatgcatctcctcacatgtcttgtgccaaattttgttaacatgattctctagagtttcccaccgataaacttgctatagaagctagaattgattttctat

SEQ ID NO: 213160 - DNA, 389 bp, Glycine max
  unsure (1)..(389): unsure at all n locations
tcaacacannatgcgaccccggaacccagctgcaacccctgtaaccagccacgacaccccacacccacgcgtgacccgctgcacataacaaccagcagcgacgacccacggcgtgaacggcggcgacgagcacggcgtgaacgacggcgacgacccacacgcagaacatcgcgatccaactctgttgggcatcttgaagctttatttttttttgggtttgtttttgctgtttgacaccccttttttctgtctgtaactttttttccctttttctatttgacaccctctttttactttcgacaattccatttttattttttttttctatttgacaccacaattttttttgttcagtcctcttttaaatggctgaaccatcatccgatgct

SEQ ID NO: 213161 - DNA, 452 bp, Glycine max
  unsure (1)..(452): unsure at all n locations
agcttctattttactgtctccgtgtgagggtcgtttctctttctgtggacattatttcacaaatttcaatggtggagatgtgcaaaaatgggttccaaaggtggtatcgaaatttcacgacaatccaacagttgacgagtctgaaatcgtagttttacgaagacaggttttgggtctctgtggaaaaagagaaagctacgatacgaatgacatttctctcacctcagataatatttcgcanattccaacaatgagaatgttcgaaaatgagttctgaaaggtgctcaaatttcatgatgatccaacggttaacgagttcgggatcgttattttactgagacaggtttgagtgtatgtgggacaaagagaggattttaagagaagaagaagggataacattattgagaggaagaggaagcgtaaagatgtattgtcagtctgaaaactaacct

SEQ ID NO: 213162 - DNA, 220 bp, Glycine max
  unsure (1)..(220): unsure at all n locations
actaagctttaaataagggcccaaacactgaanagtcgtccatgaatatctcttaatacatttctccaccatgtctgacaaaatggccagcatgcacctctgaaatgcggctggtgcattacataacccaaatggcatctgtctataggcaaagacaccaaaagggcatgtaaaggccatcttctcccgatccttggggtccaccgagatctggttataa

SEQ ID NO: 213163 - DNA, 384 bp, Glycine max
agcttctcgatatattatgcgcctcaatcgtaccttcgtgtgttaagttatgaccatttgagttctggcgtgcttccgtttttcaatttcaagcttctcgatatattatgcgcctgaatcggacttccgtttgaaaagttaggaccatttgaatttctagagagcatttgttgttcaatttcgagcgtgtcgatgtattatgcgcctgaatcggacttccgtgtgacacgttatgaccatatgaatttctagagagctttcgctgttcaatttcgagcatctagatatattatacgcctgaatcggacttccgtgtgacgagttataaccatttgaatctctcgagagcatccgtgtttcatttcaaccttcttgatatattat

SEQ ID NO: 213164 - DNA, 471 bp, Glycine max
tggaaatgaacaacggaagctctcgagaaaaaaaaatggttataacttatcactcggacgtccgattcaggcgcataaaatatcgagacgctcgaaattgaacaacgaatgctcttgagaaattcaaatggtcataacttgtcacacggaagtccgattcaggcgcataatatatcgagaagctcgaaattgaacaacggaagctcttgagaaactcaaatggtcataacttgtcacacggaagtccgattcaggcgcataatatattgagatgctcgaaattgaacaacaaatgctctcgagaaattcaaatggtcataacttgtcacacggaagtccgattcaggcgcataacatatcgagacgctcgaatatgaacaaccaaagctctcgagaaattcaaatggtcataacttatcacacggacgtccgattcaggcgcataatatatcgagacgctcgaaattgaac

SEQ ID NO: 213165 - DNA, 436 bp, Glycine max
agctggtcgcataactctactcgatgttagtttttaaaggtgtgggtgttcgagatattgaaagaagggtgaaaaaagggaaggacatggaacacatctgggatttcgttttcggacataaaataaaaattattgtccccaactagtcagttttttttttcttcaaaaagtaatattaatgttagcctagctgacacttataataacatatttcttcaaaattatcatttaatgtggagtatgactgacacaagtaaaaaactataaaataaaacatcaatgaaaatcaattaatgcctacgtagtgtcagttgatgctatattgtgttagtctcaaaactattcctacagggtcgcattaatttgatctttctttgagcgcataatctcaccaccttctttatttcttcgattgtatcctaatagtttagtatat

SEQ ID NO: 213166 - DNA, 385 bp, Glycine max
aaattggtccaaaacaaaacgtgagccccatagacagcatccaatagatgtcataccttttctgttacatatcgtggtagtgcaattgatgccagattgcacacagcagtctcagttggacttgaatattcaattatctcagtacacaaagctgacgatttaattggacccaaattctggtgattgcttttcctattgcaagtatgctagtagttgtaacaaaaatgctggaattactcatcgggtgagaacaataaatacaaaatctcatgaggaaagtcaaagacatctaagaacaccaccttataaagcatgtacgggggtgcggcttctatctgtgacttcagaatttcgaaccagaggctctgtgcctggacaaccttca

SEQ ID NO: 213167 - DNA, 421 bp, Glycine max
agcttgtaataaccagaaattattttttgttatatgaacccatacaaagtcaattatcaatggcagtgatgcaaaaccacttgtttagatgactgagtatagatctcttccctggtgtatttatatagttacttgtacaatttaattttctttaatgccttctacaagcaatatgtcttgggcaatgcactgtacaaagggatgtttcaaattgtggtggaaatgggttgaataactcatcaatatacttataagtttattaattttatcaatatattacaaaaacattttcaacaaattgtatctcttgaaaaccaaggcttagacctgttggcttttgtaaaagctataatgcaaagtaagccttttaggttaggccaggcacaaaacgaatagcctatttcttataatagactggact

SEQ ID NO: 213168 - DNA, 447 bp, Glycine max
gcagaaaacaagttaaattatacattcaaaaatgttgactttttaaaacttgagagtaaacaattcacatcttaaatctcttcaacatccatgcattgacttaagtaaagataaacataatggttgtcactctaaaggccatacaaaaataaagtaaagtaatttacataaatccataaagaaattctataaatgtatgaccctgccttgatgtcatagctatcaaaccaacgatcctaccttaaaatatatctaaacatatgaagttaagcctgttctctagcattatgttcactactctgatgatccttacctttgtgtggcaatcaacccaaacacatacaacaaaaacagataggggaatgagatacatcttaccacatataacaatataataattaaaggcaacttagaatcatacatcattacacgttgcaacttattcac

SEQ ID NO: 213169 - DNA, 429 bp, Glycine max
  unsure (1)..(429): unsure at all n locations
agctntcagtttgtctaccgaagcatggctgtggttgttgngaaaatgttgtgcttgataaatgttaaggtcaattctttcttttattaacagtgcttttgaaccattttgtacttttggtcaacaacctactgtagaaaagtgtgattcgtgcatccctttgttgcatgtgttggctcatacctttgcgccctgggctgttgcatctaatatagggcctttttttaaacagttacaagtcattgagtgcttaaaatatatttgttctggtgctcatcctgatatggaaatgcatgtgagtatattacgagtagtcttttgtttccccttattgaatggngaaattaagttcatttggctacttgggtaaactacccgcttctatatatcttttattcaaaatgccttcatcaaaataccatcttctac

SEQ ID NO: 213170 - DNA, 394 bp, Glycine max
  unsure (1)..(394): unsure at all n locations
gaacatatgcttagagataagctaggtgttgtgtctttagtcaatacttaaataattattacaaaagtcaaccattttcccattaataataatntatatttgaatattctttggttatttgctcatgacaactatataatttaaatccaaatcatgtattcctcatcgatgtgtaatctattatcaattgcttactctcgttaagattattgttctcttaactgtagaatgggggcaactttccctcaactctaaacttttgataataaacaataaaaagggaaagaaatgttcttataagttgaagaananaaaagataacactcatatgtcatagaatacaatcacataaattatcatcactgctattcaagcttataccaattatgtatat

SEQ ID NO: 213171 - DNA, 107 bp, Glycine max
tacttatcaggcgtaccaccaggcgataaggccccataactgcttataaattactccccccttgcactcatcgagactgttgaattattaacactttgccgcacgag

SEQ ID NO: 213172 - DNA, 390 bp, Glycine max
agcttgaaacattggaaatcttggcttcattcccatcttccggctggatcttcccacttagagtgaccaagggaaacttcatgaagaagcagaaactaataaattagctttaatatagattttgaattaagatactgtttctgtaaagacattaattgaatggtattgagttgactggtgcagctattttgtactcaaaagaagccaaatagaagtcatcaagttttttgtttggtatgataaactaggcataacacttttggccaatagtagttgattttagttgcttgttagcatataatggattcactataattgcttggaaaatagtctactaatttaaacttatcaaacaaccattatatacgagatctcaatttacacattaaa

SEQ ID NO: 213173 - DNA, 388 bp, Glycine max
  unsure (1)..(388): unsure at all n locations
tcggatgtatgatgaaatattaaaatataattctttgaactntctgatgccatgatgagaaaagagtaaattgtataggattctcatatgcaatgcaaaattgggctggccttattgaacttgggtccaatggatctaggagatccatacagtacaagttacttgagaaagtttgcttcagctagatagagagaccaacaagaaagcttcagctagataaataattccctcctatattttctccaagatgtgctctttttgagaaatttattcctgaaaataatacaaagaaggagctttttatccatggtgacgtcatgaaactcaattctatttgctctaatgctgtactcaatcttttgcttgatgtatatatataattatgcat

SEQ ID NO: 213174 - DNA, 318 bp, Glycine max
agcttgtcgggttcaatttcaattaagcgcttggggcatcccacggactgagcaaaagggctcaggttatcaaaatattgcacgtcttttaaagcacaaagcgaggatcagaacctcaaccctacgttcttttttttaaaaagactgcgatgagagatattacaaaggacaggaacccctgtgggaaaccaagaagaacatacaaaaataaaacatgcaacggcttcctcaattgccccagatattaagcgtagtatcgcttgacaacgttggagttcacgggtgaaggtagctcctcgtcattcatgttggcgagca

SEQ ID NO: 213175 - DNA, 434 bp, Glycine max
  unsure (1)..(434): unsure at all n locations
tgcctcanagaggtccaggaaggacaatgcggccgaaggatctagttctgctcctgagtatgacagtcaccgctttaggagcgctgtacaccagcagcgcttcgaggccatcaagggatggtcatttctccgggagcgacgtgtccagctcanggacgacgagtatactgatttccaggaggaaatagggcgccggcggtggacatcactggttactcccatggccaagttcgatccagaaatagtccttgagttttatgccaatgcttggccaacagaggagggcgtgcgtgacatgagatcctgngtaaggggtcagtggatctcgtttgatgctgacgctatcagccagctcttgggatatccgttggtgttggaagagggccaggaatgcgagtatggccagaggaggaaccggtctgatgggttcgatg

SEQ ID NO: 213176 - DNA, 400 bp, Glycine max
  unsure (1)..(400): unsure at all n locations
agcttgcttgtggngcttctatggaggttgtatctttgagcttcaattgggtcctttaatggtgattttcgaccatgaagatgcagcggaagacaaaggaaaataggtgagaggaggcgccatccattaaggaataagccatggaagaaggagcttcaccaccaaaatgagtcttggataagaagcttggagaggatgcttcaatggaggaaaagaaagagggagagaaagagagaggggggagcacgaaattgaaggaataaaagaggtatagaagtggaactttgaagtatgtctcacaagactctcattcatcaaagttacaacaagtgttacacatgcttctatttatagactaggtagcttccttgagaagctttcttgagaaaacttccttgag

SEQ ID NO: 213177 - DNA, 405 bp, Glycine max
  unsure (1)..(405): unsure at all n locations
tctacaagaagagatggccacggggatcaagaatggactactcatcaaaagtaataaaggagaaaatcacaaggagctgaattggagcactttgaagattgttgaatagctcgcttagcggcaccaactcgctaagcacaattccagctcgagaagaaattgtgcttagtgcgaatgccccgcttagcggaaacctttcactagaattttcgaaaaacttgtgtctacttgtgtaccaggcttcaagcttgatgtagataggccttaaatggtgtgtttaaggggttattagagggttagttaccttcttatgcctagccctataaatactcaaaaactcttaattntggaaaattnttgtagaattgaaattaagttgtgcttagagagagctntagcctcttc

SEQ ID NO: 213178 - DNA, 284 bp, Glycine max
  unsure (1)..(284): unsure at all n locations
agcttttctttgtgggttgataggttctgtctcgtagaatggcatgatcattggctgacatgttctcaatcagctcagttgcttcttccggngtcttcatttntatctttccccctgcagaagcatctaacagttgctttgtttgtggtctcagcccatctataaacatattcaattggattggatcagaaaacccatgagtggaagttcatctcaacaagcctctgaacctttccaatgcttcacttagagacttattaggacactgatganatgaagagatt

SEQ ID NO: 213179 - DNA, 317 bp, Glycine max
  unsure (1)..(317): unsure at all n locations
ggcctcanagaggtccaggaaggacaaggcagcagaaggaactagttccgctccggagtatgatagtcaccgctttatgagcgcggtacaccagcaacgcttcgaagccatcaaggggtggtcgtttctccgggagcgacgcgtccagctcagggacgacgagtatactgatttccaggaggaaatagggcgccggcggtgggcaccactggttactcccatggccaagtttgatctagaaatagtccttgagttttatgccaatgcttggccaatagaggagggcgtgcgtgacatgagatcctggttaggggtca

SEQ ID NO: 213180 - DNA, 372 bp, Glycine max
  unsure (1)..(372): unsure at all n locations
agctntaaaggatgattgtattatataacttataaaacggtttcccaattaaaaaggaataaaaatgtgtggcagtataaggataagacataanagctgcgaacagttgaacaagaataggaaccttggaatatggaaatcgaaggaaacagataaaggctgaaggtgccaccgtaatagtctttccctttattcaacgttcaatcataaaggctggtcgaccaacgtgtgctcatccatgtcaaattgaatttggatattttaaattttaatcttataaatcgaaaaatataattaagaataaatactttattacagaaaaatacatatttttgtacgaatataagtattggaaaggtaataaattcttga

SEQ ID NO: 213181 - DNA, 356 bp, Glycine max
tatccacctctcataaatttgaaagtcaatgtcaataaagtccaacgttgctagatatggaaatatacgagtcaaacttgggttaggaccattgaggcattaaattaagtttaatatatcagcgtagtgcttggctaacaaggaatgggaaatcaagatactacctcaaattcttttttatcataagaatctttctgataaaattgtttatttcttcatgtaaggctctttttatattgtatttttttattaactatttttatcaaaatatttctaattacttataactctttagttaacaaatagtagagaaaaaatgttatgcattaaaatgtaaataattatttattatcact

SEQ ID NO: 213182 - DNA, 441 bp, Glycine max
  unsure (1)..(441): unsure at all n locations
agcttgctaacccatggaagctcctaatatctcccacacttttttaggtgggccattcttggatggccttgattttctcagggtccacttggaccccatttctaccaactacaaaccctaagaaaactatattatctacacaaaaagtacacttctctatatttgcatagagggtgtttttcctaaggactgaaagaacttgcctgagatgtcctaagtgatcatctaggctcctactgtatactaaaatatcatcaaaataaacaactacaaatatacctatgaaatcccttaagacatgatgcataagcctcataaaggtgcttggtgcattagtgagcccaaaaggcatcactagccattcatacaaaccaaacttggtcttgaaagcggttntccactcatcaccctttttcatcttgatgtggtgatacccacttt

SEQ ID NO: 213183 - DNA, 465 bp, Glycine max
  unsure (1)..(465): unsure at all n locations
ctaagctatgcacccctntnttcaatattaatcaacctgaaatcacacacaatcacaagcaatcaactacactcaatgcaaagaaaacaaaattaaaaataaatgactgggtttcctcccagcaagcacttgtttaacgtcattagcttgacgcatcgctctgttatcctagatcaatcttggttctctctttcagaaccttctcatccaactccttcacctgtaagcacacatcctggtccagcagttctcttccttcattaaatagatcaaagctgatttgttggttttcaagactcatttctaactttttcttccctatgtccaccacacagcttgcaatagacataaatggacgttccataatgacaggaatatttgcatcttcctcaatgttcattacaataaaatcagtaggaaaaataagatgttntactcgaaccanaacgtcttcaatcactccat

SEQ ID NO: 213184 - DNA, 414 bp, Glycine max
agcttgagatgaggaagtgtagaagggtgtttcttcctgcttttactcgttgaccacagagtggtacctggagatatgtcgcgggggtcacgagaccttggggacgtcaggtggggtgctattgtccaaaaccaagcttgaccaatcccgacccaacccgggcatagtcagtcagtgagaacctgtgatgtacctaaacaggcgagctcctggcagtcaacagataaaaggaacaaagaccacaaagcaaggaggcttgtggtggctggccagctgtgaactttgattgatatgtgggttatggcctctggtaatcgattaccaagggtgggtaatcgaatacaacgcttaaaaatgaagacaggaggctaagatggtctctggtaatcgattaccaaggagtgtaatcgatta

SEQ ID NO: 213185 - DNA, 228 bp, Glycine max
ctgcacaagactctcaattataagagtgacctggagatcctccagacgtcgaagacactgtccagcacgatgctattccttcatggactgagaggggcaagctgcgggcatgattatcatcttcccataataccttggatcaacagagatcgtgtctccctataccacttcacttgggaatgaacgctacttgtcttatcgagaatgatatgccgtgctattgcgtgt

SEQ ID NO: 213186 - DNA, 433 bp, Glycine max
  unsure (1)..(433): unsure at all n locations
agcttctcactttaaaatttagaacatatattaggaaatttattataaactaaagcatcaaagatttttgaaagtccaatttacaatatccatcaagttcatgcttactgatgttttctcatgtgtgcttctgttcggttgtgtatttatttatatatttattattttctcttttaggtctgtgccagcatctggacttgatgcagtgattcctagtgcaaatcagcttaccatcttctataatgggagtgtttgtgtctatgatggaatccctgcagagaaggtatacccatgctgcactttaatcatgaatcaatcttgcagctgctgtgccttcaatccaggctctaactttacatgttatgaacttatgatgcaatcctaatcatacantcgtttatttactaacacgtgcatgacataatgcttattg

SEQ ID NO: 213187 - DNA, 392 bp, Glycine max
  unsure (1)..(392): unsure at all n locations
tggcgccaaacataagagctttgcacaaaaatggtgaacatataagtagaaaagaagagatttaagagcttcataagagagatttaagagaaggagtctgaagtcactcactactatggagcttggaagaagataaaaatggtggtgtcttcctcattgaaggtctcatgcaagaagaagaaaatgaaggttcaagttttggtttttggagaggaaatggtaagaaatgatgagaagtgatgcaaagctatgcctaattctattgataagctcacttgatactactacaaaatgtagatttaaatcgctatttaacatcggttnttgataaataccgatgttaacaaaaacatggtggcataatggtaaataatgtgactntcttaacatcg

SEQ ID NO: 213188 - DNA, 360 bp, Glycine max
  unsure (1)..(360): unsure at all n locations
agcttgttgggttcagcttcaattaagcgcttgnggcatcctatggattgcgcgaaaaggcccaagtcatcaaatactacgcatcttttaaagcacaaagtgaggatcggaacctcaaccctacattcttttaaaagattgtgatgagaaaattacagaggacaggaatccctgtgggaaaccaagaagaacacacaaaaataaaaacatgtagcgacttccttaattgccccagatcttaagtgtagtatcacttgacaacgtcgaagttcatgggtgaaggtagctccttgtcatctatgttggtgagcaccagggcccttccggagaaagccctttntacaacaaaggcccttcgta

SEQ ID NO: 213189 - DNA, 416 bp, Glycine max
  unsure (1)..(416): unsure at all n locations
tgaagcatgagccgttctgagagcttaagatgagnttgtgagtgattgtgagatcctagaggtgcaggagacatcctcaccacttgtattttttcaatctttcatcttgttcttctctttgttgtaaagaaggcttcctagttatcgaaagctaaatcctctgttggatcttccctataggtacctgatgtaaatatatttttatttatttaatgatgttttgtgtgttctctgtgctatctgcttttcactccagtatgcctttaccttgatcacgcagatgcatgctttgttagggtcattcaactatggaaactggtctgattctaaagtccttgagagtacatggctaagttgtcgtactatcacgaggaatcagggtgcgataatttagttgtgtatgtgtttcttaatgc

SEQ ID NO: 213190 - DNA, 362 bp, Glycine max
  unsure (1)..(362): unsure at all n locations
agcttttatctagccaagatcatacaaaagtgttacaacagaacctaacggtttctaattatgtgggccatcaaatctatcatgtgtngacaataattgattagcccatgaatttcctctggggctgaacacacttcggcgatggccatcgctntggcttgtagtcgcgggaggtcttgacttccatttaaggtcaaggtgaacctatccatccacatggtcgcttcttgatgcaatgcatcaatcaccctccctcttgcttccttctcggcgtacgcttgtgtgaagtcctctactagcttttgttcatgggtcaaagactggtttaactcttcttgtactgccctatgatagctagcatg

SEQ ID NO: 213191 - DNA, 292 bp, Glycine max
  unsure (1)..(292): unsure at all n locations
tctatagaaaggtcattcctaatttctctacaattgcatcacctctcaatgagctagtgaagaagaatgtggcatttacctggggtgaaaaacaagagcaagcctttgctttgctcaaagaaaagcttactaaggcacctgttctagctcttcctgacttttctaaaacttttgagctagaatgtgatgcctctggagtgggagttggagctgttttgttgcaaggtgggcaccctattgcttattttagtgaanaacttcatggtgccacccttaactaccccacctatga

SEQ ID NO: 213192 - DNA, 312 bp, Glycine max
agcttggggctgctgccaatggtggctcccgtaagcttgttgaaggttcttgagctttgggaaagaaatggggtgaaaatggcttcacccccccccccccctttaagttttctcatcaaaccacgctcgcccaagcgagctgatttcaattttttttttgcaaaaatattttttgcaaagctgtgctattcattgttatattttctctctaaaaatcctataattgcatataaacttaggcgaattcaggatataattcaagaaaacgaacaagtatgaaaaaggaaattaaagagcacatttagagatact

SEQ ID NO: 213193 - DNA, 452 bp, Glycine max
  unsure (1)..(452): unsure at all n locations
tcaattataagaacttgaggagatatgcttagaagcctatgagaactccaagatttacaaggagaaactgaagaggtttcatgactctaagattcttaagaaggagatccatattggccaaaaagtgatcttgtataactctcgcttcaagcttaattttggtaaacttcgatctatatgggatggacctttttttattactaatgttntccccatggcacaattgagattaaaaatgaagttattagcaaagtcttcaaagtgaacggtcaccaactcaagctttttcatgagagccccaagtggtggagcagtttgtggcggacctctctttgatcttgccaactttatgtgatgatgtcccttgaatggaactngangagtttccatccccttcttttgtatgttgtcacttttgttgcctttcattgcatgctcacattgagaacaat

SEQ ID NO: 213194 - DNA, 398 bp, Glycine max
agcttacagttcaaatcaaaagacatctttttgtaatactgatatactctccagagatttgagtttttcttttttagcttatcaagttcattattagcaatggttcattcttttttaagtaagagtttttgtttaggcatttccttgcacccttcttttgaatcttcaagagttgtagttgattttaccctttcttccaagtcttgaaaatccttaagaagagtttttcgcccactagatgtatttttgtccaatagtgctttgacttcctcacaaatagaggtatctattcactactaggcgaagaagtttccaggacaaaattaactaagtgaacttgatgagctttcttgaaatcctcatgctctctttcaagatgtttaacaccttttatttaa

SEQ ID NO: 213195 - DNA, 468 bp, Glycine max
  unsure (1)..(468): unsure at all n locations
tagagaggaagttcaatggaggaagagaataagagagagaggaagggtgtgggaattcaaggagattagggagagaagttgaactttgaagtgagtctcacaagtttcccattcattaaagttatgacaaatgttacacatgtttctatttatagcctagcacatggaaagcttccttgagaagcaaggaaggtatcttcgttgggaagctagaggaagaaagcttccttgagaagttagaggggggctactcacacccctccaatagctatgctcagccccatgccaaaatatatganaatacaatgggaagcttccttaagaagcgaggaaggtagcttccttgggaagcaaggaagaaaacttccttgagaagctagaggaagggagggctactcacaccctccaatagctaagctcacccncgtgtcanaatacatgaaaataccaaaaaagtccttactacaa

SEQ ID NO: 213196 - DNA, 294 bp, Glycine max
  unsure (1)..(294): unsure at all n locations
agcttgtccgagcagttgagcaagaccgaataaaatatgtgggccatcaccgactagtacaaggaaaagttaagcctatcagcgactcatgagcaaaggctagaggatgagtacaacaaggtatcaatcctgcaagcgaaaaggaaagcaagggaaagggtgatcgattcattgcacagagaagcaatgatgtggatggaccacttcgtctgggagtcaagaacttccctaactgctagccaaggccanaggaatggcggatgtgtacttagttctcgaggaggttcacgggct

SEQ ID NO: 213197 - DNA, 338 bp, Glycine max
  unsure (1)..(338): unsure at all n locations
tanactcanaaagaaaggtggagaataaagtgagtgaacgactagaaaatagcttgtatgcatcacttggtttcaggtttgtcatcatcaaacagggggaaattgtggaagcaaagctacgatgatgattcaccaagagatgatgccaaagctcaaagaggtttttcaagattaaagaatcaagcattcaagattccactcaaagattcaagaatcaaatgaagaaatcaagaagcatcaagccaagtcaaagtaggtagttaaaagtatatttttcanaaaacatcaaatagcacactctttcgtttaaaaaggattctctgaaatgttctaagtta

SEQ ID NO: 213198 - DNA, 370 bp, Glycine max
agcttctagccaaatggacttaccttgaattaattcctttgatagcccctttgagcctatgttcccctttctttgttttgaagctcattacaaaccttaaatgaaaaaccatgatatcaccttacccttaaggaattttggagctttggaattgttttgggaataagttgggaataagtgtgggtggtatgtttcattggaagatataatttttggccatgcttaatgttttattttggccatgcttgatgtatatatatattgcctagttcttgctttaatcttcaaattcatactattaaaaaaaatgaaaaaaaaattcaattggtgcaaattctgcaaattcgtacagttcaaaaaaaaaagagaa

SEQ ID NO: 213199 - DNA, 339 bp, Glycine max
  unsure (1)..(339): unsure at all n locations
tcggccccattgtcttcgtcgccctcccttntcgctntaccttaccccagtagaggtcgtgatttagcaattgaagcagaggatgaaagaaagccctggttggtggtgctacgggggcagatctgcaactaccgttcactctttcctcctacgacgtcaataaccttgagaagggtatgccgtaatcgattgaagcttactttataaaggctgaatctctccttaagcttatgttgctatttttatgtgttttttcttcctggtggtggttgtgccattgatctgaatgaagaaacactagctattcatgtatcttttggctcctttttcctttctcca

SEQ ID NO: 213200 - DNA, 429 bp, Glycine max
cctgaggaatgcacgcttgcttctacacttccacttgccaatattttcaaaggactaacctctctgagatatcttttgtttccctttacaaagatttaagggactaactgcctaagaattctttgtcttaacacattggagggtacatcctttgtggtacaagtagagagtacatctacttgggttgtaatacttagaacaagagcgggtacatctcttgtggatcagttcaagtggagggtacatccacttggttgttcaaagagaacaagggagggtacatcccttatggatctttgcttgtaaaggattttacaaggttattggaaatctcaagaaccgatggttgcttggtgactggatgtatgcacatgttgttgcctaaccagtataaatcttgtgttcgcttcttcgccctacactctttac

SEQ ID NO: 213201 - DNA, 442 bp, Glycine max
tgccacccagctcgcccaagcgagcagggttgcttcctctataagcaacagccttctggaggaatcttctggagggcccaagtgggcctggttgctatttgcacccccatttttactaagtacaccccctgccttttttttggtgattcttttttcgtaaagttacggaaacttacgaatttcgtaacgatacttgttttctttccgtaatgttacggaaccttgtgaattacataatcatcccttttttgacttacggaatgttacggaacctcactaattgtgcaacgatgcttccatttgatttccggtgtgtcacggaaccttacggattgtgcatcaatattttcttttgttctccggcatgtcgcggaatttcacaaattgcctaatgatgggtgccaagcacctcacaaggaccaaacagaagtcgcatgtcatc

SEQ ID NO: 213202 - DNA, 450 bp, Glycine max
  unsure (1)..(450): unsure at all n locations
agctntaaacttcattgcatccagccactttctcttttcttcattatccatggcctctctaaatcactcaggttctccatcatctgttaggatcacatactcattaggagaatacctcttagaaggttgtctctccctgttggactttctgagttgaacttgaggtggttcggtggcatcaccaagattttcatcttgtgacatgtcatgctcctcttcatcatcatcatcaacatgaacatctacctcatctccaggttgttggacactaacatcattcttaactttagtattcagattctgaataggcgattgaactggttgaaaatcagccacaccattgtcttccttgggtgtaaacttatccaccttatcaatgtcttcaatggtttggtcttccatgaatttcacatcatggcttctaacaagcttcttctcaataggatcata

SEQ ID NO: 213203 - DNA, 455 bp, Glycine max
  unsure (1)..(455): unsure at all n locations
ntgatgatgttgagaagaaatcacatgtttgtcatcatcattaagggagagaatgtgaatgtatgtacacatgattttgatgatgtcaaaagaagaatcaaacaaggctcatttgcatcaagattaatacaagattgtttcaacaaacaaagccttgattcaagatttcttcaagatcaagccttgcctcaaaatgaaagatttcaagtcatccaaggcacatgtaatcgattaccaagacacatgtagtcgattaccaatggtttgaaagtgtgtaatcgattacacatcatatgtaatcgattaccagagactttgaacgttgggaattcaaatattaaatgaagagtcacaattgttcaagaaaaataactgtgtaatcgattacactaatgttgtaatcaattaccagagagggatttcaaggaatatcgccaacaatcacatcttatcat

SEQ ID NO: 213204 - DNA, 380 bp, Glycine max
  unsure (1)..(380): unsure at all n locations
agcttaggataagggttatggatgttgtggtttctcataggtcaagctacaaattgtgacaatgaagttggctcgagtattttcggtggaaagctccagttatctatttatggtccatggcctactcaatctttaataaatgaccaagttttacaaaaatcaaacttttgtttttctgaaggaaaaatcaacttattattcggctttgattttaacattgttactcttacgtatcttgcaacagcgcaaggggtccagctccaaaatctagttgtggataaatctaaaattcaaatggatcaagtgtcattataaaatagacagttatgattctaggaatccctctctaaattgtcaattttagactttgngtatcacat

SEQ ID NO: 213205 - DNA, 447 bp, Glycine max
  unsure (1)..(447): unsure at all n locations
cttgtatcccagggaggggattngagcttaatgttgatgggtctcctttgaagattctgagaaagaacatgaccactctagctcagacatggagcgttctttccttctcgaacctcattcccacctcccatacatatgatgtgaccttggacagagccaagttgatttatggtataattatgaatatggatatgaacttggggtacctcatctcccaccagatctctctgattgcacaacataatacatccaaacttggattccctgccttgatcacagctctatgcaaggccagaagagttcagtcaaactttagatccctagagagcttgagccctgccattagcttggcatatattaagaagaattgtagaatcttgatgattcaacagtgacatttagagggccaaggaaggccagaggtatgagatcagaggcccctactac

SEQ ID NO: 213206 - DNA, 351 bp, Glycine max
  unsure (1)..(351): unsure at all n locations
agcttagacatatgccacccacggnggtcctttctcactatattatttcgtcctttgtcctcatttttacattttgaggtaattgtttcctctatcccaattaatatttttcaatttctcagaagtactcgcgggttccgaatattaaaaaataaaaatataatctataactattaatattaaaaaattattctattaataataacaattttatccttaaatcacttcttanattttaaatntttcttctaacttacattaacttttcactatttttatattattagttctttttattcttgtcattttttattaactggtttatttttttattatctaaaaaatttaaag

SEQ ID NO: 213207 - DNA, 472 bp, Glycine max
  unsure (1)..(472): unsure at all n locations
gtgtattgctgcattctactaatatatggagttgtccacttctttgcctgagaataacaattgcttgaccacaacaacgctggagacggtaagggacaatggtctttcaaataaacatgttgtacatgaacaaagattatatcatgcggtgaccgtgtcaaatgaaccagcgaagtcattgcataattgttatactaactatattcaatgtacctgaacaaaatgatttccaaacacgtgaccgacacatatcatgcggtgcccagaagaatcaggtggttgttgacttctaagaggaaaaaatgtcatgctttgttgtcgggacaatgatacaaggattacgttataccgtgatgcaatcacatatcccatctccgttatatccatccacttgtccactctaacctgaatcaaccaaacatacacatgtaagtaatntatagtttgtattaaaaaaataacctanaacata

SEQ ID NO: 213208 - DNA, 437 bp, Glycine max
agcttgcataaagaaatgtcagaggatgaaattgcatgtggctgtattagagcacattgaagagaaaggtgtcatgagaagaaaagaggggttgtttccctaattattaactaactgcaaccaccaagtcacaaggtggtaaccttgctgttcgacaatggctcgcccactatccatcagactaatgcaactgttttaacaaattatttggctacatatttcaaaacatataacctaagtttagcttaattaaaaatgaaccttaagaaagtgtttgaccccattgtactgcaaaagaatgagtattctcattgaaatcttgtccaaatgaaggtgcactgaaacaagtacgaaatgaatggattttagaagaatatcataccttttgccttaatgaatagctagcagctctaataccagcaaattcatcaactaac

SEQ ID NO: 213209 - DNA, 458 bp, Glycine max
  unsure (1)..(458): unsure at all n locations
tctctttttctattattttatttaagcaatgccacatgtctccatttgagtggagcaagaagggcccactttctctttttgactgtgacccacactcagtcacaaaagtgaggaaaatctaacctttgaaacgctaaaaatcctgcctcggtttgtgtgccgtttctctggttccagtttctcgcgtttctctgcgtccgtcggggccagttttcgaaagtaagcaatatatatatcaaaacgctcataatagaaccctgagcgtggttcagaggttggtttcgttaaattctaagtcgcacacaaaacgatgattnttaaactaattaattaagaattaacccataaccctccagttatggatttctcttccttaattagcctaacccgcgtatcttgcccncactactcctacttctaccaagaacacatatgcatatacactgaataaaacttat

SEQ ID NO: 213210 - DNA, 412 bp, Glycine max
  unsure (1)..(412): unsure at all n locations
agcttanacattcaatttctaggctctcgatatattacgggacttaatcaagcatccaagaaaaaatttattgtcgtttgaatttgctcagagattcaacattcaatttcgagcgtctcgatatattacgggactcaatcagacatccgagtaaaaagttattgtcgtttgaattggctccgagcttcaacattcaatttcgagcgtctcgatatgttacgagactcaatcagacatccgagtaaaaagctattgtcgtttgaatttgctcagagattcaacattgaatttcgagggtctcgatatcttacgggactcaatcagacatccgagtgaatagttattgtcgtttgaattggctcagagcttcaacattcaagttcgagggtctcgatatattacgggactcaat

SEQ ID NO: 213211 - DNA, 362 bp, Glycine max
atgagccaattcaaacgacaataactttttactcggatatctgattgagtcccgtaatatatcgagaccctcgaaattgaatgttgaagctcttagcaaattcaaacgtcaataagtatttactcggatgtctgattgtgtcccgtcatatatcgagacactcgaaattgaatgttgaagctctgagccaattcagacgacaataactttttactcggatgtctgattgagtcccgtaatatatcgagacactcgaaattgaatgttgaacctctgagccaattgaaacgacaataactttttactccgatgtctgattgagtcccgtcatatattgagacgctcgaaattgaatgttgagc

SEQ ID NO: 213212 - DNA, 419 bp, Glycine max
  unsure (1)..(419): unsure at all n locations
agcttgccgcccagctcgtccaggcgagcatggttgcttcctccagaagcaacagccttctggaggaatcttctggagggcccaagtgggcctggttgctatttgcacccccttttttactaaatgcaccccccttttctatttttttgtaattctttttccgtaacgttacgaaactttacgaatttcgtaacgatacttattttccttctgtaagggtacgaatccttatggattatgtatttactcttttttacctttcgaagaagttacggaaactcacggattgcgcanaaacacctctttccgacttccgccacactacggaatttcacggatcacgcaagcctgcttccttttggatttctgagacatctcgggacttcatttattgcatgtcatcaagtaataatccccgg

SEQ ID NO: 213213 - DNA, 458 bp, Glycine max
  unsure (1)..(458): unsure at all n locations
ttannaattgaattanaacgttcaataactgctggtaatcgattaccatatatgtgtaatcgattacacagtgcaaattttgaattcaaattttagtagctgttgtaaatcagttttggccactggtaatcgattacatcctctggtaatcgattaccagagagtaaatctcttgaaaaagactttntaacttaaatttcttggccaaaccttttgctacttcaataggaattcccttcctattttaatatactctttctaagactctagaaactgtcttgatcatccatcttgaatatctttgtcttgaataaagctttgagaaacacgtaaccctttggcaagctttccctttggcaccatcaaaacattcagcttgatcctttgtctacaatctcccnctttttgatgatgacaatcctganatcaagacaagctatatacaagatgatagcacg

SEQ ID NO: 213214 - DNA, 396 bp, Glycine max
agcttgaaattgaacaacttaagctctcgatatactcaaatggtcataacttatcacacgaacgtccgattcacgcgcataatatatcgagacactccaaattgaacaacgtagggtcttgagaaattcaaatgttcataacttgtcacacgaaagttcaattcaggcacataatacatcgagaagctcaaaattgagcaacgaatgctctcgtgaaattcacatggtcataacttgtcacacggaagtctgattcatgcgcataatatatcgagacgctcgaaattgaacaaccaaagctctcgagatattcaaatggtcataacgtgttacacggaagtccgattctgggccataatatatcgagaagctgaaattgacaacgacgctctctag

SEQ ID NO: 213215 - DNA, 429 bp, Glycine max
tgagattgaacaacagaagctctcgatatattcaaatggtcataacttgtcacacgaagtccgattcaggcgcataatatatcgagaagcttgaaattgaacaacagaagctctcgagaaattcaaatggtcataacttgtcacacggaagtccgattcaggcgcataatatatcgagacgctcgaaattgaacaacggatgcactcaagaaattcaaatggtcataacttatcacacggaagttcgattcagacgcataatatatcgagaagctcgaaattgaacaacggaagctgtcgataaattcaaatggtcataacttatcacacggaagtccgattcaggtgcataatatatcgagaagcttggaattgaacaacggaagccgtcgagaaattcaaatggtcataacttatgacacagatgtc

SEQ ID NO: 213216 - DNA, 377 bp, Glycine max
  unsure (1)..(377): unsure at all n locations
agcttagcagncacttgttgtcctccatcgttatcctgatcaccgtgaaagtcctcaacaaccactctgtcatgcaccttatacagagcatcctgagccggagacacataattgcctccaccctcaacagcattagtctcatcactgagaccataaatagtaacaacgcgctcttcgcaccccggcacagtctcaccaatcctaatcttagccttagtctccaccctcagttgcttaacaatctcacctcccctaccaataacactgccaatctttcgacccgggcacacataacgatacacggtatcctccgaatcaatcacaaactgctctctatcatcaccatgattcctccttttaattggcccattatcatg

SEQ ID NO: 213217 - DNA, 371 bp, Glycine max
ctaatgagtgctatttttactgggactatctactatcttaagcgggacttggcattctaaatagatgttggaaaggatatattcaccctctacaagagggagtctggtgagcattttcaaaaggtaatctttttggggaattttatcacagaccacaactgtgatagccattattatgctttgagatgctacagttttgacgtcttagttcctttgtcccacatacgttggtttgtaaaatatgtgtctcattagtgttatatatagagacactcgcaagctgtagatgtgcactaataatacagtttttaagtgtaccatggacgtaggccactaatcacagaggctaaatggagatttttaatattgct

SEQ ID NO: 213218 - DNA, 378 bp, Glycine max
agctttggccaaaccccagcagcagttgtttccttagagacttgccttagcaccttgtctttgagactgaggataattacactgtgtgccttttgcagtagtgctttcttatccccatcagccatcatcttttcaagtttggcttctccatcaagtgcttccaccaggccctgctgaacaagaagagctctcatcttcaatcgccataacccaaaatcattttgccctgtgaatttttcaacctcatacttggccgagtccatttcttgaatcgaactcaaaaatcgctccacgctcaccgcaccaatttgttgtgccaagatcagattttagttcacaaaagaatgagtttcttgtatgaacaagaataagcaaaat

SEQ ID NO: 213219 - DNA, 379 bp, Glycine max
tgttgaaattgccatgtttggatgagttagacatacccattctgttttatggtttttgtgatgatgtttgtgatgtttatatgctgaaattgcctatggaaaactgttagagatgaatggtagagttaacctacggttagaaagtgagaatgtgatgttatgagtggaaaaagagtgaggctttgagggttggaaggttaggtctgaattctgtggtaaatggagattaaggtgagttaatactagcttgaaatgtcatttatgacttatgagaaagcttggactgtgctagagagaaaaacaaatgaccaaagtgaaccaagagccatttctagggcaaaattgggtgttgaggagtcaaactttgattcggtagaaa

SEQ ID NO: 213220 - DNA, 399 bp, Glycine max
agcttgcccagtctagctaggttgcttcctccaaaacaaccgccttctggaggaacatcctggaaggcccaagtgggcctggtttctatttgcacccctttttttactaaatacaccccatttgcttttttggtgattctttttccgtaaagatacggaaacttatgaatttcgtaacgatacttgttctcttttcgtaatgttgtggaaccttacagattacataatcatcccttttttgccttccgaaacgttatggaactttacggattgtgcattaacacttccttttaattttcggcatgtcacggaacttcacggattgcgctcaacgcttttcttttgtcttccgcatgtctcgaatcttcacaattgcctaaccatgggtgccaatacctc

SEQ ID NO: 213221 - DNA, 337 bp, Glycine max
tgtatgtgaaaggatgtgactcttcacatttgaatttgaatttcaacatccaaaggcactggttatcgattaccaaaatattgtaatcgattacaactttttgaaattaattggatcgttgataattcaatttgaaaaagttttcaaaacaactttactactggtaatcgattacaacaatctggtaatcgattaccagagagtaaaaactctctggtaaacatgtattgagaataatcatgtgctactcaattattgagacaaactcttcatacttatcttgattaagccttttcttgattcttgaatcctgatcttgattcttgagatcttgaac

SEQ ID NO: 213222 - DNA, 410 bp, Glycine max
  unsure (1)..(410): unsure at all n locations
agctntgccgatttagttttcatcggcgaaaggatcgaagtgggtttgagaagaggaaaatctgattatcctgctttgatgaatgggaagcctatggcaaatggagagaataagaatgagggaggaacccatgctgtgactatcgttcctatatggccaaatttcccaccagctcaacaatatcaatactcagccaatatcagcccttctcattacccaccaccctatcagccaagaacactcaatcatccataaaggccacccctatatcagccacaaagcctgcctgctgacatccgatccaaacaccacccttacacaaatanaacaccaactaggaggaatttctagaaataacctaagaattacnccattccatgtatatgctgcttactccctattactcatat

SEQ ID NO: 213223 - DNA, 338 bp, Glycine max
tcgtgctcagatccctcttggtggactaggcttaatttatacagccctcctaggtttagactaacttaaactaagcttcatcctcagatccctcttgttggactagacttagcataaatagcttacgaaagtttagactaatttagcctaagctttgtcctcagatccctcttgttggactagacttagaccaaacaacattattgtaacaacacatttaaaaccaaaacttaatccacagatccctcttgaagactaagtttcaattatgcttcattcaagttctaaggaaacaatacattttccaatgctaaaatcacctaaccagacacacaaat

SEQ ID NO: 213224 - DNA, 351 bp, Glycine max
agcttgaacctcacagacccaatatcaattatcttctacaggacttgttgtttccatggaggactgaaccaccaacttgtttgacaagatcctcacaccacgacttgtttggagtcatatgaaacgaacacccacagtccaagatctatttgtctcagtgttcttatgagacaccattaaagcctcagctgaatcatatccatcttcaactagagtagcatttccaggctctttagatcgatcttgctcgattcctttctgtctattacgacagaactcttcggtatggcctggtcttttacacgtggtacatctaatgtttgtacattacatccataccgagttggtgac

SEQ ID NO: 213225 - DNA, 403 bp, Glycine max
tcagcttgcacgccagagtgctcttcggctggccgattgctgaatcataatcatctgccggaataagtgggcaccaccattccataccattatagagaatcaaataatatatatatcctcagaatctcattaagtcatttttattgatacgaactgtatataagtattaacaaatttatcagacttccgcgccatacttgactaagttataagataacctataggatgctattactttggagataggaaatccgatgctgaactttagatgataaagagataaactttctcatattatcggttccgaaaattagcgcgttgagttttactaaatgacgacatcctagaacatatccattcaagcacattggtggaattatatcatacgctgatataagcaaat

SEQ ID NO: 213226 - DNA, 449 bp, Glycine max
  unsure (1)..(449): unsure at all n locations
tgcacacaagcaagtcccatttgattaagatcagtaccaaatattgcagatttcttctccccagtagcacgaagcttcgacacagcattcttgaaagtattgtaagattcagtgtagttctccaacacgtagtacatgactcccatctgagcttcaataccagctattgtgttttgctgaccagaggcttcattaagtatctctagtgccttgtgaagtaacttaagtgcctgttctagctcattcattgactcataaatggctgagacattcataaaaccactagcaacctcctctggagggaccccaggcatgggattctcatagatnntaagtgcactctcacaatatgattttgattcccttatcttccatgtcctgcaatacaagtcagcaaggcgtacaaagactgatcccacagaaggatgattctcacctttgtgagtcct

SEQ ID NO: 213227 - DNA, 464 bp, Glycine max
  unsure (1)..(464): unsure at all n locations
ccgattcggatcgatgaatgaaatcctctcatgcaagtacaatattggagctaaatcttcctcggaatgattagtcgtttatgaattataagatgagaaaataaaattatcaaatgtaaaaagttttacgtaattattcaattgtaagattttatatatattaaatttattaatttttaaaataattatcttaaaataatttaaataataatttataattaaataataatataaaattattttattctgttataataattacacttagggcatcttgacatatgcttcaaactttcaactcctaatttaattntgcttgaactttaactgccagccatacacgattcttagtacggctaagggatatattctgtaccgccaaaagcccaaaccccccttgaattattgattatntatttgcgccaatttttgttggacttttatgcaagattactggttgagcc

SEQ ID NO: 213228 - DNA, 302 bp, Glycine max
gcttgcttctacacttccacttgccaatagtttataggactaaccgcctgagatatcttttgtttccctttacaaagatttaagggactaactgcctaagaattctttgtcttaacacattggagggtacatcctttgtggtacaagtagagggtacatctacttgggttgtaatacttagaacaagagcgggtacatctctttgggatcagttcaagtggagggtacattcacttggttgttcaaagagaacaagggagggtacatcccttatggatttttgctttgaaaggaatttacaa

SEQ ID NO: 213229 - DNA, 134 bp, Glycine max
tgccacccagctcgcccaagcgagcagggttgcttcctccataagcaacagccttctggaggaatcttctggagggcccaagtgggcctggttgctatttgcacccccatttttactaaggacaccccctgcct

SEQ ID NO: 213230 - DNA, 432 bp, Glycine max
  unsure (1)..(432): unsure at all n locations
agcttttgcctcanaacgcattgtttccaacatccaaggctctggtaatcgattaccagaagagaattttgaagcaaagggtttaaaaagggttttgaatttgaattttgagtcatgtaatcgattactagatgtttataatcgattaccagtaatgacactttagaaaacactttggaaagacatgacccttcaaaatataattgtgtaattgattaccagaaatctgtaatcgattaccagtgaataattttagaaaaatctttttgaaaagacacatctcttcaaaccattttgaaaaggcacgaagggcctatatatatgtgtgtctgacttagaaaagcaagagagagatattctaagagaacataattgccaaattctctctcaacaactcctgggcaaacacttganaatctattgataattcat

SEQ ID NO: 213231 - DNA, 450 bp, Glycine max
  unsure (1)..(450): unsure at all n locations
ngaagaggatgctntaatggaggagaagaaagagagaagcatggagcacgaaattgaaggaataaaagagggaaagaagtggaactttgaagtgtatctcataagactttcattcatccaaagttacaacaagtgttacacatgcttctatttatagactaggtagcttccttgagaagctttcttaagaaaacttccttgagaagcttctttgagaaaacttccttgagaagctagagtttagctacacacacccatctaaaaactaagctcacctccttgagaagcttccttgagaggctagagcttagctacacacccctataatagctaagctcacccccatgacaaaaaaacatganaatacaaaaaaaatcctactacaaagactactcanaatgccctgaaatacaaggctaaaaccctatactactagaatggccaaaatac

SEQ ID NO: 213232 - DNA, 431 bp, Glycine max
  unsure (1)..(431): unsure at all n locations
agctntaaggctaagtcttcatgttgctcatgttgtttccctatctctaacagtccatcatcaatcactttcaagatcccttggatttataaaggtgcataataatatcatggacccttccttattataacatctcctcatttttgtctcttcctctcccaacgcccttaatggaagctctaatgacgactccaatgacacctccaacatgagcaatccccaactgccaccgcacacttctccttcctcctccgtccaaaaacaaagttaacacaaaagcatagtgacattgctaaactcaccaaaccaacaaatccacaatgcatgataacaaatagaatatattaaatttcaaaacgcatgaacacatgaaggttgggcattaatggagtacaaagttgttcacaataccataaaccaaatttatctga

SEQ ID NO: 213233 - DNA, 451 bp, Glycine max
  unsure (1)..(451): unsure at all n locations
ctcaagctgtcgtattaaggcatacttcanaaagtgtttgttgtctctaaacaatttctttttctttgtaagggattacatttgaagatgtattcattggtgcattaaatgtgagcatttaatgcacattctctccatgttgaaacgccactctctttagctgtcttgaaccacacttcagcaaaggtcaacatgttgtcgcttagaacagttctaatcacaacaggtgtagaccacgttgtttgagatgaagaaagatgttgttcttttaagacttgaatatcctcttactttcttggacttcgaaaaatcttagaaaaaaaatttcaagacattctcagcagaatagatctcagacacaaagcattaatgaagtcttaaatgcttatcatagcttaacatttgttngcttctttctaatctttcaaacgcatatgcaaaacaacaattc

SEQ ID NO: 213234 - DNA, 433 bp, Glycine max
agcttgccacccagctcgtcctggcgagcatggttgcttcctccagaagcaacagccttctggaggaatcttctggagggcccaagtgggcctgattgctatttgcacccccattttttactaaatacaccccctgcctttttttggtgattcttttttcgtaaagttacagaaacttacgaatttcgtaacgatacttgttttctttccgtaatgttacggaaccttgcggattacataatcatccccttttttgacttacggaatgttatggaacctcactaattgtgcaacgatgcttccatttgatttccggtgtgtcacggaaccttacggattgtgcatcaatattttcttttgatttccgcatgtcccggaatttacaaattgcctaatgatgggtgccaagcacctcacaaggaccaaacaaaag

SEQ ID NO: 213235 - DNA, 387 bp, Glycine max
  unsure (1)..(387): unsure at all n locations
taactatgctagtataattattttgtgtcattaatctttctccttttaaactccattcgtgcaactagatatatgtgcgattcaatccttgttcaattaatcttgcattacataatttaaaagggtttttcaagttgtttctcaatataattactttgataaatggttctaaatttatcctatataaagaaaggtgtgaaaagtttgtttttgaaaaagagataaagattttgaaaatatatattcacctccctctctaaatcaatctacatggatcaacatagttgctatcgagttgtcaaactagaatcttgaanatttgaaggttgagtggtacatcctatttttcgtaataaattaaaaagctttttagtaaaaaataaataa

SEQ ID NO: 213236 - DNA, 416 bp, Glycine max
  unsure (1)..(416): unsure at all n locations
agcttacaaatatgtgctatatccaagcccataagttatatcaaatcacatctagataagataagatacgataagatctaattttatagaataaattagtctgccctcttcaagtccaagcccaattctagattcaagcccaatgctagattcaagcccaatgcttcattaattcctgaaattagattaaaaacatcaaattggctgaatgggcccaaataataaaactgcctaattaattgacaattaagaccaatcaataattaaaatggtgcaaaaagggtttagaaaatagaagatnatgatggcacatcaaaaccccccatacttagccttttgcactcctgtgcgaaatgaaacatagaacaagaactaaatccaaggatatcagagggagacaaacaaatacattcaca

SEQ ID NO: 213237 - DNA, 400 bp, Glycine max
tctgagtgaaacaatgcgactattcactattcaattagaatttcaacgttcaaggacactggtaatcgattaccataacattgtgatcgattacagccttttgaagatatttggaacgacgcacatttagtttgaaaactttttcacactcattgtgctactggtaatctattacaacaatatggtaatcgattaccagagagtaaaaactctttggtaaacgctttgtcaaaaactcatgtgctattcaaggatatgaaaaaactttataatacttatcttgaatgagtcttttcttcattcttgaatcttgaggcttgagacttgaacttgattcttgagatcttgagacctgatgcttgagtctaggctttcttcttgagtcttcgaatctccttga

SEQ ID NO: 213238 - DNA, 355 bp, Glycine max
agcttgcaatgaaagatattgtgtatgtaggagtctggtgtcaatctagacacacaaaccaaggccataattcaaaataggtaagatagaaatgatgatagtcattggcacaaatattgacttctgcaactgctactaagcttgcaatcaaagatattgtatatatagtaatgaactttccattcagtaacacaaatttgttttatttgtacgcttaaatctgctagattgtctgttcaacttgaaatctcaaatttctatcttacatcttttatttggcaatatgtaacaaaagatgcaacacataagtttactaaatgttacatcagagatgggcattagttgtttatatatt

SEQ ID NO: 213239 - DNA, 437 bp, Glycine max
  unsure (1)..(437): unsure at all n locations
gggttagaggtacttacccgttgaatactgaagacaacgatgaacgaacgatgaatcttgaagaacggtcgagaatcttcgcgtaattactcacggaaacgttacagaagcgcctcagcttggattttcttcacggaactaattatcctcaacaatttcgagagagagagaagtgcctaaggggctgaacctttttcttcttcacttctccccctatttatagcanaataggggagaagcttgccgcccagctcgcccaggcgagcaaggttgcttcctccagaagcaacagccttctagaggaatcttctggagggcccaagtgggcctggttgctatttgcaccccttttttactaagtgcacccnccttctatttttntggtaatctttttccgtaacgttacgaaactttacgaatttcgtaacgatacttat

SEQ ID NO: 213240 - DNA, 354 bp, Glycine max
  unsure (1)..(354): unsure at all n locations
agcttacagctttgtcgagctattctgctattgcacagatatgtatatctatatccaaacgcgatatataggaacatgaaatacaacttagcaggattaacttaagtataataacatgttcttttacttttatataattagaaattattttgtacatcgattaataattacttataaatacagataaaatataccaaaatatagatttgaaaagcattttaagaaaatactagcttatttactaaacatatgtgagaagatccataattacatgagaagagtatttntcactctcaagaacatgaagagacggacttattaaatagataaacaagttttaatatatctatgttg

SEQ ID NO: 213241 - DNA, 375 bp, Glycine max
  unsure (1)..(375): unsure at all n locations
ntagcgaaacaccattgtgagcgaggagggaatgcaacattattttggatttggaacacgcaattgtgaccaccaacgaggcattntaaaataccagggatgcctgtttcgcatatactgctggcgaaaccagcatggctcatttcgccactactgctggcggcaccctgttgctcctgccccctctgcgtgcctagactgcagcctctacgcccctacactggcctactgcaatgtattgctagtttgactggcgaaataactgaggttactttgcaagtgccagtggcgatttcactgccacgtggcgcgtcgcatgcatgtttcgccaacatgcatggcgagttacgttaaacacggaccctcgcgtaattt

SEQ ID NO: 213242 - DNA, 436 bp, Glycine max
  unsure (1)..(436): unsure at all n locations
agcttcacaatatttcagaagtctaaacatgcactgttgcgtaatttataaagttttgtagcattccggaagtcaaaacaagcattgttgtgtaatctgtaaagtttcacaacattccgaaaggaaaagcaagaatcgttacgtaatccataaaccatagaacctgtaaagtttcggcaggttttagaaagaaatcggcagaataacacaaaagggggtgtatttagtaaaatgggggtgtaaataacaattttcaaatctgggcccttctagaggattctagaccttttctttctccttggctaagcaaccagcttgcctgggcgagctgtgcggcaagcacctccacgttntgntgaanaatggtttctgggacttccgtaatgcttccgtaaaatttctgaaaaacttgggtacgcatgtttcacttaataat

SEQ ID NO: 213243 - DNA, 246 bp, Glycine max
accattatcgactccctttttgcacatgttctgtagttgcatcctatccagaaccatattagaatagtactgatactgcctaacgaaagcaaccattaagtccttccaagtatggactcgggaaggttccaagctagtgtaccaggtaacaactaccccagtaagactttcttggaagaaatgtattagcagatcctcatctttgcgtatgcccccatcttctgacaatacatctttatatggttc

SEQ ID NO: 213244 - DNA, 417 bp, Glycine max
  unsure (1)..(417): unsure at all n locations
agctntctaatctataaatagaagcatgtgtaatacttggtgaactttgatgaatgaaagtcttatgagacacacttcaaagttccacttctctccctcttttattccttcaatttcgtgctcccaccttctctctttcttttcctccattaaagcatcctcttcaagcttcttatccatggtacattcttggtggtgaagctccttcttccatggcttattccctagtggatggtgcctcccctctcccattctccattgccttccactgcatctccatggtggaaaatcaccattgaaggacctcattgaagctcanagatccagcctcgttagaagctccacaagcatgcttncatcaaggctccctccaccttggaaagggattggccttcaatccgaggttcttcatactct

SEQ ID NO: 213245 - DNA, 158 bp, Glycine max
caggaacttaacactcagcttttgtgaaggagtttctttacttgtattgaattcacggcaagaccagtatcgatacccaaattgtatcattaagctttgaaacatggacctgcaaatattgagagctttgaaaaattttgtctgaaacgaaacgatat

SEQ ID NO: 213246 - DNA, 428 bp, Glycine max
  unsure (1)..(428): unsure at all n locations
agcttgaacctcacagacccaattccaattatcttttacaggacttgttgtttccatggaggactgaaccaccaacttgtttgtcaagatcctcaaaccaagacttgtttggagtcatatgaaatgaacacccagagtccaagatctatttgtctcagtgttcttatgagacaccattaaagcctcagctgaatcataaccatcttcaactagagtagcatttccaggttctttagatcgatcttgcttgtttcctttctgtctattaggacagaatcttcgagtatggccttctcttttacagtggtaacatctaatgtttagtacattagatccaaatcgagtttgtgacttggatcttttcccttctgtcttatcatccttcttgtattggcttccacgaactaggagtccnttcccatgtagag

SEQ ID NO: 213247 - DNA, 461 bp, Glycine max
  unsure (1)..(461): unsure at all n locations
gactcttcggctggccgattgctgaatcataatcagctgccggaataagtaggcaccaccattcaataccattatagagaatcaaataatatatatatcatcagaataaaattaaatattttttattgataggaattgtatatgagtattaagaaatttataagacttccgcaccatacttaactaagttataagaaaacctattggatgctttttttttggtgataggaaatctgatgttgaagtttagatgaaaaaaagtaaaactttctcatattatcggctaggaaatttaatggtttaaattgtaataaatgacgacatacaagaacataaataataaaaaacattgcaaaaattatatcatacgctgagataattaaatntgttgagataactaatanaacatagattattccaaaatacacacattgctaagaatattatatgctaatagaaaa

SEQ ID NO: 213248 - DNA, 402 bp, Glycine max
agcttcaatgtccctgttcacatcttcaacctctttatcaagcttatctgacaaaatcctcatgcagtcaaggcatgaaggctgttcaacctgtaaccacaaacagaaaacatagattatgacccaatcacctaaaaacctatcaaatacattacataatacatatttacatgtttcctccatccacaaacctgcatctgcgtcgtggcaatctcaaatgctcgagtcaggacagtaatagtagaattaaacccagagttatgaggtggcaaatggccaccagaatcagcccctgtgcccgacgaatgcaccgcgtttccatcggtccccgattcggacttgtacacaaccacaaacgactcctccatggccttccctggctgtgcagcagcatcgccgcgt

SEQ ID NO: 213249 - DNA, 412 bp, Glycine max
  unsure (1)..(412): unsure at all n locations
actaaccttctgaacgggatcatatattcattggcatagattaatgtatgaagatgtggtacgtgatatcttttggtgtcaccctgatgcagtgaagttagtcaatgcatgtaatttggtgtttttcgtagacagtacctacaaaacaaacaagtacagactcccactacttgattntgttggggtgacaccaacaaggatgacattctctactggttttgcatatctggagagtgaacgtcttaataatgtggtatgggctttagtgttggatcaagtggcctcggaataattaagaagggggggttgaattaattattattgaaactttactaattaaaaatctacccttcttaggcttttactatgttgttaagaaagttaagaacagaaatattaacttaaccaaaag

SEQ ID NO: 213250 - DNA, 433 bp, Glycine max
agcttataagaacaaaattgccttaatcatttccaaatatgcatgtgaattaggacgcatcaacaagaatcaagccaaggctattgtgcaagcaatcaatggggcaaaacacaccaaatgattataatgatggatggctcaaattctcacaaaggtaaaatcatcactttcaaattgagctttcaaaactatcatgacatgtagagaagaatcaaggatttcaagtcacaaaatgtcaagaacttttatttcgaaacaattacccatttcttgaacatatcctataattcaaagaaaaacatgcaaagtcgtacgtgcacacaaaattgacccaaaatattaaactgaaaatccgacgaaactaacaacattaacaaattaacacaactaacaaattaacaaaaccaacaaaactagcaaaaccaaagaacac

SEQ ID NO: 213251 - DNA, 345 bp, Glycine max
agctttcgttttcaattacgagcgactcgatatcctacgggactcaatcggacatccgagtgaaaagttattgtcgtttgaatttactcagagcttccgttttaaattacgagcgtctcgatattctacgggacacaatcggacattcgagtcaaaagttattgtcgtttgaatttgcttagagctttagttctcattttcgagcgtcttgatatattacagggctcgatcagacatccgagttaaaagctattgctgttagagttttctcagagcatttggtttgaattacgagcgcctcgatatcctacgggacacaatcggacatccgagataaatgtattg

SEQ ID NO: 213252 - DNA, 379 bp, Glycine max
tgcatttggaattgcgaaagccccactccatcattaggattagtacctgacatctcaaacaaacaaatcaaacgtaacaagacaattatagttgctgtttgaatctcacccactcaagtgtatcacacaattatggcttttctctaatgaaacactcttgccttttaccactctaattccccttgagttcttatgtaattcaagagattatggccacaacaaagaacaattcaccaatatgtgtaaggtaaggctagagagacaaggaaaaggttaaccaagataaaggctaacaatgtttttaggcacaaatgaaggagataaaattcagaatttatgaattcaagtaacaatccttcatgccaccaatatattacct

SEQ ID NO: 213253 - DNA, 401 bp, Glycine max
  unsure (1)..(401): unsure at all n locations
agcttataagaacaaaattgccttaatcatttccaaatatgcatgtgaattaggacgcatcaacaagaatcaagccaaggctattgtgcaagcaatcaatggggcaaaacacaccaaatgattataatgatggatggctcanattctcacaaaggtaaaatcatcactttcaaattgagctttcaaaactatcatgacatgtagagaagaatcaaggatttcgggtcacaaaatgtcaagaacttttattttcaaaacaattacccatttcttgaacatatcctataattcaaagaanaacatgcaaagtcgtacgtgcacacgaaattgacccanaatattaaactgaanatccgacgaaactaacaacattaacaaattaacacaactaacaaattaac

SEQ ID NO: 213254 - DNA, 414 bp, Glycine max
  unsure (1)..(414): unsure at all n locations
ggtacccatcacatgtggtactatgtggtggtcgggcgatggtgcacaacaagttttccacatccacaatgcgcgcataaacccaccatcccctgttgcccacctccaactgagctcacgtactcccacgtagcccatatcctcgtttctctcaacaccgggtccccatcaatcctcccaagcnttcccaacatcaaagtaatacaacattcaaacagcacaaactatcacagccaagaaaacagaacaaaggcagaaaactctgccaaaacaccaaccaaaaatcacagcttttcccactcaaagaccccagtaacaattccttcgatccaattcgtaaaccgttggatcgactncaaaattttactggaagtctatagtgcataagcctacattttgaccgtgggatctact

SEQ ID NO: 213255 - DNA, 429 bp, Glycine max
  unsure (1)..(429): unsure at all n locations
agcttcccttatcgatattgccgtatgcattacttaacatcagtataaacaagagatgtcagtggatcttaggtattccacctttccatcaagcattaatgccttttttggagcacatgcattaatatctgattaacatgtgttcatgctatttgtagaaaattgtatatcattgtacattgtatcaatatttttctcaagattctctagatacttttctcaagacatcacgattgacaagtcacaagtatacacaatttataaaaaaaatggtgaaaggcatcggaggaaaccgaanaagttacctaatagatggacattntatacagtcttcaggtctaggagttggtggcactcgacaatataaaaaacctgttaatgtcaaagcatatgcagccacttttcccagaagtagcaaaacatttgtag

SEQ ID NO: 213256 - DNA, 401 bp, Glycine max
  unsure (1)..(401): unsure at all n locations
ngaacttgcctgctaagcgagagtgcgcactgagactggattacacgctgagcgagctgtccaattcttccaactcttcttcaattcttgcatcaatattcctctgaagcactagaattcttcttcttttgacttctgctaataaaaaattgcacagatgttaatctcttccttatttcgttctcaacaatagtaaagtgaagaaatttcaatcattattagtcgaaactgactatcaagttaactcagatttcgcagttatcaactgctccaaattaaaacatttgtttgtcctcatgcataagacaagttctgagtgtgccggcacatgagataactatgaatccattaaacatctgtttgatctcgtgaggagcctgacgaatcacatggagatgaaa

SEQ ID NO: 213257 - DNA, 385 bp, Glycine max
agcttagaaatgagaattattaatagttacttatgggatcaatgaactgcgtgataaagtgaacaacaaagtttgatgcccaaaaacacatgtatacttataactaaggttgaaatagaatatgtgataatgctaataaactttaaatgaacgacaaagacgcgtttattttattttgtagcgtgatacattttcttaatttagacgtaccacagcagtgaattatttatatgctaaataccaatcgtattgttaataagaataatcatgagaccgatagttattagatattaaccagcgcgcccaacatataagattcataaaatgtaatagcatgtccctcaagagagcactgtagctaacacctgaagagctatacctttcc

SEQ ID NO: 213258 - DNA, 360 bp, Glycine max
agcttatagccacaagcctagtttgctattataaaaacctacctaatacaaacatcaaagtcagcaatatgattgtgtgaaaataaatagctgcatagccagccattatgtttgcttaacactagagtgttttatatatgtagtagtacattagtactgaactttgccatgtatgaactattaatgaagcatatacatcagtataactacaacatattttaattatagcatgctatggttaattacttcattattgttttttttttatctatatcgaagaggttacaacaattcagataacttacaaaactaattaagcgagattccctcagttattattgtttatttcagcctaccttc

SEQ ID NO: 213259 - DNA, 156 bp, Glycine max
tatttgtgattattgagatttttagaaggagctaatagtgaatattcttcacctttatttttaaattaaatagaagccaaaaacaattaaattaataattatgttgaaactcactggaaaataattattaagtaaagataacccaacttaaaactc

SEQ ID NO: 213260 - DNA, 352 bp, Glycine max
agctttgagataattcaaacgacattaaattttttcttggatctccgattgtgtcctgcagtatatcgacatgcttgaaattaaaagcagacgctatgagcaaaatcaaacgacaataatttttaattcggatgtccgattgagtcgtgtaatatatcgagacgctcgaaactgaaaacagaagctctgtgcaaattcaaacgacaataactttttactcggatgttcgattgtgtcccgtggtatatcgagacgctcgtaactgagaacatatgctcgtagcaaattcaaatgacacataactttaactcagatgccgattgattcccgtaatatatcgagacactcaaaa

SEQ ID NO: 213261 - DNA, 394 bp, Glycine max
tggatttcctgttgtatggaatctttccttcctaagatggagccaaacccagtccccctcattaagaactagctcatttcttcctctattgcccttaattgaatacacctttgtttggttctctatttgggtcttaaccctctcatgcaacttctttacaaactctgacctagattccccttctttatgtataaaagaagtgtcaagtgggaggggaatgatgtctaagggtgttaagggattgaacccatagacaacctcaaaaggggattgcttggtggttctatgaacccctctattgaggcaaattctacatgaggaagatactcatcccaagacttatggttgccttttagaagagcccttataagagtggatgaagacctattcacta

SEQ ID NO: 213262 - DNA, 222 bp, Glycine max
  unsure (1)..(222): unsure at all n locations
agcttgctaacccatggaagctcctaatatctcccacactntntggggtgggccattcttggatggccttgattttctcagggtccacttggaccccatttcttccaactacaaaacctaagaagactatattatctacacaaaaggtacacttctctatatttgcatagagggtgtttttgttggatcgagtggcctcaaaataattaagaaggggggggg

SEQ ID NO: 213263 - DNA, 353 bp, Glycine max
tatgaactagatctgttaagatcgataactatattcaatttataactattattattttacatattttttatttacttattttatacaaaaagcaactgatgtgaaactaataagaacttaattatatgaatttaataacataaaatacatcattaaatcttatacattaattgcatttttgtaataaattaaataatacattaatggaagaaaagttgttcgagcaaaagttttaaatcaatcactcctttcatattaaagtttcaactcgtgtaggtttgggacaggtatatgtattggttttatcgcatgaatgggaatggatactattatacccatcctacacatgccca

SEQ ID NO: 213264 - DNA, 378 bp, Glycine max
  unsure (1)..(378): unsure at all n locations
agctntgagccaaaatcctgactcaccatataccttgacccagggtgagaatgtcaatccttaccctcggaagcaaagaaaanaggagagaaggaaaatttccaatcaaaggaaaaaaggagaggaaaggaaattcccaatcaaagagtgggagaaagcaaaaagaaaagaaagaaaattcccaatcaaagaatgggagaaagaaaaagagaaggagaagaaggaaggaaagctcctgatcaaggatcgaaagaaaacagaagatatgtgcagaggggatctctggaccagacaatatctaaacaaatacagaattgtcaccaaatgaacaaaagaaagaanaggaaaccataacctaanagtggtcttctccctttg

SEQ ID NO: 213265 - DNA, 433 bp, Glycine max
  unsure (1)..(433): unsure at all n locations
agctngataattaccttagggagctcctttctacgcctgatagatgacgtactccatccaacaagttctatttaaagagtcaagttgttcatgaaagcattaaccgtgacgctaaattgtgtagtaaaacattaattcaggtcaatttaatccttatccttaatattacaaaacaaaatatataaatcaccgctaattaatatggtccctcctatcgtcagtctattttaaatcagtcaattcaatagtacttaagataatttaattgtcaaaatcaagaattaaattgacagatcctattattaggacttcaaatttatcgactaaaagacaaggatacggtcataacgaacatttgcatangcaacacggtgtttgaaggagcgtaaagcagacctacagagaaagaggtgtagattatcacttgttcatg

SEQ ID NO: 213266 - DNA, 391 bp, Glycine max
  unsure (1)..(391): unsure at all n locations
ctaagctattgcggtttcnataatcccttatgctcggttntgggatgttgcannatttattgtctcanatcccaaacttccacaagttaacatgcctttcaaccgttgctgctattacctctttttgttatgcattaattggaagcgggctntctctggcagtagttgtctcaagtatgagcttcacctatatctttccaaaagctgtccatcattcattccaaaaaatatatgctacatttntttatcagcaaatgttagtttgttagaatgttaattttgttagcagagggattgaacatgtaacctttcttcttttccttctctttaaccatccacccacntatatctttaaattttatctagaatttctaagcacttattagcttat

SEQ ID NO: 213267 - DNA, 391 bp, Glycine max
agcttagagatagaaagtacttttcagttttccaatgagttgaaaagacatttttgccgagttgttacgcaattctattcattttttgtgtgtttaaagcacttaacacttgatgacatggtatagcagacttggtcacttggattaatgcgttaatgagtacaatttttgggaaatttagcatacgcctattgttgagtgtagtatgatgcaatctggatttcttagtaacacttggctactcaggcctttgtatgacaatgaaagaaaagaaccttagtagttaatggctggtcttgtgcgttctgatttgcgatttatgcccgatcagtgatccttcacatcacacaaggtggcttctatattccttatattacccttgttcatacta

SEQ ID NO: 213268 - DNA, 436 bp, Glycine max
  unsure (1)..(436): unsure at all n locations
tatcttccttgtgataacaatatctctaagggctaccgggtctacaactcgctaactaagaaactcgtcatcagtcgagatgttgaagttgatgagtatgcttcttggaattgggatgaagaacaagtgaagaagaacgttcttatacccgctcaactacctcaagaagaagctgatgaagaagacccangtgaaccaccttcaccttcaccataacaacaagatcaaaaactatcatcaccagagtctactccaagacaagtaagatctttggtggacatatatgaaatcagtaacttggccatacttgaactttggaagcttgaagaagcgtcaaagcaggaagtatgggtcaaggcaatggaagaagagatacagatgatcgaaaaaaacaacacatgggagttagtaaatcgtccccatgggaaagatgtca

SEQ ID NO: 213269 - DNA, 336 bp, Glycine max
agcttgttaaaaacggaagagaagaaaaccgataatgaacgaaatgaagatgaaagctaaaaaaataagaaatgaattgaaagtctcggattcaaaaacttacccgttgaagaacgaagaacggtgaagaacgacggaaaaccttcacggatttgctcacagaaacgtcttggaaacacctcagcttggattttcttcatggaaacaattttttttcacccaaaacagctgaaatgcatagccaaaggggttagggatattaggaacaacctcccttcgcctatttataggaaaaagggggaggacgttgccgcccagctcgcccaggcgatctgg

SEQ ID NO: 213270 - DNA, 359 bp, Glycine max
  unsure (1)..(359): unsure at all n locations
actcagcttaacatcagaccacttgcaggtgctggaactacttcacatggacttgatggtgcctatgcaagttgaaagccttggaggagagaggtatgcctatgttgttgtggatgatttctccagatgtacctgagtcaactttatcagagagacatcagacacctttgaagtattctaagagttgagtctaagacttcaaagagagaaagactgtgtcagcaagagaatcangagtgaccatggcagagagttcgaatacggcaagtttactgaattctgcacatctgaaggcatcactcatgagttctctgcagccatcacaccacaacaaaatggcatagttgataggaaaaaca

SEQ ID NO: 213271 - DNA, 441 bp, Glycine max
  unsure (1)..(441): unsure at all n locations
agctntataagcgcgggttcgggagacaaaggcgaggcgttcgcgatatgcgaagatgatattccgagtactttggatttggtacgaccatgccctcctgatttccagctgggaaattggcgagtggaggaacgccccggcatttacgcaacaagcataatgtaaacctttacggttttaaaaagctctatagttgggcctaggctttagagttntcattttgttaaggctttgtgtcttttgtttttgaatttataatacaaggatctatcttcatctgttcctggtctctacccattctcattcatttgcatgtttacttctttttctggaacggcagatccgatgacgagtcccccgaaggtactaatacctgggacccgtctatcgacttcgagcaagaaatgaatcaaacggaagatgaaagaaatgagggtgtgg

SEQ ID NO: 213272 - DNA, 453 bp, Glycine max
  unsure (1)..(453): unsure at all n locations
tctcgtatgctgacttactcccatatctgcttgataatgcaatggtagtcataagcccatcaaagattcctcaacctccatttcccagaggatacaactccaatgtgacatgtgcttatcatgggggagttccacggcattccattaagcattgtatgaccctgaaacataacgtgcaaagtctgatcgatacaagttggttgagatttgaggaggagaatcgcttgtgaattctgatgtcatcaagcaatactatgcatgatgcttgnggcaatttgaaggttgttgttagatatttccaatgactcattangatttacaggttaatgctattactataaacaacagtcacaatgttaataatatagatgaattngatgttgttgtctctcattctctcacaattacatctttgcttatttaactntcactggaatgtgaatgtatgccatt

SEQ ID NO: 213273 - DNA, 116 bp, Glycine max
agcttgcacttgaggagggaaggatatttgcaagtaatgaacaactttcttaattatttgtccttcagattttactgtttctttttgctaatatgtaaatataaatagtataaggc

SEQ ID NO: 213274 - DNA, 414 bp, Glycine max
  unsure (1)..(414): unsure at all n locations
tatactgttatgtatggattaatagaaaagaaattaattgaataatattaattattattggaaaagcctcaagttgatcattcaaagttagacgtaccaccatattagttctttggcttgttatagaaaattcgttattgttgttcatcaaggtaattgtattctacaatattttcttcgttgttaataatatcgaacgctttgtatttccaatgtcttcatctaagattntgtaagtaatgtaatattgtaattaaaataatatttttgaatattttaatttaaaattaatatattntttgcaaattagttntggttggttcattagaaaaacaaataanatatttcaaaaaatttgcaaaaaaaaaacatcggttggtctaaaactgatgtagaaagcaactttacaacatc

SEQ ID NO: 213275 - DNA, 293 bp, Glycine max
  unsure (1)..(293): unsure at all n locations
cgactgagtacgcataattatacatggttggagagacaaagcaattagaacttgctgacattggtaatacagacatggccactggaatatgtgcattgaagagcactgctttatttggcggtacaagtaggcctagcagctattgtcatatgatacgatatgtgtgatgtatacacagatgcatactaatgcattcgattcacaatgagtgtaacataccattctagcttatggctacnttagcacaaaaaagattaggcattaccctactaaaatgtaacgataaaaatact

SEQ ID NO: 213276 - DNA, 484 bp, Glycine max
  unsure (1)..(484): unsure at all n locations
cctatcagactcagcttacacatcgatccctcaactgtagccttattcttgactatattcttgaaggagtgtaaaaacctaacattaatatgaataagtatttctttaaaaatgactatatatataatacaatggtgtataaatgattactcatttatacctctcgaaaggatacatccaatgatattggactggaccaccaagtcttgcctcataaggtaaatgaactggaaaatgctccattgaatcaaagaagcttggtgggaaatattgttctaacttacacaacaacacaggtatgttattntccataactcttagttgttcaacatttaatgttgtcgaagttagttctttgaaaaattggctaagttcaacaagtgacttccaaatagggtttggtaatgagtcaaatgcaatnggaaagcaaccgtgcatgaaaacatgacaataatgactnttcattccattgaagtttcccttg

SEQ ID NO: 213277 - DNA, 76 bp, Glycine max
acgcaattctatacattagctgtgggctaaagacagtgctcactggatgacatggtgtatcagacgtgggcgcttg

SEQ ID NO: 213278 - DNA, 532 bp, Glycine max
  unsure (1)..(532): unsure at all n locations
ntgaccaatgagncctacttcacgtgcctaagatactcagctacgggggcttaataacatacatcaccaatcctctttcatagcctgagttgcatcctgttcggagaaaggagagttcatggctcagatatgtgagtcgatgagggttatatggtttaaaaggaatcagtgggtcttccacaacatatagttccagcacgtgcgagagaccttatctaatgcatcttccatccagttaccttcagaaagtgtgctacatcggcctggcttcaagcccaagagctggattcatcttcctaaacgctgtattagagctaatattgatgcttctactggtcttggtgtgctctttcgcgatcaaagtaggcaaatgctagcagctgcctctcttctgctcccacattgtcatgatcctctcactgtacagactatggctctcangtgggaaatagacaacctttgctatctcctctgcatcttcaatctgatgccaactttgttcacatcgcactctaaggtgatagtccgcact

SEQ ID NO: 213279 - DNA, 423 bp, Glycine max
agcttcggggctgagaacctatataacagcaccaaggttatggatagaggtctcttttcgttgtggggagaaagaataatcttatgttatgcaattccaggtcttactattcacgtaacaataaaatttcattttcttcttcaatctgcaatatcgctttctatcgattaatggaaggctaagtctccagagtcgttttctcttgacgatcaagcacaactctctttgaggttttattattactatagaattctgatcatcttttcctcttcaccaattactatggatttggtgctattaatccatgcatgcttagtgatcgactaattgtctctgtgcttaattcacgttcatgcttaatgatcaggatcattcatgattaattgaggtatgtgttgcttaatcacataatgattaccttat

SEQ ID NO: 213280 - DNA, 423 bp, Glycine max
  unsure (1)..(423): unsure at all n locations
tttcctggccttctcttttaatatataatatatagatttatagatatagatatatagataaatagttagctataaaaattggcctaaagttacagaatgttaataaagcataaaaacatattatttattgaaaatttaatttcttaagtgatgaacaactaattttaaggaaatagaaaaaggaaagtgataacaaaattaaataaaataaaattctatattataatattatatatatatatatatatgaaatattaataatatntttaactgtaatattttattttctcccaagttttattttaataataataataatagttaatgggatcttcaaccacactatattgcacacgaatattatataattttttaaaaaaattatactntatgatacaggattgatatgtaacacacaattct

SEQ ID NO: 213281 - DNA, 316 bp, Glycine max
agcttgtaggataatggggtacccatcccatgtggtactaagtggcggtcgggcgaggtgcacaaaatattatcttgacatcctcatatcgcgcatgaacccaccatacgctgatgaacacctccaactgaactcacgtactatcacgtaaaccatatcctctttactctaaacatacgggtgcccataagtctttccaagcttacccaacatacaggtaagtcaacatcgaaatcgtcaccaactaacaaagctctctcatcatgggaaaggaagataactctgtccaaaactcaaaccatgattacatgctttt

SEQ ID NO: 213282 - DNA, 492 bp, Glycine max
  unsure (1)..(492): unsure at all n locations
ttgccccattgttccatgctctacggacctatgaatctcagctngcatgcctcttttattcgtcggtatgcattccacaactcatgctcttcatatcaggtntcangtgcatagttttctctctatgtgccacatttcgaaatctaaccgttttccttttgaagtttgggtgattgaccctttttaagaatcaacttctcactttcttacagggttaagcctttgggtaccaatacctattggtgtgtgtataggactaaaagtcctctactttatgttncataggactcnaagtcctctggtttagttcatacgactcaaagtccttgcttcatgtttgagaactcaaccctctactttgttatagatcaaagtcttgttttatttatggactcaagtctctattcatgttatagactcgaagctctctttatttaagaccaaaggtttatttattcctagactaaatctcttttatgtttgcgaccacct

SEQ ID NO: 213283 - DNA, 418 bp, Glycine max
  unsure (1)..(418): unsure at all n locations
cgaatttcttaattgtgagacgctccggacttactggttctttctgctcatatggcaacctgaataccatatcgcctcccatttccaaccaccaacctaacaacaactgtgaaaccattcagactgcgaataccacgacccgttttatgaatcatctctcctattcctccgcgcaagacggtaacttcactgggaacatcagcgtataaagagagaaaccgcatcatgagcacattcaactaccaactgataaaaaaacaacaaaaaacattccttgcttctcacagtggcgtccgagagattagctccccagcgtctttctcnagaccacataacacttcggtcactctctgtcaccgcgctaccgagacatctgcagaattcttcggcaccccccgtcttacccaccaccccaccc

SEQ ID NO: 213284 - DNA, 165 bp, Glycine max
ctcacaagatgtgtcatactgacttctgatgcacgctgacggtcggaacttgccgagtggttgtactgtatcggactattgaatgctgtaagacgagtggcctgttcacactcaaagactaacatcgttttctgcgaccttcgtcacttgcggacgacatgtccg

SEQ ID NO: 213285 - DNA, 420 bp, Glycine max
  unsure (1)..(420): unsure at all n locations
ttgtataaactcacatgtcgtatcacttctgattttatcttattagaataaattccattntgtattatatatacgtntttctctgaaattttaaaagaataatagtggctgtacattggtagcgataaaataatgccgataacaatcataacaaaatgtaaaatatactactttaaagtcttacaaaaataaatgagcaacaaaaaccttatcaactaattaacaatattaaggacatatttttttaaaatattaacaagcttattaaaaatgtagaaataagcttcatgataaatcaagattgattcaagggagtttgatgataacaaagatgatgacaaacaactcanaagtcaagatcacttcatgataacaaagatgatgacattcaagattaagttcaagaatgagtcaagaaca

SEQ ID NO: 213286 - DNA, 475 bp, Glycine max
gccaccttgaaacccttgagtacaccgcgatctcgatagaccctgctcagtaccgcatgatcctctagagtctacacgcacgcatgcaaactagattttaggacaatgtgactgagatatcactggacaacctttacagagacttaggggactaactgcctataaattcaatgtcatgacacattgcagggtccattctactcctgaccacataacgagacatcctcttgggttgtaataataagaagaatagcggtatctgtctctggtcagactattaaaactgtgtcgaacctctcactagtttaacaattatagtactggaggtacaactactgggttgactgctggcactatgtacaaagctgacactgtttacaatttgaataactgggacagaggtttcacggactttctagcgtaaaactcatgaaacaattacactgccaacagtaatgcgtggctaagactcttc

SEQ ID NO: 213287 - DNA, 271 bp, Glycine max
  unsure (1)..(271): unsure at all n locations
agcttgttgacacgtggagatttaagttatctttcacgctcacaagatctgtcatactgacttttgcttcacgctgacggccggaaatacccgagtggctatccgtataaagtttntgcattctgtaagacgaaaagcctgataacacgcatagactaacatcgtcttctgagaccttcgttaattgtggtcgacaagaccgttgacacgtggagatatacgtaatcttgcgcgctcacaagatctgtcatactgacttttgagtcacgct

SEQ ID NO: 213288 - DNA, 351 bp, Glycine max
cgcagaagacgacgttagtctctgcgtgttataaggctttacgtcttacagacagcaaaaagtttatacggataaccactcgggtatttccgcccgtcagcgtgactcaaaagtcaatatgacagatcttgtgagcgcggaagatgacgtaaatcttcacaagtcaacgggcttgtctgccgcgattgacgaaaggcgcagaagacgacgttattctctgcgtgctattaggcttttcgtcttacagacagcaaaaagttcatacggataaccactcgggtattttctcccgtcagcgtgactcaaaagtcaatatgacagatcttgtgagcgcggaagatgacgtaaatc

SEQ ID NO: 213289 - DNA, 217 bp, Glycine max
agctgtactaaactaatcacatacatgtatatatatacttagcatgaaaatctatgactaaaaacatgtagtcacgaaaatgaaatacatacatgtacagaagacacaacacatagctttctctgtcagtctcaattcgaattttgtttcaaggtgttacacaggaactgttactattagaattgtctaacgcttataaataaaaagattggcactg

SEQ ID NO: 213290 - DNA, 459 bp, Glycine max
  unsure (1)..(459): unsure at all n locations
tgtaattagtataactcgagtgctngtactcccgagttaacaaattctacattcttcattntgtgcattaaaattcacaaaagtactttgtcaactntaatctaaacatagcagtatatgtcaaccccagctaattcttgaatgtgaataagttttattttgccacgtaatgtttcagaatagtaatgttagttgccaactcacaagcatatgcaaatagatgcataactggttaaggaaagtcccacaaagaanacgataggttaagaatgatcaacttcactaaccacctttntcccctttctgtcaccctcttgttttgttgtatagagaaagggtaagcanaggaatttgtcattntgtattctcaaatctatatggatataaacattactntaaaatggngcatggtgaanacaggttctaactcctatgagatatggacatcacatcatcagt

SEQ ID NO: 213291 - DNA, 444 bp, Glycine max
  unsure (1)..(444): unsure at all n locations
agcttgcttctacacttccacttgccaatagtttcaaaggactaaccgcctgagatatcttttgtttccctttacaaagatttaagggactaactgcctaagaattctttgtcttaacacattggagggtacatcctttgtggtacaagtagagtgtacatctacttgggttgtaatacttagaacaagagcgggtacatctcttgtggatcagttcaagtggagggtacatccacttggttgttcaaagagaacaagggagggtacatcccttatggatctttgcttgtaaaggattttacaaggttattggaaatctcaagaaccgatggttgcttgcggactggatgtangcacaggttgttgcctaaccagtataaatcttgtgtgtgtcttcttcgtccctacactctttacttttccgctgtgtacttttattttcgc

SEQ ID NO: 213292 - DNA, 448 bp, Glycine max
  unsure (1)..(448): unsure at all n locations
aagctngcacccagctcgcccaagcgagcagggttgcttcctccagaagcaacagtcttctggaggaatcttctggagggcccaagtgggcctggttgctatctgcacccccatttttactaagtacaccccctgccttttttatggtgattcttttttcgtaaagttacggaaacttacgaatttcgtaacgatacttgttatctttccgtaatgttacggaaccttgtgaattacataatcatccctcttttgacttacggaatgttacggaacctcactaattgtgcaacgatgcttccatttgatttccggtgtgtcacggaaccttacggattgtgcatcaatattttcttttgttgtccggcatgtcgcggaattcacatattgcctaatgatgggtgccaagcacctcacaaggaccaaacagaagtcgcatgtcatcaac

SEQ ID NO: 213293 - DNA, 437 bp, Glycine max
agcttatgttttaatgacgagtatgtgtaattgtaataagctccttagtatgaactctagtcataattaggatgcgtgctttaaagttttacaatgcttgaatttgtgtgataatcttgaatatgcatttcaacttactcatttaacttttataatattgatccatggttaaggattgaaatctttcgaaacatgttttggaaaatacttaagtttttatcccgcatcaaataattgattatatgatgatataattgattatcttgatgatgatgcctttgtttttcataattgagaaagactcaaaattagtctattatcttgagtgaataattaattatatggaattgaaacaaattttactatcacagataattaattatatgatgatataattgattatatgttcttcaggttgcctagatgatacgatcaac

SEQ ID NO: 213294 - DNA, 318 bp, Glycine max
aagcgctcctcgtgatggcgcgttgaacctgcaaacgcaagtcgtaggctccaatggcattttccttgcttctgcagctgagcagtctgctgcagcactgtgcaccctgtcacctgcatagctaaaacgccagtttgactggcgtttctggccttcatgcacaacgcgccagtggatgttgcacgtcccactccacgtaagtagaaagcgaaaccgctgctgctactaacacgtccatctccacgtgagcagctcttcactgaagcgccagtggtggtggcgccatgcatggcgttcacgtaccacaagagcacccgc

SEQ ID NO: 213295 - DNA, 466 bp, Glycine max
  unsure (1)..(466): unsure at all n locations
cctgcggcatgcaagcttcatggattatgcaacanagcttattttgacttccggagagaccacacaaagttcacaagtcgaccgccagtgtccccgaacgaaattagggtatgacagttgcccctctttacttagattttattggagataaaagggaaataaagataagacactaatttccaaggcgttgaggtttgtactgatgttcctgctgcctttctgctttttctaattgataggtttcacgggttgggctattggtaggtcaggtgaggttcaactcgaatgccttgttaaaccggatgcccaagacgtccccgcatgctatcaaacttgatcgtctctggttaacaaagaagagccttgtgcatcatcggacctgaacatatctggatgactaaggtaaatcagcaaaaatcttcaaaatgattagaaattagcgaccatcatcatnctagatattatc

SEQ ID NO: 213296 - DNA, 400 bp, Glycine max
  unsure (1)..(400): unsure at all n locations
agctctggtaccgcttgttaaacaagtggcctcaattatcttaagaaagggggttgaattaaaatacaaaaactatccccttaattaaaaatttaacttttttatattaaaaatgcaacccttattatgagttactctaagaacaattcaaaacaaacttctttaaagcgaaatataaacaataataaataaaagaagtttaagggaagagagaatacaaactcaatttttatactgggtcagtcacgccctatgcctacgtccagtccccaagcaacatgcttgagatttccactatcttgtataaagccttttacaaagtgtgaaccacacagtagcaacccttcccttgtgtcaaataaccttacaacttaagagaacctnggcctttaaacagatc

SEQ ID NO: 213297 - DNA, 274 bp, Glycine max
atgacgattaacatgtcatcacgatggtgaaatacttacatgttcagaagacacaacacgtagttttctctgtcagtctgaattgtaattgtgttgtcctgtgttacaaacgaactgttagtattacaattgtctaacacttagaaataaaatgattggcacagttctgatgaatagcgccactcttaataagaaaataactggacatcttgagtattcagtaagagcttaatcaaatcagagttccatatcttgtcacactacaacattttat

SEQ ID NO: 213298 - DNA, 408 bp, Glycine max
  unsure (1)..(408): unsure at all n locations
gctataacttcataactgtccttataactagtctagatcttcacattctntttggcattaatcatgtcatcgaattcttgtaagtttatattcttttcgatcaagcatcanacataacattaatattgtgctctttagattaaaccaacttcaataaatcttttaaattcccatacttaaaaattgttacttgtaccactaacacaaactggaagcataatttaacctaccatcgtcnaccataacanaattctacagtaaacaaaaatgtttactaaaatgggacgaaatgacttcaatntgttgatgggtatccattcttggtaatgcaacctatcgaaatggaatgtagaggacaatangttcatcttgctattgggatcgttgagaaaatcttcaaagcataga

SEQ ID NO: 213299 - DNA, 301 bp, Glycine max
agcttctgaggagtgaaactatacttagacatagtaatatgagatatgacatggtgactttacaaagatactgtgcctccatgtacagtggtacacaagaatatcacatgatcctgctgtgttaatacaaattcatttcaatggtgaacacccggacagaattactataaacagtctacattgttactgataaaagagataatcactgttgcggagactaccaaatatgtagtctgaatttcaccttcctgtcttctgtacacaactataggcctataatgcttacaatggcttgggtgac

SEQ ID NO: 213300 - DNA, 430 bp, Glycine max
  unsure (1)..(430): unsure at all n locations
acatgatacatgtcnggggttggtttggttcaaggataaaagggatgccccacattatttccatgacacanatgcaaaaatgatgatttggaaattttatgcaaaactggtcatgcatgcacctatgtggacgctcaagtgtcaaaattttatggtcatgtgatgttagggctcaggattcatttcctctattttaaatcaacccaatgtttccaaaatatgttcttttatcaaattgtgcattcatccgagtccatttcgggcgtccggngaaatttcacagcattcacccttcaggtgtagacacattttccaaaaattggttatgatcaatgaatntttttcacagaaaaagtggaaatcatctcttttcaaaagcatgtcggntnttcagctagacaacttatttttctttnntctctctttttcc

SEQ ID NO: 213301 - DNA, 368 bp, Glycine max
  unsure (1)..(368): unsure at all n locations
tgatgcatgcaagcttgcattgtgctattgtttaanagctacttagtctgacctcgattcataatgaagacgcatgctttaaagttatgcattgctggaaaatgtgtgacaatctcaaatgtgcttctcatgtgactcagctaagatctacattatagttccatgggataggattgatttcagtcgaagcatgtacttgtctacactcagatttatatgacccatcacataaatgagtatatgaccatgcaacaagattatgttgcaaacgatatcgtcgctatccgtaaaggataagcactcgctaccctctattaccttgcctgagtaatggattataaggaattcaaacccttgttcctatcaca

SEQ ID NO: 213302 - DNA, 332 bp, Glycine max
  unsure (1)..(332): unsure at all n locations
acattgaacgcatgaaaataacctcaaatagattataaaaatatttacatcaagtactcagtagaaattctcaacaaaggattatagccctccattacaagggagtaactntcacaaataggagaagggtttcagagaaaataccagattacaaagcaatggggatgtcttctccacctctacctccacctctaagaacctagaaaataactctaaaatctataatctacctaaaagttacgacctttgcttccttgctcagctattcctctgttctctacacataattcgcagtcaattcagacctctttcacgtcatcacgctctttctc

SEQ ID NO: 213303 - DNA, 394 bp, Glycine max
  unsure (1)..(394): unsure at all n locations
caagctagacttaggattgtttaanctccttactatgaactctagtcataattaggatgcctgctttaaagttttacaatgcttgaatatgcgagataatcttgaatatgcatttcaacttactcatttaacttttataatattgatccatggttaaggattgaaatctttcgatacatgttttggaaaatacttaagtttttatcccgcatcaaataattgattatatgatgatataattgattaccttgatgatgatgcctttgtttttcataattgacaaagactcaaaattattctattatcttgactgaataattaattatatggaattgaaacatattttactatcacagataattaattatatgatgatataatcgattatatgtcc

SEQ ID NO: 213304 - DNA, 382 bp, Glycine max
  unsure (1)..(382): unsure at all n locations
gtattataagttataacctcaaaaaatggggtatatgtaacatgaattatattctcctgttctttaaaagcttgaaatcaacgtagtaaataaaatttacctgaggaatgcaaagacttgcaatagtgagaccagatattaaatctcctctaaattatttaaggttgtaacttcttccccaactaagtattgggaatatggcttcaataccgagcctgatcttccttgatctanngtgatctttgaagggtcttacaggatcatcacaaaagaacgtttcttttatagtgtcttggaattcctcgaagaggttctgtctcggaggaattgccatttgtgggcttgtggtgcctgaccaaatgaagaagatggcatacttctg

SEQ ID NO: 213305 - DNA, 113 bp, Glycine max
  unsure (1)..(113): unsure at all n locations
agcttataagaacanaattgcctcaatcatttacaaatatgcatgtgnaataggacgcatcaacaagaatcaagccaatgctattgtgccagcaatcaatggggcaaaacaca

SEQ ID NO: 213306 - DNA, 424 bp, Glycine max
  unsure (1)..(424): unsure at all n locations
cagcttaagaataatggcctcaacaaacttcttattcccaaaaggatattcaataaataggcctcctatgtttaatggagagggttaccactactggaaaacccgaatgcaaattttcattgaggcaatagacttaaacatttgggaagccatagaagttggaccttatgtacccaccatggtggctggaaatacaacaatagagaaacctagagaagagtggtttgaagatgaaagaatattagtgcagtacaatttaaaggctaaaaacatcattacttctgccttaggaatggatgaaatatttanggtctgaaattgtaagagtgccaaggatatgtgggatactctacaagttacacatgatggaacaattgatgttaaacgatctangataaatactntaactcatgagtatgaatta

SEQ ID NO: 213307 - DNA, 290 bp, Glycine max
ggcttgctattgaggctcatatggatgctggtcttacaagctgactgaggaactataatggtcctctttgtacatggagacgcagcgtatcacaatagcctgcagtgtgaatgcagctccattctcttggtgatcacccgtgaagaatggctctacacagcctacatagctcctgataaaaagattgtcacggtcgtgaagtcgacaaaatatggagtgtgaatatcccattgggtgttctctccacactagaggtctataatgcttacaatggcattgttgacacgata

SEQ ID NO: 213308 - DNA, 427 bp, Glycine max
  unsure (1)..(427): unsure at all n locations
actcagcttacaatctagagccataactcccacaattcaagctattagttccacttagcacataagcacattatcacatcactaacatatccagctttaatctaatcacttagaacttaattgaaagcatgcaaatcatagataatcaatatggagagattcagccagaggcaattggaatcaataacaatgatttatgccatagaattctaaaccctcgattggtgcagaatgcgttaccaaaatcaaaaatgaaagtcagaaactggaaggtgttttgcactcgagattgtggaggtgaggtcgttgctattctctacatacaagaacaaaanttgttgatttgaggaaagaataaggccaagagagggatntcatggatgagagaaaagcatgcaatagtggggtgttgtgtggatcgcgtatg

SEQ ID NO: 213309 - DNA, 412 bp, Glycine max
  unsure (1)..(412): unsure at all n locations
agctntccaaagttttctggtttttctaaaccttgaaaacttgtgttattcatctttttcattctcttctccctttgccaaaaagaattcgccaaggactaaccgcttgaattctttntgtgtctctcttctccctttttcaaaagaacgaaggactaaccgcctgaattcttttgtgtctcccttctcccttgtcaaagaattcaaaacgacacaatctgaaaattcttttgattcttcccattctcttatacaaaagtgttcaaaggactaaccgcctgagaattcttttgtatccccattcacaaaatatcaaaggtttaatcgcctgagatctttgtcttaacacattggagggtacatcctttgtggtacaagtagagggtacatctanttgggtttgactgagaac

SEQ ID NO: 213310 - DNA, 362 bp, Glycine max
  unsure (1)..(362): unsure at all n locations
cagctttggaatgcagattagctctattggctctctggttgcattctttgaaccttngatgtattatctgatatgttatcgaagatattcttggttactaacttactctccctttatatctcaattntttatgtgtgcacgtgagctgatgagcatgccaatgactgattactattgtttgaattttacttgattgagatataggaggtgaagatgtcgaccccggcaaggaagagactgatgagggattttaaaagaatgcaacaagatcctcctgctggcatcagtggggctccccaagacaataatattatgctttggaatgctgctatctttgggtgtgtaggagtatataaatcatg

SEQ ID NO: 213311 - DNA, 541 bp, Glycine max
  unsure (1)..(541): unsure at all n locations
cctcaccaccttcatcncntccttattanttaatcaccntccactgttatctactattactantatcgccgcgaccacccacgacatcggtgacaccttgtganacggtcacctaccagcaacctgaggcatgcaagcctgcaacactcctataagctacggacctttatgccgtaatttccacacactaatgaggaccttgcacggcggcgacgagcatggagacccatcacaggaccaaggacaccacacacagtgaacccatcgcacccgtctaggtcacccataccaaggaggtcatgacgccacatgaccattcatcggaagaccggacgaacccctaccctggactcatagaggtaactgacacaagggcacgcgcgatatgagtaacctatatgactaaaggataacaaccctggaaaacgacatgcggcacatacatgccaagatggccttcaggtgccacacacagactcggatctagccaaacggtacaacaaactcctaataactctttggacagcccagcggctacacc

SEQ ID NO: 213312 - DNA, 395 bp, Glycine max
tatatatattataaataaacatctatcaatcaatgtctacaaagtacatatattaatgtctgaaatcgatcacaaagactaaaattatgaattttataaaatagggagacacaatgtcttaattaaaaatgagagactaaaattataaatctttttaaagtggaagatgaaatatctcaattaaaaagtgagagaactaaaatcatatatttgaaaaaataggggaacaaaaagtatattctagtctaattatctttgtgtatgaatttggatttgaaattgtgtataagtgaatatagatttgggttaatcactttagtgcttgaatttggatctgggttagacaatatgtctacgaccatttaattaaacaagttagcaagtaattttggatc

SEQ ID NO: 213313 - DNA, 329 bp, Glycine max
agtcatacctcctggtaatcgaaaacccgaactgtggggatgtgcacagtaggccatcactgtccccaatacgtgcacacaaaatgaagcacttgtccccgtcttggtcagtacatgcccaacaagtactgatgtccgctgaccattccctggacgaacctgacccatccccttacatgtgcttgatagatatcaattgcatctctgttcacggagaacactaagctgacctatcttactaaacacgtatcaagaaccctgatcgagagattatgagcgcgcattcattggtcaagtctggcgccatggttgccacacacattctgatg

SEQ ID NO: 213314 - DNA, 487 bp, Glycine max
  unsure (1)..(487): unsure at all n locations
ggatcgaagtgggtctgagaagaggcataattgattatcctgctttgatgaataggaagcctgtggaaaatggagagaatgagaaggagggcggaacccgtgttgtgactgtcgttcctacatggccaaatttcccaccagctcaacaatgtcgatacccagccaatatcagcccttctcattacccaccaccctatcagccaagaacacccaatcatccacaaaggccacctttaaatcagccacaaaacccgcctgctgcacatccaataccaaacaccacccttaacacaaaccataacaccaaccggggaaggaattttccataaaagaagtctgtagaattcaccccaattttggtgtcatatgctaacttactcccatatctacacaataatgcaatggtagccataatcccaacanagattcctcaacctnncattttccgaggatacaactcgaatgcaacatgtgcttatcatggatg

SEQ ID NO: 213315 - DNA, 498 bp, Glycine max
  unsure (1)..(498): unsure at all n locations
nttgaccacccttgcgttgancgcgntccttgagacccatcctgcangcatgcaagcttcaaggacacagaaagcgtgcacgctgatgatcacatctatgaacattaccccatattccgtgagggtcacacttagtggaagaccaacacatatctaataatggagcttcgatggactgtattgaatactcacctttgagcggtgggactagctttctaatgacactgatgacctaccgctttagaacgatgatggatacattggttctcaaactcgaatgcgcggggggggcggcgtgaacatattttgattcttcccactctcttaaaccactgtggtccaaaggactatactgcctcacaattctttttgcttcacattcacaaaatatcccatggtcaactggccacattcttgtcttaaccaatggacggtcactctttgtggcacacattacggtcacttattcgggctgactgacacactaactgtcatccc

SEQ ID NO: 213316 - DNA, 358 bp, Glycine max
ctgagaatgcgaatttagctctattgtctctctggtgcatttcttgaacctttgatgtattatctgatatggtatcgaagattttcttgattactaacttactctccctttatatctcaattctttatgcgtgcacgtgagctgatgaacatgccaatgactgattactattgtttgaatattacttgattgagatataggaggtgaagatgtcgaccccggtaaagaagagactgatgagggatcttacaagatagcaacaagatcctcctgctggcatcagtggagctccccagaacaatgatattatgcttcggaatgctgttatctatgggtgtgtaggagtatataaatcatg

SEQ ID NO: 213317 - DNA, 305 bp, Glycine max
  unsure (1)..(305): unsure at all n locations
agctttcgttntcaattacgagcgactcgatatcctacgggactcattcggacatctgagtgaaaagttatcgtcgtttgaatttactcagagcttccgttttaaattaccagcgtcttgatatactacgggacacaatcggacatccgagtcaaaagtaattgtcgttcgaatctgctcatagctctcctcccatttacgagcgccttgatatattacagggctcgatcggacatccgagctaaaagttattgtcgttagacttatctcagacgctgcgttcccaatttcgagcgtctcgatat

SEQ ID NO: 213318 - DNA, 425 bp, Glycine max
  unsure (1)..(425): unsure at all n locations
tgcgaaagccccactccatcattaggattagtacctgacatctcaaacaaacaaatcaaacgtaacaagacaattatagttgctgtttgaatctcacccactcaagtgtatcacacaattatggcttttctctaatgaaacactcttgccttttaccactctaattccccttgagttcttaggtaattcaagagattatggccacaacaaagaacaattcaccaatatgtgtaaggtaaggctagagagacaaggaaaaggttaaccaagaaaaaggctaacaatgtttttaggcacaaatgaaggaaataaaattcagaatttaggaattcaagtaacaatccttcatgcaaccaatatattaccttaaagagatttttntatagttcttaagcatgaaccattcagcccaattcttaatttta

SEQ ID NO: 213319 - DNA, 451 bp, Glycine max
  unsure (1)..(451): unsure at all n locations
agcttattttgataatataaaaaataagatagcttataaattattagaatttttttcaatttattcttattattttatttaaaatttcatttatcattttatttaatttaaaaaccttcttatcctttttgttcattgtctagaaaaacttttatataaaattttacattcttacggcgcatatgacacacaataatcgacccatcaattgatatcactaaatcattcctaatggttcaaagtttttttaaccatatacctttacgattatttgttgaattattcaatgtttttcctaaaattatattatcttatttagttccttgcataattnttttttggattgaatcagggaaagtaaaagttcccctgtttgttaacttaccctatgcaaaattntataatacataatttaaaaaattgttatccctactttaagatgattaatact

SEQ ID NO: 213320 - DNA, 284 bp, Glycine max
gctatgtagttgagacaaattagggtgaatggttaggtgctgttgttgatgtttggcgccggagttatgtacagggtgtgttgatttatattaagacaactagattgtggtgtgcacgttgggatttggtggctgttcatttctatgaagagttgaaaacatggctgcattttttcttcttcttttcattggactgactgttggttagcttttatgttctatttaattagcttaggttgttgattatgttgttgtgtctggagaaaactgagaaagattaatca

SEQ ID NO: 213321 - DNA, 373 bp, Glycine max
  unsure (1)..(373): unsure at all n locations
agcttgtcgattcttctttagtcttctttcctctttnttgtttttccttcttttnttttttaaatttggactgtggggatgtgcgtgtaggccatcactgtccccaatacgtccccacaaaatgaagccattgtccccgtcttggtcagccatacccaataagtcatgatgtcccctggccattccttggtcgtacctgtcccatccccttccctgtgcttcatagtttttaagtgtaactctgtagcacggtgattagtaagttgacctattttactaaataggtataaagaaccctgtaagattgattatgtgtgcacattcattggtcaagtatggcctcttggttgccacacacattcttctgtatctg

SEQ ID NO: 213322 - DNA, 281 bp, Glycine max
agcttattcttcatgtaatatatcacgaagacttatgagaatataagcgagatacttcttttctatctccctaaatgtccacacttgataacctacaatcggtgtcgaaactaccactaaaactatccggtactttttatgaatcctctcatgttctatctaacctgtattttcttatgagaaacattgagatatttccttctccttgttactagtatatccgcatgtgcatgggctataatgatcaatctatctatcctatttataagagaaaggtggat

SEQ ID NO: 213323 - DNA, 328 bp, Glycine max
  unsure (1)..(328): unsure at all n locations
cttctccttctacggagaaaccaagaagctntacaagaatacagtgctgaagtatggcaattagtgccactctcattttgaactcatctaaaccttgtccagacttctttgaaagccttttcacagctaacgctttcccatctataagtgtgccctgaaagttatcttctgccatagttagaaagattntaaggaaaacagaagtttgtgaagttttcttagtcaccttgtataccggcccacatccaccttcttcgagcttatattttgttgagaagtttttagtcacattagctaagactgttggcaagtcaatgtcttctgttcg

SEQ ID NO: 213324 - DNA, 402 bp, Glycine max
agcttgtgctcgaggccttgacctcataattgtttcatcactgtgtttgatccattctgagagtttccagggcttctgccacttccatttaaactgtagcagccattgatgatgacttctcttccacttccaaagtattccggcttgtcctatagctgctagcctcttcgttgacaactctccaatgggtatcatctggatataaacccattaaaacttattgagaaataaacactatcatcatcatcatcagggaaatagaatctagcaaacatacctttcgtgcttcatctaaaaatgtagctgactccctgcctgaccaattaacaactccaggagtgaatttgagttgctttggtgcacgaagcgacattggagataacggaccactcatctcatccg

SEQ ID NO: 213325 - DNA, 345 bp, Glycine max
  unsure (1)..(345): unsure at all n locations
tttaaatcctctctgagatgagaattatgagattccaattcagatattctgctatgacgctttctctaaagcaacataaaataaattataatggtttacaattctgagacaaatttctaactattgcataattgttgtattaggaattgtataagataacacaccatattagtgctttcaacatagattagaaacagactacaagtctacagaataggctcanaagaggatcaacctaatcttctacaagcctcgaatatacaatgacatcaaacatatatagaactcatgataagttattacattgcactgaaatagcttattctacccactctcttaattaat

SEQ ID NO: 213326 - DNA, 435 bp, Glycine max
  unsure (1)..(435): unsure at all n locations
agcttataagaacaaaaatgcctcaatcatttccaaatatgcatgtgaattangacgcataaacaagaatcaagccaaggctattgtgcaagcaatcaatggngcaaaacacaccaaatgaatatgatgatggatggctcaaattctcacaaaggtaaaatcatcactttcaaattgagctttcaaaactatcatgacatgtagagaagaatcaaggatttcaagtcacaaaatgtcaagaacttntattttcaaaacaattacccatttcttgaacantatctataattcaaagaaaaacatgcanagtcgtacgtgcacacaaaattgacccaaaatattaaactaaaaatccgacgaaactaacaacatttaacaaataacacaactaacaaaataacaaaaccaacanaactagcanaaccaaagaacact

SEQ ID NO: 213327 - DNA, 380 bp, Glycine max
  unsure (1)..(380): unsure at all n locations
tgtatcagcgtntatgcgagacggagaccaacatgctagctatcatcgccaagtaccaagaagagttaggtctagccatggcccacgagcatagaatcgtggacgagtatgctcaagtatacgcggaaaaagaggctagaggaagggtgatcgactctttacaccaagaggcaaccatgtggatggatcggtttgctcttaccttgaacgagagtcaagaacttccccgcttgttagccaaggccaaggcgatggcagacacctactccgcccccgaagagattcatgggcttctcggctattgtcagcacatgatagacttaatggcccacataattagaaatcgttaggaaacttgtatggtctctcagaccttgact

SEQ ID NO: 213328 - DNA, 278 bp, Glycine max
  unsure (1)..(278): unsure at all n locations
agcttatacctcatgtaattgaagactgagacctaagagaatatgagnggatactgcttgtctatcatcatataacgtacccactgtataactacgatcggtgtcgaacctcccactacctctatgcggttcttcacagaaacctcttgaagactcctcaacctgtattttcttcttggaaacattgagatatcaccctttacatgtgacttgcatatccacatgggtcatggacattagtatcaacctcccttctcctatatataggagaaaggtgg

SEQ ID NO: 213329 - DNA, 330 bp, Glycine max
  unsure (1)..(330): unsure at all n locations
agctgttgtgagtaataaacccaaacatttcagtgtcattgtacatctcaaaagcttcttccaaatccttcaacttctcgtcttccccagctgcctccataagtttcacaaaatctatcaaactcaaaaacacatcaccatcagaatccaactcctcaatcaactgttcagcatctttggtcaacaactcaccaccaatcatgcctagccggttcctaaactcacatggagaaatcttaccatccccatcctcatcanaatacttaagaacacgctcaaactctgtgttcaccctcataactatagaaaatacacgcataaatattgatg

SEQ ID NO: 213330 - DNA, 415 bp, Glycine max
  unsure (1)..(415): unsure at all n locations
ntgaggcatgccactcaatctttccactcgttgtggggttccaacaatagagtcattgcaactttcattctcacttactttttatccaactagtgattccacatgatacaataacattcatggtcaaaacataaaacatgatgtacacgctaaatgtgactatatgagacacttagcactccatacaatagactcaaaaatgagtcctccatttgcatccattcaagcacccacaaagctgactnttcactaaataaatgaagtgatgacataattaatntccatttatatggtatcattgccaggtataaaacagtcaatattgtggtgtgtgtgaaataactaaccttgatccatggttagggatccctgtatgctaaaatataccccaacaatccatgtcttctatacctca

SEQ ID NO: 213331 - DNA, 420 bp, Glycine max
  unsure (1)..(420): unsure at all n locations
agcttgttaataacggaagaaaagaaaaccgattatgaacgaaatgaagatgaaagctaaaaaaataagaaatgaattgaaagtctcggattcaaaaacttacccgttgaagaacgaagaacggtgaagaacgacggaaaaccttcacggatttgctcacagaaacgtcttggaaacacctcagcttggattttcttcatggaaacaattttttttcacccaaaacagctgaaatgcatagccaaaggggttagggatattaggaacaacctcccttcgcctatttataggaaaaagggggaggacgttgccgcccagctcgcccaggcgatcttgggtttannnaccacctcttattctcctgaagggatgtcatcttatctttcatcgctagcttccactcaatagtgtcattcccct

SEQ ID NO: 213332 - DNA, 447 bp, Glycine max
ctcagcttaacatcagaccacttcagggtgctggaactacttcacatggacttgatggtgcctatgcaagttgaaagccttggaggaaagaggtatgcctatgttgttgtggatgatttctccagatttacctgggtcaactttatcagagagaaatcagacacctttgaagtattcaaagagttgagtctaagacttcaaagagaaaaagactgtgtcatcaagagaattaggagtgaccatggccgagagtttgaaacggcaagttactgaatttgacatctgaggcatcactcatgagttcttgcaccatccacccaacaaatggatagtgaaggaaaacggacttgaagaactgcaggcatcttatgccaaaattcctatatttgctgagcatacaccatgcttttcacaagccactaagaggctcacccctgttaattgaag

SEQ ID NO: 213333 - DNA, 454 bp, Glycine max
catgcagctaggcccttttcattgcctgactgaatgatcttggtcttcatggagtgcatatcagtgttaaaggtccttattctgctcagtctcaccctgccacaattcttagaacttgcaaatgcaggattaatttttacccaaactctacggaagactatggttgacagccacaaataaaaaaatcccaggccatcgtacagaaacgtgtgacacagtgcgtacaaacaaaatcctttctaatcaagccatggaaaatatcccaaaagccaccctctcataataatagccactcattcattcatggaatactattcaaaccgacaatcctaacatgcttattgctactgtattaataagctccattcataaaatagcttgttagttattacacgtttcatcagtacattaacccttcactgagtccggccagccctaatctataaacttaata

SEQ ID NO: 213334 - DNA, 306 bp, Glycine max
  unsure (1)..(306): unsure at all n locations
cctctcttgaaagcatcaatcttcatattggctagacttggagtatggcgaaatattatgagcaatggaatacactgccataagtatattgccataactcttacgactgtgaagtttacaactacacagatgtggaatggttcagttgccaagtagcattgtcatgttgtcagaacttgaggtgttgagtatttcgcaatgtgaaggactgcaaaaatcaaaacaggacaaagatttaaaaaatgagagattaattgtgtcgtcttcaaatgtggaacatatngatttccaacaaacatagagtta

SEQ ID NO: 213335 - DNA, 447 bp, Glycine max
  unsure (1)..(447): unsure at all n locations
agctntgtggcttatttaggggtggcctttgcttatgattgagtgttcttggttgatagggtggtgggtaatgagaagggctaatattggttgagtattgatattgttgagctgttgggaaatttggccatataggaacggcagtcacagcacgggttcctccctccttctcattctctccatttgccccaagctttctattcatcaaagtaggataatcaaatttgtctcttctcaaacccactttgatcctttcgtcggcaaaaactaaatcggcaaagcttgaaggcgtgtaacccaccaacttcttatagtaaaacactggtaatgcgtctactatcattgttatcatctccctctccatcattggaggtgctacatgagtttccagatcccttcacctttgcgtgtattctttgaaagattcatgctccttcttacacatgt

SEQ ID NO: 213336 - DNA, 458 bp, Glycine max
  unsure (1)..(458): unsure at all n locations
actaagccttacaccagcttcttacaaccaatattctntgtctnttcaagccacaattggctctaacacgaatcagaagatttcttggtttgatttcacaataatgaacactttatcctcttacaaacagataaacaaattcaacgcttagtcttttctctcaagatgaacaaagtattttgagagcttttctaaactttacaagaatttacacatagagctttttatgcaaagaataaaataataagtgcttcaaattatatctaatgccttcaaagcttctggtatttataggcctccttcaatcaagtatatgttatctctaaacagacacattatctctctttaagctggcgtctgaagaaaatggtcgttgggtcattaaatgtgttcattaaatgcacaaacttcttcatgttgagaaaccactctacgtcactaacatgtnggaaacttca

SEQ ID NO: 213337 - DNA, 412 bp, Glycine max
agcttctcaaggaagcttctcaaggaggtgagcttagttattagaggggtgtgtgtagctaagctctaacttctcaaggaagcttatgaaagaagcttctcaaggaagctacctaggctataaatagaagcatgtgtaacacttgttgtaactttgatgaatgagagtcttgtgagacacatttcaaagttcaacttctctctctcttttcctccttcaattttatgctcccctcccctctctctctctttcttttcctccattgaagcttcctctctaagctttttatccaaggcactctcttagtggtgaagcttcttcttccatggcttatttcctagtggatggcgcctcctctcaccttttctcctttatcttccgctgcatctccatggtggaaaattagcattga

SEQ ID NO: 213338 - DNA, 448 bp, Glycine max
  unsure (1)..(448): unsure at all n locations
tggaaaatgatntctataccaaagttagtcgtataaagtgactaacacttgccagcatggacgacttagaattaccttcacccatgaattccgatgtcgtcaaatgatattttgcttagcacttggggcagccagaggagtcaatacatgtttgtgctccaaagactcatcgagatccccgaagtcttctaatcctttgtaaaccatgagcgcaacatttaataaacattggattgatgatttgcatttcaactccttgtgttgtgtcttctattgtttttgagtacacactatcgttttcgaatcctaagccataaatgggctcanatccatggngtgccatanaagcatttaagtaaattgaatataataacactggtttaattgtttcacttaaactgcctaatcatgagcgtgcatgcatngttcattggacatcctgcgagtc

SEQ ID NO: 213339 - DNA, 434 bp, Glycine max
agcttcctcggtgccattcctgcgaaggcaatcatttggaaagttagttttagtgggacattactcttaaagcaaaaatggcatataacctcctcccataaatacaaacatcaatgtaaatttagagcaagcttatgcgcatgtttccttacgaacgttcacttgcggaagacattctattaaccgaaaaaatgcacccatatacaatcaaggcagctttgttacctagattatttacacgtacttccaaggtgtatttgttacttacatcacacacatctccttggctaaattcacatacatgcatactccaagcattttggggtaccaaaaattgcacatgtgtacatcttggtatttctaatacctatacatacacaaacttcatgatgaatcttgactatctacacaataaggtgctacatttcatgccc

SEQ ID NO: 213340 - DNA, 387 bp, Glycine max
  unsure (1)..(387): unsure at all n locations
cgcttgcacccagaagagctacaagtcaagctcaaaacacagatagcaaacctcctcaactctagagttccatcaccaaacatctgccaccattctccaggttgcataactnttctagtgtcctttgcctcttccatagacaaaaaccctctagcaaaatcaaactcaacaagttgcaaaataattntttttcctttctacaacatccttgaccaatcttctcatacacatgtgcaacccttctttcacctgagggtcatcatgtctaanactaggtttataatgcaaatgaggattactataatacgcagttgtatgcaaaggcttgtgaagctaatgatctcacctctcattgataattntctaaacaggctcatagatacatca

SEQ ID NO: 213341 - DNA, 394 bp, Glycine max
agcttgcacacaagattctgcttggctggcacttcaaaaccttctggttgggtcttatagatgtcttcctctaaatccccatgcaagaatgcagttataacatgtagctgctccaagaaaagattctctgccgcaacgatactcaaaataactctgatggtagtcatctttacaactggaaaggagtctctgagatatcaattccctgtttctactgaaaccctctcaccacaaggctcgccttgtatcttcttctaccgtcagattcttactttatcctacagacccacctattttgtaacgctatctttccttctggcaatctatttaaagaccacgtcttattcttctgaagggatgtcatcttatctttcatcgctagcttccactcaat

SEQ ID NO: 213342 - DNA, 495 bp, Glycine max
  unsure (1)..(495): unsure at all n locations
tgtgaganagcatggaagagttagtcttcctacntttatttgttgaccatagagttgtacctggagatatgtcgcggnggtcaggggaccttggggacgtcaggtggggtgctattgcccaaaaccaagcttgaccaatcctgacccaacccgggcatagtcagttagtgagaacctatgacgtacctaagcaggcgagctcttggcagtccaccaataaaagaacaaagtccacgaagcaaggaggcttgtgtggcggctgaccagctatgtatcttgngtggtttctgaanattaccctctggtaatcgattaccattcgtgggtaatcgattacaaggtttaaaaatggagacaggatgttaagtagcttctggtaatcgattaccaattgtgtgtaatcgattacacagtatgatagagcactggtaatcgattaccagttgtgtgtaatcgattacacnagtgtacctgctactagtaatcgaataccat

SEQ ID NO: 213343 - DNA, 310 bp, Glycine max
  unsure (1)..(310): unsure at all n locations
agcttcggctcttgatacaggttctatcctatcctatccttnttttttctttntttggtaatttgtccttgtttcgctcttgtttgcgtcttgttgcattctggttatttgtccttgatctgttattagatttcttgtttgagtcttgttgagttcttgattatgtctttgctttgctcttgttcttgatcttgtcacgtttttgctcttgacttatttcttgctcctttcacactttgtgtcaaaaaaaaatctgttttatttctgtttcaagttaaaaaaaaaagatgcagaaattttgaaaaaaaaa

SEQ ID NO: 213344 - DNA, 354 bp, Glycine max
  unsure (1)..(354): unsure at all n locations
tctgcttcttccttcgagcagcaggcgtgagctccactggtctcaatggggagaagctggtgggaggggaaaacccaactggccgcatggggggtntcagagggatccgtttcccactcgcattacccggcgtggaaatcaacggtgacgacacccccaaaccaccagcctggttctgattaagactcaatccctgagcttgcaaatgagcctggagttgagcatgagctgcagctgctgcttgggcctgngcctgggcctgggccttggactgagcttggacaatagcatgggcctgggacagtggaaactgtccttgataaccaacaggaatctgggcctgtccttgggact

SEQ ID NO: 213345 - DNA, 432 bp, Glycine max
agcttagaacaaggatgaataattccagcaactacactatgggatttttttttttaaggaattaaacttcataattgggtaattcaaaccttctaacaaccaattatattaccttcaagagttgttgaaagctattatagcatgaaccattcagtccaaataattatttttaaataagtttatgttttttttaaaaagaaattaaaggcctaatttgtgcaatggctcaacctcaataaaaaaaatagcatgaacaacgtaatataaaatggcaatgaagaaattacaaggatgttaccaagaaatttcaacccacgcactcttgactaacccttgaaccgaagctctgataacaaaaatgatgtatacccatttcccaagggttgaagatggatcttaaaggtttttttttttaatgaaatttattgaata

SEQ ID NO: 213346 - DNA, 451 bp, Glycine max
  unsure (1)..(451): unsure at all n locations
ngatctcaaccagccacaaatctccanaaccacatatatatatgcatggcctaccttagggggtgagataaatccttcaataacagacttgaaacatccgagtcacttggatctaagtcagaataatttcggaggaatccccattctccaatttattggttctctcaatatgttgcatcaccttgactcattactgtatgagaactttcttgttcagtttattctaaacttattactgtttgagtttggcccattctaaatgagctataatatcatgaaagataaatggaatgtgcatgaattgcacagtatgttagtttatgaagaaatgaggcctaagaatcaaagaagtcactcagtccattatgtaagccaccaagggaatcaaggagcanganaataatttatgaagaagcatgataaaggcagagggtaattaaagatcaatact

SEQ ID NO: 213347 - DNA, 351 bp, Glycine max
ctatgatcaaatctaagggtatgtatgatcttacacattccactaatctgaggcgattggtgaatctaataattagtttacgtatattatgacgatgggttcgaggtattatgatataattcgatctaacttgaccgctcttctatctgaatcttttcatagcattcaatatatcggacttcttacatgactgccataacattctgcattgcaaatgtgatatctgtatcataaactatggattagaaaatacaccttaatgagactttgtctaaacgtttcctatctaaatctcaaatctaacaagaacgaagataagcccatccttaacatcctcaatcaaatacattc

SEQ ID NO: 213348 - DNA, 442 bp, Glycine max
  unsure (1)..(442): unsure at all n locations
agcttgtgttctaanatatgttgaatttgttaaactttaggtgtacaagtttgtaggttataatattgtttagaatttttcttagtatagatcaggtcatgtgggttaactagtgactcactaggttgacccatgactcaatggcctagcaccctgactgtgtcaatcaccatctgagtctaataacatggaacacatcctatctacaccactcaaatccctcatgatcaatatgattcattacaggcccaattactagctntataatcatcctgctatagatgatgtttgatagcattgtacgaattgtagattgttcaagtcgaaagattactatctcataatggttgccatgagaaacaattatgacacttacataactattatgaagccttctcatagagagcttgccttttataaatgttactcctaatatttatac

SEQ ID NO: 213349 - DNA, 374 bp, Glycine max
  unsure (1)..(374): unsure at all n locations
gtacgggtgtgtttatattgatgctctntcatagctttatgatgttgttntgctttaacttatgttgcatgttctttgtttcgcagagaaggtcgaagaacacactaaagctgcgatttgatgagtacgggtgcattttctttgttgctctgacgttgatgcgctttgtttcccctccccgtcttctgcgttttctattattntgatctgttgtgatttttggatgcttaaagcttcgatttttataagtacgggtgtgtttatattgatgctctntcaaagctatatgatgctgctntgctttaacttatgttgcatgttctttgtttcacagagaaggtcgaagaacacactatagtgacgattnttatgac

SEQ ID NO: 213350 - DNA, 248 bp, Glycine max
  unsure (1)..(248): unsure at all n locations
agcttatccaaattctgttttagatattcgtgaattacaacctgncaatgtgaaagtttttattcaatggcaaaacctccctccaagtgaaaatagttgggaatcttgggctaaattacaagaggttgttcccacttatcaccttgaggacaaggtgagtcttttaagaaggggtattgatatgcataagcataagccacacatcaccaaggtgtacactcgccaacaacgagcaaaagaacaatatc

SEQ ID NO: 213351 - DNA, 433 bp, Glycine max
  unsure (1)..(433): unsure at all n locations
cccaaacacttatgtatataattaaaattgccttcattatatcaaactaattgttgaaggtttacctaacctttctttggtgtcatctcttcttatttgatgtttttatagaagaaacaatgattaaaactcactaattcagtagtagtaaatttccactaacatggcacatatataccatttgagatggaaatttggaaggacacatganaaaggtctactccaaaaactagcccaaccttgattntccatgctntangctaattggtttgcaattcttcaatgtggaggatgtgagaaattgttgacttgngttggtccaaactagtccatgtacaccctacctatannatggtgataactattgtgctaatatgcangggcatctttgtatggttaaaaanaatggatcacaacccttcacatctttctt

SEQ ID NO: 213352 - DNA, 374 bp, Glycine max
  unsure (1)..(374): unsure at all n locations
agcttttggaaggatcaagaagtgccttatgaatcctcccgtgcttatgccaccagtacctggaaggcctctcatnttgtacatggggtgtatgctggggcaacatgatgaatccggaaagaaagagcgcgctatttactacctaagtaagaagttcacgacctgtgaaatgaattactccttgctcaaaagaatgtgttgtgctttagtatgggcatcccatcgcctaagacagtacatgctgagccatactacctggttgatatccaagatggacccggttaagtacatctttgaaaagccagctctcacgggacgaatcgcccggtggcatgtcctgctatccgagtttgatatagtctacgtcacccaaa

SEQ ID NO: 213353 - DNA, 487 bp, Glycine max
  unsure (1)..(487): unsure at all n locations
tcagataacccaacccanagatgtacgacgaggctcagtctcaacatttatgtttatttttgtttaaatattatttgtttattaaaaaaagcttaaaaattaattttgattctatttttaattaacaattttagttctctgttaacgaaaaaaaatagagattttcagtgacgtgacttatgaggggatttgaccgataaattttttaacattaattaattttgagttgatacatattattttaggtcccatttagagtgattgtgagtttgtggtttatgattttaaaatgttattntaaaactagaacgttataggtaaaagttggtgtgagttttgattnttagtacattttanaactgttttttatcataagcacaaaaaanattanggtttagaattttggagttgngtttatcttttctttctcattggggtnnttatactctntctcttatatgtnggtgctctntatccctcatcgatc

SEQ ID NO: 213354 - DNA, 436 bp, Glycine max
agcttctatattactgtctccgagtgagggacgttcctctttctgtggacattatttcacaaatctcaatggtggagatgtgcaaaaatgggttccaaaggtggtatcgaaatttcacgacaatccaacagttgacgagtctgaaatcgtagttctacgaagacaggttttgggtctctgtggaaaaagagaaagctacgatacgaatgacatttctctcacctcatataatatttcgcacattccaacaatgagaatgttcgaaaatgagttctgaaaggtgctcaaatttcatgatgatccaacggttaacgagttctggatcgttattttactgagacaggtttgagtgtatgtgggataaagagaggattttaatagaagaagaatggaaaaccaaattgagaggaagaggaagcgtaaagatgtattgtca

SEQ ID NO: 213355 - DNA, 431 bp, Glycine max
agcttgagctcactgtcgctgccccataaagtcccttggaacttgttttggccatgttcttcctttccagccctcttggtttctcgttccaaggcttcggcggtggccatattgacgtcccttagttcatcatactctctttggactttgatggccattgactcgaacttctctttggttgccctggctccttcaagctccacctttagggttcgtacctcctcattttctttcggagcttcagcctctttgtctctcacagcccttagcttttggagccaatccaatccttgtatccggactctcagacatttacgatagccagcaatgatcccattactacttccgctaagctctgtgtccttccttcgcactgcatcccatgccttgtgaactccttgaagtaccctcgtgttgcggtcactgaaacc

SEQ ID NO: 213356 - DNA, 454 bp, Glycine max
  unsure (1)..(454): unsure at all n locations
atactatagcgaaagattctaccttctggtgagacttcttctatcccatacactaaagaatatggagttgcctcattcgaggtgcgtactaatgcacgatagccatgtggtgcaaagggaagcatgtcatgtcaatccttcttgatattcttgtttgctgcttctaccaccccattcattttttggcgatatggcacagaattgcgatgttgtatcttgaagctatcgcacaattctttcatcatattgttggtcaaatgggtcccattattagtaataatgtggcttggcagacatatcaatagatcaaatctcctttgatgaatctgaccactacattccttggtacactatcataagatgctacttcaatccattagtgaaataatcaatgggactacgatgaaaccatgccctattcaatggcttaggttcaattgacanatcacatcta

SEQ ID NO: 213357 - DNA, 445 bp, Glycine max
  unsure (1)..(445): unsure at all n locations
agcttaggctacaagttgaaggtgtatgaattaatagttctttagtcttttactattctaaagttgtaaaaattacctaaataatgctagattaaatgtcattttagttgatcattcatagctgtgtaagtttgatactttaagtttcttgcaatttataagttgttttaagaacttgtggcatttgccccttcacatactgagagaatgactaaagagcctttctgctctgccttttctctttcttaacacaaaatgatgttcaaccttcatatacggcaggtttgcaatcttgtctggtccaaaaatgtcaatgaactagtaagcacgcatggctattcccagaaccagataattgtttggagatacctctccatgtcaaaggtacactatatctactgtgataagccgaatctctcttatttttacttaattntaacatgtc

SEQ ID NO: 213358 - DNA, 434 bp, Glycine max
  unsure (1)..(434): unsure at all n locations
gtgtgcattgttngagtttagtattggagtacatttattgaattgcatagttactttattatttgtcactttgaattgaattcatagaatgtggattatgtttgttgacacttgacttatttgcattaattttttaatggattgagtatcataatattttacactaaaaattatttattttcaagatcacattctttctatagaaaatacaaaacataaataccgaataattcatcttatgtgagtcatcttatgtgagcagacgagaatgctaatctaaagtttgagaaaatgactaccacttattggtctttcaattcttataacatatgtgttgattaataagtaaatgtgcattattngagtaaagcaagttctttagtgtgcattactagactatntatcactttgaactaaattccatatattaactg

SEQ ID NO: 213359 - DNA, 445 bp, Glycine max; identical to SEQ ID NO: 213122

SEQ ID NO: 213360 - DNA, 419 bp, Glycine max
  unsure (1)..(419): unsure at all n locations
aagagttagtcttcctacttttatntgttgaccatagagttgtacctggagatatgtcgcggnggtcaggggaccttgnggacgtcaggtggggtgctattgcccaaaaccaagcttgaccaatcctgacccaacccgggcatagtcagttagtgagaacctatgacgtacctaagcaggcgagctcttggcagtccaccaataaaagaacaaagtccacgaagcaaggaggcttgtgtggcggctgaccagctatgtatcttgggtggtttctgaaaattaccctctggtaatcgattaccattcgtgggtaatcgattacaaggtttaaaaatggagacaggatgttaagtagcttctgggtaatcgataccaattgtgtgtaatcgattacacagtatgatagagcactggtaatc

SEQ ID NO: 213361 - DNA, 426 bp, Glycine max
agctgggatctcgttcaatttcacaaaactccgtcgtcattgatattcacgaattgtaaaagtcgtttgactttctttttttttatctcaatcaagtgtcctgcgtccaaaatcctattacattcaatacaacaaagtaaacaagaacagtgaaacgattcagagtgcgaataacaggatacgtttcatgaatcatcaatctaatccatacgcgcaagtcggaaactagatagggaaaaaaagtgtagaaagtgagaaacggaaacatgagcagattcaactaacaacggagaatagaagaagaagaagcatgccttggtcctgagagtggatcggaggagagtgtgcatggtggctgtaggtactgatctatcagtcagcacggtaactttggagacggtgagagtgagaactgagaggaagttc

SEQ ID NO: 213362 - DNA, 439 bp, Glycine max
  unsure (1)..(439): unsure at all n locations
ctcagcttgtcaagttccatactgcctgcanatgtagcccaaggcaagaacccaacttgttgcacctttcgcttcctcattatttcatagaaagctgttctcatgactgaaatactggttttttcagctgaggctataacaccgtgagcaacagctcaaatcttttcagcagatactgctgccttcatgatgccagatgttttggctcctgaagtcgcaatccctggagccacaactttataatggccagatgcaaaagccagcactttctgcatctggctgagactgattatgagtgaagttggaattttgaaagtgataaccttcaccagtgttgatgcagggactactntggtcagagatgaagctccaanaactgctgtcgcccagactctactgcaccataggttatctgtaataaccacttttctcactatga

SEQ ID NO: 213363 - DNA, 284 bp, Glycine max
tggcttcaacattcaaattcgagcggctagttgtattatacgactcactcacacatccgagataaaagttattgacgtttgaagttgctcagagcttcatcattacattactagcgtgatgatatattactgtgaactatgatacatatcgactagaacttatcgtcggttgaactggctcctatctgcaccacctttagggagcgtgcctacttatttccgtactgagccacaccttctatgacaatgacagcgctgatcgaatggagccaaacctatccttg

SEQ ID NO: 213364 - DNA, 400 bp, Glycine max
  unsure (1)..(400): unsure at all n locations
gtntactaagaatgttgatggagtcccgtaatatatccagccgttcgaaatagaatgtagaagctgtgagcaaattcaaacgacaatatttgtttactcggatgtctgattgagtcccgtaatatatcgagacgctcgaaattgaatgttgaacctctgagccaattcaaacgacaataactttttactcggatgtctgattgagtcccgcaatatatcgagatgcttggaattgaatgttgaagctctgagacaattcaaacgacaataactctttactcggatgtctgattgagttccgtaatatatcgagacgctcanaatcgaatgttgaatgtctgagccaattaaacgacaataactttttactcggatgtcctattcagtgacgtattatatt

SEQ ID NO: 213365 - DNA, 397 bp, Glycine max
agctcgccgactataccttctaccaaacacggtcgtgtttctgtctcggcccggatttaatgtgtgctgcatcaccggctccgtttccctaactgcactggaggtggccgccgtggctctatcctctataggtactctggagggccaacatgacctacgagatggaagccatccgatcttttaaagccgatagatcggacttcatctgctcctgcacgccctcttgattatccattcttctggatcgaacgttatatgggtgccttggcgctttcttagctatgatgacaaacctaaagagataaacaatggcgagtatgccaccaaaacatgaacatgcaaatgaatgatcggtgcacttggatgcaccccaaggtttgtagacaacatgatgagc

SEQ ID NO: 213366 - DNA, 480 bp, Glycine max
  unsure (1)..(480): unsure at all n locations
gctttacagctggaatcatctaccccatttctgacagccagtgggtgagtccagtccaagtggttcctaagaaggcagacctcacaatgatcaagaatgagagggatgagcttatccccacaagagtgcagaacagctggcgagtccgcattgattataggaggctgaaccaggcaaccagaaaagatcattgtcccctgccattcattgatcaaatgcttgagcacttggcaagtaagtctcattactggtttcttgatgggttttcttgttatttacaaattcatattgctcctgaggatcaagataataccacattcacctgtccctttggcacttttgcctatangagggatgcccttggcctatgcaatgcccccggtaccttctagcgatgtatgcttagcattttcagtgactttttagagagttgcatagaggtgttgatggatgaatctactggttatggatcctcttttg

SEQ ID NO: 213367 - DNA, 369 bp, Glycine max
  unsure (1)..(369): unsure at all n locations
agcttcttgagatgcctttcagttatctcattagaggctttggtaaagtctataatatcattagatacatcgatattgaaataatcaatgaaccttgaggtcaaaactgcatatganaattcataatccaacaattgacggcttttcaacataatattgtccatcaacagtagctaattcattngaattcttgatttanacccatatataatctgcaagttgtcatccgtgacttgagcatgattattagatcttggcaccaaaatatatgtaataatgtataccaatattntgtcttccactgtcagaccaccaacacccaatctattccttaaaattcttgtgggatcaagaagcatacctctgtat

SEQ ID NO: 213368 - DNA, 372 bp, Glycine max
  unsure (1)..(372): unsure at all n locations
atattaaagggcaacaaaattcttcttttgcagatgctccctgttttgaaggtgaacttcatgaactctcaagatgccttccaactcctcccatgcaagattntcattctcttgcttcttgaatggatgtggtttttggttcccacatcttgggaaacctgtctagaatcttcaggtttatttgggccttggagtatgtttggtcaagagcttccagattgtttacaagaacttgaagtcttccaaacatatcatccacaaactctccatcctttatggtgaaagcttcatagtagttggtcagagtcgcagccttcatcagtataacatctttagtgccttcatagcttatgctcaattgagtttacatct

SEQ ID NO: 213369 - DNA, 427 bp, Glycine max
  unsure (1)..(427): unsure at all n locations
agcttgtaagatttctaagatcattttccttgacaactctntgaaaaagattgccatgaatatgaagagatgacaatttagagatattcatgagatgacaatctagagagtgatcaaagactttcaaatcgatttccactgaatttatcaatagacagatcaagatgtcttagtgttgaaaggtatccaaatcatctataatgggcaccacccattgagctggtgaaaaacttgtctctgtcaatatcgtaagatcctcactttagcctacacacccgggtattttgaaacgctttcttcacttctggcactgtagttaaagaccacggcttatccttctgaacggactgcaccttatatttaatcggtagcttccactccatagtgtcattcgcctgctcagcctcactgtaacattcttgctcac

SEQ ID NO: 213370 - DNA, 180 bp, Glycine max
  unsure (1)..(180): unsure at all n locations
gtttcatgcatcanggaacaatntcactttanaagtgggtcccaattggcttcctaattttcagcttacctctntggatgtgagatcctggcagtaacgtgccaatcttccatcatggattcagtcacaaaacacacttcaagatgttggactgtctaacaccgngatcttacattctat

SEQ ID NO: 213371 - DNA, 445 bp, Glycine max
  unsure (1)..(445): unsure at all n locations
agcttagagaggaagcttcttggaggaaaagaataagagagagagagagagaganagaaagacagtggcgtggagaattgaaggaagaaaggaagagaagttaaactctgaaaagtgtctcacaagtttctcattcatcaaagttaccacaagtgttacacatgcttctatttatagcctagttaacttccttgagaagcttacttgagaagctagtgttacactccacccatagctaagttcacccccatgggaacacacacctccaatatctaagctcaccccccccctccccnncaaaataatacatcaaaataaaaaatatctccacaacaaagactactcaaaatgccctgaaatacaaggctaaaaacctatactactagggtacccttaacttgtatggtatggtgcccttaatttgtaaggaccctacaaccctaaa

SEQ ID NO: 213372 - DNA, 390 bp, Glycine max
  unsure (1)..(390): unsure at all n locations
cgtgcttagtgcaactctgaaccgcttagtgcacattagtgaattntggcttagcgcgtgcttttctcgctctgtggatagattgaagtgatgtgcttagcaggatgacccttcgctcaacgaacatgcacatctcatctttcttccagattcttcctcgctaagccagaagattggcttagcaagaggatgaaaatcagcacttcacaagcttgcctaattaacctgaaatggagaggaaatgattattaaacacataaaatggaagtactaagtatctattacctatctntaacaaaaattaattacaatactacaaaataaccataaattggaggagttntgatacaatttacataagtgttatacacaaaagttagttgtatcatc

SEQ ID NO: 213373 - DNA, 289 bp, Glycine max
aacttatgcttgatgaagaagaggggtatcttcgtcgctgaaagtagtggactgcgaattgaatctgacctaggtgataataattaagataaggctagaagatgggcctaatcaaggctcaactcttgcttctatgtaaaaactgagattattacgcaaggttagataagtatggagccattggttatagacctgctgacaaacaagatattgagccttgacaatttatgatagctgctataagaatggccgcaaatataaaggttaatcaaccttaccattgcataga

SEQ ID NO: 213374 - DNA, 351 bp, Glycine max
tgataactggtgtgttatatctaaatcagtggagtctctgtcaacaaaaaaagagaatcattggagtctatcaacagagcattgattaattgtatattatttgaatcgaatggtcaaaaatgtggagcaaatattgaaatcaatatcttattttttctggacattctgctttctatatatcttacatgttaggaaaaagaatacctgttgtgatttttaagtctttgtcggctcttagagttacttcttacagacagcaactgatgctgttattgaacatggatagcgaaaactacttttcatcaacactacatgaatcttgaattttcttaaactgtctatatcatctct

SEQ ID NO: 213375 - DNA, 114 bp, Glycine max
  unsure (1)..(114): unsure at all n locations
agctnggttatctcattcttcactacatcaataatcaccgggttgagtcttctttgtggttgtcttactggtttagctccatcctctanaattattcgatgcatacatgtggat

SEQ ID NO: 213376 - DNA, 491 bp, Glycine max
  unsure (1)..(491): unsure at all n locations
tatattgggacattgatataaggagtcaggagattcaagattaagtgctaaaatatgctgatgggcttggacatgaaaaggaattaaaaaacgaaaacttaaatcaataaaaaattataaagaagtcaattagaatacacattaaggtttaaggaaaacaatacaacaacatgcatgcaaatgatatgtataacagtaaaaccctttataaaaggttttaatttgatccaatatcattcaacaaattaaacttaagaaacatcacaattctagagctagcggacacgcacagactttcgctcgatcaatcattttcaaaattcatgaaagatntaatggcccacattgatttatcacgttgatttaaagctataagactgtgtaacgaaatagtagtaataattaattaanaaccatngacatttcataactctctagtacaatgaaactctgtagcacaagtaacgaaatacgtaacaacagcatgaaat

SEQ ID NO: 213377 - DNA, 448 bp, Glycine max
  unsure (1)..(448): unsure at all n locations
agcttaggccaattctactatttcaagagtcattttggacttgaaagtcaaaacctctgcacttgaataattgggctgcaaatttgaactttgctttgtgtaattagtttaattaggtagattagatgggcctaatcaaggctcatcacttccttctaagtagtaactgtatgtattagtggaaattagttagttagggagttagtttgatagaggtgcaaccaatctgtctaatgatcctttacatgggattagaggtcctatgacaaggtccaagattaagagggtgaagcaagctttgcaatgtttaattctaaatatcaaagagaaagaagaccaatgtgaattaagtgatgcatccaattgggacgctctcctacaaattgatgaagatgctttgnggctaacttgaagaatcactttgggaagcccaatttacaagacaaga

SEQ ID NO: 213378 - DNA, 395 bp, Glycine max
ctcagctgctctacaggggcggatcgcccggtggcaagtttgctatccgagttcgatatagtctacgtcacccaaaaggcgataaaaggaagcgccttggcagattatttggctcagcagcctctcaacgactatcagcccatgcatcccgaattcccagatgaggacatcattgccttgtttgaggaaaagctagacgaggaccgggacaagtggactgtgtggtttgatggagcgtcaaatgttctaggccatggtggtcgcaacctacccttggcgggagggcgacgcgtgactcgctggtgcattggcgagaaaggaatacgcacggagtcgccaccaacgtttatttgaggaaaatgtcggaaaaaccggaaaagacgtgatctacgaac

SEQ ID NO: 213379 - DNA, 412 bp, Glycine max
agcttgatgatatgggctgatcccgaaagaatttatgtaacaaagactgcccttggatttgaaaggaaccatatggactctgtgtgagcgactgatgttggatgtaccctactatcaaaatttccttcgggcatctttcacgagctcttggtcaaatgatttttcttctcaaatgtgcaagtgtgaacccccaatttcattttttttacaatcacaagtgtgtgcgtattccatccagaatccaaactcaaaagcaaaattagtccttctttgatccacatgggctttattgggcttgtaacgtggcaaggggttaagagggatatgaaagataaggtcagagaggctcaaaaagtgtttaaaggttacataaagtaagaaccttgagcaccttgctcgtacttttattcat

SEQ ID NO: 213380 - DNA, 468 bp, Glycine max
  unsure (1)..(468): unsure at all n locations
aagcttaagctntagccttaggctgttccatgttggttttccctctatctctaacacaagatcctcaattgtcttacaagaacttgggagccaaagatcacagcgatcaaagaatccaaggacttagcatcaaagtcgatggaagctttcttcgaaaatttcctgcatatgaacatgagttgattcaacaatctcatgcagaagaaacaaaaaagaaaagaaagggaattgcacttaaagttaactcttcaatggaagattacaaagaaatttccagtgatgacgaagatgcagagaattntaacttgatggtgaaaaagtttggaaaatttctcanaagatccaatgacaaanaattctttaagccttcgaagaanattgagagcaacaacaacatcttcacatgcttcannattggaaagcaaggccacatcanatctaaatgtcttatctacctttaaaaacaac

SEQ ID NO: 213381 - DNA, 448 bp, Glycine max
agcttagcccatcatcaatattgatttcaagaaacaaaaaagcaagtagatatatcagtgaactgagccagaccaaggaaaaatacatcaaagaaaataaataatctagtatagctaattttataatcagataaagcatctgagacctgctgccatgtggtatcaacaggaggctgccgccgagcatcgccagcatcaaaatccagtacaccataatccctcaaccgaatctacacagcaataactaaaatcagaagtctttttgaggattaaatgcatggcattatctataagacacatttttcaaattgagacaaacccgaaggaaggcacggattctttgcaaattcccaacaccaccaccaagagcagcctaccattagataaaaaagcaagcagaaattaagtgttgataacaaatacaaattcatgcttgctctcttatatg

SEQ ID NO: 213382 - DNA, 465 bp, Glycine max
  unsure (1)..(465): unsure at all n locations
tccatttctgtgtatccatagctagcanaaagtattttcaatgtgatacaataatagtgcgttcactgtctatctacattgagaccaaatagaagaataacaatcacgaacattctaatagggtattatctaacaaccagctaaatgacaagtatatagacaaaaaggcattctccttcaagctaatcggcatcagatctttagctacaaatctaagaattatcatctaaacggggatgctcttttaaaatgttgagaggttatgaattttgacaactttcgaaacactgtaatgtgcactcacatgtttttagcaaacagagaaatacttattcgctcccggtttaagatgaggaaaattatggatacccataaaggggaaaaggaaacaatggaagaaaaggatataaatttgtttggtgatagtnggatngagaaagcatacatacnccatatgcatgcagt

SEQ ID NO: 213383 - DNA, 432 bp, Glycine max
  unsure (1)..(432): unsure at all n locations
agctntaacctcattgtctctcacagtctttagatttgggagccaatccaatccttgtgtccggactctcagccacttatgatagccgctgatgatcccattactgcttcccctaagctctctgtcctttcttcacaccgcatcacatgccttgcgaactccttggagtacctttgcattggggtcactgaaaccccgtgtaatgaaaggcgtgatgctttcgtctaatggcgctcctctcatggggtagccaagctgtcttatggcgaggacaggattataatttatataaccccttgttcccattaagggaacatttggaaatccttcgcatgaagatagaatcctgattcttccttccttctagcgagggaaccaattaacagacgcccctctatgctagccaagagttggtcctaattcgtctttctt

SEQ ID NO: 213384 - DNA, 486 bp, Glycine max
  unsure (1)..(486): unsure at all n locations
gagaatgagcatgtgaatggaagtatgactganaatgttagttagtttgtcagattgattgtgaaggaatgcattaactgtatcccgatgagagtgtgatccttaaatattgagagaaatgaatatcatttagtattgatttttcatgaatctctgaagtatggactggatgcatgaaattgaggatgatgaaggccacgtttgattgtgataaccacttagccaaaaagttgaccatgtgtttgaatgatttatcccttgcacccagtttgagctgaatgaattattgattgattgaaccctgagcctatacagtgctatctcctactaccatgacttaggttgtaggagagcatcatccataggaagtgtggttcannagcaaattgttccannatttggggaggcactggggtagaattgnatggtcaaagaaaatctatcacacnactattctgatatacatatatgctttgatatatatgt

SEQ ID NO: 213385 - DNA, 353 bp, Glycine max
agctgttggagtagaaacatgggaccaactcattttatttcaaaaaagaaatcatatctagtcaaggtctgagagaccatacaagtttcctaacgatttctaattatgtgggccattaagtctatcatatgctgacaatagccgagaagcccatgaatctcttcgggggcggagtaggtgtctgccatcgccttggccttggctaacaatcggggaagttcttgactcccattcaaggtaagagcaaaccgatccatccacatggttgcctcttggtgtaaagagtcgctcacccttcctctagcctctttttccgcatatacttgggcatactcatccgcgattctatgctc

SEQ ID NO: 213386 - DNA, 353 bp, Glycine max
  unsure (1)..(353): unsure at all n locations
ngagtgtccatatgggtgcatggcatgatcagtttgcataagtttctaaatcatcgttgttataggcgtgtcatggaaataatgtggggcattcccttttatccctgaaccgctggccaaagcaagtaccctgacatacgtcatgtcctgccttctataaagcctctttgagccaaaacctcaatccttcggccctaagtctccacccaggctaggaaattttacccttatcctcganaaanaagaagaacaagaggatctaaaaaaatgaaaggaagaaaaagcttcatttactgttaagttatgaatgtgccttataaggaaaacaaaaagagaaaatccctgatcaaaga

SEQ ID NO: 213387 - DNA, 411 bp, Glycine max
agcttaggccaattctactattacaagagtcatattgtacttgaaagtcaaaacctctgcacttgaataattgggctgcaaatctgaactttgctgtgagtaattagctgaattaggtagattagatgggcctaatcaaggctcatcactttcttctaagtagtaactgtatgtattagtggaaattagttagctagggagttagtttgatagaggtgcaaccaatctgtctaatgatcctttacatgggattagaggtcctatgacaaggtccaagattaagagggtgaagcaagctctgcaatgtttaattctaaatatcaaagagaaagaagaccaatgtgaattaagtgatgcatccaattgggacgctctcctacaaattgatgaatatgctttggggctaacttg

SEQ ID NO: 213388 - DNA, 353 bp, Glycine max
  unsure (1)..(353): unsure at all n locations
aggtatctagaaagttgtggagaatattgactctgtaagttctctatatactcaacagaacctattaagacagtataaacatatcctttntcgagaagaggcattgcggcttcaacaatgtacggctaaatgaattcttctaggaagcataaatacatcattttccatgattaaaccgtgatttggaggaagcataagaaaatgcattgactcttcttgcccttgggaattaggtgtacaaatgaggacatacttatggagagaggagtcaggtacttcaatgatctatcttgagtataaaagacaagttatggaaattctccaatctatatacaccatccccaacaagctat

SEQ ID NO: 213389 - DNA, 313 bp, Glycine max
  unsure (1)..(313): unsure at all n locations
agcttaactagtttgtaaaatagcatacatgaactatataacctttgtgattacaagatatgcctttaattaatcagttcaatattttacaccatgtatggaagctttcagaacaccatgaaaatgatttgggcacgaaaagttttcaattatcatcctgaataatatctttctgaatatagaagttagcacaataactttgtgacaggtgaatcatcataacataatctaagtagtctaagacatacatntatggctggtttgttaaactattattttaaaataaatgttnttttagaaaagcactttttaa

SEQ ID NO: 213390 - DNA, 349 bp, Glycine max
atgctgtctctacatatataaaacattcccaccatcctaattttacataatcagattcatacgtcattgtggcatttcaccgagcacttggtgggcgcatgtttagacataaattgcaagagaatgggggcaatgtggcatgccccattgctttacaatgcatcataagcctaaggccttctcacacaaatccttaactcaacaaatcaagcataaaaagcaatctcaaactgctccacaagcatgagcatgttctcacaatttatagcaccaaaatgaacaatatgcaccaacggtaagcaaaaaactcaaggattgaatacttacttgttggagtgagtagaaacaa

SEQ ID NO: 213391 - DNA, 494 bp, Glycine max
  unsure (1)..(494): unsure at all n locations
ntttggcccttctngtgacggcgatcctctacagcgggactctctgcagtcgagctgcaggcctgcttgcttctggcactctgaagtataagaggtccaatgagattcaaggcttgcggaggattgtctgatataagtgtcccggagtatagaaatgcactgcatagccctgctcttatagactcttcatgtctggtcanaacaaccatctagaagaattatcactatgctaacaacttacatccacgttgacaaagtccatgacctgttagagagtcacatctttcgattctattcagacacagtcactggtaatcgattaccatatcaggcgtatcgatatcactaagcctctttgtgaaaagatgtgactcttcgcatttgagttcgaatttctacggtcaaggcactggtatccgttacagaccatcgtatagatatagctgttgaattaatggaacgtcgaactcattctgaacctcttcaacaattcn

SEQ ID NO: 213392 - DNA, 373 bp, Glycine max
  unsure (1)..(373): unsure at all n locations
tcctgactcgccatagaccttgacccagggtgagaatgtcaatacttaccctcggaagcgaaagagaaaagaaggaaaatttccaatctgagagaaagcaaaatgagaagaaggagaatntccaatcaaagagaatgaaaaaagaatagaaagaaaaatcccagtcaaagaatgggagaaagtaaaaaaggaagaagaagaaggaaagaaagctcctgatcaaggatcgaaagaatacagaagaaatgtgcataaaggtctctggaccggacaatatctgaacaatacagaattgtcaccaaatgaacgaacagaaggaaaggaaaccatgacctanagtggtcttctgcctttaattgccaaccaaaatctt

SEQ ID NO: 213393 - DNA, 415 bp, Glycine max
  unsure (1)..(415): unsure at all n locations
agctntgatgtacgtactatatgatataatacattaatctattacttctttntattntaacatataggttgagtactagtattgtaaaactagtaaaaaacacggaccaatagcacttcatgataagacccataaaaggatatgtcaatgagaatcctaatactctaacaggttcatctatcattttcattttcttaaataagaatctagaattctaaatgagaaacatcaaagtgattgatgtgatgcagcaaaattatggttctgctaaattttctggtcagcttaagctcactatgatattgttctttatcctctacaataagtctcccttattatgcattcgatttgatagggaggtgtgtcattccccttcaagccttcacttacttcatctatgtcacttatttttact

SEQ ID NO: 213394 - DNA, 405 bp, Glycine max
  unsure (1)..(405): unsure at all n locations
tcctttatgacttatgagtaagactcctaccaccaagtatggcaattaaatgtacactcatcatcagaaaggaaattaaccagaggccggagattacttttttgtcacgtttctcaatattactggaaattgtgactaaactagttcatttcgcacttgtgtcctctgctgggtaggtaagcattagcgtttgaaagtagtaatttgttaaacaatgataattaaatatttntctttnttaattaaccaattaagaatacatatagtaaatagtattttctttctctctgattataagattatttcaattaatttatgttcttaagacaaataattgattcttctaagaacaaaaatagtaatgggaaattgttttataaacactcattgtgctatgagacatct

SEQ ID NO: 213395 - DNA, 397 bp, Glycine max
  unsure (1)..(397): unsure at all n locations
agcttcgtgaaaacctgcggtaaatgagatgcattttcaatcttcattttctagttctagctatctaattctcgtttacataccttgatctttttacctggtgctaataattatagagtaaatagttaatttaatccttaatttatatcacgttattttagtctttaaaattaaagaaaacttaaaacaattggttgactagtttgactttttattaattttagagacttaaatgacaataaagtataaattcaaagactaattatctaaaaaaaaactatctatttaataattacatgaagataaagaagacacattttcaacttttttaaaaaaataaatatacattctctctctctatatatacttaaaaagtctttnggcattaaaaatatat

SEQ ID NO: 213396 - DNA, 440 bp, Glycine max
  unsure (1)..(440): unsure at all n locations
ggccaagacgaatccacacgtcctcattttcaggtgcgttgacttttanatatatatcatttgtccaattagtacaatcttgggtgctttgtaaattatgtgaactctctgcttcaaccattttcttttttagttcatcctacataaatacaccttataaattattatcatgcatcaatatccttaatacttcaatgtcactaaacaaaattcatctcctcattagttactcttcctcacaccataaccttctattagaaaattgagcaaaacaaagagaaagtattgcaataaaaatcaaaattcttacaattacagtagcagtcttttcagtaacaatgcttctatctttttcgagtttgagtgtcaatatgaatntctgcttgagaaagtgcactcctttagcctttgtgctaacatagtaanaaaataatcatcta

SEQ ID NO: 213397 - DNA, 288 bp, Glycine max
gtcccggatcttagccgccgctgctgcagctgagatgaggattgatgtcgggcctttctgtgtattgtgactcaagtggacttgatatatgacggtgttaagagacctagagactcgtcgctaatgagctgctgctcaataccttgctagtcctaactctacccaatacctgcataatcggtcaatgagaacctgtgatgttcctagtgcagccagctcgttgcatgatcctgtaatgggataacacgtactatgactcggtgggctagcggtggctgaccacctgct

SEQ ID NO: 213398 - DNA, 278 bp, Glycine max
cacttgtatctctctcgaaataactgatgaaaattaggtccgtgaagaacatccaagccgaggcgcttccgtaacgtacacgtgagtaaatacgcggggatcctcgagcagccttcaaaattcatcgatcgctcttcgttttcgtgagtcttcaacgcggaaggtcctcaaaccaagcgtttcaatatattctatgtaccgcgggcgggccacattatgttttatcgtattttattatcgagttcattcactttctatacccccgtttgacatgctta

SEQ ID NO: 213399 - DNA, 101 bp, Glycine max
agcttagatgaggtcaggggtgaggaaaatgaatcgaaacagaggagaacacggcttatatgatgtcaggggtgaggaatgtgactgacatcacttcctgc

SEQ ID NO: 213400 - DNA, 340 bp, Glycine max
  unsure (1)..(340): unsure at all n locations
ctcgctngngtgagcctggatgagctaagcagcaaccttcttccccatttggctataaataggggaaggggttgtgtaaaattatccctgacctctatgttgtgtatatcaggtgtttcgagtgaaaaaaacatgattccgtgaacaaaattcaagccgaggtgcttccataacgcttccgagatgtttccgtgagcaattccgtgaagattattcgttgttcttcatcagtcttcgtctgttcttcgttcgatctttggtcttcaactggtaacttttccaatccgaggttctcaattcatttttcatttagttgggcttcatcttcatctcgttcact

SEQ ID NO: 213401 - DNA, 420 bp, Glycine max
  unsure (1)..(420): unsure at all n locations
agcttaggccaattctactatttcaagagtcaaattggacttgaaagtcaaaacctctgcacttgaataattgggctgcaaatttgaactttgctttgtgtaattagtttaattaggtagattagatgggcctaatcaaggctcatcacttccttctaagtagtaactgtatgtattagtggaaattagttagttagggagttagtttgatagaggtgcaaccaatctgtctaatgatcctttacatgggattagaggtcctatgacaaggtccaagattaagagggtgaagcaagctttgcaatgtttaattctaaatatcaaagagaaagaagaccaatgtgaattaagtgatgcatccaattgggacgctctcctacaaattgatgaagatgctntggggctaacttgaagaatcac

SEQ ID NO: 213402 - DNA, 505 bp, Glycine max
  unsure (1)..(505): unsure at all n locations
gctgctctcacagggcggatcgcccggtggcaagtttgctatccgagttcgatatagtctacgtcacccaaaaggcgataaaaggaagcgccttggcagattatttggctcagcagcctctcaacgactatcagcccatgcatcccgaattcccagatgaggacatcattgccttgtttgaggaaaagctagacgaggaccgggacaagtggactgtgtggtttgatggagcgtcaaatgttctaggccatggtgtcgcaacctaccctttggcgggagggcgacgcgtgactcgctggtgcattggcgagaaaggaatacgcacggagtcgccaccaacgtttatttgaggaaaatgtcgganaaaccggaaaagacgtgatctacgaactttaagtgaaaggttcaagagttgtatntacgcacgaggaaggtattagcaccccacgcgtccgtcacaagagacgacagcctntaattaaatgtgcaaacatgacttcaattt

SEQ ID NO: 213403 - DNA, 442 bp, Glycine max
  unsure (1)..(442): unsure at all n locations
agcttcagggatttcaaattccgtctaacaaacaataaattaggttttattgttagtaaattattaatttttgctaataaagaaaatcaaagaagaaaactaaaatacctaaatatcctcccatattaaatccttctgagcagcagggactttcttccagctctcgtatgtcacgtcgaccttatcacaagtgacaatccccaaatatgttcttaatttcttcttgcggggaccgtcagccttgctggtcgtaggatcgacgtggaccactgatctctctgccccaggtggtctagtggccaacgaacatagccgtgtggctttgcatgtctgcttcaaggtagacggagatgctaatgcgtctgcgggagaaggaggaggaggtgaggcagctcgagtagccatggtcctttnaaaacaaaaacttgagttagtaatatta

SEQ ID NO: 213404 - DNA, 391 bp, Glycine max
  unsure (1)..(391): unsure at all n locations
agagagaccaatcacgagcacatagcatggtcttaaaagaggagttagctgcttgctcaaggtccaagagaagcttgtctcagtgtttatgcgagacagagaccaacatgttagccatcgtcagcaagtaccaagaagaattaaatctagccacggcccacaagtacaaagtggtgaacgagtatgcccgagtgtatgcggaaaaggaggctagaggaagggtgatcgactcgttacatcaagaggaaacaatgtggatggaccgatttgctcttactttgaacgggagtaaagaacttccccaattgctagccacggctaaagcaatggcggacacctactccgcccncaagcttctcagctcgtgctagggactcttccaattcagcac

SEQ ID NO: 213405 - DNA, 451 bp, Glycine max
agcttgtcattcattcaggatagaccagtgagcctcacgttcaaagggaagctagtatttgaggtgaacaggtatggcttcactgatggtggagcttgggttgatgggaacctaaactaatgcaatcctaccccgcaagggcattggatagaaaactccaagtagattaagccagagatgcaagagaaggccctaggattcttatgagccttagggtagatttcgggcccatgggctaagtatgagcccacttatctttgtaaatattagattaaggtttcattatttttgggccttgtatttagagctccataatgtaggtagggtaccctagaaatataggatttttcagcccttgtattctagggcacctagactagtctttgtattaggggtagttttggaatctcacatgcactaagtggatatttgatgtgtgtggctggagata

SEQ ID NO: 213406 - DNA, 491 bp, Glycine max
  unsure (1)..(491): unsure at all n locations
tgcctctattaccctcatagtcccagtaaacataatgccaggtatgctgcatatactgatacctgttttggccttctccaatttccagaagctgcatatgaattaataagtgccataaaaatttgttntgtagcatggactccagattgcttcatttcttcacaatactacaaaaaatattgtaattagcaactcaaaatgttcatacatcaaacttaagatcagaacttcagttaacataaaatcttagttacatcaattcatcanaagtgtatgaatgaagctactttaaacaaacaattagcggttaatcatgttcatantttttgggcatgaatggtgaacatttaataatcaaggattactagaagttcactgatttcagccctcccattatcatgataaacatacattaaaagcatatgaattgatctgtgtacaacacatcagagattatttcagcatccttgatgaaaattcattcaacactg

SEQ ID NO: 213407 - DNA, 447 bp, Glycine max
  unsure (1)..(447): unsure at all n locations
agcttggagagaaaggcaaaggagtataagttatatgtatcctgtaagcttttttttaattttctcattctcaatatattgccacaatcatggatggaaatttacatgactctgcaacaaacatgtaagcaacaggtttcaacattccgggattgtttgaggaacaatggggtaccctttagtaagatacctccacctaactaagtcgtcctagcagggtaagattttgtctttgctagtttagtgatactgtgatagtgatgctgctcaaacataaatttcatattttcaacttttctttctttcttcatatttttattttgctacatataccatatttccatatgatgcattgtgcttaactntggtcattggtcactaaatcacaattcattataaagagtggaatagtcaaacgaagcanaaaatggacaacaaattaatgga

SEQ ID NO: 213408 - DNA, 458 bp, Glycine max
  unsure (1)..(458): unsure at all n locations
ctcagctttgacttagctngtaaaaaaaaaaaaaaccaaatgcacctgaatatttggtcttcagtgaggtgctgcttcaaactctttgttagctcactagatgattctgagtcacgaccaaatggcttttcaacaataacccttgtccatccatcttttgaagaagctttaagactagcgcatctcaccacatccacaaatatgtttggaggtattgacaaataaaacaatctgttngatagctttccaccctagaaaaggccattgtcaaatatatctaagcatagtttcaagagcaattattcgtataaatttaattctgggaaatataagatgccttaaattttatgattgataatatcacccttttgtagcactacggttttaattntcaaatcaccatctgctctaaaggtttttgcactctattctacacagaagaaagatctcctaaactt

SEQ ID NO: 213409 - DNA, 393 bp, Glycine max
  unsure (1)..(393): unsure at all n locations
agctntgcctttagcgcttgtacctcatcactttcttccgaagctttaacctcattgtctctcacagtctttagatttgggagccaatccaatccttgtgtccggactctcagccacttatgatagccgccgatgatcccattactgcttcccctaagctctctgtcctttcttcacgccgcctcccatgctntgcgaactccttggagtaccctcgcgttgtggtcactgaaaccccgtgcgatgaaaggcgtgatgctntcgtctgatggcactcctctcatggagtagccaagttgtcttatggcgaggacgggattataattaatacaacccattgttccatctanggaaacattggacatccttcgcatgaagatagaatcctgattc

SEQ ID NO: 213410 - DNA, 389 bp, Glycine max
  unsure (1)..(389): unsure at all n locations
tctgtctactgactaacaattcanaatgcacgttcacattcttgttctttctatgtctaacatacacacttgctcaaactcatgaaaagaaacacaaattccatcacaatcatgcattcaatccaaagccaaaccatacaccaatttttacaaaaaagataaaagtgttctactgccatatcatcacaatgaagtcaaactgttctatatgcttcagaatgagcaaaccaattacccataaataaaactagtagtgtctataaacataaaagagataatgtactgaaaccataattataataacaataaaccaaanagcagaaacatcatcaggagattagaattcctgtgactggtcctgngtgtcctgtgtctgaacatactcttca

SEQ ID NO: 213411 - DNA, 263 bp, Glycine max
agctttatcttgagtgggtgttaaaatattatcattattatctatgctcaaaaattttttacatcagaccctggtacgatccaattggaaagtatacgacttgagttccacattggaagtctaagattgcaattatacatacctcggactccctaatgacaataactaactatcgttgtgtgcttctcccaagattattatcaattggtattagagctttccaccagtgtttcatacaaaaaatggccagggcacaccaacat

SEQ ID NO: 213412 - DNA, 408 bp, Glycine max
  unsure (1)..(408): unsure at all n locations
acactgaacaactttgtcaacatagcttatttgcaaaaaaaaaagatgtgggggataaacctattccgcatgactagagatcttttcaatgtatctattgtgtctttactgttggccccattacccaaagtggcaagcttcaaaacctcctcttcatcaatgtccagatcaaatactccacgatgcaggccataaaccaacttagcaagaagtaaaaaaaaaatatggttactcaatcaaaatgaagctccactcacagatttaatgctgcaagttctttagccaaagccatattcatttgttttaatgctccaaccttaagagattcccagcggcaacctccacttatcttaatgaattgtgaagtctgcagactgcaagaatagcaccccanatactagcatatgc

SEQ ID NO: 213413 - DNA, 410 bp, Glycine max
  unsure (1)..(410): unsure at all n locations
agcttcttgatgaatcaagactgattcaaagaatttntgataataacaaaggtgatgacaaaaagcaagctcaaaggtcaagaatacttgatgataacaaagacgatgatctcaagaatcaaagaatgagttcaagatgttcaagattgaatcaagaacacttcaaggttcaagagaaaattggatttcaagaatcaagattcaaggttcaagctgtcaagaatcaagatcaagattcacgactcaagattcaagaatcaagagaagaattaattaagataagtataaaaaagttttttctaaaactgagtagcacatggattgttctcanaaccattttaccaaagagtttttactctctagtaatcgattactagattattgtaatcgattaccagtagtaaaatgga

SEQ ID NO: 213414 - DNA, 463 bp, Glycine max
  unsure (1)..(463): unsure at all n locations
tacatgaagttcctaatctagaaaaaatatggtggaaaaaatattaactaanaatagtctcgaacagtgtgcataatgttgatccctgaagttcctaatcttgtattttctaattataccacacttcttgttttccataatgaaattgaaaagaaataaattatactgatgatgatataataatatgactaaattatggcacttgtaccccatggcccatagtttgggtgcacggaagactatntagtagttgtagtagaattttcattaggtcactggtggggcacgatttttgttattcctatgtcaagatctagataccatgttaaaatacgagaaaacagagaaattgagtaaaaaccgtctatcagagtacacggtggatcgtgttatctaggtaatagaggatactctgttctccanataaagaaatgtcctataaccgtatattataaataattct

SEQ ID NO: 213415 - DNA, 413 bp, Glycine max
agctgtgatgatatggtcttcaccgacgaaatgatcaaagtaggtctaaaaagaggcacatctgatcattatgctttgatacatgccaaaaaaaacaacggcaaatgaagagggtcataatgagggagaagcccatgctgtgactgccattcctatacaaccaagtttcccacagacccaacaatgttattactcaaccaataacaaaccttctccttacccaccctccagttatccataaaggcaatccctaaatcaaccacaaagtctgtctaccgcacttccaatgacgaacaccacctttagcatagaccaaaaacaccaaccaagacatgaattttgcagcgagaaagcctgtagaattcaccccaattccagtgtcctatgctgacttgctcccatatctacttgat

SEQ ID NO: 213416 - DNA, 403 bp, Glycine max
  unsure (1)..(403): unsure at all n locations
tccttgagaagctagagcttagctacacacactcatctaanaactaagctcacctccttgagaagctttcttgagaagctagagcttagctacacacccctataatagctaagctcacccccatgacaaaaaaacatgaaaatacaaaaaaaatcctactacaaagactactcaaaatgccctgaaatacaaggctaaaaccctatactactagaatggccaaaatacaaggcccaaaataagaaaacaacctattctactatttacaaagaagagtggacccaaccttggcccatgggctcaaaaatctaccctaaggttcatgagaaccctaaggccttctttatcaactctagcccaatcctcttggagcctcttgctcatggctctggtaactggtcct

SEQ ID NO: 213417 - DNA, 112 bp, Glycine max
acacgcatgctgctcggccataaaccacatatcatgaacgatcgcttatctattgatatactgactttgctccatataccacacttatatatgatgcattgcgcttcacttt

SEQ ID NO: 213418 - DNA, 394 bp, Glycine max
  unsure (1)..(394): unsure at all n locations
agcttgtaagacttgattgtaaccagtagcattttataccttganaatccaatgttgttctcaaacacaaagtcgtaagcatatgtagcataagaatcacaacatatgatgtgttgaacattttcatactgtggatctggaaagaagtgaccatactgcaataaaatagtaagttattctatagactataataagtagatgcaaaattgtgaattgcaaatccatcccatacaacacacttacagaattgccaggtttaaattcagtcgaggttcttaaccgcaggacacaaccaaaaacatatggtcgactcagcattcgatacctgcaaagaggacagatcacaacatagtcacccaaagtgatatatgtgaaagtgagtacacacatatca

SEQ ID NO: 213419 - DNA, 362 bp, Glycine max
  unsure (1)..(362): unsure at all n locations
ttctctcnttgaaagtntctatgggccaagtgattttgagattatgaagaatatcttttcaattgttaaactgggtttgttgattaacattggtaccttgttcacattgtattaattgaaagctatatatatatatatataatgtggctntgttatcgaacaaaactaaattgattgacctttataggtgcaaatttaattaaaacgtatttgcctgaatgattatattgtatacgtggcaatcaaaacatatgacatttaaaaaaaaaatcactttctaagacgattctagcaaaaaccatcttagaatatacgtgatgcaatcctaccccccaagggcattggatagaagactccaagaa

SEQ ID NO: 213420 - DNA, 295 bp, Glycine max
tacatgccccgctaggattctctgaccacgtagaggttccgctgctctggcgacgtggctcattcctagagaatgatgtcgaagagtcctccctgaaatttatcttcatggagctgcgaagtgcgtatcggagagctaactctgacgattctacttaccatgctgccatcctataggcttttacagcacatgctggacggtgctgctgtcttaactaccacattgcgactctgaaagcatggcctgagaccccactctgacgtgacgagtgctactgccaccttctctgttattc

SEQ ID NO: 213421 - DNA, 377 bp, Glycine max
  unsure (1)..(377): unsure at all n locations
tctttctntgtgaggaatgacccatgtntggttaacatagtcaaaaaacattggccatggtgagcaatcaacttcaaacttcttaaggcagtcatcaaactattgctcaaaaggacaatccactaaactctcccaggcttccattacataatccaatgcatntttttgaccaacaagggttttacactttgccttcacatccttatcaatgtgaaactgacacaacagattcatggacttagggaatacaactttcaccgcattcatcaatgctagatctctgtcggtgacaataactctagggagtgcatcacgtttaatgaaaagacgacgaaacctttctagagcccaaacatctctactcagatgttctcctt

SEQ ID NO: 213422 - DNA, 70 bp, Glycine max
  unsure (1)..(70): unsure at all n locations
agctnttgttatatgtctgtattctctaacttgctaattgaatgacacttatccttttgcacagaatgag

SEQ ID NO: 213423 - DNA, 464 bp, Glycine max
  unsure (1)..(464): unsure at all n locations
taggagagagtggagagtgcataaagaacaagggcttcttttctagtttccgttgatggtgagtttcatatcacagtttgngttgggccattcgcatcgtcttgtggcagatccaacaccagccttggtggctccattcggtcaacctcatgcagcggacttcctcgtcaaatctgtcataggatcttctacctcttcctccctacaaacctttgttgttgccgctattgcgatcgcgtgagcatctcatcgcacgtaagttnaccttcttcttttgggcttcgagttcatggtctccttaaggctaggaaagctntggggctcaactacgagagagagcaagcgaaagggaaagggtgagagagctacgccatgagagaatgtgagagcacacaanagggaagggtgagagagttgatgcaccacgagagactgagaaagcaagtgaaagagaaatgaaattt

SEQ ID NO: 213424 - DNA, 450 bp, Glycine max
  unsure (1)..(450): unsure at all n locations
agctnttggaaggatcaagaagtgccttatgaatcctcccgtgcttatgccaccagtacctggaaggcctctcattttgtacatgacaatcttggacgagtcaatggggtgtatgctggggcaacatgacgaatccggaaagaaagagcgcgatgtttactacctaagtaagaagttcacgacctgtgaaatgaattactccttgctcgaaagaacgtgttgtgctttagtatggacatcccatcgcctaagacagtacatgctgagccatactacctggttgatatccaagatggacccggttaagtacatctttgaaaagccagctctcacgggacgaatcgcccggtggcaagtcttgctatccgagtttgatatagtttacgtcacccanaaggcgataaaaggaagcgccttagcagattatntggctcaatagcctcttaacga

SEQ ID NO: 213425 - DNA, 482 bp, Glycine max
  unsure (1)..(482): unsure at all n locations
tcggtgtacctgaagatgctattaggctcagcctgttttcattttctttatctagggaggccaagagatggttgcattcattctagggcaacagtttaaagactagggataaggttgttgagaagtttctaaaaaaatatttcccagagtctaaaactgcaaagggaaaagctgcaatttcttcattccattagtttcccgatgaatctttgagtgaggcattaganagattccatagcttgctgcggaaaactcccactcatggtttttcagagcctatacagctgaacatcttcattgatgggttacgaccgctgtcaaagcagttactcgacgcttctgcaggaggaaaaattaagttgaagacacctgaagaagccattgacttaattgaaaatatggtttctagtgaaccacacaatttgcatgagagagttcatattcctaccaataagagnttattggagcattcattacaagat

SEQ ID NO: 213426 - DNA, 445 bp, Glycine max
agcttgcttctacaatctccccctatttgatgatgacaacttctgatatcaagaaacacacacacacacacactttttcctattcgatcactcacataaatttccattctccccctttgtttttgaatttatgcttcacttgaaattaagttaattattcatgtgagttcttgatttaatccctatttctctccccctttggcatcaacaaaaagccaaagtgcgtaacaagtatgaaacatacaaatacaactaatcattcacacaacaatcatggaaaaatataaactaaacatgaagcaagaaacatgactagatcaaatatatagaacaatcacatagtcatataacataattcataattgttcaaacataccatgcaaataaagaaatgctaaatggttcacatgtcataataatatagactatttggataagtcactgg

SEQ ID NO: 213427 - DNA, 379 bp, Glycine max
  unsure (1)..(379): unsure at all n locations
acctcattgtctctcacagtctntagaattgggagccaatccaatccttgtgtccggactctcagccacttatgatagccgccgatgatcccattattgcttcccctaagctctttgtcctttcttcacgccgcatcccatgccttgcgaactccttggagtaccctcgcgttgtggtcactgaaaccccgtgcgatgaaaggcgtgatgctttcgtctgatggcactcctctcatggggtagccaagctgtcttatggcgaggacgggattataattaatacaaccccttgttcccatcaagaaaacatttggacatccttcgcatgaagatagaatcctgattcttccttccttctangcagggaaccaattaacag

SEQ ID NO: 213428 - DNA, 449 bp, Glycine max
  unsure (1)..(449): unsure at all n locations
agcttgcctgtccgatgcagctgtaatgatggtccgagttatgttgtggaacggttacgaacccgggatgggtttaggcaaagacaacggcgacataactagcctgataaacgccaaaggaattcgggggaagtatgggttaggctataagcccactcaggcagatataaagagaagcatcacgggaaggaagagcggtagtcaaaactcgcggttgagacaagaaggtgaaggaagcccaccctgccacataagtaggagctttataagcgccggtctgggggatgaaggtcaagtggtcgcgatatacgaagatggtgttccgagtacattggatttggtacgaccatgccctcctgatttccagctgggaaataggtgagtggaagaacgccccggcatttacgcgacgagcataatgtaaacctttatgggtttaanagctctat

SEQ ID NO: 213429 - DNA, 455 bp, Glycine max
  unsure (1)..(455): unsure at all n locations
tctcaagatacacttaatgttatgcagcatgtccattctactaaagtgttaattcacaagttaaaagatgatggttggcaagctctgctgaaagatgtggtattgttttgtgagcaacatgacatttatattcctgatttcaatggtacctatgtagcacatcatgggcgctctcgatatcaaaaagatcatatcacaatagaacatcatttcagagtgaacacaatttttattgcagttgataagcaattgcaggagttaaatgctatgtttagtgagcaaacaatggaagttttaactntaatctgtgttntagttcctaagatatttttatacaacttttcaatgttgatgatatatgcactattgtgaacaaattttatcctttaattttagtaaacacgagaagatagttagaaatttaacttcacttttattttgggtgctctactcat

SEQ ID NO: 213430 - DNA, 438 bp, Glycine max
  unsure (1)..(438): unsure at all n locations
agctntgatgatatggtcttcaccgatgaaaggatcaaagcgggtctaaaaagaggcaaatctgatcatcatgctttgataaataccaaaaaaaactagggcaaatgaagagggtgagaatgagggagaagcccatgctgtgactgccattcctatacagccaagtttcccaccaacccaacaatgtcattactcagccaataacaaaacttctccttacccaccgcccagttatccacaaaggcaatccctaaatcaaccacaaagtctgtctaccgcacttccaatgaagaacaccgcctttagcacaaaccataaacaccaaccaagaaatgaattttgcaatgagaaagcctgtagaattcaccccaattccagtgtcctatgctgacttgctcccatatctacttgataattcaatggtagccataaccctag

SEQ ID NO: 213431 - DNA, 265 bp, Glycine max
  unsure (1)..(265): unsure at all n locations
gcttgactngagttatcaagagattataaatatgtgaccatggcatgaatntcataatgaatcaatcaatcatctatctttcaatcttctctcaacatctttcaatacctttcaactctttctacaaaattttctcttcatctttctaaaagtttttgttcaatattttctctttcaagaaaatttctttgatcaaaaacttgtgctattcatctttttaattctcttctccctttgccaaaagaacgaaggattagccacctaa

SEQ ID NO: 213432 - DNA, 341 bp, Glycine max
agcttgagatgaggaagtgtataagggtgaaacttcctgctcttatttgttgaccacagagtggtacctgtagatatgtcgcggcggtcaggagaccttgaggacgtcaggaggggtgctattgcccacaaccaagcttgacccatcccgacccatcccgggcatagtcagttagtgagaacctgtgatggacctaaacatgcaagcttcttgcactcaacagataaaaggaacatggaccacaaagcaaggacgctgtgggtggctgccagctatgaacttgattgatatatgagatatggcctctggtaatcgattaccaacggtgggtaatcgattac

SEQ ID NO: 213433 - DNA, 303 bp, Glycine max
  unsure (1)..(303): unsure at all n locations
tattgtcgcaacctacccttcggcgggagggcgacgcgagactcgcgggatgcgtgttccacgaaaggaatacgcgcggagtcgccaccaacgtttatttgaggaaaacgtcggataaaccggataagacgcgatctacgaactttntagtgaaatgttcgggagttgtatttacgcacggngaaggtattagcaccccacacgcccgtcccattggacggcagtctttaatcgaatgtgcaaacatgactttgatctttaagttcccttgtatgttcttatgtcctttataccctttataca

SEQ ID NO: 213434 - DNA, 502 bp, Glycine max
  unsure (1)..(502): unsure at all n locations
cggcactttgaaccctgattgacgcgatctataacggggattctatgcatgcgagctgcgcgcatgcaagcttatgagaacaaatggtcttaactattttcaaccatgcatgcgaagtaggactctcattttgatattgaccaacgctgacgagccagcgttctgtgggctggggccacctgatgagttcagtggggatgagctcaattcttactacggaatattgatttcttgaccagtgtcatgacttgttgagagcaataaagaacgtgatgtcccataatgtgtacatcttatattttcagacaatcactgctgcatcattctgagcatatcgctatactaaacggaaaccatgacaaatgtctcgtgcacactatattgaccggactattcatctggaggtacgtctagttgtacgaccttgacatgctaatccacatacgataggtgctaaaccgagcctacttagcagaccaattagctctctccctcgcaccan

SEQ ID NO: 213435 - DNA, 370 bp, Glycine max
gtgtagattccttcttaaaacacaaaacaagcggacccctttatatatatagattccttttcagctcgcatggaactttgaataactctatttcatcaaacataatcaccaaagagacattcctaaaacgcagacagaaggtacatatggcataaaacctcagaatctgagctaaatgaatggcaattatattatagatgaatcctctgcaattgacactgattcactgaacaggaaacttaccttcatccctcttcacactttccaatgtccacaagccccatggttggcccaatccctcccatagccacagtttcagtgaagtggtgattgcgatggccatcccctcccatagcgaaacaggtacgca

SEQ ID NO: 213436 - DNA, 400 bp, Glycine max
  unsure (1)..(400): unsure at all n locations
agcttgccacccagctcgcccaggcgagcagggttgcttcctccagaagcaacagccttctggaggaatcttctggagggcccaagtgggcctggttgctatttgcacccccatttttactaagtacaccccctgcctttttttggtgattcttttttgtaaagttacggaaacttacgaatttcgtaacgatacttgttttctttccataatgttacggaaccttgtggattacataatcatcccctttttgacttacagaatgttacggaacctcactaattgtgcaacgatgcttgcatttgatttccggtgtgccacggaaccctacagattgtgcatcaatattntcttttgttttccggcatgtcnccgaatttcacaaattgcctaatgattg

SEQ ID NO: 213437 - DNA, 404 bp, Glycine max
tgtaggattatgggatacccatcacatgtggtactaggtggcggtcgggcgatggtgcacaacaagtattccacgtccacaaatcgcgcataaacccaccatcccctgttgcccacctccaactgagctcacgtactcccacgtagctcatatgctcgtttctctcaacaccgggtccccatcaatcctcccaagcttccccaacatccaagtaactcagcattcaaacagcagaaattatcacagccaaacaaaacagggcagaggcataaaactctgcccaaaacaccaaccaaaatcacagcttttgtcatttaaagaccccagtaataattccttcgttccacttcgttaaccgatggatcgactcgacaagttactggaagtcttatacttaagctaca

SEQ ID NO: 213438 - DNA, 367 bp, Glycine max
  unsure (1)..(367): unsure at all n locations
agcttaaagtatgcccgagtcattcatccctatgagatgttgttgaagtattggcgatcagaattgcctttcgttggattatagggttgaaccaagctcatgcttttacaaaaaggttcatcaagtcaagttgaaatatggaagtaaccgtcttgcaaaactggggcaaaagatgaatcgagtcacatcactgcttcgtctactgcccaacacatttaagattattgatgtccttgttaacttcagtttcaccttgacaaagatgtcatggaccatgttgaaaatctaaattgattcaaccccatatcttgcataanaattcgcaatacttcaactgtacatcattcgcatgcttccatgcttttca

SEQ ID NO: 213439 - DNA, 466 bp, Glycine max
  unsure (1)..(466): unsure at all n locations
acccatcacatgtggtactaggtggctgtcgggcgatggtgcacnaacaagtttccacatccacaatgcgcgcataaacccaccatcccctgttgcccacctccaactgagctcacgtactcccacgtagcccatatcctcgtttctctcaacaccgggtccccatcaatcctcccaagcttccccaacatcaaagtaatacaacattcacacagcataagctatcacagccaagtaaaacagggcaaaggcagaaaactctgctcaaaacaccaaccaaaatcacagctnttctcacttaaagaccccagtaacaattccttcgatccaattcgttaaccgtttgaatcgactccaaaatttactggaagtctatagtacatatgcctacagtttgaccgttgggatctactaganaacattcagaactcattctgtactactctttcgacaaccaatcacacac

SEQ ID NO: 213440 - DNA, 215 bp, Glycine max
agcttctacttatgtggcaagtgcgggcttcttcaccttcttgtctccaacgcgaactttgaccattgttcttccttcccgcgatgctttttttcgtgtccgcctgagtgggcttatagcctaaaccatacttccacgatttcttgggtatttatcaaggctagtatgccgccgttgttttttcctaaacccatcccgggttcataaacggtccc

SEQ ID NO: 213441 - DNA, 259 bp, Glycine max
  unsure (1)..(259): unsure at all n locations
ataatatatcgaggcgctcganantgaacaacggaaggtcttgagaaattcaaatggtcataactnttaactcggatgtccaattcatgcgcatcacatatagagacgctaaaaaatgaacaacggaagctctccagaagttaaaatggtcataagttttcacaaagatgtccgattcaggcttgtattatatcgagacgcttcaaattaaacatcgaaagctctcgagaaattcaatgggcataacttttacttggat

SEQ ID NO: 213442 - DNA, 394 bp, Glycine max
ataaatttattagaagtagtttatttccataatctgttatgagtaaattgaacctaataaagcgtcaaatccagttagtacagaagtaaaaaacccaccctttctttcactttattcgggcaaaccatgtgactcacattatttaacctctggactgtatcataagcactctttgtctggactcttataccactagacctgatgcttctcgacggaccgtggaaatatgtactgatatgttagaagaaactgatgctcattagatccacgcttggtagatgaccgtttgaatcccgaatacgaagatgcggagaacctaacatacactgaacataatgtggattacttcctttaaacaacgagccctactgattttgattgtgcttgagtgacg

SEQ ID NO: 213443 - DNA, 319 bp, Glycine max
  unsure (1)..(319): unsure at all n locations
tgggatgaggaactatataacagtaccaaggttttagtttaaggagtctttnttcggagaggagaataattctaggattttagaattccagtttttattactgttcatgcacactgtccacgtataataaaatccattntctgcaaatgatctctaatccatacattttttaatactatggactttctttattttcttttgatatactctgtgctttaacgacttaaagtcaatatgaatttgcttatcaattatttttggatttgtacattacttatacgaaattttataagtatcttgttctagttagtatttcact

SEQ ID NO: 213444 - DNA, 269 bp, Glycine max
  unsure (1)..(269): unsure at all n locations
agcttcaaggctaagtcttcatgttgctccccttatctctagcanaaattgagccgacgggtgaagttgctaaatacaacgcatgattagtggccaaagggttactgcaaaaatatgttctggattaccatgaagtctttgttctagttgcaagaattgaactaattaaacttatggttgcaatcgctagctaacggggctggtcattggatcaactaaatgtgaaattatcattcttttatgggcccttataaaaagtctatgtatat

SEQ ID NO: 213445 - DNA, 327 bp, Glycine max
  unsure (1)..(327): unsure at all n locations
tctgccccaattctctataaatagggggagaagtgaagtgaataaaggttgagccccttaggcaattctctctctttcgaatatgcttggaaaaatngtttccgtgaagaatatccaagcctatgcgcttccgaaacgtttccgtaatgaatttcgcgaagggttcgaccgttcttcgacgttcttcattcgttcttcatcgctcttcgatcttcaacgggtaagtacctcgaaccaagctttttcgattcattctatgtacccgtggtggtccacattgagtttcgtgtattttaattcttcttttcgttaccttttataccccct

SEQ ID NO: 213446 - DNA, 418 bp, Glycine max
  unsure (1)..(418): unsure at all n locations
agcttgatattgggtaataacaactntaacaaacaacttgagatccgctctttcttctcgcctcatgataaaaatgttgcaagaattgtgtagaagtgattgtatggacaaatgaatatcctcacacaaacacttctctcacatgtntacacttcataattnttttcactcattgttcactctttttggcttttttcctcgaatagtctcaccactcttgcctttaacctctcaacttctccttatgagctcttaagtaagaacctttagggttgattatacacgacaagacacaacaagggatcaatgataatgtagtggaatagaaccaacanaagacagggacaaggggattaagaaattattttttccaattgcaccaatgtaaaaactgccaatttgtttcacatttttttta

SEQ ID NO: 213447 - DNA, 365 bp, Glycine max
gctccaggttgctgcatggaagggcataggtctgtatggtggtcagcagaggagcacaaaccacaaacccttgcgacaggtacaaatctctgattcaaggccagttgggttaccaagttgaccagacgcatgcagtttgccttcaagcttcttagtttcagatgatgcagatgggtttgtagctacctcatgcactcctctaatgactatggcatcatttctggcgctaaactgctgggagttggaggccatcttctcaattaaatttctggcttcagcaggagtcatgtctgcaagggctccaccactggcagcatctatcatacttctctccatattactaagtccttgatataaatattgga

SEQ ID NO: 213448 - DNA, 936 bp, Glycine max
  unsure (1)..(936): unsure at all n locations
ctttgtggctcatataatttccaaaaacaaaaccctcttattactagctattttggaattcttttagtttctttgaaatgtacaaaccctttataatttggttgcttcgantccccttcttttgttctttttggcacaaaaaattaccactataaacaaaagggtnaccctcaatgttacctttcattcacctattttaaccataatggaaaatatttattatatttttctcgcccggattaaacaaaaaaaaccattggccggaatcattaggccaaccacaacttaacagccggtaccccgatatttcccacattttaacacccctcaggaaccatttaattcccacccagggaagggaaattcattggaccttaccaaattaggcgcgaaagggcctatttaaccaggacaccaaatatcggctaacaacaacaaccaggcgccccaaagtaccccttaaggtggactctctttataataaggaccacacgggaaggttgcgcaagccccccataagaccaaaattctctaaaatattctcttttacttctgcgccttaaaaacttttcttccacctttttaactttgaaacccgtggggggtgatgccaatttcaaaacatcttgtttttaccacccttacaaaaaatttttgtttgaaaaggggtgttataaaatggggggattgtgggtagggaaaaaaaaaattggggccccctctcctttatttttgaagacatataaacatcaacacctgttttttataaaaaatattcgtgaacattgcccaccggttttctcttattctaataacaggtgcggtgggggggcctaacccttcttgagaggagcggcatgtgtggtttaaaaaaaaacactctttagggagggggggtatcaatgtggggggcacactaaaaccaaccagtgtggg

SEQ ID NO: 213449 - DNA, 578 bp, Glycine max
agcttctacttcatagtctaccaaattcatatgatctattcatcatcaacattattgtcagtcgtctaacctttgatgatgttgccagaactattcctaaagaagaatccaaacaaaagaataagaaagataggcaggaaaattccaagcatgcaaaggctttaatgatgacgaaggtagatcaatgtaatgtggctctaatgggagttaaaatcatggcagatcaaagtctcgaagaagaaagaacctcaaatactataattgtggcaggagatgacacttaaagaaagattgttggcataaaaagagtggaggagataaactatagagaatcgagctctcaaggttgtgttgctagcacctcaaataatatggaagccatgtgtagtgaaacaccaattggttttagaggtggaagacaacttcatgattgttggatattagatttaggtgcagcttggcacatgactccatgttgagattgtttttacacttatgaacttatcttggaaggatatgtgttcatggaaaatgatcatgcccttggaattgctggggttggtactggtcaaataaaa

SEQ ID NO: 213450 - DNA, 499 bp, Glycine max
agctttttggtcaaaaggcttgtgtatgtacaatttggccttcatcatgtcctcatttattcatttcattctaaaattcagagattgatgcagagattattactcacagctagtcgttcactcacaatttaagttcacactctccccggttttggttcaagcttttctttctcaatcaatctgtctactgactaacaattctaaatgcaagttcacattcttgttttttctttgtctaacatacacacttgctcaaactcatgaaaaggaacacaaactccatcagaattaagcattcaattccaaaaataaaagtatacaaccattttcataagtcaataaaagtgcttcactgccatatcattgtaaaccaagttaaactattcaaaatgcttcagaataagcaaaccaactatttataaataaaactagcagtgtatgtagacataaaggaaataatgtactgaaacctaattataataataaaccaaaaagcaaa

SEQ ID NO: 213451 - DNA, 538 bp, Glycine max
agcttggagaggatgcttcaatggaggaaaagaaagggagaaggggggagcacgaaattgaaggaataaaagagggagagaagtggaactttgaagtgtgtctcataagactttcattcatcaaagttacaacaagtgttacacgtgcttctatttatagactaggtagcttccttgagaagcttccttgagaaaacttccttgagaagctagagcttaggtacacacacccctctaataactaagctcacctccttgagaagcttccttgagaagattcctaaagaagctagagcttatctacacacaccccctataataggtaagctcacccccatgccaaaatacatgaaaatataaaaaagtccctactacaaagactactcaaaatgccctgaaatacaaggctaaaaccctatgctacaagaatgaccaaaatacaaggcccaaaagaaggaaaaaacctattctaatatttacaaagaagaaaggacccaaccttggtccataggatcagaaatctaccttggggttcatg

SEQ ID NO: 213452 - DNA, 813 bp, Glycine max
  unsure (1)..(813): unsure at all n locations
ctnnttcttttttttcttcaaccgaccgacaccaccccccctgggccgagttactctttttgaacgcacacgaacactaccgaatccattggaccacacctacggcgatcggccccattaatcggtactacaacgacctgacgcaacccaactactgaacacaatgtagctccggtcgctgccggtcagcaacagacacacccgttgattaacatgttgaccaaaaatcacaaaacgccgcgcacacagcgcagaaagcacaaacatcacaaaaaacccaaccaatggtactgtttacttatctcaagacaaactactctcacatattcagtcgtccatctccacgagcgcggaaacggagcatctccactcattatcaagcccgaccacacaagcacccatcaaccataatcttctcctgtggatactcaaacaatataatctactccacgcgcgcgaccgcaagctgcgcaacacccgtccccacaccacaaataaacaacggtccaccgcagaactcgatcactgcgccgtaaggaagtacttcacagaaatcttttctcgagcttaatgaccacgccttaccgcaacaacgcataacatgccaactacaacgcgtacctgctcgcatcgctgaagaaggcgctcggctacgtactgaacgaatcccatccctaaaccacatatacactggacacgcatctcatcccctgtaactcccaccagataggcccaaacgacgagcacttaccaccattccagtctgttcgccagcatacctattgtgctggccaccccagcacgtcagccccg

SEQ ID NO: 213453 - DNA, 516 bp, Glycine max
agcttgcttgatgaccaaccacccaacttgctcacactccacaacttcacttctttctttagaaatttgagcttttctttgaaaatgaaagctccccatccttggaccccaaatgaatcatataccttctttacaaattctacaagccatagttcatgaatacaaaagttgaaaatttgaaaggttttggcccctaacttacacatttatgactaagaacaatgggacaatgatccgaaatggatctatggagaacatattgggtaacattaggccaaagatgtaaacaacccaaggacaccaaaaatctatcattttactcatagcattcccacttactctcacctgtgtaaatcttctccaaacaagtggtgaatcaatcaattccatcctatttagtgcctttaaaagatacaatgatctaatttgtagtgtcacatattttactagcttcctcaaagtcaattttgaaccataatgccctttgcttctctaaggtattcttctttctacata

SEQ ID NO: 213454 - DNA, 532 bp, Glycine max
agcttttaacatcaatattcatgcacccaaggctggtaaaatcatttcatggttcccttcgctatggtaggttatttcattattactctggtgctttcttaggaggatatgttttatatgtgggtatctttctttctttacaactgaactagagggagttgttttggctatttctatagctcattccaaaggttagggcaagctttggctggaggtgaattctcttttagtcctcaaggcttttagtgttatcaataaggctccttaggatttaagaaatatcaggatgaatactttattctattgtggcccaaatggagtttcgtgtctcccatattttctgagatagtaatgtatgcgctaactatggtgtagaattactctattatgttggaagataaactttgaatttggatgaggtgtacaaggggagatacttggtattgcaaggacagaaaaataaaggtaacctttgttatttggatggacaagccttgaagagaaaccatgattgccaagtgaagaaaaaatg

SEQ ID NO: 213455 - DNA, 542 bp, Glycine max
agcttctttgagaaaacttccttgagaagctagagcttagctacacacacccctctaataactaagctcacctccttgagaagtttccttgagaagattcctaaagaagttagagcttagctacacacaccccctataatagctaagctcacccccatgcctaaatacatgaaaatataaaaaaagtccctatttcaaaaactactcaaaatgccctgaaatacaaggctaaaaccctatactactagaatggccaaaatacaaggcccaaaaaaaggaaaaaccaattctaacatttacaaagaagaatggatccaaccttgacccatgggctcaaaaatctaccctaaggttcatgagaaccctagggccttctttagtagctctagcccaagcctcttggagtcttctatccaatacccttggggggtaggattgcatcatcccctccaccttggaaaggatttgacctcaaatcctgaggttcttcatactctaggctccttcccttgacacctgtaaaaaaaacatatgtattagtg

SEQ ID NO: 213456 - DNA, 541 bp, Glycine max
  unsure (1)..(541): unsure at all n locations
agctttataagttctatttaagctatatctctagacaatgtgagactaaacaccaccgttgaggcttcacttaaggcatcccccaaagagttagaatagagaattagaaagatacaatacaaacaactccatccttgttaacgttaaatactgttgatttcatgtacatcttttttcaattccttgaataagaagaagttttctttacaaaaccttgtggaaatccaaaactccctctaagaacaagtcttttatttggacttcaatactttaaaaaaagaattaatggaaatgccatgttgcagtgtaggctgcataacactttttaccctgatatgtgtgtaatgtgttgagcttgctagattatctgttcctcacctgttcttaagagcctgacagtgaagagagtcaacaagcctcaaaagtttttaaagcatgtgcatgcaactgcttaaaatttctcacttgagggaacatagctagcttgataaatctataaaatagtagacaggaaaattaacctanattcacacaaatagaa

SEQ ID NO: 213457 - DNA, 532 bp, Glycine max
agcttgtgggactatggggtacccgtcatatgtggtactaggtggcgatcgggtgatggtacaaatcaactcttccacatccacaaatcaaacatgaacccaccatccccagttgcccaccttcaactgagctcacgtactcctacgtagcccttatcctcgttcctctcagcaccgggtccccatcaacccctccaaactttcacaatatccaagcaattcaatttccaaatatcatgaactaccctaaaccaagaaagcagggcagaagcagaaaactctgcccaaaacacattcacatattacaactttccttactcaaataccccagtaacattcccttcattctgattcgttaaccgccggatcaacttgaaagttttactgggggtttcgtagtacataaatcttcattttgaccgctgggatttgctagaaaatgtccagaacccaatatgcactaccttttccctaaccagcaatgcacaagcatttttctgcacataaacaaaatttttgttgccaaaaattg

SEQ ID NO: 213458 - DNA, 919 bp, Glycine max
  unsure (1)..(919): unsure at all n locations
cgacagacaacacgacancggcacaacgaagacccacacctactgcgcataacacaactcctccccccacttacagcacacacgggaattgaacatcgtgaacagccgagacnaagaaaaccgccggaagccaccacaacaacaacccaccacgaggcccgctcttttagccacgaacagcaaaggtaaagaggggcggggcacggaacgacgagaacaacaaacggacgcaatggccgagaggaaccgaaaatggggagaccaaagacgtccacgaacaacgcaaccagagggacgccaagcaggggctcccaaaaagccaaagacccagggagacagacaggcccagcaaccaaacgggaaccacaccagagcccaccccggggcagagggaaaaccccaaaacacactacggggcaacaaaaattgacgcgggaaggggacccatccaacaggaacccaagcaacgacaaaacgggacacagaggcgccaaaaagaacacccccacgagggggccggaaaaaaaacaaccaaccagaacgagtcgccctgaaaaacgggcgcgaaacgagcaacggggaaacaccccggagaagaaccacatgagcaaacccgcgaccacccccggaaaaagaccccagaaccgccacaagaggcccgcagcaaacgggcccaggacagacgcccaacccaaaaccgcggaaaagacgccgacaaaagccccggcgggaagcgacgcacgcgccggagaaacaggggctgcgacgcaccacatcaaaagccagcaacagcccgcgcaccaacacgaccaaccacacaaccgcaccaatgagcccgcaaggagacgaagacgaccacgatcgagcacccaggacacggcaacaaagcagaagccgccgagacagcgccagacacgcc

SEQ ID NO: 213459 - DNA, 481 bp, Glycine max
  unsure (1)..(481): unsure at all n locations
agctttttggagtagaaacatgggaccaactcattttatttcananaaaaaaaaaaaaaagaaaaaaaaaaaggtcgtatccagtcaaggtctgaaagaccatacaagtttcctaacgatttctaattatgtgggccattaagtctatcatatgctgacaatagccgagaagcccatgaatcttttcgggggtggagtaggtgtctgccatcgccttggcctttgctaacaatcggggaagttcttgactcccattcaaggtaagagcaaaccgatccatccacatggttgcctcttggtgtaaagagtcgatcacccttcctctagcctctttttccgcatatacttgaacatactcatccgcgattctatgctcgtgggccgtggctaaaactaactctttttcggacttggcgatgatagctaacatgttggtctctgtctcgcataaacgctgagacaaacttttttggaccctgaa

SEQ ID NO: 213460 - DNA, 570 bp, Glycine max
agcttatatagaagctttacaacagattttataatgacccactaacctagaattaaaataacttaatcccattaacctagggaattaaaaaaaacttaatggctgagtgtaactgaaattgtggcaaccaaaagtcacccccaacagccaacaagtcagccaccatttggtctcccaaaaggctgatgcctaggttgtcaattgggcccttattacaacttgaactaaacctactaaaccccttttagttgattaacccaaaacatatttttggtcagccaactttacaaggattgggccattatttagacaaactaaacactctaaaattgagacaaagtggtgccatttagtcctcctccatttgggccatgatacaactcacaaccttgaacttttctccttgaaacttgggcttgtattcaaatagtatggacagcacttgttgaagagcttccttggctttccttgctctagcccttgtcataggccctccaagtccttcaagtggatccttgcccttgctcttggtcatgtcctcatcacttataccttgagaaaactcatttt

SEQ ID NO: 213461 - DNA, 894 bp, Glycine max
  unsure (1)..(894): unsure at all n locations
gacatctaacgcaacnacacccacacctaccgcacatttatcgtctcagatgagcactcaacccataccccacccccccgcctatgtgacaccttngaacagcgcacgaacanaganaacccgaccgcatgcaagccatctgaaaagaacatgaaactcaaccatttttataaggcccagaaggcctataaataccggagtcagatttcaaaatgcaagagagacaaactccacgaaaacttgacagaaaaattcttgcacaacaacccccgagcgaacgcgtgcacaactagcgaaagtggaaacccaaaccccagaatgcagtacccactcgcaaagagagaagtatttatgaacccaccagaaagccaagtggaatcaaaagaccacctgacatatgaagggtgacgaaactgaacgcaacggacacggattccctgggtgttcataagccataaaacggatttgtataaacatggcggaaaagcataaacgggctgcttgaggacgaaaaataggcacgagaaggggccgaaccagcaaaagacgaacatgaattggtccaatccccttatcccagccacgccagggcaaccaatactgtcttgcaggtaaaaagaacatggcaaaatcgaacggcccttgcacatcctctgcagccaaacccaatctttaaaaaagggggataaaaattgctcagcggcgaaagtaaaacataaacccaccctcccctcctaagtattgaggccacatgtcccacaatacgcaacggcccaatcaccccaatggaaaagaccaacctggcgaagggcccaaacaaagccaccaagcgcaatccataaggcgacaagggctaccaagacaaaccagcctcagaccgggcaaataaaaacg

SEQ ID NO: 213462 - DNA, 483 bp, Glycine max
agctttgacttgagtcatcaagagactataaatatgtgaccatggcatgagtttcaaaaaaaaaaaaaacaatcaatcatctttgaatcatctatcttttacatcatcttctttcaacatccttcaatcaatctttcaacatctcttaatattttcttttatctctttcaacactttcaacagaactttctaattgatttctcttcatctttctaaaagtttttggtcaacactgtcccttccaagaaaagttctttgataaaaaacttatgttattcatcttgatgtaagctccatttgagcttgtaggcccaggatcttcttcataaatggattcctttgcttcttggtagatgaatggcagcaaaatggagaaggaagggagagaggagacgccacttcaaggagaagatgagtctagaagaagctcaccaccataggaggccatggataagagcttggaggaagaaagagatgaatgaa

SEQ ID NO: 213463 - DNA, 405 bp, Glycine max
agcttgtagcaaatgcaaacggcaataacgttttactcggatgttcgattgagtcacgtaatacatcgaaacgctcgaaattgaaaacagaagctctgtgcaaattcaaacgacaatacattttaactcggatgtccgattgagtcccgtaatatatcaagacactcgaaattgagaataaaagctctgaacaaattcaaacgacaataactttttactcggatgtccgattgagtccagtaatatatctagacactcgaaattgagaatagaagagctgagcaaattcaaacgacaataactttttactcggatgtccgatggagtcccgagcgtttcgatatattatgcgcctaaattggacatccggagttataggtatgacaattttaattgctccaaagc

SEQ ID NO: 213464 - DNA, 562 bp, Glycine max
agctttagtcaaacagaataatccgaaaatgtcaaagaattgggtgttgaaaaagcataacaacactttctgtgattggtttaaagatacaatctttgcagatgagaatgcttcaaaaagattaagaaagctagcagatgggcctaaaagaaatgttataatctggcaaggatacgacataaacaggtattcattttacacaaaagcacaagatgacaaaagtacaatgcagaacagcggggtcaccctaagggctgaatctcaacactttgcaagtgtcaatgatgccaatccctatgtagcttccatccattactttgggttcattgatgaaattcgggagcttaattatgtgaaatttacagtatgtgttttcaaatgtaaatgggttgacagcaacaccggtgtgcacaccgatgatataggatttacgctggtagatctaaagaaacttggttaccacaatgaccctttcatcatggcaaaacaagcttgacaagtattttacgtgcaagacccttgtgatgaaaggtggtgcgtggttctacaaggcaaaacagtt

SEQ ID NO: 213465 - DNA, 581 bp, Glycine max
agcttattgaacgtgatgatgtgctatcctgtttgtagagtaatacttagcaaactcttgattattcatattttttttagcttgaaggctatagagaaagccatagttagctctgatcttggtatgactccaaataatgatggagaattgatacgactgagcatcccacagttgacatctgataggaggaaggtattctccagttccattgatgctgcagtgtctaagtttattttttctctgtcaattacattcttgttctcattgactgaaagtaatattcttaattggttttcatttcttatttaactattaacaaaatcgcatagaatcacctcttctacagtcatgacccatgagaaaactgatctctacagtgacttaatatgttgtttgccatgattccaatagttttagttatcaatttattttgtttatgagattgtaccgttttatataaaggtcctatatgcataaattttaatgaatatttgaaggtctaaatgaatatgttgatttcttgaaggcatctgaataacttaaggtctgtttggtttttttccccaaagaaaagtgttttt

SEQ ID NO: 213466 - DNA, 434 bp, Glycine max
atttagtctctgttattgtaaccagtttgcatattaatccctgacttaaattttaattcaaaatagttcctaactttacataatttttacaaaatagtccttgtcgttaaattcccaagtgatggtgttagtgagttgcataagtggcaattcaatgccatgtaaactgtccaacgtggcactgaagtctgcatttataaatcctctctcacgcaaggttgcttcttcttttccccaaataaattagggtttacgaagctgctggtttctcacgctgagtcgcttcttcttcttctcccctgacactcagttgcttcttcttgtctcatctgtatctaccctttgcttgttgttgttcaattgatttctccatgtctgcaagtggcaattgttgcacattttttgggagtttcattcggcaatgccaccatgga

SEQ ID NO: 213467 - DNA, 489 bp, Glycine max
agcttatagttccagcaacgacaaaagctaattaagatagcaccaatattgctggaatggatagtttcaatatttttcatatgtaatcctttatgtagatgttggggtgaatgcacactaagatggaagagactcgctaatatgcccaacgttcctactgcaatataatgagaagctatactgaaacaaaaagataaaaaccttccacgcctcacacagatttactgattgtatccttctggtcaatccataaggatccactactacaaaagcaattatttaagtcacgagacctacgacggttgtgcaaaaccgccttaatataaggcacagtggcaattttgtaattaaggggagaaattttattttttaagtcgcacgttctaaggcggttacgaataaccgacttagaatgagttgttattgtaagacaacgacggtcttacggtaagcccgtcgttgttcctcacctggcccgtacttgacttt

SEQ ID NO: 213468 - DNA, 611 bp, Glycine max
  unsure (1)..(611): unsure at all n locations
agcttctcctccaattttctataaatagggggagaagtgaagtanaaaagggttcagcctctttggcacttctctctctttcgaatttgcttaggaaaattgtttccgtgaagaaaatccaagccgaggcgcttccgtaacgtttccgtgagtgatttcgcgaaggttttcgaccgttcttcgacgttcttcattcgttcttcatcgttcttcagtcttcaaccggtaagtacctcaaaccaagcttttcaattcattctatgtacccgtggtggtccacagctggtttcatgtattttttttctcgtttcattcactttttatacccccttttgacgtgcttaagccattttatttaagtcatttctcgcttaacctaaaaataaaataaatttccaccgatcgtttgaattgtattatccgttaactttggttgaaatgaattccgaccgatcggtcgtgcccgaaccatgttggaaacccaaatagaggtgaattatactttattatttaaaaataaaaaagatccccctttagtaaataaagcgaaaatcaattggacgttttctctttgggatttctcattcttaatcgaattgcctaattaccta

SEQ ID NO: 213469 - DNA, 909 bp, Glycine max
  unsure (1)..(909): unsure at all n locations
gagagttaatatgtgttatatcttgattataatataaaaaataattataaattattttttcttatnataganntgggggtttgtgactcttgtggaacgcgaaattaaaaaaatgtagatggaagttggtttagggaataacngggtatattttataagagaagaagaagaagaaggtgaataaaagtaaaaaatttggaaaattttaaggaaaaagtaaggaaaagtttaggaagcgcctagggttaaattttatttaaggaaaaaattttttaaataaatttgaaaaagaaaaaaatggctaaagagctgaaaactttttttttataattcctcccctattaataggaaaaaatgggagatgattggcgtccagatttgcaaaagaaaaagggtgctttcttcaaaaaaaaaagacttttggaggaaatttttggaaggggcaaaagggcctggatgttattttgacccccaatttaataaataaaacacctgggttttttttggggaatgtttttttggtaaaggtacggagaaattacgaatatttataacgaaaattgggtttatattttgaaatggatagagaaacgttgtggataaaaataaaaaaaagcttttttgatttagaaaatggtatgggaagatttattaattatggaaaagaaagggtgcatttttatatacggggggggaaaggaaaattataagggatggggagaacaaaaaatttatatttaggtgtataggacgtgaacggaaatgtaaaaaaatgttttaaaggatggggggcaagctaatgttaaagggggattataaaaagttatcatgtaatttaagacaaatggtacatggaagaaaataaagggatggaggattaaagattattaataaaataagtaatattga

SEQ ID NO: 213470 - DNA, 964 bp, Glycine max
gaaaccacgaggaatagacaacgaacctgcgcgccatggacaggaaacccacttaaatcacaatacatcaaaaagccaagagggagtgtgacatcctagaacaccccggaaataaaaataacccgaggaagaaacattttgcgaaaagaaaaaacgatctttttacggagcagagaggaaaaaacacgcgggaaaagaaggagcaacagaactcgcaaaacggaaaaagagccaacaaaggaaagcgcgcggacgcaaaaatcacaaaagaagcggtaaacgagcggggaaaggggggacatcagaggccaaggagaacagacgcaaaggggaacagggaagacggggaaaagtaaaaccgcagcgacacgacagaggcagggagacggaaaggcccaaaagacaagggggggataaggaaagacgaaggggacagcaacagcgaagacgataagacggtgcaggaaccccgcggaggcaagaggaggggaaacgatggacaaagaggaaacggcccccgcacgcccggtggagacgcgaacagaaaaaccagaggaaggcgaacaggcaaaagaagcacaacccacggagagcggacagaaacgcgaggaacgaccacgggacaaggaggcaaaaacgaagaacggaacaacgagagcacacgacggcaaaaacaagacagccggcgggccagacggggagaaagaccggaagcacgacgggagaaaacagccaaccgcaggagaaaaaccgaaaggaacacaggggcggacgcgggagagagagaacaagaaaccgggaccggcgaatgagtgtgagaaacacacgacaagaggaaaccagacgagagcggacgaggagcaagagcctgagaacaagcggcacggacagctaggaacgcaagaaatacgaggtaacaacgagcgacacgccagcacaaggaaaaggcggacgctcgccgacg

SEQ ID NO: 213471 - DNA, 905 bp, Glycine max
  unsure (1)..(905): unsure at all n locations
ttcctagagtaccatttcacacacatctcctactctacaccttctcttcttgcctgctaacacccccccgcattgaaatgatacctcaccncccgggataccttagaactcacctgcagcatgcaaccttaagaactccttggaaggtaaagtatttctgcgttaagaaaaccataaatggtagcaccctcattatctatttaaacagcctgaaaccccggtatggctgaacaataattgccatataacggtaactttttctttcatcttaaaattaatcgggaaccattggccttaagaaaattattttttctaaaacaccttcttcaaaaaaccttgccatggcaaaaaacaaatcgcccccttccattaaatggtttttctttaaaacacactgaaaaattgaaacctgcatgttccttttactattcaagaagccaaccatttctatattaaaattgaccactaaaaccttctttatggccccacttattttggatgggggaaaaatgccttccccaattgtgcaatatctctgggtaagattcccgccccacttactttcctgagcacccagggcctctgtgaccacccctgaggcaaatctcatggagtaaattcatgtcttagcgaagtctctacacaacgctcgggtattggcgctccccggaaaactggaacggaaagaaattcaaatatctcttctaataaaatcgcaggcgtacatacccccacaaaaccccgctaatatggatccgcgtcgtagcgatacccaaacggaatcttcttcctaatctcactcccaaccatatcaccaacataatcctgtacaaccgacaccattcctgtaataccccgtacaccacaaatgcttctacaacctccataacaccacctcctctccc

SEQ ID NO: 213472 - DNA, 356 bp, Glycine max
gctcagctaacattgatgaaatagaagcaatttataatttctaataaaatattttattttaaaaataaactttgatataattaagaacatatattctctgtacacaagtttgtcagggcgggctgacttattttatgagaatatatgtaggtaaattattacttaaatgcatctattaagcataaaatgcatgactcactaaaattaataatgtataataaattgcaagcgatcaaaagacatattaagaaaagagtcctgctcttgttcatcagaaagataatgtctaaattatgagaatggatccactcaagttacattttcactagatgatatcgtaaaccattcagtaatta

SEQ ID NO: 213473 - DNA, 570 bp, Glycine max
agcttgtgcagcaatcttgaaaatatatatatcatatcttcccatattccttaaaactctaaacgtcagatcctgtggatcacttcagagtctaccaagagcttcccgtgtcacttgaaactctaaatgccagacaatgcatatcattgaagactgtattggttccttcaacgactgctgaacaattaaaggaaaacagaaaacaagttttgttattgaattgcttgaacttggatgaacatactctggtcgctattgggttgaaggcgcaaatcaacgtgatgaaatttgcaaaccacattctgtctactccaagtcaaaatcatgttgaaaattgcagtgattatcatcttaaggattgtacttatcaatgtgtttacctgtatccaggatgtattgttccagagtggttggaatataagacaacaaatgatcatataaatattgatccctcttctgttccgcctttccccatcctcggatatattttctgctttgtctttggtgggaaccaatatccaagcatgtctgtaagatgtaatatttgcatcactatatctataggtgatg

SEQ ID NO: 213474 - DNA, 508 bp, Glycine max
agcttctatataagctgaaccattttatcaatatatcacaagttgagttttattcagaaaattagagtttatctcttttatcttagtgagagtgattctcctaaattcttgagtgattcaagaacaccttggctgtatcaaaggactttcacaacctttgtgtgttgccctcgctggaaagagagattctttccttcctttcatcatcacccttgttctttcaaaccacaattccagaaaatccacctctgcccagaattatctcgtggccataactcccattttacgcactcaaattaagtgattcttgagcctaaattgaatttcaaaacgagacctttcacctcgttttggaatcacctcatttggagccctgtagcttcagttattgccatttctatatttctgtccagccaccacttaacctacgttttaccatcccattcatccattttatgccaagaacccccttattaagacccaccaaattagccaccttatttttcat

SEQ ID NO: 213475 - DNA, 177 bp, Glycine max
gtaaccatgtaatttcacttgcagctgcagccatggcacggtatttagcttcaacactggatctagcaactgcattttacttcttgcttctccatgaaatcaagtcacctccaacaagaacacattagccagaggtagatcttttatctgatgatgatcctgcccaattagcattag

SEQ ID NO: 213476 - DNA, 413 bp, Glycine max
agcttgtcggggaagagagaagaaagaacttttgcggaagagacacagtgaaaaagagagaatgcttcccaaagaggaaaaaaaatgctttctattatcttaaaagaagggcaaaaatgacctttcattgaattactgggtgcaccaacaatattgctgggtgcacctagcatatcccaataaacacttacattattcgcactgttcgatgggggactcggacatcctttctctaccaatgtggtctgcttgttacttcttttaataacatttgttacttacctttcacttatttaaatttattttaaaaataaaaaaaaggttcatgccaattatctaaggtcggggagaaataaaaatttattatggtttaaatatcgagaatccgaacccccccatattaaaaataaaaa

SEQ ID NO: 213477 - DNA, 476 bp, Glycine max
agctttgttctttttataaaatgagaagttctttactcatcatgttatctaaaaaaccttggggtggatccaagtgctccgatgatccatttgcatactcatgttttggtggcatactcaccgttgtttatttctttgggaatttcatcataactaagaaaacaccaaggcacccctataacactcgatccagaaaaatggataatgaagagggcgtgcaggaacagatgaaggccgatctatcggccttaaaagatcaaatggcttccatctcggaggtcatgttaaaactccagaaaaccatagaggataaagccacggcaaccgcctccagtacagttagggaagcggagccggtgctgcagcccgccttgaatctgggcctagacagaaatacggccgtgttcggtcgaaggtataatccgcaagcttatccttatggcctgcctctaaacttcaccccccgtgccaccccc

SEQ ID NO: 213478 - DNA, 552 bp, Glycine max
agcttgtggtgtctcagcattataatagtctttcttttgacactttatatgagttggccaagtgtttgaacactgatatggtgcctctgatagttaactggctaccaaaagttcttgcttttgctcttcatcaaactgatgaccagcagttaatttttgccgtgcagttttaccatgcacagactggttctgacaagcaggaaatatttgcggctgctttacctgctcttctagatgaacttgtatgctttacagattgtggggattcagaagagataaatagaaggtaatttgtgtagatttctggaacttgattttaatttgattcctgagtggaaaactttcacacctggatattaatttttggaattcacgtgtttgtcttggaaactatgttgctggcacctcagatttagctatattaatgattatatacgtaatttgtttttatttattcactcatcattgattaacagaatttgatttggttactggccattggataaccaatatatttgaatctcacatttctttctttcatgggacttgtat

SEQ ID NO: 213479 - DNA, 591 bp, Glycine max
  unsure (1)..(591): unsure at all n locations
agcttcccgaactcttcgatgaccgaaatggtctcgacggcggtgtcgctgaccgaaacgcttcttaagaaggagagcttgcgcaaaacggcgtcgtcgtcggtgtagttggaatcttcggcggagagggaaaagagagttccggagtgagttccaacgtagaaaagagtcgtatggtgtcgtttcgagtgggcgattgcgagggatcgaatggagctggcgcgtgagtgggccgtgaggtcgaactgcgcgtggggctccagcaccacgcggctcatgctcatgctaatgctgctgctgctttcaaccttcgccattttgcgaatcgacgctctgcgactcgaaaagttctaccttctcattctcgcaggttcttctcgaaacccaattgagcctcaacgctcaacgcgtgcgtgcgattaagcaagcttggcttgcaccttcctgcacttgaactctgcttcactcaacttctgggagaaagaaggagaacagngcactttttttcttttgtttttcttgggaaaaactaatcttttctgaaaggtgacaaaatgatccctctttcattgtgaattaaaattttttcaa

SEQ ID NO: 213480 - DNA, 493 bp, Glycine max
agcttccattaccgcaaccatctatctaggtttgtaagttaataggaattttatttggattctaagtttgttgttccataaattactattattgttcataaaaaatatgtgcattgtgagtgaaccctaatttcccgtttgagattccataccatgattaatacggatagtttggattagttgtggtatggattcttgaattgtccgttcggacagtttgggaactctcttttttttacttcattcatagtgttagtgtttagctctactgagctttaaaagattggctaagattttgttaaaacataagcacttagacaatgaaggaaagctggagttgctgcacatgatgtccaacgttatgtcaaggaatgagatcgggctgcacaatgtacaaggcaagataaaatgtcaaatgaagaattgaagttgcacgatccacgatgtcggataacatgtcctgacatcctgccccgagaatactggagttgct

SEQ ID NO: 213481 - DNA, 528 bp, Glycine max
agcttccaccaccacttcacaacctctttattattcagttcacacccgtgaccccaaaaaaggctcggagatacacgccacagtgtcaccgaggtctttgcctacccaggtggttgctccatatagatccactaatcactcacacatggatagtgtgcctctcatagccatcactggtcaagttccgctgaaaatgataggcattggtcctgttctcatggatattcatgaaatccaatggaagcatgaagaaattgagcataagcagaaaagagttccgtgaggaagaaaaaagagaatttgggatacaaaatcaactttgattcaatgaattattgcttttatgtagtttaattgttgggtcaagcctttatttttataagaggaagtttgttacaaggtctacttactactaacaattattacttactaccaactacttttttaccataattgattctttaatgatggacttctaacatgactaataagtttttatctataaaaaagattctaaagaatcttttt

SEQ ID NO: 213482 - DNA, 578 bp, Glycine max
agcttgccacccagctcgcccaaatgatctatgttgcttcctccagaaggcaccacaatgatgcttgttttgcacaacaatgctctttttgacttccaaaatgttgcgaaactttacggattgcgcaacaatgcttgttaaacatttcataatgttactgaactttatggattgcacaacaattcttgttaaacattttgaggcggtcaagagaaggtcgtatgccaacaaataatgtccccttgacgaaattagggtatgacagtcgcccctctttacttatcttttattggagataaaagtgaagtaaagataagacactaatttcgttcgagaggaacatgatttggccgatcaatatccctacccgcggaacctgtcattcaaaaagaaaagccaacgcatcacgagcgttagcaaaacttcagtgccttgaaagcgaaaaaaagggataatcacaacgttttcacacactatcaaacttccctgcctaacaaaaaaaaatctcgtgcgtcgccgggcttgattgtctccggatgacgaaaagtaaaaccctggcaaaatttcaaaataatcag

SEQ ID NO: 213483 - DNA, 429 bp, Glycine max
agcttccaccagcatctcactttgggtttactgacaaagccttgaaagaaactccatccaagtttgagtttggtgaacaaggatctgcaaatctgtttttaaagagcttaaaaactgcttacttaataactttgggtttatcatacccaacctccatttatatacatcccccttagagtattcctccttctacttgagttgatgattttatgaaaataagcagggttactatctccctgtttaagccatttgcaccttgatttctgacgcagcatagattcttggagaagagattgctcccataattcagactgtagattcttaagctcttggacctgctgatcagtgggttggcctatgaaagaaatctccaaatcattcagcttttgctggattgacttcaccttgctgaactgatccccactcttt

SEQ ID NO: 213484 - DNA, 561 bp, Glycine max
agcttctagccttcaactaagtaaaatacatgctagatgcatcaaactccaactattgtgttgtaggtgccataaaatgcgaaaaataatccagacaataatacaatagaatccaaggctttttgccagatgggtagagaagagccaaataactttaagtgaaatgtggctggcataacaaatgagagcattgcacataaggtgctccctacaaatgaggcaaatacagaaaattctggcacaaatgaagctatgactgccaatccaaccaccacaatcgcccggctaacgtatatgcacatattttctagtcccattgaatcattattgtttctgaggatgattttgagtttcccttccacaatctcattaattgggtgaaacatgactgggagtgtgaatgcaagccccacacataatcctacctgtcaaatgtagcaaaaacttgaagataatggaattctggcaaaataaacgtagtattctgcaaagtgtactatcctagtagacatggctaaggacaaagtaaaatacaccccaacatatattatgcagtgcaca

SEQ ID NO: 213485 - DNA, 591 bp, Glycine max
agcttcggggttcatgaaaacttgtgttttactgataaagacaaccttatcaaccaagctgattaaattttgattaaactgttttacacttgaacaggaaaaggttggaagcagtcttgcaattgaaatgtgggagaccaaggaaacggagctaaaatgctaattgtagcattaacttactggaacaaatcttaacaaagagatcagaataattcacctctattgttgaattgggagggatttcttggactcctttgcttccataggcaagttcaggaggaacaattaacagccgctgcagaaaacttactaaattactgcttgatgaagcatatgatccaacctaaaatctaaacaattttaacccctctcaagtaaaactacttacacacatactataatagcttctgagcttaaaaaatttagtgagatgtcaagaactcacccaacttgtaattttataatcttagaggtataaatattttaaaatataaaattcttgaatacttatttggcaataaaatatacaaagattaagcaaaaacaaacataatctttagtaatataaaattcaattcattgtagttgttc

SEQ ID NO: 213486 - DNA, 496 bp, Glycine max
agctttcaacaaatgtcttcacaaataatcatcacacagcagaaccctagcaagattacccatcatatctcccaaaaccccatacccacgaaatttaagagagaaagaagtccacccaaacctgaattttcgaagtcccactcgtagccacgcacttcacgactccgggaatgccctccttttgcgatttggagcggaaatgagcaccaaaggttggagctttgttgggcaacaatggtggatgggagaaaagaagaagaaggctgcgtgagagagagggagagctgtctgaaattttgtggggctgagtgaagagagagagagagttgctttttggtcttaaataaaaggctttccctttttccattattttattcaagctctgccacatgtccctatttgagtggagcaagaagggcccactttctctttttgactgtgacccatactcagtcacaaaagggagaaaaatctgacctttgaacgctaaatcctg

SEQ ID NO: 213487 - DNA, 545 bp, Glycine max
agcttgtcaaaaagggaagcaagttagaaactcttttcaaagcaagaacattgtttctacttcgaaaccccttgaactacttcacactgatttatttggtccctctaaaactatgagtttgggttgtaattactatggcttagttatagtagatgattactcaacgttcacatggactttgtttttgaaaacaaaaaatgaagcttttgatgcttttcgcaaacttgccaaggtgattcaaaatgaaataggtcttaacattgtttcacttagaagtgatcatgaaggtgaatttcaaaatgagtcttttgaaatattttgtgaagaaaatggaatttaccacaatttttctgccccaagaacaccccaacaaaatggtgttgtggagaggagaaatatatcccttgaagaaggtgccagaacccttctaaatgaaacaaagttaccctagtacttttgggctgatgctgtacatactatttggtacaccttgaacagagtacttattagacctattttggagaaaactccttatgaattgtata

SEQ ID NO: 213488 - DNA, 527 bp, Glycine max
  unsure (1)..(527): unsure at all n locations
agcttcatcctcagatccctcttgttggactatgctgaatttanacagccctcataggtttagactaacttaaactaagctttgtcctcagatccctcttgttggactagactcagcttaaatagcttacgaaagtttagactaatttggcctaagctttttcctcatatccctcttgttggactagacttagaccaaatagcattattgtaacaacatatttaaaaccaaaacttaatccgcagatccctcatttaagactaagtttcaatcctgcttcaatcaagttctaaggcaacagtacatttcccaatgctaaagtcacctaactatgcatacaaatgggtgatcagacccagagcatacatgatttaagcactgaaagaagcattgaacacatgaaacacaatcaattagatattaaagtaattacatcaatcgttctttagaaatcccccacaaggggtgtttagccagccattacaaaaaaaccctaacaataatgagattaagagtagagattaact

SEQ ID NO: 213489 - DNA, 496 bp, Glycine max
cttaaaggaagtgaacaaatagtatttgtctaaatgtctctgattgatcggcatatctggtccccaaatcttggaaaactgccaagaccccggtaccttcagcataccttgtattatagggaacaggaagtttgacaatgccatgctaaatttaggagcttctgttaatattatgcctctggctatttttaattctctatctctaagtcctctgcagtcaactgatggggggattcatttagctaatagaagtgccgcctatcctgctggttgtaaaaaagatgtcttatttagagatggtgagctgattctgcctcttgaattttatattctgaatatggaggagggattttttaaaggatcagttcctatcattctaagcagaccttttattaaaactgctacaactaagatcgacgtatatgcccgcacactatctatggagtttggtgatacaactgttcatttaatattcttgatgctatgaaacacccat

SEQ ID NO: 213490 - DNA, 647 bp, Glycine max
cttcgaaagttgcccaaactccctctccatttctgatattaagcttaaataggtggccttgttggtgcttgtgcgcttagcacaactttggctcgcttagcgcgcattagtgaatttcggcttagcgctcgtcttgtcgctcagcggatggactcaagcagtgcgcttagcgggattagcccttgcttagcgaacatgcacaactcatccttcttccagattcttcctcgcgctcaaccaaggaatgttgtgctcagcgaatggctcactaagccaaaagattggcttagcgagcggatgaaaatcagcacttcacaaatatggctaattaacctgaaattgagaggaaatgattattaaacacacaaaaagggagtactaagtatttattacctatctttaacaaaaagtaattacaacactacaaaattaccataaattggaggagtttgatacaatttacacaagttttataaacaaaagttagttgtattcatcgactaacaatatacttaaatgaagggaatataatatagaatttagaaaccaggtttatgacaacctttggagtcaaatacccttgtcaaaacataaagggctaaagggtgtttcagattctactaaaaagagacatcattttaaaattc

SEQ ID NO: 213491 - DNA, 213 bp, Glycine max
ctcattatggccccactataataaaaatggtgaaactcaccccaggattgtttataccaaaaacttcttttttataatcctttttggaaataaggtcaggtttcaccctgacaccccataacttgcgatttatttttacaatattgtcggaatttccctgtcttttacttccaatacaataaacagctctcttttttctcttgaaaaactgtc

SEQ ID NO: 213492 - DNA, 1042 bp, Glycine max
cttgtcatcaaactttctctccctcccattccactcctcgtcgcatgtcaagtctattgaatttctacctcccttacaaccacccgcacatttgtgatgcctcttcaaccggcaggatataatcaaccgccggcagcaagctgggaaggaggctccatggacgaatatttatttggcgaaaaattgagaggggggagcccaccttgaaagaagaaaaaaggagaaaaagggaaccttgaaacgtgtcaccaagaccctatttaccaaaggtaccaccagcggtacacatacctttattcatagactaagcaagtttcctgaaaaaccttttcaagaaaacttcccttagaagcacatttgaaaaaaatcccttcagaaaccaaagccttagcctcacccaacccctcgaaataaccaaatccgctacctccctggaaacaacaactcttcgaatatagaacttcctctatagaaggcctcacaagcgtttatactcccaccaccgcactccctcttaataagcatcagccctcaacccctccctgagcaaaaagacaacctggaagcgttaacttatccccctcaccgcctattaatgtaactcaaaatcctccatcgcccccatatctcaacaaaaatgtcatcggaaagaataccatttaagagaaggtccccttctctacaaaagacaaccctccaaacggcccctgggaataccaacggcttaaaccccttttccttctaaaaatggcccaaacaaacaaaggccccacaaaataaggacaaaacccaatttttaaacatcttcaaagaaaggaaaggaatccacacctttgcacccatcgaactccgaaaacaacatccccttaatgcgaaatggagaaacccccgcgtgctctcaatttattaatcctcccgcccacaccatacttcgggagtcattccctataccacacgcaccttgcggggggatgaatggagttctaccagtactacaccaggattttgacttcctcatctcggccgtagccataatcaatcg

SEQ ID NO: 213493 - DNA, 451 bp, Glycine max
agcttgacataatgaaatcgctttttacttttttatataaaattacactaaaaataaaatatatttattaatgtatacttatttgctgttgaaaaagagtattttagcttattataactttaatttttttaaatataccatataaaacatgtgtgtatatattaatatactctataaatattcgctgatttattttttaaaagaaaattttaaaaaggtataatttcatttttttaaatacattcaaaatgtaaattgttcaaattttccttcttttataaaacgagtacatgtgcattacctaatctcaataaaaaaataatatttctttatttaataaataagaaagactaataagagaataccaaagcaaaaattagattttttttcaattggaatttgttattcgaaatgagaatcttctaccaaaagatacacttttttggtactt

SEQ ID NO: 213494 - DNA, 369 bp, Glycine max
agcttacgttgttcaatttcgaccatcttgttttattatgcgcctgaatctgacatccgagttaaaagttatgaccatttcaatttcacgagcgcttacattgctcaatttctagcggctctatatattatgcgcctgaatctgacatgcgagtttaaagttatgaccatttgaatttctcgagagattccgatattcaatttcgagcgtttctatatattatgcgcctgaatctgaccatggagtgaaaacttatgaccatttgaatttctcgagagaatccgttgatcaattacgagcatctcgatatattatgcgcctgaatcgaacctccgagtttgaagtgatgaccatttgaatctctcaaga

SEQ ID NO: 213495 - DNA, 580 bp, Glycine max
agcttggagatatggggtacccatcttatgtggtactaagtggcggtcgggcgatggtgcacaacaaggtttacacatgcacaatgcgcgcataaacccaccatcccctgatgcccacctccaactgaactcacgtactcccacgtagcccatattctcgtttctctacacccgggtccccataaattcttccaagctttcacaacatccaatcaaatcaacattcaaacagcacaagctatcacagcctagctaaacacagccaaggcataaaactctgctcaacacatcaaccaaaattacagcttttctctcttaaggaccacagtaacaattccttcgatccaattcgttaaccgctggatcgactccaataatatactggaagtttatagcgcataaccctacattgggaaccgtgggatcgactagcaaacattcagaactcattctgtactactctgttcacaagctactcacactggccttttttgcaccaagctaacattctggtggacctatgttgacagcaaaagtttgcataagtgcaaaattccaaaaacacacttccctctaatac

SEQ ID NO: 213496 - DNA, 334 bp, Glycine max
agcttgctgctattgcatacttcagaaggaattgaggatcgatatctcattgaccgagtagctacatgtggagtgctcttggaggaccaaaaccatgaggtttgggcaatgattaaattattagtgacattatctgatgttcttgtgatagtttgttgatatgaggaatcattttaagtcattgacgtaattgattagctcataaatgttatagtgtggaactgaatgcacaaaataaccggtgacttggatcgtgagtgtatattataaagttatctggtgaaattaaatttaataattgacaggagtttattatattatatacgaagttata

SEQ ID NO: 213497 - DNA, 578 bp, Glycine max
agctttatgcaagtcaattttcaggaggcatcttagagaggatcttttccgggcatatttgcgcaaaatctcttgaactaggaagatgttgtccatcatctttctgttcttaatgaaagcagtttgagtttccccaataatagtctcaagcactggggctatgcggttggccagaattttagatacaatcttgtataacaaattacagcaagatatgggtctaaaatggttaacctgggaggcctgatcatgcttaggaataagcgcaataatagcatggttgagttgctttagaatttttccagttgtaaagaattcattaaccgctgcaaagatatcatcaccaatgatattccaagccttcttgaagaataaaacattgaaaccatctggcccaggagctttattattatccatcacagaaataacgttccaaacctcttgcttataagtaggacaaagtaaggccacaaagcaatcgatgggaaccttatgacccctgttgcagatcaaaatggatggagtttgggtcagctcatgaacactaaacaaattcctaaagtgattcacaaaagcag

SEQ ID NO: 213498 - DNA, 522 bp, Glycine max
agctttgatggtgtcgagaagaaatcacatgtttgtaatcatcaaaaagggggaaaatgtgaatgtatgtatactttggaaattcaaattcaaaagtcataacccttcaaattataactgtgtaatcgattacacaaacattgtaatcgattaccagtggaaagttttcagaaaatctgccagcagtcacatcttttcattagatttgtgaatggccatcaaaggcctataaataggtgacttgggcacgaattttaaaaagagagttttgcttggcaaaaatgtcttatcctctcaaaagacaatgagagagattctaaaagaacttcattgtcaaatgctctctcaaaagaaatccttgaccaaacacttgcaaaatctataaggattcctacatgatctttattggaatattcttctcttgaagaaagaattcttcttccattcttcttattcaatgagattggttaagagactgtgagtctcttgttgtaaaggattcctgaacacaaaggatgggtt

SEQ ID NO: 213499 - DNA, 701 bp, Glycine max
agcttatttttttaaagtattataaattataatattttgtagtgcttatatattttttttgtacaaattatgtttttatttggtgaactttggtcgacttttatttttagtttaaacttttattcgattaatcttatttctcaaattattttttcatttaatttttaattcctctcatcaaatgtgtccatcatgtgtcaatgaattttaagtatttttatatatttatagaaatttaattcaaaactattaaaaatgtttgacatatctttcgtaatgcattgaaccattttttagccgttaaaaatccttaaaaattcatttcttcttatattttgaggagcatgtgttggtttttttttttaccggactacaccctttttctacaaaatatgtctgatatacactaatttgtgaattttttttcaaactacacttgtttcaagcttttaacgagaattctggttctggcaccccgacttacctattttccttttttttttattaaaaagtttatatgttattaaaattaaattttgtgttatttaaaaatatttttatgggttttaaaataattatttttttaataatttattgcaggatttttttttacttaattttgtattaaaaaaaagatttttttaatttaagcttttttgtatttttattaaataattcaaaaaatttttgggggaattttt

SEQ ID NO: 213500 - DNA, 560 bp, Glycine max
agcttctttataagctgaaccattttatcaattattacaaattgagttttattcagaaaaattagaggttatctcttttatcttagcgagagtgattctcctaagtttttgagtgattcaagaacaccctaactatatcaaaggtctttcacatcctttgtgtgttgccctcgctggaaagagtgattctttccttccaccatttcatcttcaaccttgttctttcaatccacaatttccagaaaatccaattctgcccaaaattatctcgtgaccataactctcgttttactcattcaaattaagttattcttgagcctaaattgaaattcaaaacgagacctttcaactcgttttggaatcacctcatttggagctctgtagcttgagttataaccatttctatatttctggtcagcccccacttaacctacgtttttaccatctcattcagccattttatgcccagatccccctttttaagacccaagacattagtcccctgccccccccttgaatcttgccaatttcccatccttttattaatcaattttttaatt

SEQ ID NO: 213501 - DNA, 422 bp, Glycine max
aagctcccagccgtttctaatcaatattctcattcctcaaaaaggggctttcatgggcttctgtggccttctacaaaagcctggaggatgcacacaaagattcaggttagatgtttgctgccttacttgcctattactccatgtatgcgtgaactcgatttaagtttctgcaatttacttaaaatccctgatgcttatgttgattttccaatgcttaaaagagctatatttaatgggaaacaattttgacacactacccagcctgatggagctttccaaactgtttcctttaaacttacaacactgcaagagattgaaaatatttgcctgagctcccttacaaactgatctgatatggtggaattggacaactgttgaccactatgattatggatttgggattaaatattttccacctgccc

SEQ ID NO: 213502 - DNA, 1278 bp, Glycine max
  unsure (1)..(1278): unsure at all n locations
caggcactacgtgctagtcgatggtactcgactacgtgatactccgtactctctaatagccgttcttcatatctacatgttcacttcattaccccatcgttagtttccacgggtacctttgattgcaatcgctggacccagggcatcctttataggtgcatcactcggcctggctaccctatttgcatcataacacctctccacgatcgagattttattgatcgcattcttactccggcgcactgcgcggcgccatacttgctctctgaactcttggagcatacctgcaccctaacattgatactggcttcaatgagaacagacaggatgcagctctgcccacccggaaatacgtatcgtatgctcacggtgcgataagtattgctgtggactacatgaattgtcgaaacccacctatctgttctcacctcgaatctaactgagcggtacatagaggggactgaaaccatgggtacaacacttggagatagactcaggagcgctgcttcaaagatgactacgcgccaaccgatagagctgcgcgatgcgacgtatcgcgatatgaaatgcgttgcaacgccggtactacaaagtcaatctgaccccgcctagacgcgtggaattcgtgcatccgcagagcggctatcgcaggggccttgtgctggggttacataatcgtccagttacgaatctgctttacgtcacatcatgccgaccgctattgcaatcggtaccgatactcaacgacaataaaagcgctgcgcagacaccctctgcctttcgcatgcgtatcgacaacagacgctagtgcgcccccaccaactctgagctctagatgaggtgtactcactaatgactcgcatcctggctcggcattatacgtaacacttagcccgtagagaaacgtctgagtggcacaaactcctccagatcactcattccacgatcgcgtgatcacatatcgacgatcttcaacgctacanacgtaaattgtgagagatttctcacatactgtcgtgcgagagatacgtatactcaggacgaacngcatactgtgacgctatccgacgcggtatatgatatatcaacactatggtcgtgtgagtcacatgcagatgtatcaatcgcctatatctaatacatctcatgtccgacagtntatagatcaacgtgtgatcgagcatactgtatacgatgattatcccgacgttcgcacactgcgtacatctggagtcggcgacaccctggtactgttcgtcgtcgccatctcggcaggcg

SEQ ID NO: 213503 - DNA, 561 bp, Glycine max
agcttgttgcccaaattgatcagttcactcccccagaatgttctagatgggcccaatgctagttacaccccctagtttgttaattgcaacccctccaaaatgttctagatgggcccaatgctaattacaccctcagtttgatgagtgcacctccctctagaatgttctagatgggcccaatgctagttacacaccctagtttgatgactgcacccacctctagaatgttctagattggcccaaatgggcccaatgctagttacacccttagtttgatgagtgcaaccccctccagaatgttctagatgggcccagtgctagttacacctcctagtttgatgagtgcagccccccattttgtgtttttggcttatttctttccgaaacatcgcgaaactttatggtttacgaggcgacgagtgttaagcctcttaaattggtcagccaaaagtcttgacgttgacaacaattgtccccggatgaaattaaggtatgacaactttcaattaataattgaaattatttatgtttattgcgtgattgaagaaacaaataaatgtg

SEQ ID NO: 213504 - DNA, 515 bp, Glycine max
agcttggttttgggcaataacaccccacctgacgtctccaaggtcttctaacccccgggacatatcttcaggtaccactctgtggtcaacgaataaaagcaggaagattcacccttctacacttcctcatctcaagcttgtaagattatggggtacccatcacatgtggaactaggtggtggtcaggcgatggtgcacaacaagctttccgcattcacaaaatgcgcataaacccaccatcctctgttgcccaccttcaactgagctcacgtactcccacgtagcccatatcctcgattctctcaacaccgggtccccatcaatacctccaagctttcccaacattcaggtaataccacatttcaactacacaaactatcacagccaataaaacagggcaaaggcaaaaaactttgctcaaaacaccaaccaaaaccccagcttttctcacttaaagaccccagcaacaattcctttcgttcaaatagctaacgggtgaatcgaaccaaaaaatt

SEQ ID NO: 213505 - DNA, 513 bp, Glycine max
agcttgagatgaggaagtgttgaaaggtgaaacttcctgcttttattggtgaccacagagtggtacctggagatatgtcgcgggggtcaggagaccttggggacgtcaggtggggtgctattgcccaaaaccaagcttgaccaatcccgacccaacccgggcatagtcggtcagtgagaacctgtgatgtacctaaacaggcgagctcctggcagtcaacagataaaaggaaaacaagaccaccaagcaaggaggcttgtggtggctggccccctgtgaattttgtgtaatatgtggattgtggcctctggtaatcaattaccaagggtgggtaatcgattacaaggcttaaaattgaggacaggaggctaagatggtctctggtaatcgattaccaaggggtgttattcattaccacgctttgaaacccaagtccagaaaacttagggagcctttggtaatccattaccaccctgtgtaatcgattacacacaggaatggggcactggtaat

SEQ ID NO: 213506 - DNA, 480 bp, Glycine max
agcttgagttgtagagatagaagtgacagtgacaaatgtttgtaactttgtgaagttagtagaacttggtcattagccaagaattgagcatagtctcggtgataaagacgaatctgtataaatctttgtgtcttatatgccttatgtttatttcctgttttaaactgacctcaggtttgaatttgatttagtttaaaacacattttgttttgcaattttttttctattgtttgaacttgcttttgtaaaaatctattattagttttacaaagttatatttcagatgataactttattttcacgaaaaaggctttaaaaattctaaaattacaattcaacatttccttcttgtgatatttgcctttacagaatttgagacccatgagtacaaatggattaaaaaagggggaccttatggaaatttataatcattgatacagagtaattcagtatgacaactagtgaatgaattgttaaaaa

SEQ ID NO: 213507 - DNA, 480 bp, Glycine max
agcttgttaagctttttcttaagcttttgctacaacctttttctccccctttggcaacatcaaaaagccaaagatctcggaaataaacacaattataacaatggagtagcaagatataagtatcagagtattaaagacaataagccaaactcataatcaagaaataatcaaaccagaattcaaataactgaaaatgtcaacaaccacaaaacatccaagactgaaatttaaaatccacaagataaataagcaaagtacttagcataataatgtaaattctaagaaactaaaagccaaaatacacggcttataaaagataaataatcagaatctaaaagctaagaagacggaggaggtggtggaagatcgaaactctgacgaatgtatccgacatcctcttcaagctgtgtaagacgaatgtccataccggcaaaacgtgaatctaacgagtcaaagcggtcaccaacattacgaacgaag

SEQ ID NO: 213508 - DNA, 554 bp, Glycine max
agcttttcgttgtctctctgcctgctccttccaaaccgtctttgcaatcgtctatgccactgtagtctcgcccttgtggcttatgtcctttaaaagatatttcccctattgttcttgcgcctccatatgagcttcaatctgatgtagtttgtattgttccagcaagtcaccctatggtgactcgtgctaaagctggtatctacaaacctcgtcactttgcagatataactacttatcggccatcttctcttttacatgcattactcaccacttctgagccaaaaggttttaaatctgctaccaagcatcctggctggcttgctgcaatgaatgaagaactcacgtccttacactccaacaagacttgggaacttgttcttcgaccacctaacactaacattgttggctcccaatgggtatttgttagtcggtgaaaacgactaacttttgtgtataaaacttgtataaattgtatcacactcttccaatttatggttattttggagtgttataaggaatttctattaagtataagtaataaatacttagtattt

SEQ ID NO: 213509 - DNA, 469 bp, Glycine max
agcttggaagcatttggttcagagatagaaactatgccagctgagttcaatgttagacaagtggcctcaaatatcttaagaagggggggttgaattaagatatcacaaactatttccccaattcaaattctatttcactttctattcaagttacaaattccctttataatgaacttcttaaatattgattcaaatagaacaatctgaatataaatataaaacaataataaataaaagagtttaagggaagagaaagtgcaaacttagatttatactggttcggccacacccttgtgcctacgtccagtccccaagcaacccgcttgagagttccactatcttgtaaaatccttttacaagttctaaacacacaaggacaatcattcctttgtgtttagaattcttttacaataagagaccctcggtctcttaatcccttagagaattagaaagagaaaaagaatgaatc

SEQ ID NO: 213510 - DNA, 575 bp, Glycine max
agcttggggaatagcattaactggtaatcttgacacatgcattggtacaacagtactactgtggccacaatgcaacaatcatgtggtactcgtactgacatgacctaacacgctagcaccatggtttcacaagacggcaagatgccaatcgtacttatactttgatgtgagttttcaccatggatagcatctagttgtaatggacaaaagcaaatggcttcagccgttatcaatgttataaaagaataaaagattatgttttgttttgatcaagagtgaaataaaagtgaaagaaacaggagagaaagatccaaatgtataaggatagaaataaagagagaaatagagaaatttgtcttcaattgtttagatgggtacaatattaaaagtgaaaaataacaaacgatatgagtttctatcggttggattgattattaccataataaaaatgaatcttacttgaaaaaattttattttgtttcattaagcaccttataatttattgaacttaagttttgataaaacgctaatataaatttttttatactatcaatttaattaaaaattattttaat

SEQ ID NO: 213511 - DNA, 415 bp, Glycine max
agcttctgcttgttattgtcaatggagaatatttacttgcaacattatgaactttcggagaaacaagcatctagataatcaaggccagctaattcattaacatgaaattggatctttcatttaagttggtttgctgatatgaatgattcttggctttatctgctcttgattactctagcccacaatttcactgtcccatgatcataaactctgcagataaataaaatcaagaccgaggaagataacatacgaatggaaatattagtgagctgtgctgaaactaaacataggtatctttcatggagacaatttcgatttagacgggaccatacgaggacaattgaaccacttaaaaaatgtaaaataggaaggataatatttaagagataaaagatttaaaattataaataaccga

SEQ ID NO: 213512 - DNA, 555 bp, Glycine max
  unsure (1)..(555): unsure at all n locations
agcttgacctctttgataaagagccttaatgttcttcgcatcatatgccaaaacctaccatagttaaagcacattaatgcactgctatataaaacagccaactttcaagcaatgaacttaaaataatagcaaattacaatctaagaccataatccaaatttgcattgttacaaaagcaagacaaaagggagcaactattttcttgcataatacaattacaatgtaattttctttccaatcttctaagctgataaatttcctcataataccactacttaaatattacagttggctattacaattagcatcatatttcaatggtaagagaaaaaggaattacaaatacctcagaaccttcttttatgcattcattatactggcttgtcttcaagtaacaggacatcaagttcagagagcatgccaaaagaagcttctactctggaaagatggtacctctntaatgttttccttagccctaaaatatataaaacgaaattaatgtaatagaacccaaaaaaacagataatttcatcataagtttcaatttctcaaaac

SEQ ID NO: 213513 - DNA, 532 bp, Glycine max
cgttcgggccgttaatcaacttcttttggttgacagggttatcatataatttctgcccattctccggtgatttttcctttattcagggctaaacttccattttttttaatggcaaccaaaaactggattatattaattattctcccgctctgtcacctattggggtataggtggtaattctgttagcctttttgacaacttctaacgccttcttcaaaaagacttgtttaacctgaatcaaactccgccataataacgttgtcgttctcgcgttctaatcttgtcccacgtcaaaaatgggtcttaaaaaccctatcctctttcttttcgttttaacgtcaactttgttcattcaactcctgggttatccggcacaccttcgaaatacgtggtttcacccttttggtaagacaactctttggttttaccaacctccctactacccacacatttttgtggtaactcccgggaataatctgtataaaacttactttgcgaggtatcacaatacttcaccttcacttatatttac

SEQ ID NO: 213514 - DNA, 1588 bp, Glycine max
  unsure (1)..(1588): unsure at all n locations
gagacaacacacgtagtataaccatagtantggcacatactctgcagcgactgtatcattctcgaacgctcttacacgtctcgacgagcacnatntcacatcaactactcnnatacccaaaaagacaccacacgcaagancagatagaaaaacatttggagagaancccgcgagancatctaatcnacataganatacaagccacgcatcggcaagacactgagcagaaaccacatatataccgcgacaaccacttttattctgagactatctgatcgacacacaacagaccgtacacggtaggcaacacgatatagacatacatcatacactcgagtctgcgcccactcacctcnttaccaccgacancaagcaacaccatcggcatgagacaccancactccgcacatgatcagactaatcacaacataggactcaatcgcacagctacacaaaccgatcaacacctatcaccctcatggcaacgagtcacaatacagttctacaccacacgaggaaatcagtcacaacgtcagactcgcttatcacagactactcnaacacagctacaacatcgggcgtacgcacgcgacatcacttatcacacaatacaggtactataaaggccacgaagcgaacagacacatctgccttatcacagtcgtacagagcacactcgcatagcacacacatatcacacagtactcagaatacagacgaccaacaggtatcagctacacggcaatactccaatatcgctgtcgaatacggaaccactcacaatcatacaaccacccataaacgattatcaangcaacaatatccctcataccaaaacgctacgatactctacacatacgaagctcatgccattataacacacaactagcggacatacgcatgacacacacgatctatatatcgcgcgtaatactgaaatcacacgtagctgctgcggacgatcgtaacatactacnacacaactcattcagctcacacaacaacatgtactctcgcacaactacgtgatcagcaacacattantactacgctccgcgactcatcatgacatacaacagacantagtcactctcacaatcgacgcgaacacactctacacacatgtgcgagacatgagaactcctgcatcacacaccgaaacntacgcatccgtcagaaccatctatatgaccatctangatacgttgantagacacacaccatacgaacataactatcgtcntactccacgacggatacataccantcgactgctcgnatatacgactgacgcgccgacatatagcgcataccgcgtcacacatactacgtacgatatattcgacacgcatgatctatcgacgcgcggcaagacgcgcnttcgagtatactctagaatgcacacaacagatgcatngctcatctacngacgactacaacatacactacgcgcataagtgacgaatctcacacntgacgtaatcagccgcagtctacacatcacatccattcanacactacgcacatagcgtagcgcagtgagcgtacgcgctaccaatatcacatatatagancaggagactagcgn

SEQ ID NO: 213515 - DNA, 417 bp, Glycine max
agcttgaaattgcacaacggaagcactcgagatattctaatgggcataacttttcactcggatgtccgattctcgggccataatctccatctaagatggcttcgaaatatgaaacattctggaaagcctctccgagaaaattccgatatgggtcaataaccttttcacacggatgtccaaatttaggacataatatatcgagacactcgaaattgcacaacggaagcactcgagaaatttgaatggtcataacttttcacacggatgtccgaatttgggacataatatatcgagacgctcgaaattgcgccacggaagcccctcagaaattcgaatggtcattaactttttcacacgaatgtttggattccggacataacttatttagacgctcgaaattgacaacggaagctctcg

SEQ ID NO: 213516 - DNA, 966 bp, Glycine max
  unsure (1)..(966): unsure at all n locations
gagagcaccacatagcgaaatcaacacccgtatcagaaaccttcgtttcgccacggacgtaaaacatacatccacgatcggaaagtgtgactcgtggaccacaaacannaataaaacaactggacgcgaaccagctcatacgagcgaagacgcataaaccttttttctattatgggtcacgaacaaacgaaggcgcgggtcatgaaagcaagaaatagactattgtgcaatgcaatcagacgggagcaacaccatcaccagccacgagatatggagcgaagggggaagcgctctcaaagtgcaacagcagagggaaaaccttaaaagttactaaagtgagcaatgaaaaaccatcaagaacatggacaggaaacaacaagggaaccgaacttcataaagaagtcaaaaagacccctcattgaaaagaacaaaaacccgggactcgaacagagccctgaattcagagaaggatatgaatcaactggacacacccatgtcggaaacaaaatgtaaacctatagacccaaccgaaacgaggaaaacaaaactaagtgatcaccggggcaataaaccaaccgaaaaacacttccccgtccgcaaaacatattgacagaaaacaacaggccccggcgccgcacacctcaataaatagaaagcgactacaccacatgaagcgaagccggcctcgtgaataaaagggaacgcggggaatggaccagaagacacccctccacccattgacgaaaaaagaaggggggaaaaaggaagaccttgggacccggaacaaccccaaatggggtaatgcgctggcataaaagaggtactcgcaagggctggcactcaaaaaagagagcctcccgtaagaggacccaacgtaacgggagaaggggctaatccgcagaaaaacttcttctaaacggcaaaggaataccaatggcgcgtgacaaaatatgaaactcggtagcg

SEQ ID NO: 213517 - DNA, 490 bp, Glycine max
agcttcttccaaagctggaaactagtaatcatatttatttttcagctcaacaaaaaactcgttaacttaattggactcaccaaacaacaacaaaaaaaaggcaaaaaaacactattctggaaaattcgatgcaatttttcttaaaattggaaagtcagtcaagactgttaaaaagctaagaggttcccaattattttggtttagtttatctaacattggcaaccttctctgtcatgcacagaagcacggaaaagaacagcctagcttcgagggctaagaacctccataagagagaaggataaggaagaaaacttgcattatttttctactgtcctctattacatactaagcatcccttatatagaggcactagccaagggtgcccctacgaaaacagaatgtgctagaatgcgaaaagaaaataacagaaaagtggaaaatgacaacaatgcagtgctgcacgaatgggaagcaacatgccaacaacata

SEQ ID NO: 213518 - DNA, 626 bp, Glycine max
agcttatagcaaaacaattgaaggaaacaattttgaaaaaaatattatcaagatcgaaacttaagcaggttaagacattttgagtagggtaggacatgcactatatatttcggggcaagtaatggtaaaaagcttttgccttctaaaagtgtgccaatagcaagtaggttcggggataaattttaaaagctacgtaagtgggttatcaagtgctcaactttggaagaactctctctatagcccctttatttcattcaacggtaggtaaaggaattaatcagaggccaggacaccatttagaattatgctaaaaggtcaatagatgaacatgtcaatcaaagaagtctttggcttatgccttatccctgaggaaattatgctcaaggcctttaaagaaattgttttcaaaattaataactgaatggagaactatctaatcaccgagacctttgagtctgcctttgattatgaccttgagtccattatgttgtattttagtattaccatttatctttaagaaatattcgaaaaaaagaaatggggcacggttattaacaggatgactttttgctattatgtctaaattgcaacaagccaaaatgccctttttcacaagtatttttcca

SEQ ID NO: 213519 - DNA, 411 bp, Glycine max
agcttgctaagctcagctactaactttaggatctctgttattactgcatagcttttgtgtgcatgtttaacatacatacactctttcactaacacacgcttacccacacacacccggagtaaaacatattcacacccagagacacatacacacacgcacacacacacactctctcacagaaacagacacccaccctctgactgaaacgcacacatacactgagtcacacacactgtctgaatcccacactcagagaagcacacacacagcaacacacacactgatagaaacactcacacgttcattcactgagaatcacgcgcacacatacctacaaagtcacacactctttcacacacagaaacagtcacacacacaaaccctgaaacacactctcttacgcacacatac

SEQ ID NO: 213520 - DNA, 650 bp, Glycine max
  unsure (1)..(650): unsure at all n locations
agctttctagcttttcattggtgtattttgatcttcttttggggctctaaattatgggagtatgctcaaatatatagggcaattttggtttgttttcttgcttgattaggttgaattaggggtgtgtatgggatggccctaagcctataatgcatttttgaacaatgggacatgccacattgtccccgttctcttgctattgacgcctaaacgcgcgcccaccaagtgttcggtgaaatgcctcaatggcattagcgcgtgacttttgtaaggaaacaacccatggggcattttggtttgtacacattttctttttttggaatatgtattcattcctgaaagaggctagagtaattgccccgcatatatcctaggcctaggaactaaaattttatgcaaaaagaacacaagaggaggtgcatattgggtaaagttaccctttttggccagcaatcggctctgggccacactacaatattttccctacgcctagatgtttangaattttgctcgtcattgaatgtgtaaggtttagactaagtagcaaaataccttttggcaatttacacttttgggtatggatagcaaaaatactggaatgtatgtacatataatttttggtagtcaaaatggctcacaaaaaattattt

SEQ ID NO: 213521 - DNA, 490 bp, Glycine max
agcttctcccctattttgctataaatagggggagaagtgaagaagaaaatcgaagccgaggcgcttccgtaacgtttccgtgagtaattacgcgaagattctcgaccgttcttcaagattcatcgttcgttcttcgttttcttcagtcttcaacgggtaagtacctcaaaccaagcttttcaattcattatatgtacccgtggtggtccacattgtgtttcatgtgtttttattctcgttttcatttactttttatacctccttttgacgtgcttaagccatttatttaagtcattcctcgcttaatctaaaaataaaataaatttccaccgatcgtttgaattgtattatctgataattttggttaaaatgaattccgaccgttcggtcgtgccgtaaccatgttggaaatcaaaaaagaggtaaaataataatataataataaaaaataccttctagtaaagtaaagcgaaaaatcaatcggacgttt

SEQ ID NO: 213522 - DNA, 381 bp, Glycine max
agcttgagatgaggaagtgtagaagggtgaaacttcctgcttttattcgttgaccacagagtggtacctggagatatgtcgcgggggtcaagagaccttggggacgtcaggtggggtgctattgcccaaaaccaagcttgaccaatcccgacccaacccgggcatagtcggtcagtgagaacctgtgatgtacctaaacaggcgagctcttggcagtcaacagataaaaggaacaaagaccacaaagcaaggaggcttgtggtggctggccagctgtgaaacttgattgatatgtgagatatggcctctggtaatcgattaccaagggtgggtaatcgattacaaggcttaaaaatgaacacaggaggctaagatggtctc

SEQ ID NO: 213523 - DNA, 530 bp, Glycine max
agcttgtaaaccaatgctagccaaaaaaacttcgatcgacatttgtaaaaaataaaagcatcggactatgttggtagaaaacaaactcggccgatatttgccaaaaaatgtacttttggccgaggttgacgaaggttatttttagaggaatgctttgaaatcttaaaatttaataaagtattcaatccatattcaaataattggattggatttaaaatccaaaaatctgaatttgaatataaaaccaatccattaaaatggactaaaagtggtttcgatatgatcaatggattatgtattggttttatataactggttttttttttggaaaaaatataaattatattaaacccaaaatggtacaacaataaacggggcataccccgcagctagagaaaattaaaagtctccctaatacaagaagacctatatcaagatgctaaaacaaatgcaacaggtgcgcttgtctatacataagaaacttaatcttgctaataacctctattacagaaaattgataatctttaaaa

SEQ ID NO: 213524 - DNA, 602 bp, Glycine max
agcttcaacatcagaccacttccagggtgctggtactacttcacatggacttgatggggcctatgcaagttgaaagccttggaggaaagaggtatgcctatgttgttgtggatgatttctccagatttacctgggtcaactttatcagagagaaatcagacacctttgaagtattcaaagagttgagtctaagacttcaaagagaaaaagactgtgtcatcaagagaattaggagtgaccatggcagagagtttgaaaacggcaagtttactgaattctgcacatctgaaggcatcactcatgagttctctgcagccatcacaccacaacaaaatggcatagttgaaaggaaaaacaggactttgcaagaagctgccagggtcatgcttcatgccaaagaactttcctataatctctgggctgaagccatgaacacagcatgctatattcacaacagagtcacactttgaagagggactccaaccacactgtatgaaatctggaagggaggaacccactgtcaagcactttcacatttttggaaagtcatgttactttttggcgattgaaaccaaggagaaagatggatcccaaaagtgatg

SEQ ID NO: 213525 - DNA, 444 bp, Glycine max
agcttgttaatcatcttgacaagaaaaatgtttttacacatggacggtttaataaagagtgactaaatcctcactatataatgtgtgtgtatgaaaaataaatttcacactttattattgtagaatttcaaaccaaaagatatagtgcatttaatacatgaaaattaaatttttatcactaaagttgaagtggtttaaatgcaaatggacaattgaattttacgagctagataaagactatttgaatggatacattgaaaattattttgtttcaatttttaatagaacttatttattttagttggtgaaaatcttcactataaatagaaaagagaattagtggagaaaattactttgttcagagaaaagcgtatttgtgtgaatgttatcattttttgtaactattgaatgtggtactaggatttgttgagtaatacacaattt

SEQ ID NO: 213526 - DNA, 470 bp, Glycine max
agcttcttgcgtagccgctcttggtgctcataaaatcccaaaaacaaatccctcttattactagttattttgaattctttagttcctgaatgtacaaccttcaaattgttgctcgttcccctctttgttttctgcaaaaaagaaaatcaatatcaaagaaaacatggatgaagtcctaaggatgccatgtacatgtgtatttcaagaagatatagtatttatattccatcaagcatacattgactgttgattacatgtaatagactttttataacatggttgccccaaatcacaattaaaaagcacaactaccaatctttcggagtcctttggttaatttgtcttgtctccttctgtggtggggttttgtttaataatattatactttttgccttccaaaaaaaacttatgactaatcctcttttcattaatctttattttgatgttattgtataaaagatcatgggttt

SEQ ID NO: 213527 - DNA, 843 bp, Glycine max
cggacatttgttgatgtcttcgcttgaccggcatccttattatacaactgcagcctgccagccttgattttgggggggttatcccatttttttatttttacgcacccggatgttttacaattattttaacccgtatttgaaattctctctctctctgtccacttcttattatggattggaatttattttaccttcactcaaattgaggaaaaaattatcgagtctgattcatttatggccctgtatagatccaatagctttgtactatagaagaatgcattaagaaaccgatgaggggtccatgaaaatgaacttcagacccaaacgcttctacttccatgtcctttattggaatgatagcttttcatagctcataaattatttttgctttaacccatacaactgaagggctccttctttatggcaaaaaatcctgtaccacttcgggaattttattaataaacgcccctgcttaccaaggaattagccttcttttaatcatattttgtacatgcttttccccaaaaaacgcaattactttgaacacctttggaatttcgttcaacaaaataatattctgcttaacctttctgggggaaaacacatgaattccgcctctctatacataaggggattatttaggaacactctcttaaacttccaattgtataaaaacattccatttacttactacaagatctttcattgtggtcttttctccactgcaaaccgtcgtatcggtctcgaaagggtttctatcaaatataactttattcctctaattcaccggtaaatgctactctcaaatttgtgctcctttgcgcaggtacgatctcattttcc

SEQ ID NO: 213528 - DNA, 1306 bp, Glycine max
  unsure (1)..(1306): unsure at all n locations
caggcgcagtgactgataagcagntgaacncgtngctatctactgcncacgatctantcacgctcactcactgctcatnaacaatanntnanacacanantcacgtnactactgactccctncgncacaaaccgctcccacctcgcgcgancacctttgattgtctntctctctcttttccagccgcactccttggaagagctgaaccgtgctgccatgcgcagcctttaaaccaaacacaataaacatcgaaaacgttcttatcttatacgggggcggggacacaaaacatcacacaaactgcttgtgatggccaaataggctctaaaagacatcgacccgtcttgactgaaagatgaccgtcttcaaaaaagcagtcaacaaacgcccatgtaagcacggcgcgcaacaaggacactgggcactcataccggacagagggagacctatactcaaccacgggaaagataattgcctcttccgaaatccacgacaggaaggaccaccagacaacaattgccatggaccagcgggggcgcgcgcccctataaagagacggcaatcactaaagcaccctgcgccaagcgggtcacatggacaggccacatccactacagcaaggcagcccaccccatccaaattagaggggccacaaagacgggaaaacgggggaaagccctcaatgaaccctgcagagaaacacccaggagtgggcgcccgtaccaccggtaacaaggaggccggaacaagacccaacaccgccgggacaccaccccgaggataactacggggctcaccccncggacgcaaccctatagcgaagcttcgcggtgccaccaaaatacggcaccctccatagattgaggaaagaaaaaagcactcgcataacaatagtgacaaccagcgctacgaacccccctgcctaatcaaagaggggcaggcagccgcagactcaacatcgcgcaaanaccctctctgggtgctatactggagaccacaccagagacaacgatatcaatccacgcgggcaccctcactggatggagcgccacttatataacgccgggcatatagacacctcctctacacgtgcttgccgacgagacatagaataacgacgacgggcacacaggcgccaatactntcgcaccactgtgtatgctgagcttacattgaccaacgagagacttctgacgcgaacacctcttctcccnanatcgaaagctctcgcttctggcagcagatatacgacgtatgcgatctctgcatcgcctacatgatacacagcacgcactcgtcactgccc

SEQ ID NO: 213529 - DNA, 502 bp, Glycine max
agcttcatacccacaccggactgtttttttgtctcatattcgaagaaatgaaatttgggatatgtttgtcttttgtttatagtagattctgactaattattataatttggataaacttgtagtgattgatacactattacaatgtttacttttgtacattagtagaatgtttattttgaaaattttctattgtgacagcattatgtagtgacaaaatttaattggatcatactttttgtgaggattaacttaatgggtgaacatttttgattgaatatcatattttggataaagtactgttatattagaaatttcatagcaaccaaaaattatgcttattaatcaatattattgtttattataatgcctgctctaacttatgttagcttccctattttttgaagtttttattgaaatataatgctcgcgacgattaaaaaggaggaatatgacgattacactatattgttccccttaatgaaacaaaattgggggttaaaaa

SEQ ID NO: 213530 - DNA, 370 bp, Glycine max
ttcctgcacctttaaacagacattatggactagtaagagcctctgttgatcagataaggcacggctgatcttctgaatatctaggcccatttacaacttacccttatccatatccaccatgcgactggctgtatacatgaaaggacggtccaaaatcaagggaatgtcagggtccgcttcaatatccataggcactaaatatgggggaaagtaaaatgcttaacccttactagaacatctataataaccccatggggactcgtatgaaacgatctacaagggagtagtgccattttagctggcatgatctccaactctccagttattctacgcttggagatcgacatcaagtttattctggcccccaaat

SEQ ID NO: 213531 - DNA, 578 bp, Glycine max
agcttgccacccagctcgcccaggcgagcaatgttgcttcctccagaagcaacagccttttggaggaaggatctggaaggcccaagtgggccagattgttatttgtaccccccctttttactaaatgcacccccttctatttttttggtaattcttttttcgtaacgttacgaaactttacgaatttcgtaacgatacttattttccttcccaaggttacgaatccttacggattatgtatttactcttttttagctttcaaagaagttacggaaactcatggattgcgcaaaaacacctctttttcatttccgccacattacggaatttcacggatcgcgcaagcttgcttttttttgatttctgagacgtctcgggacttcatttattgtgcaacaaaggacgccaagtatttcaaagcggctaaccaaaggttgcatgtcatcaagtaataatccccggacgaaaattaggtatgacaatatgtaaacaaattgtctcataaagaatagaaaatttttcttactaatttatcttttatctttctctcccctttgtcaacatcaaaaacaaatatg

SEQ ID NO: 213532 - DNA, 533 bp, Glycine max
cttgtgacatactgatgtgatttttgttgtatttattaataataagttttaaataatatattatatttccttgttttatattaggataaatattttatttttatatattaagaaaatattgtatcaacataattaaaaaaaataatattaaatatcaagttatacataaattattattatattacaaaaagaattagtaataagtcactttagtcgatagctggactaattgatcaagattgacaatcaagtcaactaactattttagttgataaccaattcaaaatcaatcgattacggtaatcaatcgggcttgccacattagttgatagcctattaaaattagtgagattgagttaggatttttaagtttgggattatgactcaaaaggttcaaagatatccaaatcatttgcatatatgaggtataactcaaaggagtaattttcactaaatctactaattcatgaccagccacaaatttttactcgccattgaaaaatcatttttacccattctcaactaaccaattt

SEQ ID NO: 213533 - DNA, 494 bp, Glycine max
agcttttcgattcattctatgcacccgtagtggtccacattgtgtttcgtgcatttttattctcattttgtttactttttataccccctgttgacgtgcttaagccgttttacttaagtcatttctcgcttaacttaaaaataaaataaatttccaccgaacgtttgaattatattatccgttaacttcggttaaaataaattccgaccgttcggtcgtgccgtaaccacgttggaaatcaaaaagaggtaaaaaataatataataatcaaaaagacatcttttagtaaaataaagcggaaaatcaatcggacgttttctctttgggatttctcattcttaatcgaattgattaaataactaaagggaaactaaggctaaaatcaactcgcctaatcaagctcgtccacaaaaaatagcttttgaagtttgtcatttcaatttctcactaagtaaaatggatcatttttttaggtcaacgcccttaaatgatca

SEQ ID NO: 213534 - DNA, 629 bp, Glycine max
agcttaagctcctttaactgcacaagactcttaatatttgaagagtatccttgtggaaccttaacccgacaaagacactgacaaaaacttatcttctcctttttggacaaagtatggcaagctggggcaagtaaattttcttcccatcagaccttggatgcaattgtgatcgtatccccatatcagctagatcttgacgggtattcaagccatccttcgtcttgccttgaatgttaaggagcgtcccaatcacactgtcacaaacatttttctccacatgcataacatcaatagaatgtctaacgtctagatcagaccagtacggaagatcaaagaaaatggacctcttcttccatatgcaactattacttttatccttcttttggatctttccaaaaacattattcaggtgttgaacccgctgatatacttgttcaccaatcaacagtattggcgcaatatcatgctcttggattccattaaaagcttttttcagtcgtctgtaaagatgattgggtgttaaaaaacggaaatgcctactgtagactatttttttttcctgttttaattggttgtagcttttggtttcttcacagatgggggatgcatgaagaacctttaacattgta

SEQ ID NO: 213535 - DNA, 584 bp, Glycine max
acctgcagcttcaagcttttccgaagaaaggtcttccttttacacaaattgttcttccgaaagaagttctttcggaaagcgaaaaaagaaattattttttttaatgcaagggcaattttgcccattcatctaattgctgggtgcaccaccaatgttgctgggtacacctatcatgttccaagaaacaaagtatgatgcaactttatatgggcccatcaaaaccatcgtgggcttacaaaagtccaactggccctacactttttttacccgatcacaccccccacagttgaaaatacatacacccctttttctcaatacatcacattcatggttacataaatggatgaatgaggatattaaatttataaaattaattttattattactaattgatttttagtttttgttgtgtatatcatttatattataagagatatccgctggaaaaaaatattaatatttctttaacaaaataaaatgacacttatttgaaatgatttttttcttgccttaaaaatattttgggacgcataagaagaattatattacccttcggcctttttactaataagtgcaaagtaaaa

SEQ ID NO: 213536 - DNA, 554 bp, Glycine max
agcttcgaaagactagtgaaatagtacttggtttgagtggagcctacatagactaagaatacgggtgaaaagcctgtagaggcttacacaataatggtgacggcctatacaggtaagcactcatactagtggaaagctagcagaggttagaaaacaatagtgaaggccatgtataggctagaagaatattgagtagtgaaacctacagaggtttaaaatactggtggtgcctgtaaaggctgaagaagaatcctggaaaggttgaggatgtttgaggagatacagtacattgtatttggtgtctatgttaatgaaaatcatacagttataggaactagagatgcctccaagatttatggatgaactaatataaatttgtgtgtgttgacttggttttctttatgattctcatgcatgtgtttactgcatcttcatcatatcttttgatgtctttatatttaaactgaggtaacatttttacatttaaacaatatttttgaaagaaattttattttattttatttcaaaaacaacatcagtgggggcttttttac

SEQ ID NO: 213537 - DNA, 377 bp, Glycine max
  unsure (1)..(377): unsure at all n locations
gcaagcttatttnattttanaatttatnattaatgtttggttaagnaatttttttatnancgtgttattaaaatgaaaataacaactaactttgaaaaaattactattaattttataatttaaattaaagttaacagataaaaaataattgcataataatttaataaaaaatatagtatggaattttaaattaatctttgttttttatagaaataagctacccatagttaattctagagaaacaaagatcactggtggatcttgtttttttaatacacgatcaactaattaaattaaatttttttaacatatattagtttttggacttttattgaaaataatttcaattaaataattagattattatttgttttagg

SEQ ID NO: 213538 - DNA, 584 bp, Glycine max
agcttgatgattcaacgtttcttctatggcgacaacaagtcgagccaattatcaaatcccaccgtcttcagcaatttgtagctaatccacagattctgctccgcttcctttctaaagaagatcgttaggctggaattgagaatccagcgtatgaatcttgggagaaacaagatcaggtgctcctcacatggcttcaattgaccttttctacattgattttatctcgagtgttataggatgcacacattcctatgaagtttgggagtgcattcatgagtatttttacaaacaaactatcaccacagcaaggcaacttcgcactgaattttgagcaacgactcttgcgggtaagtcaatgcacgagttcctgttgcagatttgcgcaatcgcagattctcttgcctctgttggaagtccaattatgcttcaggagcatatcgattccattcttgaaggtccctcactgaattatcatccgccattattgaaagcaagttttaacccccgcggagtaacttgaaccaatggttgccaccactgcagcatacaccaccataccaaaaatcaactcgtcataccgaaaa

SEQ ID NO: 213539 - DNA, 597 bp, Glycine max
agcttctcactcctttgacattcattggaggagggagtttctcaattgcatcaatctttgccttgtccgcctctattccccttactgaaattttatgccccagcactattccttcttgaaccatgaaatgggatttctcccagttgagaactagattggactcttcacatatttgtaatactctttcaaggtttgataggcaccccttaaaagatggcccaaaaatagagaaatcgtccatgaaaacttcaatgcatttttccaccatatcaaaaaagattgccatcatacaccgctgaaatgtagctggggcattgcatagaccaaaaggcatgcaccaatatccgaatacacctatagggcaggtgaaagcaatcttttcttgatctttgggatctacaacaatctaattatagtcagaatacccatccagaaaacaataataagattgccctgcgagtcgttcaagcatctggtccataaaggaagcaaataatggtccttccgaatggcatcattcaacttccgatagtcaatgcacaatctccaacccgtgataatccttgtggatattaactcatatttatcaatttttat

SEQ ID NO: 213540 - DNA, 854 bp, Glycine max
gtccgtaatcgatctttaaccctaccaccgaaatcaggatctcatcactaaatcacttgtccaaactccggaactgagtctgtcttcgaaacccggatcctaagcaccgcagctgccgcctggcaaaaaaattacacgtttgttattttgctgaaagaaatgcacccttttaatatcttgtcctaagaaagaatgagcttggggcaggagccaatttcttataactacgcaacatcaagttctgaactctcaatgacaaaggtgccccaaaattaatgtccgacagaaaagggtacaatgtcttgaaaataagttggggaaccaaaaaaaggagcatttttttcattcggtctggattcgtaagatacttctcaggccccctgtcttgatttaccgggaactacaatatttttctttgagaaaggtaagattcaaaatgcagagattgcgctggggaagggactaggctactccagcgtgaaaagggacctaccgtcacaaatttgctcccgtcgagcctcattcaacaaccccgatgcaactggggttggcatagggattagggggcttaaacataaaacgggtcctccgggggaaatcatattaaaatctttatccctacccctatccaaggctgggacgaattcaatccttgcccgagggaaggatctcacattactattcctgcaaacgaagcctccctgaaaacgattgggggaaccgttccccctcatttaaagagaagaagggcattcctccctccatgcaacataattgaacggactcgacccaatcctatgataccgccgtatcttcttctgatgacacagacaaagatcaattactaagaacac

SEQ ID NO: 213541 - DNA, 492 bp, Glycine max
gtgcttttttaatccaaaaacaaattcctttgatgagtagctattatgaattctttagttcctgaaagtacaaccttaaaattgttgctcgctcccctttttgttttatgcaaaaaaaagatcgtgattattacttgaaccataaggaataacatctaaagaagttatgcttaaaatgtcaccttttaattttttggtatttttccatattagattacactgttcacagtcgagacatgatggaatgttgtacaaggaattagatgatggaaagaatggaagttaatatatattcacgctcttgtaacaacaaacttttatgatagaaaaaaatttgtaaagtaagcaactttttaaattatgttttaaaattttcaccccaaaaataatctattaaattttgtttgccttataaccatagatgaattttttggtatcaatatgtttgatcttggaaaaaaatgcccgatagcaatttaaaagaattagtat

SEQ ID NO: 213542 - DNA, 970 bp, Glycine max
  unsure (1)..(970): unsure at all n locations
ggaatcgcatgaggagtgaacactaacgggttcagtactgaaccggattagatcgtattaatgacatccatagcagcaaggacgatgtgacgcttcgtaccaccnncggggatgcattagagaagatccgcggggcatgcaagctctgaatctctttgaaccccttttttttttttggaccaaaagctttctaaagtggcggggggtttctatatcttcgagaacacggacgtagacaagccactataatatcgccgccgggagcccacaaaggggaccgcccggcacatgacgaactacatcggatgagtgaccgtattgggccccgtttactaggagcgagggacgtacccgcctgaaatacgtgcgagactccgcttgaacgcgtcgcagggtagaatcataccgcgcgccgtcgagcggattcgatggaaagcgcgctcttgtccaccgtcgaaaggcgtccgggggacgagcccccatgaaaaggattgcggaatcttgacgaaaaggcacataagagctctgaagcggcagctttcctgggcgtgtgcggatggaggggcccctccttgtagggcccagtcggcgcggtccgacaaccacgggatttgacggcgcaacagagagccgcgccctcactgggcggcctacggcaactgcgggagggggccgtgccccggggggcaatacgaacattcgggcggagtacaccgcgacggagccccaccgcgctgtgatacggccggctagaatacgcactgtagcgacaatatctagagtccacgagccattggcgtcagggggcatggtagagaacggcgaggtgcgccatccatcggcgtctgtctcgcgacggggacggaccccgaggcgcttcaatgcggaccgaacgtcagaggaactgcgctcacgcgcagcgtcgatcgcgaacgcacgtcgcgcagcgtgggtggcaggttcacacatg

SEQ ID NO: 213543 - DNA, 416 bp, Glycine max
aaacgaatgaagaacgtcgaagaacgggcgaaaccttcgcgaaattccttatggaaacgttactgaaacattctcgaagcgcctcggcttatattttcttcacggaaacaatttttccaagcaaattctaaagagagagaaatgcctaaggggctgaaccccttttcacttcacttctccccctatttatagaaaattgggggagaagcttgccacccagctcgcccaggcgagcagggttgcttcctccagaagcaacagccttctggaggaatcttctggagggcccaagtgggcctggttgctatttgcacacccatttttactaagtacaccgccctgccttttgtggtgattctttttataaagtacggaacttacaattcgaacgatactgttctttcatatgtatggac

SEQ ID NO: 213544 - DNA, 294 bp, Glycine max
catatctaaactcgccgcaagggatgcctaactcaccataaccatatttaaaaccaagggtgaacaaaaagagacgcatgaacatatgaaagccgacatgtcggctctaaagaacaaatggcctcatgatggagccatgttaggatgaaacacctatggagaaaacacggcctctgccgccgtgtaagttcggctgccgaagcaaacccacttcctgggaactctcaccatcctccctaaacatagatggacggaaggcaacaccggggcccatggcagtctcacctggataca

SEQ ID NO: 213545 - DNA, 299 bp, Glycine max
gaacacccccgctcagctaaaatatcgatcgctcgtttatttttgaacctcggaattcaatgcatactttccacgatgtccgattcgcacatatatgtgagaggtcaaattaacaacgcactttgaaattaactggttacttttacaccgactctttaaattatatggctaatatcccactgggtcgactaggttaaaaaaacgacactgaaataacatcggaactttaaaattaaaggcatacgtctcacagatgccatcggctcttaattcgaaggttgaattgaaacgagctctca

SEQ ID NO: 213546 - DNA, 339 bp, Glycine max
acggtaattgtattgatgtcttctcaatatattgatatgttataacgtgataatatattccgcatatgagttatgattaacatggtggaaagctaactcgaatattttctcatcacatatcacattttaatgtgaatataaaacagacctgatataaaatagcgtaccttaatctattaataaaatcatgatcgaacattttaaaagtttataaatataacttttttaaacgaaatacacttttgtagggatgccaaatcactgacctttccgacgtttagacctgatagaaacatattatacattgatctctcaactcatgtaattcctctactaatg

SEQ ID NO: 213547 - DNA, 413 bp, Glycine max
  unsure (1)..(413): unsure at all n locations
ctacgncagaaaatacatatttaccatggtctatctttcaccttctaggcgataccttcttatacactaaaattcaatatttgactacacattttcaatctataatagaatgatacttttcactacaaaaatcacatcctgaatttcttcatttacagtggaagatagtctttaaagcctttttggcaataagtttccaaaatatcctctaattntaaatagcaatgagcagatctatattttgaaaaagaagtggaagttcagctcagtatcaagaatacaaatttaatactgcaattataaaactgtgaactatatttngatgatttgagattacctaacggacagcctttccaaagcttgtgtagctgccaactggactgcattatcatcgcaatntaaaagccttacta

SEQ ID NO: 213548 - DNA, 347 bp, Glycine max
  unsure (1)..(347): unsure at all n locations
ctgaacgaaccaattcctcttccgaatatgacagccaccgtcttaggagcgctgagcaccaacagcgcttcgaggccatctagggatggtcatttcttcgggagcgacgcatccacctcatggacgacgagtataccgacttgcacgaggagatagatctccggcgggggggcatcacctggttacccccattggccaagtcgacccagacatagtcctcgaattttatgccaatgcttggcctatagaggagggcgtgcgagatatgcgaacctgggtgaggngtcagtggatcccgttcatgcggagctctcacccagtcctgggatccctttagtgctggagag

SEQ ID NO: 213549 - DNA, 283 bp, Glycine max
  unsure (1)..(283): unsure at all n locations
gctcatcgccgtgaaaatagaactttattttcanggggatcacagcctccggtcaagtgatctgatactctcatcctcgctccttgccctaatcttcctcttgagtgacatttttcgccccaactgactcccaaactctcacgtgtatcattaaatgattagtacatttgctttaactgatcttggagtacattcctgctgcgttggatatttcacactaatcacactgagatggtcatggcgttgtatcgttttatctatccacttgtcacctcctgaatta

SEQ ID NO: 213550 - DNA, 402 bp, Glycine max
  unsure (1)..(402): unsure at all n locations
atccttagagtcacccgcggcatgcaagctngcatgattacattctcgccctttctcattctaattcttcttgacatcatcaaaatctgcatgatttacatgcttgttgntttggctcaaaacttgttctataattggtgcctagtttataccaattctagttctgaaatttcaattgaaaagtagtgtgataacaagcgccaaaactagagggttcttgagtctttttttttttgcttattttgttaactttaacctcggagccattcctaagcttctttttgagtcctacgctgcttttaagctcttttcattgctgtaattggtgacacatccttgagaatctgtcttgttaatactatattgggttagctttcatctcattattttggtctgcagata

SEQ ID NO: 213551 - DNA, 426 bp, Glycine max
agcttatgttgcaaacatctacaatttaccttcttaacctcagcagcaaaatcagccacaacagaacaattatgacctctccagcaacaggtacaatcccgggtggaggaatcatcccaaccttagatggtcgagtccttcacaacaacaaccttattttcataatgttgttggcccaagcagaccatacattcctccaccaatccagcagcagcaacaacaacagcaatagccccagaaacaacaaacagttgaggctcctccgtaaccttcccttgaagaacttgtgaaatgactatgcaaaacatgcagtttcaacaagagaccagagctttcattcagagcttaactaatcagatgggacacttggatacacagttaaatcaacaacagtcccagaattctgacagattaccttctcaatct

SEQ ID NO: 213552 - DNA, 458 bp, Glycine max
  unsure (1)..(458): unsure at all n locations
agcttcatcgtctgccgtgaagaagacacacaatgccacacgtctacgatcgttgtctactagaccacctactgctaccggcaaggctgacgatccccacaggaagatattaagaacatatttgggggttgtggcgcgtgataaggtagacgtcacatacaagaactggaaaaaggtccccactgctcaggaggacttgatttgggaggatattcaagtattttccttttcttatgtgatgtactttaattaatagccaaaaaatacattattgtaacaaataaaccttatttgttattgtcagacgaaatttgacatcccagaggcttctgacagtaggacgaanaagaagttacttgaacattgaattcatttattgatagttgttattcattggatgtccatcatcacattatgaaggttcatgaataactgggaagcaatacctttatttaaac

SEQ ID NO: 213553 - DNA, 408 bp, Glycine max
  unsure (1)..(408): unsure at all n locations
tatccatggcttgctatggcggagagtttcttctatactcatcttacctccgaaggggcgactcctcccaactctacttcttctccattccgctgacattaaaattcataaagctcaggactccattgatgaagaagatccaatgcctacaagcttcacatggagctacgtcaccaattcatcacggatgttcgtggcatgccgatgccaccttgacctctttattgtttcccaacacctaagttacaactnactttcctcttggagggcttacttcatgtcttctgcttgaccatcttttcactttggagaagccccaatctcatttcccatcggcgttgattataatgctcaaacacattggtgctcgctcactacttaagaccctgtgatctttctttatccaca

SEQ ID NO: 213554 - DNA, 265 bp, Glycine max
gactccaatccgtttcttcaaaaaagcacttaactcctcaaaaatggcaaggaatataaatcatgtatttctcatacagaaatatattcctattgttactatgcacttggggtgcacaagcagaggacaccttatggcgattctggcaatgacaaccccattcattggcatgggaggaaaattatcacccaatattgataaaatattgactgaaatagccctccaaactccctccactggttgtgttgcaccacatatggcaaag

SEQ ID NO: 213555 - DNA, 290 bp, Glycine max
tgtggacccacaaattatggcatgagtctgcattcacatatgcataaataacatgagaggttaaaacatgcctcaaaactatttaagttggtgaggccaacttcttctcgtctataaagaatcactaaatttggattggtacaatactgaattatatgtttataactacttaacatatgcaaggacagagcctagcgtcaatcactactacaacattctgagggaggaagtagatggtcatctagcaatatattggcgcagtacgatttctcaagaaacatggactcttg

SEQ ID NO: 213556 - DNA, 460 bp, Glycine max
  unsure (1)..(460): unsure at all n locations
agctnggagaggatgcttcaatggatgataatatttatggagaganagagagagaggggaagttgaactttgagttgtgtctcacaagactctcattcatcaaagttacaacaagtgttacacatgcttctatttatagactaggtagcttccttgataagctttcttgagaaaacttccttgagaagcttctttgagaaaactttcttgggatgctatagcttagccacacacacccctctaataactaagctcacctccttgagaagcttccttgagaagattcctaaagaagctagagcttagctacacacaccccctataatagctaagctcacccccatgccaaaatacattaaaatataacaaanaagtccctattacaaagactactcacaatgccctgaaatacaacgctaaaaccctatactactagaatggccataatacaaggcccaaa

SEQ ID NO: 213557 - DNA, 468 bp, Glycine max
agcttatatatatgttgtattaatatacttaatttatatttaacttctttataattgtaatcttatttatgtgttctcaatatattgatatattataaagctgaaaattatattcattcaatatgattttatgacttaacatgttaggaaagctaactagtaatattttttaatcacatatcacatcttaatttgaataacgaagagacataaaatataataacaaactttaatttatttatataaataatatagaataatataaaagatattatgaaatcataacttttttttaaacgaaaattagactctttttagttgtaggtccaatatcattgcacctttaaacgacgtttaagacctgaatagaaacatataatacatcgatctcatcactcatgaaattcctcaacttaagatcaagtgtattgcagtatatcttcatctgattgatactagcaacatgag

SEQ ID NO: 213558 - DNA, 419 bp, Glycine max
  unsure (1)..(419): unsure at all n locations
cggatcttaagtaacctgcagctgcanctnggcctaatgaagagagcatgtttctttgttgcaccccctatcactcacatatgttcataaatattacatgctaccctatattttcacacctcacaaactcatttctaatgtcgaatctttaacaaaaccagtccatgcaaccatagcagccagtttattttcgtgacaatctagtgcatagagaaaaattccttagactcgttttggtcataacctttatcaagaggctcacatttatgtgaaattgaaggctaaccctaagttttgacacccatggaactcatttatttccttaaaatttgataatagataacgacatatctacagtgtcagtcaggggagtaactactaattctgaacatcaaaacaacattgaatgaggcttagct

SEQ ID NO: 213559 - DNA, 448 bp, Glycine max
  unsure (1)..(448): unsure at all n locations
agctntttattngtattngatcgaataataattttttacttatgatttggagtatgtcacacaacaaagtacaaactatcagcgaataaaggggatataattgaacggtaatggacattatttacgtgtatatgttcgcatgcttgtgatttgtgaacatatgatactagtgaaatgcttatgagtggtggtgatatggatcttggattcacgatcgctatcatctaaccgttccacctatatgtcgagttgatagatgtatctataataaaaatatccgaatttggctaagattgtaattattttttctattacagataatcatatatttggtgacgtgttattgaactttcttctactaatagcaaatattattaaattcgaattataatcacgattatgcatcagatcagaactatcattctaatgtcaaagttgagggttttga

SEQ ID NO: 213560 - DNA, 350 bp, Glycine max
agcttgcaaagacctagtgcataaaaacatcgtttgtttataacaagctcgcaaaagctcacaaaaatgagaaaagaagcaaaacacgtaccttgcattgatgtcggactccaacgaaggatgctccacctcgcagcagtcatgaaccccaacgacagtcgtgaaccctatcagtggcgatggtgaggaagaaatggtggtgattaggtcgcacaacggcggtcacaggtatcaaacaaaaatgataggccttgcgggtgaaagggagaagaggaagggtttgtttgtgatactaagcgtgcgaatgggaagaaggcgttctggatctctaattatgtataacacaacat

SEQ ID NO: 213561 - DNA, 464 bp, Glycine max
  unsure (1)..(464): unsure at all n locations
cagcttatgcgcatnattacttacgaacgtacactttcacaatatattctaccaactaagaaaaatgcacccatatacaatcaaggtagcttcattacctagattatttacatgtaacttcaaggtgtatatgatatttacatcacacacgcctccttggctgaatttacatacatacatactcaaagcatgttggggtaccaaaaactgcacatgccgctcatcttgtggatttctaatacccatacatatacaaacttcacgatgaatcttgactacctacacaataaggtgctacatttcatgctttctttctttatcaaggatttgctacctaaagccacatgcaacattcaagcatattatcgctttgctgactaaaattgtatccaaattagaaggcatatattctttgtaatatgttctcttcacataacacgcaacatatttatatatatttcttt

SEQ ID NO: 213562 - DNA, 460 bp, Glycine max
  unsure (1)..(460): unsure at all n locations
tctctgcatatcttcacacaacataatctctcanaactctctggaacttggacctttctctctctagaaaccctagacatgcaaagctctgaatcccagtccaaactctccaaacaatctgatttcaggtttaaataggtggccttgtttgtgctcgtgtacttagcgcacatatggaccgcttagcacacgttagtgatttttagcttagcgcgcctttctcgcttagcggatgaactgaagcggtgcacttagagagatgaagcaatgcgcttagcgaacctgtacaactcatcttcttttggattcttcctcatgcttagctcaggagtgttgcgcttagcggatggtcgctaagccagcagattggcttatcgagaaggtgaaaacacctttccaaagcttgctaattaacctgaaattggagaaaatattattaacacacaaatgaaaatctaag

SEQ ID NO: 213563 - DNA, 475 bp, Glycine max
  unsure (1)..(475): unsure at all n locations
agctnaatggcttagtgaggatggttatgtgcttgtnangaagcaagtggagttggatatctccattgganagtacaatgataaggtgctttgtgatgttgttcatatggaggccagccacttactcttggggagaccatggcaatttgataagagggctaatcatgatggtttcaccaacaagatctttttcacgcatcaaggcaaaaagatagtgctcaaaccattgagtccacaagaaatgtgtgaggatcaaagaaaaatgagagagaaaattcttcatgacaagagagagacagaaaaagagagccaaacacttgagagttaaaaagttaggacagatagagggaaacacactacaggaaaaagatgagtgaaacactcgaagtgagggagaaatttctagctactaaaggagagggcaaagagttgtttcattacaacagcccctatacttgttgattgcaaaattatg

SEQ ID NO: 213564 - DNA, 438 bp, Glycine max
  unsure (1)..(438): unsure at all n locations
gctngaagatgttgtgatcttcacattaaaggtatatttctttcaattcatatttctttgtagggtttaatcatggntagggttaccaagggatcttgagttgatagggtttcaacatttggaatttctcttgtagggtttaagggaaaagtagatagttaggaaattgcttgtgcatagtctttgcactttggttctctaatagtggaatgttctaaagactcttanaacaactagatgtatgccttcttgaagagtaaccaatataaattatgtgtgtgattttttctttctctaacccgtggttttggaatcaatcttgatattggaattgatatgtgtgggccataaaactatcgtttttaaggtttttgaattcattcggttattgcngttgtaataagttacaccaagacttttgagaaaccctgatgtcat

SEQ ID NO: 213565 - DNA, 433 bp, Glycine max
  unsure (1)..(433): unsure at all n locations
agcttatagaatatataatagaagaacaatgactattgaagaatctatacatgtttcctttgatgagtctaatgccattcttccaaggaagggatttttagatgatatttcagattccttagaagatacacatattcatggaaatgactctaaagaaaaagatgaaggaagcaatgaagattctcaagataatgaagttagagcaaataatgaacttccaagagaattggaaacctcaagagatcatccccttgacaacattattggtgatatatcanaaggggtaacaactagacattctcttaaagaattatgcaataatatggcttttgtatctatgattgaacctaacaatatataaaaagacatagtagatgataactggatcatcgccatgcaagaagaactgtaatcaattgaaagaaaccatgtg

SEQ ID NO: 213566 - DNA, 474 bp, Glycine max
  unsure (1)..(474): unsure at all n locations
agctngntgtagagccataagtgacagtaaaaattcttgttactntgntcaaagttactaaaaacttggtggattatcaagaatttggtatagtctcaatggtagagacgaactagtataaatctcattatgtcttatcattatctcttatctatttaattgactaagggtttgaactttattttgtttctaaaaagtgtttatgaaattntgtaagtattgtctattcttgtctatttgcaaaaacctcattttctatcttaaagctcttttagatgatagatttcttttaaagagaaggcttggaaaaaatataaaatcacaattcaatcctccttcttgtgatatttgtctttataatctagatactaaaaaaattatgccgttatatcataattgtactttctccccaaaattggcaacttttccgactttggtagttttcatttgaaattattaaatcgaactagtatt

SEQ ID NO: 213567 - DNA, 316 bp, Glycine max
  unsure (1)..(316): unsure at all n locations
tttcccttcataactattccatcccgtcntttgcacgggctggaactggactgggagtggtataaatattatgtgaacaccaacactcaaatgcttattaagaacaaattttaattcacgaaactggcttatgtaaaatcaaatgtctatgaatatatgaggaggcagttaatgtttctttcatccaagtataatttcagtaaactctgctatcacaattccatgcagatgaaaagaagttaggcttcaatgtggatgaactcctcctcccattcaatatttattctgagccaaagcctctatgcatggtcataaa

SEQ ID NO: 213568 - DNA, 275 bp, Glycine max
  unsure (1)..(275): unsure at all n locations
agccaaccgaagagtctcaagggtgtttattttacctctcctctgacttaaagtctggntcttctgatgcagagtaactgtggtttacaataatggcataaacttgaaaatcctaatgaggcattagagacatctaacatcaacattcaaaattgccccatgttgggtgtcgcttgtcaatgttaggaatcacaagcgattcttcttaatttcagccagcctgcattaattagactctgcaccttatgctcagggccccataatgctaacagaat

SEQ ID NO: 213569 - DNA, 392 bp, Glycine max
  unsure (1)..(392): unsure at all n locations
tagagtcttaggaagggtatatttaatagaaagggaattccaattgaaatagcaaaaggtttggccaagaaatttaaattaaaaagtctttttcaagagatttactctctggtaatcgattaccagaggatgttatcgattaccagctgccaaaaatgatttacaacagctattaaaatttaaataaaaaattggcactggggaatcgattacacatantatggaatcgattaccaacagctactgaacgttttaattcaaattttaaagcttgtaatcgattacacatatactgtaatcgaatacctgaggagatttcaaaaaaattctaacagcacatcttttatctatcttaaaggcctcaaggcattatatatgtgactgagactgag

SEQ ID NO: 213570 - DNA, 173 bp, Glycine max
atgaaagattgcttaagaataaccaagattgcttcacaaacaaagccctgttaaagacactaaagaccaagccttccttaaacagatgctttcaagactgcaggctctggaatcaataccaggaggggatcgataccaaaaaaagggtgaaaaaaccgtgaaaacgttgaatg

SEQ ID NO: 213571 - DNA, 455 bp, Glycine max
  unsure (1)..(455): unsure at all n locations
catgcaagcntggctgatgaagaaacaaccatnggctcntttcctatnccacgaattcatcttcattccttgccccttcatcttttacacccttttgtacagttaagcacttcatgaccttgaagaactaaacaacccattgttggggagcttctcactaaactctctngatgtaaagactcttactatctatttaatcggattactaggtttattggatttttggggttatttccatgtatgtggtctgatcatccatttatatgctatggtagggtttaagtattggaaaatgtggttaatccttataactgggaagagcatctaaaaatcttcatcgctagggatagtgtgaggtgtgttanccgaattgtatatctctactgagcatgtggttcaactagtttatgtcttgagcgattaggaaagaaactatggtgatgcaattctaccct

SEQ ID NO: 213572 - DNA, 371 bp, Glycine max
aacaccacttggacttatgatttaatcacaaaatcatattctataccttcacattaatcacatgttcataacaaaacattctaagtacaacacaacatctctcacacacaattcattacccacaatcacgtagcaaggcacaatgatcattacacagagcgtatgccacatatatactaagactcaatcctatattgaatgtggtatcttgcagtgaaaaataacactatggcacctaggagtacataataaaatacaccacacaatgggtaagcacgtcactcttatataaagaatcataggtgattaatagggtcattctgttaatgtaatgctctaccatatgagatcacatagatttaaggagcact

SEQ ID NO: 213573 - DNA, 410 bp, Glycine max
tatgagagacaagatgacagactagatcccacacttcattccttgtaaacagatttagttcatcatgcattacccataaccaatgcttatcatgcaatgcttcatccatgtttctaggctcaatctaagaaacaaaagccacgttattgccataaaattctaagtctagagcgagagatactctcttatatatttcacaaattatattggccagggaaagcgctttttgatttctcaattccattgggaggtctttaggatgtgtggcattgatttccttactttgtcaagatccttagcactgggttcatcttcaagagcaatgtccttatgctgaaagcctgcattttcattttcataaaaaacaacattgtacagattttcctcacatgatgttcttctaataacac

SEQ ID NO: 213574 - DNA, 441 bp, Glycine max
  unsure (1)..(441): unsure at all n locations
nngcttggacagaatggatgagatggagatntctttatatgctaanngaagagtttcaagggtgtttatatttacctcttcatctgatttagagtctggttcttctgatgcagtgtaactgtgtgttacaataatggcataaacttgaaaatcctaatgagtcattagagacatctaacaacaacattcaaaattgccccatgtgtggtgtcgcttgtcaatgttaggattcacaagcgattcttctcaaatttcagccagcctgcatcaattagactatgcaccttatgcttcagggccccataatgctcaacggaatgcctcggtgcttctccatgacaagcacacgttgcgttcagttctatcctctgagaaatggaggatgaggaaccttggttggggtatggcaccattgaatatcgagtggatatggagcagtta

SEQ ID NO: 213575 - DNA, 360 bp, Glycine max
  unsure (1)..(360): unsure at all n locations
tatagctaagcncaccgcgcatgacgtataattatcatgatatattcaataggatacaatcctactacaaagactactcaatatgcccttaaatacaatgatgaaaccctatactactagaatggtcataatacaaggcccaaaagaagaatacaacctattctactatttacaaagaaaaagggactccaccttggcccatgggctcaaaattaccctaggttcagagaacctaaggtttctttataactcagcccaattctctggaccttttgctatggtctggaactggtcttcctaggaggatgcataccaggtctattagctaagttggttaaattgtctttattgtcggcccat

SEQ ID NO: 213576 - DNA, 397 bp, Glycine max
  unsure (1)..(397): unsure at all n locations
agctcggagattataatcttccatgctgcaattgttaagccactagcatcagcatgtcctcttcacacccattattataaaatgatttaattattcatttaattcttatagattctaaaattatctnttctaattcctatagttaataaataaatttttgtagctcttaaaatataataaataaagtttttaatctttgaaatctataattaacttcggtaggtaaaatataaactttaagacttaaaaaattatatttattaactatgaagactaaaaaaaattaaagattataaagactaaataaataattaaacattataaaatataaacagctaactgacacttgattagcaaaaataatgttcactagctagctagtattgaggggtacaga

SEQ ID NO: 213577 - DNA, 388 bp, Glycine max
  unsure (1)..(388): unsure at all n locations
gcatgcaagcttgagatgaggaagtgttgtatggtgaatctttctgctgttatcgacgaccacagagtgggcctgtagatatgtcgggtgggtcacgacaccttgtggactgtaggtggggtgctattgcccaaaaccaagcttgaccaatcccgacccaaccctggcatagtcggtcagtgagaacctgtgatgtacctaagcanggcgagctcttggcggtctacagataaaaggaactaataccacaaacgcaggaggctcgtggtggctggccatctgtgaactttgattgatatgtgggatatggcctcttgtaatcaattaccaagggtgggtgatcgaatacaaggcttaaaaatgaagacaggaggctgatatggtctct

SEQ ID NO: 213578 - DNA, 219 bp, Glycine max
ttcacttgggcgaaaagcaaaggaaccaaccccatatgaagtggaagaaaaattgcattctgccatccaaactcaaacatggatagacctcttcccccatggatctctttctaatactatttcttacaggtcaaaccacttgcccattattttgcgattttttccaaggatccaatttgtaataaaaaatattatttcattttgagaattcctagcttg

SEQ ID NO: 213579 - DNA, 481 bp, Glycine max
  unsure (1)..(481): unsure at all n locations
agcttatatatattattacgctcgagantaaacattttatgctctcgagaaattcaaatggtcataacttttcacctagatgtccgattatggcgaatcacatatcgagacgctcaaaattgaacatcggaagcccttgagaaattctaatggccataacttttaactcggatgtccgattcaggcgcatcacatatggagacgctcgaaaaggaacaacggaagctcttgagaaattcaaatggtcataactctccacactgaggtccgattaacgagtataatatatcacgacgctcgaaattaaacatcggaagctctcaagaaatgtaattggtcatcactgttgacacggatgtccgattctggcgcataatatatcgatacgctcgatatgagacatcggaagctctcgagaaattcaaatggtcataactcttcacacgaatgttcgattctggcgaatgacatatcgagacga

SEQ ID NO: 213580 - DNA, 457 bp, Glycine max
agtctgtgccttgattaatagcattttaaagttataaatatgaccatttccagaagtactggctttcaacctctgaaggttattaatagtgttagagtttgtgggttctaatttatgtgttgagcttattgagtcttaagcccacttctgcttttgtactgtatttattagcaaatcaatgagaaccaatgggatgttatcgttcctccaaaaaaacaaataaaaacagaaatttgaccattaatcattaccaccaaaaactgatagtagaatcattcaaattaatttgaaaagttggcgatattgccagtctggcaaaaacaattagcaatgagcttagcaagacaaagttttgagcagaatgcatgtgtttgacaagagcagcaattaggtctcgtatatgtaccactatctgtgatggtaaatgcaaaatcagttgaagaaatgcaacttcaac

SEQ ID NO: 213581 - DNA, 429 bp, Glycine max
  unsure (1)..(429): unsure at all n locations
tgaacactagtcactttaaaagttatgactnttgaataactcttcataaacaagtcactttaagaattgtgactttcggtaatttatttttcgaaattagtcgctggtaatcgaataccatcataatgtaatcgattacacatcaacaaatgtgactcttcatgtttaaatttgaaaatcaaaacgtttagaaacactggtaatcgattacaagtattgtgtaatcgattacacaagtttgaaatgatntgaaacaagtttatcacaagttgtgactctttgaaattgaaatctaacattntataacattggttatcgattacatgattatggtaatcgattacagctctgtaaatcagtttttgaaagaatggtggctattggtaatcgattactgccttctggaatcgattaccagagagtaaactc

SEQ ID NO: 213582 - DNA, 106 bp, Glycine max
  unsure (1)..(106): unsure at all n locations
agcttgtgcaaatcaaatcactgctacatttcatctctagcatgcattntctttctttacccactcctcacgttngggtttttggggaaaaacaccataacttaac

SEQ ID NO: 213583 - DNA, 388 bp, Glycine max
  unsure (1)..(388): unsure at all n locations
tctagagaaaactacatgaagctgcctcggtaaaacgcttcccagtcttcgnntaaccgttgatcttctcgaaatttggttttcaacttcacaagacacttgtccatgatctgaccgttgggatctttgagaagatctctggagtgtgctagaagcttccgttcccgagagcatctcttatttaagcatttcaacctttgctttcgtgtagcttaagaaaaacatcatttcttcttctttctttcttccaaagccatttctaaagttccaagaactttctccatcacccatagccaccattagccaccacaaaccatcgttgttctccattgaaactccacaacgagaggaacccgtcgattggagcggaatcttccaacttggctta

SEQ ID NO: 213584 - DNA, 448 bp, Glycine max
agcttccatcaagtggtaatcagagcacaagtattttttcttgtgctccttaaacctccattaattttttgtggtttaccttctcttccattgttgttacttcattttttcctccatgtatctcctcacatgtcttgtggtaaatgcttttaacatgattctttagagtttccaccgattaaactcgctatataagctagatttgcatttctatggtttaaatttcttgttcttgttctgaaccatgaattgtcgtcgagttacgttcctttgagttttgtcttgttattttttgtggctgaaacctaaaccataaaattcttacaaaaatattaaagttaaagaatacctcacaaatctagagagacttgttcacttattgttgttctgtcatacaactcatgtctagtcatgaaactcgccacataagaattcttatgttgcgctg

SEQ ID NO: 213585 - DNA, 296 bp, Glycine max
agaatttactcgacaaatgaggagaatgttattcattcatgctctgatgatgtcgagaagaaatcacatgtttgtcatcatcaaaaagggggataatgtgaatgtatgtatacatgatttagatgatgtcaaagaagaatccacattgctgcttcaatgatagcattcgcataaaataattaagattgttcacaaacaaacctgtttaagattactaagacaaccttgcttaaacgagtgcttcaaacactattatggccttgaggcatcacaatcattgaagagtactgtggacc

SEQ ID NO: 213586 - DNA, 476 bp, Glycine max
  unsure (1)..(476): unsure at all n locations
agctnnttgactcctgagtcttaggaacttgcttaactcgngattctntggcatcatcaaaataatcttggaaggtattgcttccacatgggatagggctttgatgtccacatcatcatcatataggaaacttagaaaacaaaacaaagttcaacaagactacttctaggaattgatttagaacatgttatgaactaaataacatgcatgacttagactcaaaattcaaaagataggctaagaatgacaacaatacatgaacaaatgtatctagaattcaatcaacaaaatcaaaattcaacacanacttagaatataatgtgacaattattatgactaaacatgactntaagacaacagggattaagtgatctacacttacatttttgtgttcttttttctaatcaatattgtggaagaaaattagatctagaagttcaacacaagaatattacgaccgacaaatgatagaacct

SEQ ID NO: 213587 - DNA, 470 bp, Glycine max
  unsure (1)..(470): unsure at all n locations
agctngttaaagaacttaggaaanatcaagatctttcttgttcgcacatcgttcgcgtgtatgatatccactcgacaaggtttgaagtagaggagaccttcaatcctataacgcaacatggcggacaaaagtgggcagttaacttgaatggccattattgtcaatgcggaaggtattctacgcttcactatccatgttcacacattattgcagcttgtggttacgtgagcatgaactactaccaatatatagatgttgtttacacaaatgagcacatcttanaagcatactctgcacagtggtggcctcttgggaatgaagcggcaattcctccttctgatgatgcatggacacttatccttgacgcaactataattcgtgcgaaaggtcggccaaaatcaacaaggataaggaatgagatggattggctggaaccatctgaccaccaacaaaaatgtagtagatgtgga

SEQ ID NO: 213588 - DNA, 439 bp, Glycine max
tgactgagaacaagagagggtacatctcttgtggattacctctagtggagggtacatccactaggttcaaagagaacaagggagggtacatcccttgtggatctttgcttgtaaaaggatctttacaacgctgaaagaaatctcaaggaccgcacgtcgcttggtgactggatgcacgcacgggttgttgctgaaccactataagaactcttgtgtgtttggttccttctttcctactcttttactttccgctgtgtatctaatttccgctgttactttctattaagtgtctcttctactcctcattctcttaacagattagtaaaagccttagacgaagtaaattttaattactaaacggttacgaataattaattcaaccctcttcttattattccgggccactcgatccacaaagcatatcagaaatcacatgtta

SEQ ID NO: 213589 - DNA, 284 bp, Glycine max
  unsure (1)..(284): unsure at all n locations
atccttaagtcacctgcggcatgcaagcttttatgtcagaagcaactgacgccttctctttatacaatggtgcagnntttcatctgctatcacgaaaacttttcacacaatgatgctatttgtaatcaaaatttctagagctctttttataatttttcttttctatcacaacaatcctctttctttacttatatatcttgggctaaaaattattaggagaattttaagtgaaaattcctataccaagttatgaatattgagtttgttactcattaattatcatg

SEQ ID NO: 213590 - DNA, 421 bp, Glycine max
  unsure (1)..(421): unsure at all n locations
tattgaagaaagttaattattttgatgtgaaacatgtttttactccttatgaatcatccatcaagttaaaaaaaaaaacaattgagtaaaagaatttcttcacataaatattctcaaagtatcgattctttgttgcatttgacaaacttctctaggtctgtctgatattgcacatgtagttggtagattgaaaagcaattgagggatttagtgatacaaaattgaagttctgattctgatgaaataaaattgacaagtcggtatgtctttgctttagctggttgtacaatatcatgaaaatctactaggcaaattattatttcacatgannagcaaacttgttgctttanatactgctactaatgaggctgaatntcttaaaattgtattatgcgatttgtcattgtgaataagtgatacc

SEQ ID NO: 213591 - DNA, 333 bp, Glycine max
agtgaatgattacctcactgagtttgaaccgttagcgaatcggattggggtctgtcttccaccgtgctccttaacatgttttattttgggcctttacccaaacctccgtctgaagtcgggcttggacctatgtcatataaagcgggcgctggcagtttagaaaaaaaaattggaccgctttccattccgccatctttacccttttggtgcgccctgtaccgcccccccccggggtcttcatggtccccccggcgcccctattaaaccttttaaaaaacttttgttgtggacaggggtttttttttaacaaagggtttttcacccggcgccccc

SEQ ID NO: 213592 - DNA, 502 bp, Glycine max
  unsure (1)..(502): unsure at all n locations
tgaatcttccttggtcgggtacatgagcatatgcaatgctcttttatactctcaaatgatcaactcttggcttcactccactccatgcttcttgtggtgtttgatctttgacattctttgntggggagcgattggacaaataaacggcacatgcaacagcttcggcccaaaattcctttggcatatttttagccttcaacatacatctagtcatattaataatagttgtattttttctctctgctaccccattttgttgtggagatctangaaccgttagaaggcgacaaatcccatgtttttcacanaattcattanattcttttgatgtgaattcgccacctctatcggatcttagaactttgattacataaccactccccttttccacacaagcttagaggcatcactttcaccatcttctcctctnctaaggagtttagtgctccaaaattcaagtgcccaaatctcatatgccaacaccatgattcatcttttatgc

SEQ ID NO: 213593 - DNA, 484 bp, Glycine max
  unsure (1)..(484): unsure at all n locations
agcttgcactatggtttataggcggacttaatattgtgattaaatgaataactgcagcacaatttcaaggatcaacctagcacaaagctagaaaatcgactaaaagtagcaccagtaatagttttcttttgtgtcaaactaatttgaaattcctagtacttcatgaaaataaagctaattcctgtcaaattgagacaggtttgattgcaattttcaataataaactcttatccgatgcaaacttgttgaatgccgtttaaataagatgctctgcccacagggtaggagaaaagcagtagttntaggagtggacaaaccaggatccacgtcgggccttagttgtagtgaagtcctccatagtgggaagactcgtggggtgcttatttggaggactcaaacccaagtctggtgtacctattctccttaaacgctacatggacaaggtactgtgagcaatttcttttaatgtaaatctgagtcaatg

SEQ ID NO: 213594 - DNA, 280 bp, Glycine max
tcccgcgaatcatctctatgatacctgaagaacatatgacaaggaaatttcaagattggagcctacaagagggtagacctgactcacaagtttgttttaatttcattcactactacaaagcgcactttgtacatcggtcgaaaatcgaaatttacatcggtggtcaaccgatgtaaaatatgacgtcgctggtagtgttatgtttcgacatacgttcaaaatctgccgttgtagaaataccaacggttttacatctggactaaccctatcaccgtctttg

SEQ ID NO: 213595 - DNA, 454 bp, Glycine max
  unsure (1)..(454): unsure at all n locations
agctntaagtgaaaggttcggtattgtattacacacggngaaggtattagcaccccacgcggccgtcataagagacggcaacctttaatcaaatgtgcaaatatgacttcaatttatattcttttccctttttacgttcttatgtttttttatgcctttttatgtttttatctttttgtggtcgacaagggcgtttccctttgctcctacgtattcctcgattttgatgagaaaatcagacctacgtagttcttttgtgaacaaagcgttttggttaaattattttttatccttttttgcaagatatgtttttattgaatgaaaggtcatttaaggcgttggaccgttagacaatctctctgatcttttgaaaagtgagaaaacattaaggcatttgaccattaatgatttctctatttnttcgaaagaggtagcaaagctacatatttgattt

SEQ ID NO: 213596 - DNA, 489 bp, Glycine max
  unsure (1)..(489): unsure at all n locations
tgcttacatgaaacacacactcggattttgatgttccaagcttcacaggatgagtaaagaaaattggaaccaagaataaaggttttgcacaaaaatggtgaggaaacaataagaaaatgaagattaatagccttttaccaaagctctgagaaaagaagtctcaagaacacttgtatgaagcttggaaaaagaagaagaaaatggattccccttcctcccttgaagaactcgtgcacaacaatggagaatgaaggttccaagtgtgatatttntttagaagtgaagagataataaggcttcaggcatggttcacatgagacatgattagggttaaagttgacaagatcaaattgacaacatgaatgaccatntgatagccatggtgtgtgacaccctttaccccgacatatatatanataaataanatatataaaaatatttgtatacacattcacgtgggtaaaaggtcgcattcacttcaccattacc

SEQ ID NO: 213597 - DNA, 178 bp, Glycine max
ctgcagcttaaacagaagatggatatgttattctgtgggaagaataaaatgtgtcgcatgccatcacatgtttcacatttccaagaagatatacttgaaactaatgaccatatgcttaatgatgagagaaggatacctcccacccattataagatcgtttaagctcatatgttgcaaa

SEQ ID NO: 213598 - DNA, 336 bp, Glycine max
  unsure (1)..(336): unsure at all n locations
agagtaggtcgcttatatagattactggccaccgatgaggaacacacattactagaagttagtaaagcttattttggggtcactntcgcatcgattattggaagcttgaaagagatgccattgtcatactcatacataccatgtgcactctattaaatgcccattgtcatactcatatcataaataatattttatgaggattcttatgactaacatatataacaaagntatatgtatagactaacaaactgattcatgtaaatcgaaattcttatcattgaaaacgtttctcccactactcttactttctctaaacttgtctttagcaaattcagc

SEQ ID NO: 213599 - DNA, 466 bp, Glycine max
  unsure (1)..(466): unsure at all n locations
agcttatgtatgacatanacacactcagttattgtctttccagtatcattntcatctacaagaaaaattgttagtgaatctgagtggctgagtgctattcataatctcgctatcttgaattaagatactgttactgttaaagtttcgtaattttggtcttaccatgaaaagaaaagggcaaagcaatcacaaagagatggattattgtaaaaaaaaattaaaccacaggtatcctccattgaaatcctaagtcacgtaggatcattatgatgacaatcctttccattcaagtatttaacagaattacataccatgacttannattaaaactactcattaattaagctagaacaacaaatgctagttgatccacacgttatataccatgacttanatttaaaattacataccatgacttanatttaaaactactcattaatttacaaatggctagtgataattttat

SEQ ID NO: 213600 - DNA, 352 bp, Glycine max
  unsure (1)..(352): unsure at all n locations
ggtatcaaaaccattggatgagtaagatagcggtagtagatccatagacattagaattcctttgttcgaaagtctaattggcggctaagttcatacatagaggaccaagtagtgtgtcccataacaaccatgaaacaatgaagaacggtagtgcaagatactagagcatgttggtggcaatggttatgcaagtttgtggagccacaagtaagctctaagggccacaatcggatactcgtggattgaaaatgactttcactcaaggggaaaactatcatatgaaagagacacagacttgagggagagaattgtggagtagtgatgcaatcctaccccncaaggatattggata

SEQ ID NO: 213601 - DNA, 493 bp, Glycine max
  unsure (1)..(493): unsure at all n locations
ctaagctttgccttnntctcccttataatccatagagtagagaaatattatttgttatccaccgagnactagaaatcatgctaagtagtcacttaaatggtgaatttttttttcaaattggtcagtaaaatatgtcaacttagagactaaactagtggatattcaatactttgaaagctagatatataattttattattttagggactacttaagagagaaaataatatttgagataccaaattgattatttgtttgtatagtatcataattaattatcattagcatatacttctaagctagagatggtctttcttttttgcatattaacatatataaattcatcttactggtttagagaggatgtggtgattaatccatcttcatactggtgcaggattactgcaaaaatgcgagttctgctcagaaaaatcataagaattcaaccanaacttatgtataataacaaaactgatattgtagcaaaagttctg

SEQ ID NO: 213602 - DNA, 63 bp, Glycine max
ttaagcaccgagctgcactgagagagctcatggagaaacttttggtataaggagaggggaccc

SEQ ID NO: 213603 - DNA, 467 bp, Glycine max
  unsure (1)..(467): unsure at all n locations
agcttcaccttctggtcctcctcataggtggtgcatgatataacatgctctattttcatctcccactccaagtaggcctccggatcattctttcctttaaatggaggaatgttgagtttaataccatcaattcagttttgtctaggaacaccatcattccctcttctcctcctttcttcttcattatgatctctattctccatttgatccaacctctcatggagcgcatcatctcgttgtttcattaacctctccaaatgttgcatcaaagcttgcatttggaattgcgaaagccccactccatcattaggattagtacctgacatctcanacanacaaatcaaacgtaacgagacaattatagtngttagttgaatacctcacccactcaagtgtatcacacaattatggcttttctctaatgaaacactcttagcttntaccactctaantccccttgagttctt

SEQ ID NO: 213604 - DNA, 430 bp, Glycine max
  unsure (1)..(430): unsure at all n locations
tagcgccactacttgcgctagcacacttgcagtgagttgaatttatattcttgttggcgcttatcgcatcctttcccgctaagcccaactgatcaaggccgtacccgaatcaaataaacattaaaaatgcagtatctatgaagtgatcctaggtcgtctgccaacgagcaatggtcaaccaaacattcataatagatagtaataaaatagtaacaaactacggggggntgtttgttcttgtaaattaaacaacaagcaattntgaactagaaaataacagaattaaaacatgttgtttccccttgattcacaagaaattcagaagtatacgtactttctgcaacatggatagtgcattctgactctanaaaatcaacatcaagaggtacaacacccacaaaatcataaccatactcaaattcaaattcac

SEQ ID NO: 213605 - DNA, 293 bp, Glycine max
agcttgacacagagcgcttaatacttgtttatttcttcacaatatagctagaatgtatttcagctagatgtgaagagtgcctttcttcacagtgaaaataaagaggagatctatgtgcagcaaccaaatggttttttgaaaaagggtgaagaagaaaaaatgtacaagttaaaaaaggaactttatgggcttaaacaagcaccgagagcttggtacaacaaaatagaggcctattttattcaaaatggatttggtagatgcctttgtgaacatacattgtttacacaatcaca

SEQ ID NO: 213606 - DNA, 332 bp, Glycine max
  unsure (1)..(332): unsure at all n locations
ttgacatgcaatttcagttcgctcttcaaccctttggttaacgcaacaagcctttgagcttcctcatgcatctcattaaatgcttctaaaagttcttccaaatcaagatttacctcaatttcttcacttggtgacgggtcattcatggattttccattaagcatacatttgcaatttcttcatcgcttgaaaagtctaatgttggtgattcactatcttctcatgtgtgcctatattctattatgattattgaatgataagagtggcacagagcanactctggcaattacatcaatggcatgcgaattattntatatatatattctcgcata

SEQ ID NO: 213607 - DNA, 118 bp, Glycine max
aaaaaaaggaaggggcccccctcattttttttcttttttaacaccaaacccggcctcgaatttttttttcccccctcccaaaaaacaaaaaaaaacccaaaatttaccccccccccct

SEQ ID NO: 213608 - DNA, 424 bp, Glycine max
  unsure (1)..(424): unsure at all n locations
tctggtgactgggaagcacgttattctgttgttttcaatatctttttcttcgccaagtatgtgtatacgtgtatatgtgtattatgttcattggtctctattattgnttgcattttgntntgtgtgcagaagaaaaaagaaggaatggagacgagagtcgtcatcacagaaagggcaggacggacgaaatcagngtcctatctttgctttcctcttatctccgatgagaggtaagtaaagaggggcaactgtcataccctaatttcgtccggcgattattacttgatgacatgcaataaatgaagtcccgagacgtctcataaatccaaaaggaagcacgcttgcgtaatccgtgaaattccgtaatgtggcggaaatcgaaaagaggtgttattgcgcaatccgtgagtttccgtaacttctt

SEQ ID NO: 213609 - DNA, 493 bp, Glycine max
  unsure (1)..(493): unsure at all n locations
tctgccccaattntctataaataggaggagaagtgaagtgaattatggttcagccccttaagcacttctctctctttcgaatttgcttggaaaaattgtgtccgtgaagaaaatccaagccgaggcgcttccgaaacgtttccgtaacgtttccgtgaggaatttcgcgaaggtttcgaccgctcttcgacgctcttcatcgttcttcgatcttcaacgggtaagtaccttgaaccaagctcttcgattcattctatgtacccgtggtggtacacattgtgtgtcgtgtatttttattctcgtttcatttacttgttataccccccttttgacgtgcttaagccattttatttaagtcatttctcgcttaacctaaaaataaaataaatattcaccggtcgttngaattggattatcccgtaacttcggttaaaatgaattccgaccgttcggtcgtgtcgtaacacgttggaaatcaanaagagataacata

SEQ ID NO: 213610 - DNA, 484 bp, Glycine max
  unsure (1)..(484): unsure at all n locations
caagcttgagccaaaatcctgtctcaccatatttcttgacccagggtgagaatgtcaatccttaccctcggaagcaaaaaaggagagaatgaaaatttccaatcaaaggaaaaaaagagaggaaaggaaattcccaatcaaagaatgggagaaagaatgggagaaagtaaagaaagaaaagaagaaagctcctggtcaaaggaaccagaagaaatgtgcaaagaggtctttagaccggacagtatctgaacaatacagaattgtcaccaaatgaacaaaaagaaggaaaggaaaccatgacctanaatggtcttctccctttaattgccaaccagaatcagtgcgctagcgacttgttcgcctcgcgcanaaccaaaacagaaaaggaanaagccaacataaaaaatcataagccaaaaacacacataagccgaataacccatcatgaanacccattctcaagggaagtctattgatcatgaca

SEQ ID NO: 213611 - DNA, 408 bp, Glycine max
tctatggagggtggatctttgagcttcaatgaggtccttcaatgtgtgattttcaaccatggagatgcagcggaagataaaggagaagaggtgagaggagacaccatccactatggaataagccatggaaggatgaacttcaccaccatgagagtccttcgataaaaagcttatagaggaagcatcaatggaggaaaagaatgagagagaggggggggggggcatgaaattgaaggagataaaagagggagagaagtcaaactttgctgtgtgtctcacaagtttcacattcatcacaagtgtgacaagggttacatatgtttctatttatagcctaggtcactaactaaatgaaattcacaaaagttaatttcattttcatttcatgtgaatctaagaggaatatta

SEQ ID NO: 213612 - DNA, 476 bp, Glycine max
  unsure (1)..(476): unsure at all n locations
agcttccagcattagcgatttcaacctatatatcaagagtagtgtttatgttgcttaaggcctggatagttacaatttgtgtttgattatgcttaattatcttgaataacacaattcaagagagcttaagacttattttgattcaaaaatccagccacaactcaacaccacaactcaacttcatcataggcatcatgtaggaaacttagaaaacaaaaaaaagttcaacaacaagactacttctaggaattgatttagaacatgttatgaactaaatagcatgcatgaactagactcaaaattcaaaatataggctaagaatgacaagaatacatganaaaatgaatctagaattcaattaaaaaaataaaaattcaacacaaacttagaacataatgtgacaattattatgactaaacatgactctacgacaacatggattaagtggattatacttagctntntgtggttttttt

SEQ ID NO: 213613 - DNA, 376 bp, Glycine max
  unsure (1)..(376): unsure at all n locations
atatcaaagaatgagttcaagatgttcaagatagaatcaagaacacttcaagattcaagaggaaagttgaattcaagaatcaagaatcaagattcaagaatcaagaaaaggctattcaagaatcaagaaaaagcttaatcaagataagtatgacaagggtttttcaaaaactgagtagcacatgaatttttctcaaaacatgtttaccanagagttnttactctctggtaatcgattaccagattattgtaatcgattaccagtagcacaatggatntgaannaagtttcaaactgaatttacaacgtttcaattaatttcaaaaagttgtaatcgattacaatgttttagtaatcgattaccagtgcctttgaac

SEQ ID NO: 213614 - DNA, 436 bp, Glycine max
  unsure (1)..(436): unsure at all n locations
catactacatctttttgttctttttataaagataagagagagagtcctgttgtgttgcctcatgtgaacctcatgattatgaatttaacaatatctgatctatttatgcatatttcttggtacagaatcttgtaaataaagagctttgtttttcggggctctatcccacgcttatccaaggcagaaaaacttgaatttgtttggtttgatgattgtgaaagcttgcgtgagctccacccatccatgtcatctctccccaaccttataactntgtctataactagatgtagagggattgaaagccttaatgttcattcaaaatctctccaaagggtgtatgacaatggttggtcatatctgtcaaggaattctcagtggcatcaaaggaaatgacaatcttgaacttatctaccacctncatagtgcaantccatca

SEQ ID NO: 213615 - DNA, 455 bp, Glycine max
  unsure (1)..(455): unsure at all n locations
gctttatccatggcttcctatggtggagagtcttttctatactcatcttcttctagaagaggcgtctcctcccaactcttcttcttctccattccgctgccattaaaattcaagaagcaaaggactccattgatgaagaagatccaaggcctacaagctccacatggagctacgtcaccaattcatcacggatgttcgtggacatgccgatgccaaccttgacctcttttctttcttcaccaacacctaagtttacaactttcgtttcctcttggagtggcttcacttccatgtcttcttgcttgaccattcttttcaactctggaggaagcccncaatcctcatcttccncattgtcggcttgatttatcagttgctcanaatcaacattcgggtgctcggtatcactactttcaaaggactcctcgttggatctgtatcatttaatcacaaca

SEQ ID NO: 213616 - DNA, 348 bp, Glycine max
  unsure (1)..(348): unsure at all n locations
gtcactttgaagactgtggcataaccttattgttaatcttcattgccatatggggaagaacattatgtataacaaaaggaccatctcatctagatcgaagtttaccaaaaataagctggtggcaagagttaaacaacaacactttntggccaatatggaaatcctttctaagaatcctagagtcatgaaatctcttcactttctccttggtaatcttggaagttctcataagctttaagaggacctcctcaagttcttgcaattaaagcttcctttccatacctgcttcatcaaatgccatggtacaaacctttcaccgccaataagcacagtgctcaatctccatca

SEQ ID NO: 213617 - DNA, 352 bp, Glycine max
  unsure (1)..(352): unsure at all n locations
gtcacctgcngcatgcaagcttcanagaatgacccaggggagtgtgagttcatattatttctaccacgacctcgacatagctctgatttgagccaatgtcgaggaggatagggaggcaaccatggcgaggtttcttaatgggctgaatggacatataaaggatctggtggagctgctacactatgtggacatagacgatatactccatcatgctatgaaagtggagcaacacttacagagatagtgtgtgaagaagagctcatctaattttgataactctaagtggaaggaggggtttaagaaagaggacacttcttgcgatcacaccctatgggctgcaccaatgcccacc

SEQ ID NO: 213618 - DNA, 232 bp, Glycine max
atctataagctctatagacgccagaaaatgcagatagaagttgagtttattccttaatcatgttctcaatggattcacatattgcctctttaccatcagagttgacagtgacatcatgatgagagtcctcatcatctaaacttgtgcccaatgctcactatgttctactggaggatgcatcatccatcagacacaaagtggcttctttctcattgccctcggcagacaatga

SEQ ID NO: 213619 - DNA, 249 bp, Glycine max
  unsure (1)..(249): unsure at all n locations
tcccccattcaaccaacccagtgtttccaaaaattgctcttttatcaagtcatgcacacatncgggtccatttaggcattcaggaaaaatctttcattgcattcaccctttaggcacacattctttttttttcaaaaacctttttgtgttatgatccgggaattttccaaagaaaactggcagtcattttcttcttcaaaagcgtgttggcttttttagntttctttctcagtttttttccttcaatta

SEQ ID NO: 213620 - DNA, 274 bp, Glycine max
ctaatatctcccacactgtgaagagtgatccatctctggatggcctagatgtctcaggaccacttggacccgctttctaccaaactcaaccctaacaaaactctattatctacacacaagggacactcctctatatttgcaaagaagcgtgtttttctaacgacagaaagaacatgcctgagatgtcttaactgatcatctatgctcctactatacactataacatcatcagagatacaactacaaatctacctactaaatcccttacgacatg

SEQ ID NO: 213621 - DNA, 430 bp, Glycine max
  unsure (1)..(430): unsure at all n locations
agctcgccttgccccatgatatatatgagggacttatgatcactatgaatgacaaattccttgggataaaggtagtgttgccatgttttcaaagcccgtactaaggcatacaactcctaatcataagttgaatagttaagggtaggaccacttagcttttcactaaaataagcaattggatggccttcttgcatcaacacagccccaatcccaacatttgaagcatcacactcaatttcaaaagatttttgaaagtttggcaacgcgagtatggaggcattagttagctgttgcttaagaacattgaaagcttcttcttgtctctcttcccatttgaaaccaacattnttcttgagcacttcattgagaggagctgccaatgtgctaaaatccttcacagatcgtctataaaaacttgctaagccatgtg

SEQ ID NO: 213622 - DNA, 452 bp, Glycine max
  unsure (1)..(452): unsure at all n locations
actcagcttcatataagctcgaaccatttatcaataaacacaaggtgagttttattcatattattagagngtatctcttgtatctttgtgagagtgattctcctaaattcttgagtgattcaagaacactctggctgtatcaaaggactntcacaacctttgtgtgttgccctcgctggaaagagagattctttccttcctttcatcttcacccttgttctgtcaaaccacaattccagacaatccacctctgcccacaattatctagtggccataactcccattgtacgcactcaaattaagtgattcttgaggctaaattgaatatcataacgagacctttcacctcgttctggaatcacctcatttggatccctgtatcttcagctatagccatatctatatgtctgtccagccaccacttcttaacctacgttgtaccatcccattca

SEQ ID NO: 213623 - DNA, 420 bp, Glycine max
  unsure (1)..(420): unsure at all n locations
agcttcttaagtatgctagtaaatatttgttttataatttanaatttataaatatatatatatatatatatatattacttatattaattctattgtataaaataaaatatttattttagaatctgttacgtaaaattagattttctatctttctaagattttgtttcaatgggtcaaatgcaatttgttatgtttgttttgatatctataagttggtttccaacggtcagatttttgttgttgcataagggggtttatgcctatatatatttcctttctcctctctagaaaagacacacaagcagaacaacattttgaattctttctccctaaaattntctcttccttctcttataaaaacttatttttgagagcaaaagtattggtgttcagaaggtgtggggattctttcgctgcaca

SEQ ID NO: 213624 - DNA, 438 bp, Glycine max
  unsure (1)..(438): unsure at all n locations
taataagcctcctatgtgtaatggagaggattaccactgctggaaaacccgaatgcaaattttcattgaggcaatagatttaatcatttgggaagccatagaagttggaccttatgtacccaccatggtggctgaaaatacaacaatagagaaacctaaagaagagtggtctgaagaagaaagaagaatattgcagtacaatttaaaggctaanaacatcattacctctgccctaggaatggatgaaatatttagggtgtcaaattgtaagagtgctaatgatatgtgggacactctacaagttacacatgagagggaacaactgatgtcaaaagatctangataaatactctaactcatgagtatgaattatttangatgaagacgaatgaaagtatacaagatatgcacaanagaattacacatatatgtaatcat

SEQ ID NO: 213625 - DNA, 465 bp, Glycine max
  unsure (1)..(465): unsure at all n locations
agcttctatagaaggttcattcctaatttctctatctttgcatcacctctcaatgagctggtgaagaagaatgtggcatttacctgnggtgaaaaacaagagcaagcctttgctttgctcaaagaaaagcttactaaggcacctattctagctcttcctgacttttctaaaacttttgagctagaatgtgatgcctctggagtgggagttggagctgtattgttacaaggtggacaccctatngcttattttagtgaaaaactttatagtgccacccttcactaccccacctatgataaagagctttatgccttaataagagctctccaaacttgggaacattactcttgttccaagggaattgtcattcatagtgatcatcaatcacttagtacattagagggcaaagcaaagtaaacaaaaggccatgcaaatgggtagagtacctagagaaaaattcatatg

SEQ ID NO: 213626 - DNA, 268 bp, Glycine max
tcatcatgcttggacgaatgagaaaactggcgccaatgaagagggggaagatgagggagaaacccatgctgtgactggcatttctatacgggcaagatttccaccaacccaacaatggcatttcacacaaccaatgctaaacaccacctttagcacgaaccataacaccaaccaaggaaggaatcttgcagcaaaaagcctatagaattcaccctaatttcagtgtgctatgctgacttgctcccatattcacttgataattcaatgg

SEQ ID NO: 213627 - DNA, 392 bp, Glycine max
  unsure (1)..(392): unsure at all n locations
actcagcttanaggcttagacaagggagtatgagtgttgaacaatatatgtttcatatgaaactactccttntgagagatgggcttatggaggaggaaagaaaaagtattgctaggtttcttagtggacttaatatagaagtgagggacaaggttgaggtccttccatataggaacctagatgacctagtccaactttgcataagggtaaaacaacaacttataaggaagcctacttcaaaatcttatggctctcactcttatccaaagaaagaccaaggtcaaggcatcttatgggctgcaccttctaagctcaaagatgataagggaaaaaatagaaaaagaaataaaggacaacctttaatggttaaggaagagtgtaatgaggtaagt

SEQ ID NO: 213628 - DNA, 454 bp, Glycine max
  unsure (1)..(454): unsure at all n locations
tctcctaataatacatatgaaataccaactagaagctctgttatgttcttcataagcaacatgttntgtgtagaaaaagtcataatcagttaagtgtcactatttaaccctttctagtagccttctgattcatttcaattgggatgttataacactttgaaccattaggataatttttctcaccttgacttaaggccatcaattgagtagcccataccccaaaagtgttcaatcaggcctcgaagggaatgcttacttggagaagctagaacttcgtaagatgatattatgtgttctaactcatatacatgtattactattacctcaagttttcaatgacttaagtgtgaaatgaggtaaagacataaaagaacaaaaagggtagataatacatgagaagtaaagatatatatgataagaacaaggagaggaacattggggaaagtgaaaatat

SEQ ID NO: 213629 - DNA, 483 bp, Glycine max
  unsure (1)..(483): unsure at all n locations
agctggctagcanatgtttctgacatatcattcatcttcatgtcattttattatgtatttctgttggaatttcgtattttgttgtctagtgtgtaccatataatacatcttcaggaatttcagaataattctagtgctgttttttggtttgttcacttgtcaggggtgaggagtgtcgttgggacatgtcttctagagtctcttgcttttgtgtatgacctgtttgaattgagctattcatcataaagatgaccccacctgcaatgttgaatttacaaaccaatgtttatcatcttccttctctgtcttcgtcttccctcctctnttttgagatatcatgtttatcttctttctatcactgtggtcagcttaatcttggctaataattttnttgcttcattngtgtgcattcagcctntcanatgaatcatactatccatgactgccaaggtcaccaaaaaacatgaataanaatgtcataag

SEQ ID NO: 213630 - DNA, 489 bp, Glycine max
  unsure (1)..(489): unsure at all n locations
ctcagcttaacctagaggagacggaccattccaagtgttggagattatcttcgacaatgcctacaagattgacttgcctagtgagtataatgtaagtgccactttcaatgtgtctgatctatctctttntgatgcagatggtggagccttggatttgaggacaaatccttttcaagaaggagggagtgatgaggacataaccaaggaccatgaagcacttgaaggtcccatgaccagaggcagacttaaacaagcccaacacgtcatagagacaaggctggtcatttgtatagctgccattgatgatgattgaaggcccaagtggagaaagatgaaggcccanaggcagaggcactaccaagactactaatngttgctgaaggcccaagttaaataagttttaagttataatttaattttattgtaattttggcccaaactgtntataaggcccatgtctatttntatctttnttgtcaaatatactat

SEQ ID NO: 213631 - DNA, 411 bp, Glycine max
aatacatggagctggaggagcatcgctctattacagtacttgatggttatcagagaaattgatctgacgttcacttgtttggtgagggtatattggaggcttagtgctgctatgctggaaagaaatgtgttttttttttactctattggaagatagctaccggaccttggcaaagaaatatgtgccagggctataataaaatattgaactgttgacttaatccttaaataatatttggttggttggactttccaatatatttaaaccttgtatttgaattttcaatataataaaacctttaatttaaggttatgtgcacaagtatgtgatgtcatctttaaagaacccatcctccctccattatgaaagaactcacaccacaagtttatatatcaaaacccaataccaaaa

SEQ ID NO: 213632 - DNA, 348 bp, Glycine max
cgcttggatgcaagaaaggaagctattcacaccaagtgtttgtgaatctctctcactcatgactataacaatgaagatgaatcacaacagaaattgtaacagagacaaaatctggttgaaacgatatcttccagtgcgcagtaggaagagctctgataccataacagaaattgaactgaatgaataaaggaagttgtatcgcgagagagagagagatcgagagagagaagaacacacaaaatagcttatggaatgatcatagacagcttaagctttattttccagtaagtatggtgtatatacataatggagaatgataagggaatattagctattcaattacaaatg

SEQ ID NO: 213633 - DNA, 376 bp, Glycine max
  unsure (1)..(376): unsure at all n locations
agccagcttaatcacagtgcggtaccctaccgcaaacaagggcttcatgaatgcctttgtggagaggtggcatcangagacgtcttcctttcacctacctgttagagagatgaccatcactccagatgatgtgtcttctctcctgcatctgcctatgacaagcaagcccattgatcacatcccatccgcctttgaaagagactctatgaagattccgctaatgagccttcttggcatatcgacagaggaagaggctatggtggcgaccaccacaggtgccaaagtgaggtngacgttgctagtaaagtatatcaccgctatgttaattatgtatagcatgagggttgcacgacttatttctgcctctgtcgacata

SEQ ID NO: 213634 - DNA, 250 bp, Glycine max
tccttgcatggatgtcggacgtcaacgaaggatgctccacctcgcagcagtcatgaactccagcgaccgacgtgaaccctatcattggcgattgcgaggaggacatggcggtgagatgtcctacacggcggtgacaggtgcctaacactgatgataggtcttgcgtgagaaagggacaagaggaaggctttgttcgtgatactatgcgcgcgaagggaaaaaggtgtttggatcgaatttatgataacac

SEQ ID NO: 213635 - DNA, 498 bp, Glycine max
ttaagtcacctgcggcatgcaagcttgtgttagggtgcttagcagctcattctattatcattagtgattggtttcatagtaattggtaggggatttttttcgtcaacttgacttggtctttctatggatgatttagagccacctcatgcatgcttaattttgtttattattgaactttactatctctgtgcatgttttagtccattaaattactgaaccttttttcttccctttcactctattttgtgcaggcattttgtccccaatttaactattggcgctccagttattgaaagtttgagaaagcacacaaagtaacaatcttcctttttcactgatgtagatgattttatgaagatttttgtttttttttttcctatctgcataatatatggtggcttttagtcattaaccattaaccattaacccttgcaggggatatttggattgtcaccttatggttacaaatcctcttgattatgtcgagcccttgcaaaa

SEQ ID NO: 213636 - DNA, 416 bp, Glycine max
  unsure (1)..(416): unsure at all n locations
atactaagcctactaaaaacacgttggtcaaaacctagaagttggcatgatagtttataccaagttctttgggcttattgaaatttgccaaaacaagccactgctggtgttactcatttcaagtttgtttatgggcataaagcggntttacctattgaaataagtttaaattcaattcgaattcatagacaaaatgaaatgcttgttcaagactattgggatatgatgtatgacaagttgaatgtcttggacgaggaatgtttaattgcgttagaaaatattattcgtcaaaaagagaaggtggctaagcactataataaaaaaattttggaacaaatatttttgacttggagaattagntttgaaagttatattacccattgataagaaatcgaaagttcttggtaatggtcacc

SEQ ID NO: 213637 - DNA, 401 bp, Glycine max
  unsure (1)..(401): unsure at all n locations
actaagcttctcgatatattatgcacctgaatcagacttgcgtgaganaagttattaccatttgaattgttggagagctttcgctgtgcaatttctagcgtctcgatatattatgcgcctgaattggactttcgtgtgataagttatgaccctttgaatatgccgagagcatgccgttgttcatttctagcgttttgatatattatgcgcctgaatcagactttcatgtgataagttatgaccaattgaatctctggagagcttccgctgtgccatatcgagcgtcttgatatactatgcaccttgatcagacattccgtttgagaaggtctgaccatatgaatctatggagagccttctgttgtgcaattccgagcgtctntgtatattatgcgcctgaa

SEQ ID NO: 213638 - DNA, 501 bp, Glycine max
  unsure (1)..(501): unsure at all n locations
atgtggaaatctctgaaatattctagagatgtgtggattcttctggaaccttatgaaaaagtatggaagagagtagaagagtgtagagactcctataatgtgtggagcattctagagaattagtctccaccctatgatacaagtaatctccaccattcattgtggaggtggagtagtataaataagggtaggagcttcattcctaataaaaaatccaagtagagagtctctctaagagtttgaagacgaatcttttntacctgctcaactcctttgttgcaagtttgaagcttatctcatgcttctttggcccgtcgtgcgttggatatcttctcaaatgtatcttcatccaccgattgataaatgagaaagagagctntcttgtctctctttcttgactccttcaacgtctcctttacaccttggcttagcgaggcttcatcttgctcctcgaagccattctctacgatatcccacatatcttgatacttcaattatcat

SEQ ID NO: 213639 - DNA, 487 bp, Glycine max
  unsure (1)..(487): unsure at all n locations
agcttctcaaggaggtgagtttagttnttagatgggtgtgtgtatctaaactctagcttctcaaggaagtgttctcaaagaagctcctcaaggaagttttcttaagaaagcttctcaaggaagttttcttaagaaagcttctcaaggaagttacctattctataaatagaagcatgtgtaacacttgttgtaactttgatgaatgaaagtcttatgagatacactttaaagttccacttctttccctcttttattccttcaatttcgtgctcccccccttctctctttcttttnctccattaaagcatcctcttcaagcttccaaggcaattcttggtggagaagctccttcttccttggcttattccctagaggatagaagtcatgtctagtcatgaaactttttcacctatcgtagttctgtcatagaagtcatgtctagtcatgaaactcgtcacataagaattcttatgttgtgctgaatttt

SEQ ID NO: 213640 - DNA, 495 bp, Glycine max
  unsure (1)..(495): unsure at all n locations
tgtcacccagctcgcccaggcgagctcagctcgcccaggtgagtcttgttgcttcctccagaagcaacagccttctggaggaaggatttggaaggcccaagtgggccagattgctatttgtacccccctttttactaaatgcacccccttctatttttttgtaattcttttttccgtaacgttacgaaactttacgaatttcataacgatacttattttccttccgcaaggttacgagtccttacagattatgtatttactctttttttgctttcgaagaagttacgaanactcacggattgcgaaaaatacctcctttcgatttccgtcacatcacggaattttcacggattgcgtaagcctgctaccttttgaatttcggcatgtctcgggacttcatttattgtgcaacaaaggacgccaagtatctcanagcggctaaccaaaggttgcatgtcatcaagtaataatccccggacaaaatanggtatgaca

SEQ ID NO: 213641 - DNA, 452 bp, Glycine max
  unsure (1)..(452): unsure at all n locations
agctntatgaagtatattggttgtctattccttgaaaactcgtgctattcatcttttcattctcttctccctttgccaaaaagaattcgccaaggactaaccgcctgaattctttttgtgtctctcttctctcttttccaaaagaaggaaggactaatcgcataaattcttttgtgtctcccttctcccttgtcaaagaattcaaaacgacacagtctgagaattcttttgattcttcacattccctaatacaaaagcgttcaaaggtttaaccgcctgagaattcttttgtatccccattcacaaagtatcaaaggtttaacagcctgagatctttgtcttaacacattggagggtacatcctttgtggtacaagtagagggtacatctacttgggtntgactgacaacaagagagggtcatctcttgtggatcagttctagtggagggta

SEQ ID NO: 213642 - DNA, 444 bp, Glycine max
  unsure (1)..(444): unsure at all n locations
gaatgcccattgtgaaacctttattcaaacctttcaaagttagtgagaacgcttaaagaaaaattagggaacttagaaaaaataaatccttaattgaaggcgtacgtgacaaccatagtgaattactaaacaagattggtaggttacttaaagtcattccagataccccccaagcctcggaaaatacttccaaaatggtaacaagaagtacctccaaattaatcaatgttattaatgaagatagtgaccaaaactcagataacacaactgagataggatcagtgtcagaaaagaatataaatccaattaattccaaacactggaaaacaccctccacattatattatcaacgtncaactgcccctgaccttctattagaagaaagaggtgaaaacaatcttaagaagtttagtgcacacaacatctatgaatggacatagatgc

SEQ ID NO: 213643 - DNA, 462 bp, Glycine max
  unsure (1)..(462): unsure at all n locations
agctngttgtagatctcatcatccagatggtgtttcctgcttaatatctaggattcaaaattaaccaaagttatgtccagaaaattaaattattgaacagatcataaataagatatacaaaagcaattgttaagaagataaaaactccatggtactcacacggcatatttctagtgctgtttcatttgtaatcaaggtttaaaattgcatttacaacacctaaattgtaaaaacttgcaaacaaatgtttaattatatgaagccccctcaatttattttgaaaaataaaaatttataaaaaaaaagatttattttttctttatttcttaactctcagtgctctaaaaattgtctaatttcgccattgacaatggtgattttgctaacaattgtgaagagtcaactgttgnggtccgaattacgatngtagatggcaatttgagattctgaaccatatcaatt

SEQ ID NO: 213644 - DNA, 461 bp, Glycine max
  unsure (1)..(461): unsure at all n locations
acttgcagtctctcagacatgtcattcacaaattctccttcttttatggagaacctctcgtaatgtctagttagagttgcaggccttctaagtcttacatattttgtacctttggagnttgggcttaatgagtctcaaatctctttgcttggtttaagcctacagaactttntgtactcattnttatatagagcacatactagtgtatatctagctcttgtgtttagttccatagtggccagatcagcatctgcccattgtgcttntaatctacgatgggaatatcatcatttgtgatgataagcccaaatttgtacttagtggacttgatgacaatctctgtagaacaacttcatgatgatcaagatgattcaggagtttgatgatataaagatgatgacacagctcaaaatcagatcactctgatacaagatatgacttcaaatgattcagataagtca

SEQ ID NO: 213645 - DNA, 374 bp, Glycine max
  unsure (1)..(374): unsure at all n locations
actacgctatcagaagttcattctagcatgctttttgccttgatcacgtaaatgcatgtggtgtcaccgagctagtttatcgtactatcacgagggatcagggtacgataacctaattgttgcatgtgtgtcttaatgcgattctggtcaagattactcctacaagaggaatctgcggacgatgcttgatcgggattacgctagactatcatgatgaatcggcgggatttatcatttcaggagacaccacagaacacatgagcattggtaagatagaatatccttctacatcacgccctattaggagaccacgtgttgctacttgtcntacacatattactcacggattgtcatttatagctactattacctgg

SEQ ID NO: 213646 - DNA, 280 bp, Glycine max
aggccggctttaactgtgcggccggccaagaccaaacggaaaacctcctttgaaaaccccccacggcccaaacccaagcccgcaaacgaaacaccccccgcccgaaaaagagccgcttcgaactaagcgccccccaaaggaccacagcccggggaaaaagggaaccctgatacaccccggggagggggctccgggtgccaaaccacaaccacacaatggccacaaagcaaaccagagatgcgagacccaccaaaaactccccccccccccccgggggggg

SEQ ID NO: 213647 - DNA, 473 bp, Glycine max
agcttccaatgtacaccaccatcacacaggactttatctataaatgattatggacattgctcaaaaagatatacagtcaatgtttcttccatctagagaaatttgatgtcatcatatgacaatcaaaagaatagaacaactgcttctacatccacatgccaaatcagtaatccttattccaatatgacacagtcagacattcatacatgtaatttttattgttatgctattatcaaatatctacatgcacacattttatttattattacatccttttcatatgttcttctacagtcaactatatatagaatgccaaattgcctgtttattatgcagatgaacattagacaccaactaacactacacaggatgaatcaattgtcagcgatgacagctcacaatccaccaataatgatgtaaatatgacacaggaaaacataatatacgcatttatccatattatatttattata

SEQ ID NO: 213648 - DNA, 473 bp, Glycine max
tgtaatactatattagatatatgtgattgtgaggagctgtacctctttatgaatatgacaactcactccatgtgtgttgtttgtgtttgaatcttatgatgatctcgaaccttgtgtttatgagaacaaatgattacatggatgaatttaaagaacctcgtgctaatagaggttgagacacaatgctctgataggatataacattaagacatgagtttctatactaatagcatgaaattttggacatgcagttgtatcattttatgtcacatgctgagtctttagttcattcattggagtcaaccttattttgggtggaagatgtcttcatacccttatttaataagcttttaatatgatgattaacatggatattaaccttttacacacgtaaactctcttatgttcattgatagaaacaatcttttcaattaattttgcattgttatgtatgatattatataaatatgtat

SEQ ID NO: 213649 - DNA, 456 bp, Glycine max
  unsure (1)..(456): unsure at all n locations
agccttgtacatagtatccatgcatcacgggtatgtggaagacaagacttgcaatggagaattgnggacgaatcttctattaatgtttggtctcaaccttgtctcatagatgaaggtaccccatatgtctcttctattcctaattcattgaattatgatttgaatgttggagatttcattgaccacgaatagaaaatctagaaaaaaagatcttgtagaagcaaattttgtccaacctattgtgcataaaatattaaccattcctctcttacacacataagaaatggatggtcttatttggaagtttacccaaacaagagcttacacagtctatagtgcttaccatgctatcacggagacagttttagacaacaatcatctaaaagttgaaggaaaatggtcactgatttggaagctaaaccgttggcccgaaataaacacttgctttggtgtctt

SEQ ID NO: 213650 - DNA, 390 bp, Glycine max
  unsure (1)..(390): unsure at all n locations
cttctgcaagactctgcttgccattttttaaagatctttntaagccctctaattcttgtagcatttcctcttcttgttnttgcttctcactcttgttattcagcaactaaattcaacatgatttaaaaatattacaactaatgactgagaaataagcattttacagtccaacagtaaaatggtggcccatcacatgtgtgtttggttcagcttatagtgaagaaacattcacttttcttgacatgtttctgaggctntattaatggaaaaagatgaatatttcccaaagtctaagctgaagcaaacatggcacccataccacaaagtgggtatctaacataccatatctttacataatctcatgcaagaaaactagtaagaaactcaatt

SEQ ID NO: 213651 - DNA, 481 bp, Glycine max
  unsure (1)..(481): unsure at all n locations
gaaagaatccatggaggaaatgcttaccacctcgttatgactggaaagcagtttctaatgactcctctacggcctccacataaggcatagaggatgggcagctcaccaagatgtcttcctcgcctgatacgatgaccaaatgcccttccactacgaatttcaacttttggtggagtgtagaaggaacaactcccaccgagtggatccacggacgccccaacagacagttgtaggggggttaatatccattatttggaaggtaacttgacaggtgtgaggacctatctgtactgggaggtcaatctctcccctaacctctcggcgggtgccctcgaaggcacgaaccaccattgaactcggctttaggtgggaagcattgaatggtaatttctccaaagtgctcttangcatcaccgttaaactggaaccattatcgatgaacaccttggctacgatatggtccatacacttgactgatacg

SEQ ID NO: 213652 - DNA, 460 bp, Glycine max
  unsure (1)..(460): unsure at all n locations
agctntattcaagacaaagaaattaaagatattcaagatggatgatcaagacagtctctagagtcttaggaagggtatatttaatagaaagggaattccaattgaagtagcaaaaggtttggccaagaaatttaaattaaaaagtctttttcaagagatttactctctggtaatcgattaccagaggatgtaatcgattaccagtggccaaaaatgatttacaacagctattaaaatttaaattaaaaatttgcactgtgtaatcgattacacatatatggtaatcgattaccaacagttactgaacgttttaattcaaattttaaagcttgtaatcgattacacatatactgtaatcgattacctgaggagaatttcagaanatattctcaacagtcacatctttttatttgattcttaaatggccatcaaaggcatatatatatgtgacttgagacat

SEQ ID NO: 213653 - DNA, 296 bp, Glycine max
  unsure (1)..(296): unsure at all n locations
tatggggaaattttggnttggtttcttgcttgaatacggtgaattattggtttgtattggatggccctangcctataatgcattttgaaacaatgggacatgccacattgtccccgttctctttgtattgacgcctaaacgcgcgcccaccaagtgttcggtgaaatgcctcaatggcattagcgcgtgacttttgtaaggaaacaacccgtggggcattttggtttgtacatattttctatttttggaatatgtattcattcccgaanaaggctagagtaatngccccacatata

SEQ ID NO: 213654 - DNA, 350 bp, Glycine max
  unsure (1)..(350): unsure at all n locations
acttaagcactgagctgcacttaacatnggtggtgataaggatccattaataacnccctagattcgatgcgaggtgcgacctgtcaataaagaaacgatcctaatttattgatcgcaatttgtcgacaagaactgacgatgttggttgcgatgttgaaactgaagttctgaaatatgataatcggagacatttaagttcacaactttcccaatttcttctattgttcttatggaagaagatagctgggagtggatagccttatctaaagacaatgacgtgatgccaatgactgtgtagaagccaatttccgggtgactatgatgttggataggtgcaaagaggattaatg

SEQ ID NO: 213655 - DNA, 248 bp, Glycine max
tctcatgtaggaggaccttcttctagtaattctaacttacagcagccttctatctctattccattcccacctatagcaagtccaaacaaacatatggaagaagcggaaaaggagatcttggagaccttcatgaaagtagaggtgaacatacctcgtctagatgccatcaagcagaatccaagatatgccaagtttctaaaggagctgtgcacccataaaaggaagcccaaaggcatgaaaggattagc

SEQ ID NO: 213656 - DNA, 376 bp, Glycine max
  unsure (1)..(376): unsure at all n locations
gatgcctaacctacaagccttctaatttatatccatatgccaaccctncgctatctctcccttcatggctgcttagaactaaacgatttctctgagatctcaaagaatctcggtaaggtgaaattagaactaactagtatcaaacaattgcctctatctattggatctcaaagcatgctnaagatgctacgtctagcatacacttatatcgagaccttgccaacaagcatcaagcatcttacaaggctgcgacatctagatcttcgatattgcgcgcggcttcggactctaccagagcttcacccatcacttgaaacactacatgtccgcgaatgcgcgtcattggagactcgaatgttcccttctattcctccac

SEQ ID NO: 213657 - DNA, 435 bp, Glycine max
  unsure (1)..(435): unsure at all n locations
agcttcagactaaagcaacacagaagataggtatccttatatccccacactaatggattctcaaggtttgagatatgaaattgagaatgaggtaaatctggagcaaactctcacctcacacaagtctataacatcaatttaaactagctcaaactggatttacacctaaaattccaccgaatcaaaatttgactcctcaacatccaattttaccctacaaatgactctttgctcactctggtcattagtgtttctctcttgcacagaccaagctttctcataagtcctaaatgacatttcaaactaggattaactcactttaacctccaaataccactaaatgcaaattcggccttccaactctcaaaaacccactctttgttttgactcataacaccatattctcactntctaactctaggttaactctaccct

SEQ ID NO: 213658 - DNA, 466 bp, Glycine max
  unsure (1)..(466): unsure at all n locations
ctaagctcatgaattacattctcccctttttgatgatgacaaccacctgtatgttatgagcaacaacaaagaacatatctatgtgcatatagtttactcccccttggttntacaatgattgcttatatgagacaattgaagatttcatatttttcatatataaaaagttgtctcataaaacaatagataatttttcttactatattatcttttatctttctctccccctttgtcaacatcaaaaacaaatcatgaatagagaggagaaagatgttaccacttgctgcaatgtatgagaatcaagtgatatcaaaaggcattaaaacaatcattcaatattaatcaagcaaaaacaagtacaatatcacatcaatcaaacacaatcaaacacaatcaatcatcatatatttcaaatcggataattaaattaacaatcaactaactatacacaataatttctattatt

SEQ ID NO: 213659 - DNA, 479 bp, Glycine max
gcgcggcatgcaagctaggcttagcgcatgaagactgagcgcttatcacaaggtctgcgcttagcggatagacaattgcaaaaaaaatttctaagtctttttctgtctatatcttcacacaagcttaaaaccccttgttcattactaaacaaactaaaattaatcacaatcacaatcaagatatcctaactacatgcaagaggtaataatgaaaatagaaaagggaaagaaaagctaggttgcctcccagtaagcgctcttttaacgtcactagcttgacgcatcgtcctgttatccaggaaccaagagagttcctacttcaaggaccttcttctcaggtctcttttcctccatcacatgcactttaaaataaacattttggctaagtggatccttgttctcctgaaacaaatcaaagctgatcttctgatcttctatgcccatccgcagtatctttgtttccatgtccaccacacagc

SEQ ID NO: 213660 - DNA, 428 bp, Glycine max
  unsure (1)..(428): unsure at all n locations
ctaaaaaacttgagtataacctttatagtaaataagccgaaccgagccgagccttacatatgtcgagccaaaggcccttgacaagctgctcggctcatttccacccctattagtgactatagaggttcacctgtntatctttatctattttatttgaacatgtatgggttgtttatgtttttattttactcgccgactcaaagttttaacgcgttgaacagttactacattttattatgcacactttaaagatcaagcgatgttttatgaaattggataggaaaagttttaatttccacaaatttccgctatttctataatctttcgagttaaccttatagaagactgatgactatctttttcttaagaaatcaactacggatgtaattgggtcgattggggtgtgttgggtcaacctatgactcaac

SEQ ID NO: 213661 - DNA, 285 bp, Glycine max
taactgctatcaggtaactgctaatacaatctcatggattatgatgagaaaattctagagaagcgccagctcgtatgatatgacaaatcttatggattatatcgtataatgctattcttgtaagacagttctaaaggatacaacatcagttctaaagggtttacataaatggttttcaaccgttttagaagcttatgtcttggaaagtactctttcacgactattatttgactgtctttgtatagccataggtctactatggttttaaatctagaccgtcttata

SEQ ID NO: 213662 - DNA, 339 bp, Glycine max
tgaggtatgagaaaagaccggaggagaggagagataattttttatgtctgcctcatgcgaagtcttaaatttgagcgtatactcacacgatcaaggtgaacatattgcgcacacctgaccactaattataggctaagtgacacactaaagacgaggggaatttgaatctctatatcaattgcacttgaagttgatattaaaatggtggagccacacatggagccacaatttcactaatcatgagcagtgaattgtagatatgaatcatcccactaattcaagatcaagtgccagattctccactaattgtgcttatgagtcatgacgcatgttaaacat

SEQ ID NO: 213663 - DNA, 291 bp, Glycine max
  unsure (1)..(291): unsure at all n locations
ccttangcactactctctctctctcgaatttgctgaggaaaattattttcgtgaagaaaatacaagccgaggcgcttccgtaatgtttccgtaacgctttcgtgagtaactacgcgaagattctcgaccgctcttcaagattcatcggtcggtcttcgttttcttcagtcttcaacgggtaagtacctcaaaccaagctttttaattcattctatgtacccgtggtggtccacattttgntgcatgtattgttattcttgtgtttggctactttctatacccccttttgac

SEQ ID NO: 213664 - DNA, 485 bp, Glycine max
  unsure (1)..(485): unsure at all n locations
agcttaatgctgatgggcagccttagaagattttgatgaagaacatgaccattctagctcagacatggagcgttctctccttttctaacctcattcctacctcccacacatctgatgtcaccttggacagagccaagttgatttatggtattattatgaagatggatatgaacttggggtacctcatctcccaccagatctctctgattgcacagcatgacacatccagacttggattgcctgccttgatcacaactctatgcaaggctagaaaagtccagtcagattctagatccctggagaacttgagccctgccattaacttggcatatattaagaagaactgttagaatcttgatgatccaacaatgacatttagagggccaaggaaggccaggggtaagagatcagaggtccncactacttcagcaccacctgagacaccatctacttcttcttccacagctctagtaccttcctcaact

SEQ ID NO: 213665 - DNA, 440 bp, Glycine max
  unsure (1)..(440): unsure at all n locations
ngcctaattaacctannaatgagagagaatgatgattatacactcattatggaagtactaagtatttgttacctatacttaacaganaatacttataacactacaaaataaccataaattgggagagtattgtcgcaacctacccttcggcgggagggcgacgcgtgactcgcgggatgcgtgttccacgaaaggaatacgcgcggagtcgccaccaacgtttatttgaggaaaacgtcggataaaccggaaaagacgcgatctacgaacttttaagtgaaaggttcgggagttgtatttacgcgcggngaaggtattagcaccccacacgtccgtcacaagggacggcagcctttaatcgaatgtgcaaacatgactntgattnnttacgttccctttatgtccttatatcctttataccctttttatatatatttctc

SEQ ID NO: 213666 - DNA, 464 bp, Glycine max
  unsure (1)..(464): unsure at all n locations
agctagcattatagacatggtntacattcttgtattatcgacatcatgcgctgaagctaattaattctctttcgtatataaagggatatggctgcacgttcgaacatgatgtatttacttttttccttagtgtctttgctcttaatcttactatgttgcagtttttgttgttcttgggtgatgcgcctacctcaccttattaatcattatacttataatagaatcttattattctcttggtctaatcattgttggtataattctattattgtgatattgtactctctatagattaaaattggtctttttagttcttatantttatatttcaatcttctgttaatctttttaggttcagagttgtattctttatttttatactttaccacttcaattctctttcatctatctaaaagatcctttctaattttaagactaacaaatatagtctccattaatactac

SEQ ID NO: 213667 - DNA, 448 bp, Glycine max
  unsure (1)..(448): unsure at all n locations
ntaaatgaccctcanaatcacataatctcatttctaacacaattttctctcttngccgcatatttctagggactactcatatgcgttcatttgtgttttgtagtgtcctattggtcctgcacaaggcagatagatcatgtaagcacaaaatccaaaaacaagcaacaagtatcaattgagcgtaattatttgcctaagaccaaaactgagttaaggtgagaaaataagagtcaaagaggggtcaaataatctaagaagaataggaaaatactaaactaaaaatggttaatcatcgcctctgctactgatgtatatattntcctttcccaacttctgattagttaacttggatactaaatttatagtgaaatatctttagtaattagtaactattacacctaagtctagtacattttaagtaattctaatgaaatatatgtttattgac

SEQ ID NO: 213668 - DNA, 322 bp, Glycine max
tcttaagtcaccgcggctgcaacttagtagctagactgatcatggggttattttgagttaagggggaagaaaggtaataatgcctcagcaacaatggtttagccaactatatagggattatggtaagaatgtatcctaagataataatgagaattaaccctataataatggtgagaatgaaataggagtttatgtgaagtattaatgattgagaggtgaggatccgaccaaatgcataaaggattcgctaaaaacatggtgaaggcaaagtcatgagataaataaaatacttgcttgggtagaagaattcaattcatcagta

SEQ ID NO: 213669 - DNA, 371 bp, Glycine max
  unsure (1)..(371): unsure at all n locations
tacctcatgcacttctctaatgactatggcatcatttctggcactcaactgctgggagttggaggccatcttttcaattaaatttctggcttcaacaagagtcatgtctccaagggctccaccactggcagcatctatcatacttctcttcatattattgagtccttcataaaaatattggagaagaagctgttctgaaatctgatggtgggggcaactggcacatagtttcttaaatctctctcagtactcatacaagctctctccactgagttgtctaatacctgagatatccttcctgatggttgtggtcctggaagcacggaaattttttctaagaatactctcttaaggtcatcccanctcgtgat

SEQ ID NO: 213670 - DNA, 376 bp, Glycine max
  unsure (1)..(376): unsure at all n locations
agctnctacttatgaggcaggaggaggagccttcactttcttgntnccaacgcgagctctgaccactgttcttccttcccgcgatgcttcttttcatgtccgcctgagtgggcttataacctaaaccatacttcccacgattcccttgggtttttatcaaactaattatgccgccattgtctttgcctaaacccatcccgggttcataaccgttccccaacataactcgggccatcattaccgccgcctcagacagacaaagttgcccaaagagggagtccacggaggaaatggtgaccacctcaaaagactggaaagcggtttctaacgattcttctgcggcttccacataatgcatggaggatgggcaagctac

SEQ ID NO: 213671 - DNA, 427 bp, Glycine max
  unsure (1)..(427): unsure at all n locations
acctttgcgagattcctcacggaaaacgttacgaaaacgcttcggaagcgcctcggcttagattttctttacgggaacaattttccccagcaaattcgaaagagagagaagggcccaaggggctgaacccttttcttcttcacttcctcccctatntatagcnaaatacgggaggggggtgccgcccagctcgcccaggcgagctcagctcgcccaggcgagccaggttggcttctccagaagcaacagccttctggaggaatattctggagggcccaagtgggcctgggtgcttttgcacccccattttgtactagtacaccccccctgctggtttttggtgattcttttttcggaaagtacgggaacttacgaatttcgtacgatacttgtttctttccgtatgtacagaacctgcggatacata

SEQ ID NO: 213672 - DNA, 437 bp, Glycine max
  unsure (1)..(437): unsure at all n locations
ctacanaagctgttgagaaattcagatggtcagtacttatctttctgaagtccgattcaagcgcataatatatccagacgctcgaaattgaacaacggaagctctttataaattcaaatggtcataacttttcacatggaagtccgattcagaggcataatatatcgagaagcttgaaattgaacaacggaagctctcgagaaattcaaatggtcataacttgtcacacagaaatccgattcaggcgcactatataccgacacgctcgaaattgaacaatgaatgctcatgagaaattaaaagcgtcataacttgtcacacgagagtccgactcacgcgcataatatatggagacgctcgaaattgaacaacggaagctctcgagatatcaaatggcataaactttcaatggaagccgattatgcgcatactattga

SEQ ID NO: 213673 - DNA, 500 bp, Glycine max
  unsure (1)..(500): unsure at all n locations
gcttattaagagacttctagcacactccagacatcgttgtagagatcctctcggtcagatcatggacaagtgtcttgtgaagtttaaggccaaatctcgagaagatccaacgattatttatatgctgttgagcgtctctaccgaggcagctgcatgtaggattctctagaagcttcattaagaggcttcctccagaagcttcctcgnggcttctttgagaagatttctcaacaggcttctttgagaagctagatccttatctatccacacccctctattaactaaattaacttccttaanaataattacggatgaaaataacgtaacaaataatcaaacatcacacataattactaataatatatagatatatatatcagggcgttacaccctngcccagaatgcacagtctagcctccatctctctgggatcaaaccttagtcttcaaaactagaataagtgggtaaagattccccctcctctaataacactagagtct

SEQ ID NO: 213674 - DNA, 460 bp, Glycine max
  unsure (1)..(460): unsure at all n locations
agctggaagagtatggagacccattcatgtttactaggtggnggtcgggcgatggtgcacaacaagtnttccacatccacaatgcgcgcataaacccaccatcccctgttgcccacctccaactgagctcacgtactcccacgtagcccatatcctcgtttctctcaataccgggtccccatcaatcctcccattcttccacaacatccaagcaaaacaacattcaaacagcacaagctatcacagccaagcaaaacagagcaaaggcagaaaactctgccaaaacaccaaccaaatcacagcttttctcacttaaagaccccagtaacaattccttcgttccggttcattaaccgttggatcaactcgaaaactttactggaagtctttagtacataagctcacattgtgaccgtttngatctactatcaaacatccagaactcactctacattactct

SEQ ID NO: 213675 - DNA, 348 bp, Glycine max
aacaaacccgcttgccaatcatggagggggggccgttaatgccatccaggcgagtatgtcaccagggcctaagctcttggaggatgtaaagacccccacaagggttatctacaaggctttgcacaaagtgggcatgattccctgtggcgggtgcacagaagactcttgcttaatgcatccgagtgtactccatgacatggaaacatgttcagcagttagagatctatacaacggatgatagaccaacgccggcttgaggtcggcagtgatagggacgaggaacaacatgtatacatgcaatcggcagatgaagaaggacctcaaaagcctaaacccttgataatacac

SEQ ID NO: 213676 - DNA, 338 bp, Glycine max
  unsure (1)..(338): unsure at all n locations
agcttaatggcttctcgacataaactattaattcgtatagngagattctcaatgtcaattggatctgttatnttttcatcagtttcaatatcagaatttgcattccttgtccatcgtttcaaaatgtagtgcgatggaagggtaagaacatttgtaacagtgaagacagtcaatatatgtcaacaaagaacgcctgagtattcaaacatctggcagctgcaattcaccttcatttcagagatatttaatgtgaccatgtatgccttgtgatcatgtacatatttagcaaccctgtatttactgatcacaccatcatcctcaacattatttgcagtata

SEQ ID NO: 213677 - DNA, 423 bp, Glycine max
  unsure (1)..(423): unsure at all n locations
tctacaaccacccaccttatcctaaccacagaatatggtctacttcttcgctgnttccctatctatcgctnttctgagcggcgtatcactcgacaaatatttgggtctctattactcatattattgnctatgctgaggacaaggaaaaaaggacaaagccaagcaaccaaatataacccgaggaaagagtggtctttgctttaatcattatgctatccacttgcttagtttcaatcataatgccacccaccaagcttgctntattcataatttcccactatttctgcacctaaacagtagaactcacctccacgctagaatgaanagaaagaaatacagcgcgggtttgcaccctagtgagatcgaaagaaacacaacccatcagagaaaattataaaaaaaattaagaaaaaaggaattcta

SEQ ID NO: 213678 - DNA, 416 bp, Glycine max
  unsure (1)..(416): unsure at all n locations
ctaaggctaaataggctaaactntcgtaagctacttgagccgagtctagtcttaaatgagggatctatggacgaaactcagttaaagttagtctaaaccaaagaggcttgtttaaatctataatattctaacaaaagggatgatgtaagctccattggagcttctaagccttggatcttcttcatcaatggattcctttgcttcttggaagatgaatggcagcggaatggagaaaggaagagagagaggagatgccacttcaaggagaagatgattctagaagactctcaccatcataggaggccatggataagagcttaaaggaagaacgagatgaatgaggngagagggagagaagagcacgaaattntgtgctctaaatgagctttgaaatctgaagtttaatattcaaatga

SEQ ID NO: 213679 - DNA, 415 bp, Glycine max
  unsure (1)..(415): unsure at all n locations
agctntctagctattcataggagtattttgatcttctttttgagctctaaattgtgggagtgtgctcaaatatatggggcaattttgatttgttntcttgcttgattacgttgaattatgggtttgtatgagatggccctacgcctataatgcattttgaagtaatggggcatgccacattgtccccgttctcttgctattgacgcctaaacgcgcgcccaccaagtgttcggtgaaatgcctcaatggcattagcgcgtgtattttgtagggaaacaacccatggggcgattcggtttgcacatatntttgggacatgcattcattttcgaaagagctagagtaattgccccacatatgtcctatgcctaggaaccaaagtttttatgtcaaagtacacaagaggaggtgcata

SEQ ID NO: 213680 - DNA, 465 bp, Glycine max
  unsure (1)..(465): unsure at all n locations
tctacttatgtggcanggcgggcttacttcactatcttgtcttttctcgagctctgaccactgttcttccttcccgcgatgcttcttttcatgtccgcctgagtgggcttatagcctaaaccatacttcccacgatttccttgggtttttatcaggctagttatgccgccattgtctttgcctaaacccatcccgggttcataaccgttccccaacataactcgggccatcattaccgccgcatcggacagacaaggttgcccaaagagggagtccacggaggaaatgctgaccacctcataagactggatagcgggttctaacgattcttctgcggcttccacataaggcatggaggatgggcagcttaccaagatatcttcctcgcctgacacgatgaccaagtgcccctccactacgannattcagctttggtggagtgtataaggcacaactcccactgag

SEQ ID NO: 213681 - DNA, 333 bp, Glycine max
  unsure (1)..(333): unsure at all n locations
gatctctaagtcacctgcggctgcagctgagacagcctacaattgctgatcctgtaatcgggcactgctcatacttgatctgtcaatgctttctccattgccaacaggtaaattgtacaggaagactgcacaactcctacttnttaaggccattcattattccgaggatccttagatttacttcaaattttgacattggaaagaacctcggcaacattaaaagcactattgtgttgatgctgcataactgacatttttaaaggatcatcctcccgattttgaaaaagactgcatattcactttaatatttttggagtacatgaaagagccttt

SEQ ID NO: 213682 - DNA, 471 bp, Glycine max
  unsure (1)..(471): unsure at all n locations
agcttaataaaataatgaaaatctaattaaattatggaggaaatagccaacacaccttctatatatgaccatgcattgntacatctctaccacanaatatgaatatctaatcttattggaaacgatattaataaatgaaaagataaacatctctttttaaaccttatacatcattcacataattatttcatgtatcatgtttaacattttttaatttcaatttatattttcttcttcgtaaatataaagccatgtacacccattaacaaagttcatcttgtttacagcttcctttaaaaaaaactgttgtttacaacttattctccacattaattatcttaatcttttttttcaaacaaagctcaatcaatttttcatataaaaattaattctaacctttaattttattctcaatatcaaacaatcacatcaaacactttataatcatccaccatattccaacaatatcca

SEQ ID NO: 213683 - DNA, 442 bp, Glycine max
  unsure (1)..(442): unsure at all n locations
acacataaaactaagctaatgaactactgcaatgtaaacgccgggaagtcaattatgaacctggccgtntgggtcctcttggaagctacgaaccggtaccgcncagccccttcggcnnnaagggtatacaatgctagatatttgcnagctngcnaaacgcttctacgggccttttcaaatcactgaccacgttggcaaagtcacatatcgctggaagctcccagaaggtgcgcgtattcatcctggggtcctttgttccctcttaaaacccttccacagcgaccctgattccagttccactgccccactcccgcagcacttcctcaatgatcagccgcttatcactcccttagcaatcctggactatcgccgccattctaaggaggacccatgggaagtgttagttcaatggaagggactggctcatgatgagacctcatgg

SEQ ID NO: 213684 - DNA, 236 bp, Glycine max
  unsure (1)..(236): unsure at all n locations
agctngatcaaaacaaagagataaggatgctantccactcatatcatacacgtgctcattcaaggcattacaaacactctatttatatcaaacacaccactgaaacatgagtcaatcatttcactgttcaaacaagctttttgtacaagcaatcaacactaagacaacaaaaatttataagactaaaatttaaatactaaaatttcaatgactcatacataaagcataaactaaat

SEQ ID NO: 213685 - DNA, 322 bp, Glycine max
  unsure (1)..(322): unsure at all n locations
tcaagaatgagaaatccccaagagaaaacgttccattgatttttttcgctttactttacttaaacggattttttgattattatattattaatttaccttctttttgatttcccacgtggttacggcaccaccgaacggccggaattcatttaaatccaattaatggatgatacacatcanacgatgcggtggaatttattttattnttagattaagcgagaaatgacttaaataaatggcttaagcacgtcaaaagggggtattaaaagcaaatgaaaacgagaacaaaaatacatgaaccaaaatgtggaccaccacgggt

SEQ ID NO: 213686 - DNA, 443 bp, Glycine max
  unsure (1)..(443): unsure at all n locations
tttcttattttatatananngctagctgctagggaacaaactcccaacaacaataacaaaaggataagcgcaatcatggaatatcctaatagaatgatatccataacattctacactatctaaatggtgcgattnggtatgcctactacatgatgtctactacgtactatatgcatgatgcctcctgttaatcatgttgttaaccttcctcttgggcctagtagtgcttactgcctgcagatcccctgtgtcattcatacccctcccccccnccgtgtcattcgtatcactcaatcaactggnggcatttaatgtgaaagcttttgtaatgtactcaaggaacttatcanaactcatatacctgaatctcttcatgacacaatatttttaagtgctgcaagcaaaagcacaggagtaaaaaaaaactagagaacagttatgtg

SEQ ID NO: 213687 - DNA, 148 bp, Glycine max
  unsure (1)..(148): unsure at all n locations
agctgtgacccaactccatgaaagagagaggactcctcttttgttatnnccngaaacggaattcatagctgttcaaaatgatatcactttctagtttccagatcatccatatataccaccgcacaccacaggaacctccatctaattg

SEQ ID NO: 213688 - DNA, 347 bp, Glycine max
acttatgtgctttaagtgagaagaaatgcctctttttccacttgtgaagatagtccaagtttggctatgaagatggttccaactgagaaacatttggtgttttcattgggttataaacctattgagctagctttgatattgccggtgtcgacaacatcccgtgaaagagctctttcagcaatgaagattatcaagtctaaattgcgcactaagatcaacgatgtgtgggtcaatgacttgatggtatgttacaccgagcgggagatattcaagtcccttgatgatattgatattattcgaacatctacccgcaagaagtctcgaaaggacacttgcctcgtaattta

SEQ ID NO: 213689 - DNA, 445 bp, Glycine max
  unsure (1)..(445): unsure at all n locations
aggatggagaattgcactaagcaatcactacgcacggctccaagctccagggtggaggacgcatgaacgaaaaagcaattcatggggctccgaanaagggttgaggatggagaattgcactaagcaatcactacaaacggctccaaactcgtgggtgaaggacgcatgaacgaaaacgccattcatggtgtctccgaaaagggttgaggatggagaattgcactaagcaatcactacgcatggctccaaactcctgggtggaggacgcatgaacgaaaatgcaattcatggtgcttcaaaaaaaggttgaggatggagaattgcactaagcaatcactatgcatggctccaaactcgtgggtgaaagacgcatgaacgaaaacgccattcatggtgctccgaaaaaggttgangatggcgaattgactaagaatcacaatgcatg

SEQ ID NO: 213690 - DNA, 266 bp, Glycine max
  unsure (1)..(266): unsure at all n locations
gctgcagctgctgtctgctgaatgtatgaaggtttttttgagaggcctnaggccgctgggccctcgacctttgtgctgaatgagagactgccggctttcctagtgaaagggatgtcggctttttacgtcctactggaacgctgggattgctggtgctatctttagagctgtccagtttgcagtgcgggacattcgtgatgagctttaggactgaacgttcaggggaaaggcgcctggagcacgatgtgtgtggcgctagacgctct

SEQ ID NO: 213691 - DNA, 398 bp, Glycine max
tttattttgtttgctgacttctcacaataccttgtatgcagaaaatgtgaaagaacactaaagctaccaattttatctccaacaagtttcgatttttatctcaaacagaattgctttctttggttctctggctacgatttctttggttctctatttctcaaaatacaaaagcttacatcttttaagtcagcctctattgcatgcagagaaggtggaagagtagactacaactgttgtttttatctgaatactctacgagtatgagttcattttctttgttttttggttatggtaaatttttcgtcttcgcaccttctagacgtgtcattcttcttatcccattttttgggatgtatgatgttcacaagacaaagcttaattcttgggcgtctctctta

SEQ ID NO: 213692 - DNA, 192 bp, Glycine max
atagggcagcactagttgagctaagctgcaaagaggtgataggaatcgtcacggatcataggcatgatcttcattgatcagctaaagagtatccttaaggtgacaatagactatgtcctcagctaagcgacactgttgggaatatgtggccatcatcgatagtgcaatagaaggaaattattggcgactacg

SEQ ID NO: 213693 - DNA, 451 bp, Glycine max
  unsure (1)..(451): unsure at all n locations
agcttgcattaggaattgcgaaagccctactctatcattaggattagtacctgacatctcanaaaaacaaatcaaacgtaacaagacaattatagttgctgtttgaatacctcacccactcaagtgtatcacacaattatggcttttctctaatgaaacactcttgccttttaccactctaattccccttgagttcttaggtaattcaagagattatggccacaacaaaaaacaattcaccaatatgtgtaaggtaaggctagagagacaaggaaaaggttaaccaagaaaaaggctaacaatgtttttatgcacaaatgaaggaaataaaattcagaatttaggaattcaagtaacaatccttcatgcaaccaatatattaccttanagagaaattttttatagttcttcaagcatgaaccattcaacccaatttttttttttttttaat

SEQ ID NO: 213694 - DNA, 334 bp, Glycine max
  unsure (1)..(334): unsure at all n locations
cagcttcttatgcacttctctctctctcaaaattgctgaggaaaattatttccgcgaagaatatccaagccgatgcgcttccgtaacgtttctgtaacatttccgtgagtaataacgcgaagattttcgaccgttcttcaagattcatcgntcgttcttcgttttcttcagtattcaacgggtaagtacctcaaaccgagcttttcaattcattctatgtacccgctgtggtccacattttgtttcatgtattnttattctcgttttcattggctttttatacccccttttgatgtgcttaagccatntatttaagtcatttctcgcttaatct

SEQ ID NO: 213695 - DNA, 411 bp, Glycine max
  unsure (1)..(411): unsure at all n locations
agctngtangattatgcgagacccatcacatgtggtactaggtggcggtcgggcgatggtgcaagtcaactctccacatccacagatcacacataaacccaccatccccagttgcccaccttcactgagctcacgtactcccacgtagcccttatcctcgttcctctcaacaccgggtccccatcaatctctccaagcttcgacaacatccaagcaattcaacatcccaaacatcatgaactatcaaaaccaaggaaaacagggcagaggcagaaaactctgcccaacacaaaccaatatcacagctnttctcacttaaaaaccctagtaacattctcctcgttccaattcgttaaccgttggatcgactagaaaaattttctgagagtctctagcacataagtctacatt

SEQ ID NO: 213696 - DNA, 405 bp, Glycine max
  unsure (1)..(405): unsure at all n locations
tgagagattataacttctttaagagagaatagatttcaaataatttgtttctttcgngngcgntttgaccatcctatggaaagaccttccaaagaaaatacacattggaagttaaaatttgttaaattaatatgtgaccacaattttatttccatgttgagctgggttgcttctggtaaaaggttttgtttatcatttggcagagacaggttaaacattctgtactttaattgtttttggtcttatatttctttagagtctttggctgataatgcatgtttcacttgattgtttggactttggaatctattaatatacaggtacaaggcagagatcgtttagttctaaaatacatangagaacagctgggtatagaaggttcctacattcctcgtacctacattg

SEQ ID NO: 213697 - DNA, 429 bp, Glycine max
  unsure (1)..(429): unsure at all n locations
agctncgagctatgctgctacactagttctgttccgcactgccgttgcattttattgaaagtgaaacaatttgaagtttgaagatggatgactcattttgaaaggtttggtggtgacggcgcaactgttttctgacgatggcgtgggcgcttttttgatgactgtgtgtggaccttgtttgacgacaacgcataatctgtccgacaacgatttataagccctccggtgacggagcgaacactttccggcaaacagcatagtcgcatctattgattttcttatttttgttttcttatgcacgaccggttcggccgttttgctggtttaaccgcttaacggccgggttgcaccggttgctaccggttcaattgcatgaatgatccaaagtccaaccctggtgcccttccgtttccagtccaactggttccg

SEQ ID NO: 213698 - DNA, 435 bp, Glycine max
  unsure (1)..(435): unsure at all n locations
taggggtattttcttggagagacaccaatggattgtatgtacatgttntataggaatttaccaacaccaagtaattgtaggtacaagatntttgaaattttaccaacactatgcatttgtaagtagaagttattttgagttttacctacaccaaataatagtaagtacaaatttttgaatttacctatgacaaacaactatagatataagtattgttttacttttacctacactagattatgtgtgtaggtaaaagcctccgtaggcatatgtncattttcttgtagtgtgtgttncgtgtttatgatggaatgagcctaaacacttgagcttgagtgaagcaatgactgtgaggggttggtgatgatccttccttgatttctgccatccttactagcttatttcagntgtgactctaatggtgcatgtcctatc

SEQ ID NO: 213699 - DNA, 462 bp, Glycine max
  unsure (1)..(462): unsure at all n locations
gtactagacttgagctcaacttgagttgaatacgcactgcttgatcttggctcattacctatcataggctgttcttataggctcggctcggcttacataaaagcctggcttggnctatgagcctatttaaaaacctgcttaaagatgtctttgaccaattaatatttctaaaacctagtgaaatactaactaaaaaaaacttataaaattctgtacaagttgtagaagcaaaacttccaagattatcntgatgatgccaaagattattaaagatttattcgtacaagatttatgaaatcaagaagattcatgagaagactcaagatatgcaagaacctcaagaatagcatcagtataagtataaaaagaaattttcaaagaaaagtttgaatagcacaattngtccaaaacaattattcaaagaaaaatctttaccagagttttactctctggtatcgatac

SEQ ID NO: 213700 - DNA, 455 bp, Glycine max
  unsure (1)..(455): unsure at all n locations
agcttgttttctatccaaactcangcacttgctatttgtgattctaaacagtaattaatgttggttcttttatgtatcgaaactgttaggagagagaaaacacctcagcacttgaaggattatgtttaagggattttggcacaagttcatttatttggtagcgcagtagtgcattaggataattctgttagtgttccctctgcttgcctagaggattctgttggtggctgttgtcctatagtgagcacatataactatatatatgcagtgtattgacagaagggaaataagaagaatataagccaagctttctctctatgtcttaagctnttctactctcttctctctgcttctgcattctgcatttctgcttctattcaaggtcttaacatttgaggctttcattgagctcccatggcggaacctgaccgatggaaccccattctttggcgact

SEQ ID NO: 213701 - DNA, 499 bp, Glycine max
  unsure (1)..(499): unsure at all n locations
tctgggctttggagccttatgatgaaagtatgacttatattatctacctangactactttgcttaaccaaaaaaacattaacagaagggagcaactaaattgtattgaccgactttgcttactgcactagctacactgaaatttccacgaacatcatctatgttccatagaccatctcacaaaacttcttctgctaaggtctctggtgtagaagaagcaaaagagttgtcattgagcataaattacaagtatccttgctcttctgtggtgctttggtgcatgttcaccatttcttgtcttgattgagatatataaggtngtctatggaccattccgttgttcctctgtgctactctatnacccatttttacagagcattntccatctaaagntagcccctaagccaacttatcatctctttggctatatcccaacgaaatagcaaggatttggtcactntatccttcttcaaatatatataagaataaggacctatttc

SEQ ID NO: 213702 - DNA, 127 bp, Glycine max
agcttgcttctacagatgatacccaaactggtgtcgttagactatgttagtgaaaaagatagattctgtatgttaaggtcatggtgggagaaaaggtgaatctacctaaagtcatcttctattactg

SEQ ID NO: 213703 - DNA, 412 bp, Glycine max
  unsure (1)..(412): unsure at all n locations
tataactctacctcttaaccccaccctttcctctctgccatgaggggccacaagttcaagctctgggaccacatccaaagcttcaatcttggtgacatgggctaccgcactggtggtatcattcgtgatctcgtcgaggacatgctttaatttcactgcaacaccaatgccgacatcgtcagcatcgataacatcacccaatattggtaccctaacttcatgtatgacagattcgtccctatgactcactattggagagtcaatcaaagatggtcatgttgacaatcatgtttgcgacattgttgtccctatatgccacgtangctctttcattaacggtaatcgatgaaagttaacgaatgaatcgaattgtacacttttacactttccagactataattgaatctcatct

SEQ ID NO: 213704 - DNA, 345 bp, Glycine max
agcttcgaataaaatgactgttcatggtttcctacactcttaaaaggattatatattcacttcggatagagtaaatgtaggtataaattaaatcattaagaagtcgagatgttcaatcaagattaagatcggtacatttttctaaaagttgtgaaaggtaacaactccagtggaatctttatgtttggaagtggaattacatggattgtgtttttaaagagctatatatgtaaaatttatttcttttataaaatgattacagtatactacctcccttgtgtttatattaaagatggtctcttaatatatgccccctctttaaagaccttttgaattcattcatga

SEQ ID NO: 213705 - DNA, 387 bp, Glycine max
  unsure (1)..(387): unsure at all n locations
ataatcgcaaagccaaagccctctctctctctctctctctctctgactcctccatttctgtgcctcttctctgtcgttacgaccctctctcctaaacggcgtaacggaaggagtcacgtgacgtgccgaagaanaaggaaaagggtgatggctntagagcaggagggtcagaataggaacacaaacggcgtattggatgctggagatgagggagggaaagcgccgagactgcctcggtggacaagacaagaaattctggttctgatacagggaaagagagacgctgagaacaagttcaggaggggccgaaccgcgggtctgccattctggtcgggtcaagtggagccgaaatgggcatcggtatcttcctactgcagaaagcatgga

SEQ ID NO: 213706 - DNA, 276 bp, Glycine max
  unsure (1)..(276): unsure at all n locations
agctngntccttattgctgccatgctagcatcataagcacctttcttcacaactatatcttaatcttcaatgntctgccttcagaagactatctcatattttcgttctcaatccctgtatttaactgtagctattagactcttcatggggccaggcccatagccttcctaactggtgatagaaatatgacactctatgaaagaaagaccctttttctttctttcttacacacacacacacacacatacacacaaagaaaactttggataaatatac

SEQ ID NO: 213707 - DNA, 428 bp, Glycine max
  unsure (1)..(428): unsure at all n locations
ctcagctntcgggtganactatgttgctccttggaggtgggaggatatgtctttattgataatgacagngngtgtgagagagaagcacggtatttatttaattatttaattatttctttaaaaaattgggtctttggttaactgagttgtaggaagaaccaacaaatcctctttctttgtcctcgctggcgtaggagaattagataataattatgatgtttgacaaagtttttgaaaatggtctgctgccgcgattttggctgcaacttaaattgtggttgtgtaccgcatttgtctgcaatttcctttaacatcaagtatcatgatgaaactgtgaccacaatttaaaaccttgatgtttgaacagtaagctagtagaaattgtctttcatttgatttagaaatcttgctgggcatgctgcttaata

SEQ ID NO: 213708 - DNA, 451 bp, Glycine max
  unsure (1)..(451): unsure at all n locations
agcttcatgctaagtatgtatgagagaacttcattattgttgntcaagacatacaagtgagcttgtaacatatcttctaggcttggagtgatcacatgcagtcctcttgaacctttaccacccactctgtcatcatgctgagactcaagaaggccaacaggtttagccttctcaatgtattctgaacaaaattcaatggctgtttctgcaatgtacctcttaacaatagatgcttctggatgatatagattctttgtatacctttttaagatcttcatgtatcgctcaatcgggtacatccaccgcaaataaatatgaccacaacatttgatttctctgaccagatgcgccatcaagtgaatcatgatgtccagaaagcaggggaaaatgatctcccactggatagataattgcacctattttcagctatcaacttgatggatcacaactt

SEQ ID NO: 213709 - DNA, 450 bp, Glycine max
  unsure (1)..(450): unsure at all n locations
tctcagcttatggatgatgaatcaagtgattcaattagttgtgatgatgacaaatatgatgacaaaaatcccaaagaatgatttcaagattgagtcaacaagttcaagatcaaagattaatttcaagcttcatgagaagaaatcaagaagattcaagaatcaagagaagtttgatttctagattcaagagaagataaattcaagattcaagagatgaaatcaagaagacttcacaagggaagtattgaaaagattnttcanaaaacaaacatagcacaatnttgttttcaaaagagtttttctcataattttntaagttaccagaagttttactctctggtaatcgattaccagtttcttgtaatcgattaccagtgggcaaagttgatttcaaaagcttttaactgaatttgcaacgttccaattggtttttaaatgggtggtatcgat

SEQ ID NO: 213710 - DNA, 425 bp, Glycine max
agctgtgatgtatgtgttgaatgcattatatgtaaatacaccaaaagaaagaaattgggtgcatatagagctacaaacgtcttggaattgatacatacggacatttgtgggccatttcatacaccttcatggaatggtcaacaatattttacatcactcatagacgattactccagatatgcatatatgcttcttatacatgaaaagacacaatctctagatgtgttcaaaacatttaaagttgaagttgaaaatcaactcaataaaagaatcatgagtgtcagatctgaccatagtgatgaactatatggcagatatgacagttcaggtgaacatcgtccgaggccttttgccagctacttagaggaatatggaatcgtccacaatacaccatgtcggtgtcacttggcatgaacagtgtgact

SEQ ID NO: 213711 - DNA, 408 bp, Glycine max
  unsure (1)..(408): unsure at all n locations
ctttctaaagtttctggttntccaaaccttgaaatcatatgtgttctatatcctctattctcttctccctttgccaaaatgaattcgccaaggactaaccgcctgaanttattttgtgtctctcttctccctttttccaaaagaacaaaggactaaccgcctgaattcttttgtgtctcccttctcccttgtcaaagaattcaaaatgacacagtctaagaattcttttgattcttcccttttccataaacaaaagatttcanaggactaaccgcttgagaatatctttgtttcccccttcacaaagtttcaaaggactaaccgcctgagaactttgtcttaacacattggagggtacatcctttgnggtacaagtagagggtacatctacttgggttgttgtgactg

SEQ ID NO: 213712 - DNA, 100 bp, Glycine max
agcttgagacgcatgtgatctgttggcatcttcaaaacatcggcttgatcccttgtctacaatccttaaaggaatgcattcgtgacatcaagtagatgca

SEQ ID NO: 213713 - DNA, 434 bp, Glycine max
  unsure (1)..(434): unsure at all n locations
tgaagaactacacagntcacttgaagcgcgtgagcagagatttttatataggaatcctgagaagcacaatgatcaagccttacaagctcaaacaagcagaaagtttgacaagcaaggagacaaatcccaaaagaacaaaggaaagtggcgtgatgagaagtggagaatgactgaagattcaaaatgtggtgattctggatcatcttcacagaaagctgtgtcaaatccaagaagccaattctcagagaataagaaatggatcgacaagaagaaggtgcagtgttacaactgctggaactttggccattttgcagctgattgtagattcagtanaggctctcatgtgaaaggtgaagaagcacgggtggcacatgaggagaatacagaagatgatcattatttgctgatgggtgaccaccaaaatgatcttcagt

SEQ ID NO: 213714 - DNA, 156 bp, Glycine max
agctttggaagaaagtgatgaggtacaagccctataggcagagcttgaaagagcctgtgtagtcgaagagaagttcaagtccatagccatcaaagtctgaaaagagtatgatgaacttatggaccgttatatggccacagctgaaaccttggaatg

SEQ ID NO: 213715 - DNA, 404 bp, Glycine max
  unsure (1)..(404): unsure at all n locations
tactaaagatgttcgactgttccacctattcatccttcaatctctccaagtccccttccgatcattctttggctactaatccagcgcttcaactagaatcgaccccattatgatgcaatacttgcatttgtaaactaccagaaaattatggtcttttcgaacctttatctttgacaacaactttagcattngttcctattccttctttatataaataggaaatggagcataaatattggtaggatgctatagaaactgaacttcttgcactagaggaaaatcagacatgggacattgttccatgtcctccatcggttaaacctcttgngtagtaaattgtatccactataaagctacattcagatggatcaatagatcgatacaaggctagaatggggtgtctt

SEQ ID NO: 213716 - DNA, 394 bp, Glycine max
  unsure (1)..(394): unsure at all n locations
agctngcatatacttacaacaaagtaatgactttcgcttggcaacatttatataaagtatatcccaccgatttctttattaaattatggaaagcccaatttacttcttacagaattttggtttctaattcttcataattattaatttatctggctgctaactgncatagacaaaggagctatatagataaaaccaacacgggagacaactgtgaattaatattctttcctatgggtatgtttcatagttccctgacagtttgtttatgttctatccaacgatagataacgaataaaactattattgctgaattgggcatgtattcctgattacgtgaataattttataacaaaaatatctttaagtatttagccgctcctcaagctgtgtggag

SEQ ID NO: 213717 - DNA, 346 bp, Glycine max
  unsure (1)..(346): unsure at all n locations
gaacctataattacatgtaaatttcacaaatccttcattagccacctctaatgggtaactgttcaagtttaaaccaatgcaatgaaaaaaaaaacgttttgcaggttaaataaaatccgcttggtttacgctcttattaacagtttaattcccccacactttcatatttagtgatcatacagtagcccaagcaaggcgatcaattggaccaaggacgtgtcttttaaaacaaatcactccacctctgaaaaaaaacgccaaagcccatcttttattatattcaaatntgggttgttgattctcgcacttcgaatgcattactttcttacacaacatctataattct

SEQ ID NO: 213718 - DNA, 463 bp, Glycine max
  unsure (1)..(463): unsure at all n locations
agcaagcttgtccgcaaaaatcacttaaaactcttttaaggtccaacgccttanacgatcctctgtgcttttattggttaaacatggaccgtttaaaagcataaaatcaacatgtaactctaccacttttttgcaagaattacgtaggtctgatttcctcatcgcaattgaggatacgtaggagcaaaagccctgcttttgtcgaccaccccaagagatcgtaatgatccaattccttaacgtttctctcctttcaaaaaacaaagagatcattaatggtccaacaccttaacgtttctctcctttcaaaagaatcaaaagatcgtttaaatgatctaacgccttanacgaattgtgtgcgggtaaaatcgatcttgcagaanaagatcacaacaacttaaccaacgtttagttctcacagaactacgtangtctgatttcctcatcgcaattgaagatgcgt

SEQ ID NO: 213719 - DNA, 401 bp, Glycine max
gcttcacatcagaccacttccagagggctggaactacttcacatggtcttgatggggcctatgcaagttgaaagccttggaggaaaaaggtatgcctatgtgattgtggatgatttctccagatttacctgggtcaactttatcagagagaaatcagacacctttgaagtattcaaggagttgagtctaagacttcaaagaataaaagactgtgtcatcaagagaatcaggagtgaccatggcagagagtttgaaaacagcagagcatatagagtattcaattccagaaccagaactgtgatggaatccatcaatgtggtggttgatgatctaactccagcaagaaagaacgatgtcgaagaagatgtcagaacatcgggagacaatgtagcagatacagc

SEQ ID NO: 213720 - DNA, 291 bp, Glycine max
  unsure (1)..(291): unsure at all n locations
agctcaggactgagatgaggatagtnttttattangcgcngaacaatatacttggccttcatttaactgtctctgggcttggcggccacactcaacaaagtactttagacacctactgtacgttgatttaccaatgctgatatgggaatgttgtgacaatcctttaaaaccttattgatacattctgagaggattgctgcatgtggtcatatcgacgttcttctctatcgtaagccatcgtgcatttttcatttgagatgcgatcaaaccatgttgctatggctggactca

SEQ ID NO: 213721 - DNA, 362 bp, Glycine max
  unsure (1)..(362): unsure at all n locations
cattccttaatggatgacgccttctgataactataatcctttgacttccgctgcatctccatggngagagaataccatttaaggaccccattgtagctcaatgattcaacctgcatggaaaccccacagcaagcttcctcatcttcattgctactagcatcaataatagagacaaacttcttttccaccatagcaagaacatgattcagaacactaccgtgaaactggacttgctcatttctgtcagagaagttaagcccattagaattggccagataatacataagaaggcattgaattcagaacatgcattacattataaaattcacataagtggcttgagacataaaatacacgtcata

SEQ ID NO: 213722 - DNA, 441 bp, Glycine max
tgtttccaaggctacacgaacaataagacttgaaacactctagtgtttctgctctcgggataagaagcctttttcacacaccaaaataaatatcagacatcgcaacggtcagatcgtgaacatctgtcctgtgaaccaccagaccaaatttcgagaagatccaacggttaatgaatgcaagagggcacttttactgagacagctttatgaagcttccttgagaagcttttctcgataggcttctttgagaagcttccttgagaggcttctttgagaagcttccttgagaggcttccttcagaggcttctttgagaagctagaatattaactattcacacccttctaataacctcaccttgaaatataacatgggtgaaacaacacaatatatgacatccaacatcaattactattaataatatgtcacggtgttacaccta

SEQ ID NO: 213723 - DNA, 472 bp, Glycine max
  unsure (1)..(472): unsure at all n locations
agctcggaagccattcaacatttttttcatattttggtttgattaaaagtgcttgtttctatttcatgcagaggcttttcaagaaagaaaacaagaaattgcaaccactactagaggtaatgtttcaatcaaccttataatataattatatggattttgagtgtctcgtctattttcgttagcatttttaaagtgttaacattttatgtaaggaaagccatattgtagcaaagagtaaagtatatttagcttgaaagaaatttctatattatatgcttgcgatgcatgctcttagtaagaatactttcatgataaaccctcctacatttgatataagaaaatataaacaagagtagttttgacctctctgatttagtgctttgactgaccttnttgcatttgtcccgtcaaggcaaggaggatgcaacttcaaacttaaaaaccgaaggaagattaactctcatgaagtcta

SEQ ID NO: 213724 - DNA, 435 bp, Glycine max
  unsure (1)..(435): unsure at all n locations
cgccatccagctcgcccaggcgagctaggatgctttctgtatatatcaaccgncttctggaggagatttctggaaggccgaagtgggcctggctgctatttgcacccccatttttactaaatacacccactngctctttttttggtgattctttttccgtaacgttacgaaactttatcgaattcgtaacgatgcttaatttctttccataatggtacaaaaccttacagattacataatcatcccctttnttgctttcgaaacgtacagaacttcacggattgcgcctaacacttcctttaatattcgcatgtcacggaattcacggatgtgctcaatgcttccttgactttgcatatacggactcacaattgctacgatggtgccagccctgagtgtaaatagggcgatgtacaccatgtcccggcaaatagg

SEQ ID NO: 213725 - DNA, 190 bp, Glycine max
  unsure (1)..(190): unsure at all n locations
ttgagaactaaagagggctcctcacccctccatagctagctcaccaaacggtcaaatacatgataatacaaaaaaagttctactacaaagactactcaaaatgccatgaaatacaaagctaanaccctatactactangatattctgaacttgaagggagggtactctataaccttaaatggccaaatac

SEQ ID NO: 213726 - DNA, 462 bp, Glycine max
  unsure (1)..(462): unsure at all n locations
tgancaatcccgacccaacctgtgcatagtcggtcagtgataacctgtgatgtacctaaacaggcgagctcctggcagtcaacagataaaaggaacaaagacaacaaagctaggaggcttgtggtggctggccagctgtgaaacttgattgatatgtgagatatgggctctggtaatcgattaccaagggtgggtaatcgattacaaggcttaaaaatgaagacagcagactatgatggtctctggtaatcgattaccacggngcgtaatagattaccaggcttcagaaaggaactggaacactgtggaggcctctggtaatcgattaccagcctgtgtaatcgattacacagatgaatgggtcactggttatcgatcaccaggtatgtgtaatcgataacacagtgcatctttgcatatttcatgtcctgaggctgtgtaattcaagtttaacctctggta

SEQ ID NO: 213727 - DNA, 264 bp, Glycine max
ttctcatacttacagtgtgcgcccatcttgcgacagtacatcttgagatgggttttgggacaagctcgtcctttatacttgttgaagtccacactctgaacttcggggggattacaacatcgggtactaaacaaagatcccgcttggctgcgaacggatagtccccaaattcttacacggctctcaatttttcctcgaggagatcgagccttctcctttcttcagttgccgggggcgggcctttcgtggacaaactattggttg

SEQ ID NO: 213728 - DNA, 279 bp, Glycine max
  unsure (1)..(279): unsure at all n locations
aaaacaaaacgcctatagcttatttctcggagaaattgggaggagccagattgaactattgcacctatgacacagagttctatgccattgtaagagctcctgatcattggaaacatttattgcgtactaatcactntatattgcattcagatcatgagtcattgaaatatatcaatgggcagcataagttgagtccaaggcatgctaaatgggtagaatttcttcatcttttaatttctcttccaatacaacgatggttacagtcatgtggtggctgat

SEQ ID NO: 213729 - DNA, 362 bp, Glycine max
  unsure (1)..(362): unsure at all n locations
tgcagcatgcaagctatgacctgngctagagggtnanagatttgtgggaagtgcttacatctcccatcttaaggggacctaatcaatgaaaataataatgtccttgacgatattacactacatgcatgatggtccttggttaatttatattcacaacccaccatatcattctacgaccatgtaggttaaaatcattgtatcgtcgtttatagccaatatgtgttacctcaagagagggctatgtacacccacgcatccattatagggcgtatgttaaaggaatattaataccataaacagcttcgcgactggatgatcggagattatgaccacaatgtattcgccgctgtgcataccacttg

SEQ ID NO: 213730 - DNA, 458 bp, Glycine max
tctgcaacacatataacgcttggctacatgctgagttgcccttattttactgaccacccacagtctatttgcttgttcgttgcacactactctgcagcaatcatggttctacttaaatgactctatctgaaaagagttcctaactatattctgtgcacagcagattcgcccaacacaaaatgtcatcttgcattatgctctagccctctgttgatcattcttcttgcacttgaactccttgcccatcaatatgctatactccctctaagcagagttaaatatatatagagaaccacacttcatctccaataccaacttctgatcaccaacttcactactttgactatatagaggataaacttcaacatcctcatcttcatcatcgactctaatgcgacataaagctcctatgaatgataaccatctagctaactacacgttcaacttcattcatcata

SEQ ID NO: 213731 - DNA, 461 bp, Glycine max
  unsure (1)..(461): unsure at all n locations
ctaagcttctaaaataaggttattatatgtgaaatagtggtaatgaatactctttgacacagngatttcaagctattaacttttagctgattcccttgtgctagattatggatgagaagtctctgatcaagaagtatcagaaggaaatttctgagttaaagcaagaactgcagcagttgaagcatggcatggttgagaatcccaatatggccacatcttcacaagaagatctggctaatttgaagcttcaggtttgtgctgatgcatatatcttggatcatctaataagtatcactgtacttggtgggagactttataatatgccagaataaaatgttgtcttgaatcttaacccaatgatatttactcttctcactgcacatcaaaactggtatctntatttggtatggtgtntcttcacttccccataantaagcatttttcattaatagcttgaagct

SEQ ID NO: 213732 - DNA, 378 bp, Glycine max
ccttagaacaacatacttgtccttcatttaattgtcggtgggcgtggtgaccacgatcaacaaaatactttccacacctactatatgttgatttcaccaccgctgttatcggtatgttgcgaaaattcttcaatacctcatttatacattcagagaggttggttgtcatgtggctatatcgaacttcttcagaatcatacggcatggttcattttttctttgagatgcgaacaattcatgatgctatggctggactcagttgaccaaatcttttaaattttgattaaacatatcctgcatgagtgacccaccttaaataagtaaaacacatttatgttatataactttaaataacggacctgaaattaatctacccat

SEQ ID NO: 213733 - DNA, 447 bp, Glycine max
  unsure (1)..(447): unsure at all n locations
ntatatctctcgatattaccctttgaatccttcttggntttaaatatccatttacaaccaataggtttcacaccttcangcaatntgactagattccaaaattcattgtcattcatagacttcatctcatccttcatggcgtcaatccaattttgagagttagaactgtgcatagcttgacagaagttgattggatcatcctctgttaaaccaacaccatccttatgttcttggagaaatataatataatcatttgagattgcacttctcctctctctaatggatctccttaatgacacttcttaaggttgttgaggttgctctaaagggtattgaaggagaacctcattattgtcttgntctggaacaatgtcaataatttgaacattgtcttctattactggangtgtgtcttgaacaataataggtatgaggacttgatcactg

SEQ ID NO: 213734 - DNA, 261 bp, Glycine max
  unsure (1)..(261): unsure at all n locations
agcttgagccacatacattgatatataacaatattgcctaacaangnncacacttaaccaagaataccacgactgggtccaaatatcactcactacgatgacatgaaaacagaatgtgtgaaacggaccagttgagatccacactgcacattatacgataacgaagaaataacaaaatgcatgaattcatattagtgatatgtagagcacatatgatatgagtactgcaacctttgtaactaataacatttattaatccaa

SEQ ID NO: 213735 - DNA, 436 bp, Glycine max
  unsure (1)..(436): unsure at all n locations
ttcatgcccccgtagaatactggtcttttctacaacagcgcaatntcaattttatccttccatanagaagatatacgaatgaccaatccttaagacaaatcccgaaatgtgtttctggtcaataattgggctatggctcatctagatatataggattattgctatatccgcttcccttttttccttagtacactcatcttcctttttttcaaaatcaaattagttaaataacattntttttcaaaccttcctctctccctcccacactccctctttcttaccaacaacatatactctctttcttttatcacactcctttcttctttcagttcctttatcctccttcaatctcttgctctaactttaggatttactntatcctttcttccttggtttattatngntcactcacacaatatcattaatatctctcatg

SEQ ID NO: 213736 - DNA, 462 bp, Glycine max
  unsure (1)..(462): unsure at all n locations
tacactgcngctgcaacattcaatgctgaccttttctacctctgtcacccttggtgccaaatttctttgatctctaagtacatcagccaatacacattccatttccaaattccatgtgaaataacttcttgtttccttattatttttttcctaaaacttttcttttgtccgtcattttttcattagatgactccattgaagttaatgtcacttattcaacctgtctataacaaatattagatatgacctactttattcatttgactagtccactgcacaatcatagaaaatatttcaagcaaagtttttatgcaataacaaagtacataaaagtctatcttcaatagaaaagtacaatagtaacaaagcacacaaagtttttatgcaatagtaaattacatttaanaaagaactatccctaagcaaagtttctcctaaacttgatagtagcaaacatattca

SEQ ID NO: 213737 - DNA, 233 bp, Glycine max
ggaatggaagaaggatatgcctctcttgagaatttgatcaaaagtaggggccaccaccttatacctaatggactataaagcactccagagttgagtgaatcaccacataaaaaactaccacccaaggtgaggatcgatttgtaattttggaattggctaattacataccttcattcctctcatgattttttaacaaagaaggctgtcattgaaagtgtggtgggagcctccta

SEQ ID NO: 213738 - DNA, 380 bp, Glycine max
ctctgctgacaccatacacacctgttgccttctatgcaacaacctggagcaatcgagcaacctgaagcttatgctgcaaatatttacaatagagctcctcaacctcgtcagcaaaatcaaccactatagaacaattatgacctctccagcaacagatacaaccctggatggaggaatcaccctaacctcagatggtccagccctcagcaacaacaacagcagcctgctcctttcttccaaaatgctgcaggcccaagcagaccatacattcctccaccaatgcaacaacagcaacaggcccagaaatagccaacagttgagggccctccacaaccttccctctgaaaacttgtgaggcaaatgactatgcagaacatgcc

SEQ ID NO: 213739 - DNA, 459 bp, Glycine max
  unsure (1)..(459): unsure at all n locations
gcctatgctgcanacatctacaatagaccttctcaccctcacttgttaatgagccacaacagaacaattatgaactctccagcaacaagtacaatcccgagtggaggaatcatcccaaccttagatgatcgaattcttcacaacagcaacaaccacaacaaccttattttcagaaatttgctggcccaagcagaccatacattcctccaccaatccagcagcaacaacaacaacagcaacaaccccagaaatagtaaacaatgtgggctcctccgcaaccttcccttgaagaacttgtgaggcanatgactatgcaaaacatgcagtttcaacaagagaccagagcctccattcagagcttaactaatcaaataggacaattggctacacagttaaatcaacaacagtcccaaaattctgacagattactttctcaatctgtctagaatcccanaaatg

SEQ ID NO: 213740 - DNA, 470 bp, Glycine max
tcggaagaaagtgatgaggtacaagccctataggcaaagcttgaaagagcccgggttttcttagagaagttcaagtccatagccatcaaagtctgaagagagtatgatgaactaagggacgtcaatatggccaccgatgaagccttggaatgagaaaccaagaaggcctgaaaggaagaacacgaccaaaacaagttttgaggggctttatagggcagcaatagtgagctcaagctccgaagaggtgaaaggaatcatcacgggtcaaaggcatgatctggaaggacgagctaaaggcttgccttatgtcgaaaagaaatttgtcccaacagttaaagcgagactgaagggaatatatgggtcatcatcgatgagtgcaaagagaagctaaatctagcggtgactcatcgagcaaggctataggatgagtacgccaagatatcagcagaaagggaagcaagggaaagggt

SEQ ID NO: 213741 - DNA, 452 bp, Glycine max
  unsure (1)..(452): unsure at all n locations
ctgaaccatntatcaataaacacaagttgtgttatattcagaaaattagagttcttagggagagtgattctcctaaattcttgagtgattcaagaacaccctggctgtatcaaaggactttcacaacctttgtgtgttgccctcgctggacagagtgattctttccttcctatcatctccacccttggtctttcacaccacaattccagaatatccacctctgcccaaaattatctcgtgaccataactcccagtttacacactcaaattaagtgattcttgagcctaaattgaatctcaaaacgagacctttcacctcgttttggaatcacctcatttggagccctgtagcttccggtattgccatttctatatttctgtccagccaccacttaacctacgttttaccatcccattcatgcattttatgccagaaaccaccttattaagac

SEQ ID NO: 213742 - DNA, 360 bp, Glycine max
  unsure (1)..(360): unsure at all n locations
cacaatagcnttaaggacgtgctnccttaaacctccattacatttcaactttactttctcctcattgttggttcattattcttttccatgtatctcttcacatgccattgtgctaacatgtccgttaacattgattcctttataatttccaccgattaaacttgctatagaagctaaatatgattttctatgcgtcacatctcttgttcttgttcttgaaccatgaattgtgttgaatttacgctccttagaatcttgtttggtatcttttgggctgaaacctacaccataaaatcttacacaaacactaaagtagacgaaaaccctcataatatagagtgacttgctcacctattgtag

SEQ ID NO: 213743 - DNA, 292 bp, Glycine max
  unsure (1)..(292): unsure at all n locations
ggcgcctaatctcacctcttctcctttatcttctactgtgtctccatggcggaaaattaccattcaaggacctcattgaagctcaaagatccagcctccatataagctccacaagcaagcttccatcacgttgggaccactctcttttgtanatattagaatangtcttttcttcttttgggccttgtattctgtccatccttgcctgatatggtttaaccttgtattttcaatgcattttgtataatctctggtagacggactttcttttcgtttacatgtattttggaat

SEQ ID NO: 213744 - DNA, 427 bp, Glycine max
  unsure (1)..(427): unsure at all n locations
tnctcgggccatttctgtgaagcaaacattnggaatgtatttttaccaagaaatgctactcttaaaacacaaatggcatacaacctcctttaataaacacaaacatcaatgtaaatntagaataaactcatgcacatactcccttacgaacgttcacttgcacaagatattctcctaactaagaaaaatgcacccacgcacaatcaaggcaccttcgtcacctagattatttatatgtacttccgaggtgtatttgttacctacatcacatgtacttccttggctaaatttacacacacgcatactcaaagcattttggctaccaaaaatcgcacacgtgcacattctggtatttctaatacctatgcatatacaaactttgtgatgaatcttggctatctacacaataaggtgctacatttcatgc

SEQ ID NO: 213745 - DNA, 379 bp, Glycine max
acaactatgatgatgtctgatgactgtctaacttatgaagcttgtattacagaatcacttgaccgaaagacagtgaagtgagctaagcttgaattgattagtttataatagaggagtgcatttgattagtgtggtttcagtgcattaaacatggtatctaaatccaaataaatactcggtatgggttaacaaattttaaatgatttaatttgctaaatttagtctgcgtggagtttttttttcacatacctaagtcaagttgacaagataatgaaacgagtaaacgacaatgttatcaatggaggttggccaaaattctgtcatatagatgccattctgccatatggcgctgccatatcatgccttctttacacattgc

SEQ ID NO: 213746 - DNA, 413 bp, Glycine max
  unsure (1)..(413): unsure at all n locations
agctngaagtgaggaagtgtgtgaaggtgattcttcctacttttattcgatgaccacagagtggtacctggagatatgtcgcgggggtcaagagaccttggggacgtcaggtggggtactattgcccaaaaccaagcttgaccaatcccgacccaacccgggcgtattcagtcagtgagaacctgtgacgtacctaaacaagtgagctcctggcagtcaaccgataaaagaacaaagaccacatagcaaggaggcttgtgtggtggctggccagctatggatcttgagtgatatctggaatatggcctctggtaatcgattaccaaaggtgggtattctattacaaggcttatatatgaagacaggaagttaagatggcctccgtaatcgattaccaatgatgtgtaatcgat

SEQ ID NO: 213747 - DNA, 444 bp, Glycine max
  unsure (1)..(444): unsure at all n locations
tcctagggccatttcctatgagatcatgcatttagaagttatttntacaagataatgcttatcttaacgcanaanatgtcatgctaatccctccggtttagaacgaactcatgcgcacgtttaaagtaacacatttatgcacatgcgtatgtgtagaatatcctactatttatatcaacatagaggccatccaacacattctaattgtcatacatatatacgcatttgaaaagaacacacattctcacgctcaaggcattgcgtcaaaatttacacttaactatgtcctanacatttgctatcacaaactacctacacacactcgaaacatatataccatacaaactttcattggttcactcacacttatgcatatnggcaagatatttacattatgcacatacttgcattcaaaagggaatcccgtgctatcatacattcatt

SEQ ID NO: 213748 - DNA, 414 bp, Glycine max
  unsure (1)..(414): unsure at all n locations
gacctataatactaagcttgaaaagctatactgattattgtatatcgnngctataacttataacaatntcacctccatgtgtcaagaagaggctacccttgctgaatgctacaaataactcttcttcaaagggatagaaagcacttcttaaatttcctaacagtgttgagtccttttgttttggggtaaaatgaaaaatatgttaatgattttgtttttacttttttcaagcaaaacaaaacatgtagagcaaattaatggcagcggacattctaactatatgtttgaatgtcacacacatgacatggcctattcgaatgcaaattgccatagagacaattactacattggcctatctccatacttctaacatcatccaccgtgatgtcaaaaccaacaacattctacttgaca

SEQ ID NO: 213749 - DNA, 299 bp, Glycine max
  unsure (1)..(299): unsure at all n locations
agctngagatgaggaagtgatgaaggtgatatcttctgcttttattggtgaccacagagtggtacctggagatatgtcgcgggggtcaagagaccttggggacgtcaggtggggtgctattgcccaaaaacaagcttgaccaatcccgacccaacccgggcatattcggtcagtgagaacctgtgatgtacctaagcaggcgagctcctggcaatcaacagaatataggaataaagaccacaaagcaaggaggcttgtggtggctggccagctgtgaactttgattgatatgtgggtta

SEQ ID NO: 213750 - DNA, 407 bp, Glycine max
  unsure (1)..(407): unsure at all n locations
tataagaacaaaaatgcctaaatcatttccaaatatgcatgttaattangaagcatgaaccagaattaagccaaggctattgtgcaagcaatcaatggggcaaaacacaccaaaagattatgatgatggatggctcaaattctcacaaaggtaagcttatcactttcaaattgagctttcaaaactatcatgacatgtagaggaaaaacaaggatttcaaatcacacaatgtcaagagacttttattttcagaacaattaccaatttcttgaacatatcctatagttcaaagaaaaacatgcaaacaaaattgaccaaaattaaactagaacccaacaaaactagaaagaattgacctaaaatattaaactagaaacccaacaaaactaacaaaattaaactaattt

SEQ ID NO: 213751 - DNA, 332 bp, Glycine max
  unsure (1)..(332): unsure at all n locations
ctacttctggatcgagtggtataagggtgcctttgcgcctttttaagtatggggaggtccctaaagaaacaaacagtggggagtatgccaccaaaacatgaatatgctaatgaatgataaagcacttggatctaccctcaatgcctttttagataacatgatgagtttcaaaacttctctttttataaaaaagagcaaagcttttatctagctaagatcatacaanagtgttacaatagaacctaacagttctaattatatgggccattaaatctatcatgtgttgacaataattgattagcccgtgaatttcttctggggctgacacactt

SEQ ID NO: 213752 - DNA, 488 bp, Glycine max
  unsure (1)..(488): unsure at all n locations
tatggaccttgaaactcatctttcattcaggcactctctggtggtgaagctcctccttccatggcttattccctagtggatggcgcttcctctcacctcttctccttctccattccactgctattaaatttcaagaagcaaaggattccattgatgaagaagatctatggcctataagctccacatggagctatgtcaatcagtgtatgtatgaagctcaagtntaccatccaagaaggaaagtaatagcaaactagtataaaatggagtaactgcaaaaatgaataacacataaagttctttaaatcaatgactaatgaaccacaccaagaaatcaaacgatgctcgaattgtcaaagtcatttntaattnttttaggacaaacatataagtaaatagacactaaaagttaattgtcaacaatataagcataacatgtgcctataaaatgtcaaagtcactcaataacgaatatgctagaaactgat

SEQ ID NO: 213753 - DNA, 295 bp, Glycine max
  unsure (1)..(295): unsure at all n locations
caccgatcattgtgtttaatctcgttaatcactggtaaagcaaaatctaaccgaacattcacattggtacctcggctaaaccaanaaagccaaattattataaaattatcaatatatcttacaaaataatattaatatagccaaaatatcgggaacaaaataatactcaagtaatcaaaaaaatcaatctgacgtttttcttttgaaagtttccttgaatgaattgactaataatcaaagtgaaactaaggctaaaatcaactcacaaaccaagcatttgccgctaaagtcactc

SEQ ID NO: 213754 - DNA, 325 bp, Glycine max
catcaaagtctgaaaagagtatgatgaacctaaggatgtcaatatggccacccgttgaaccttggaatgagaaaccaagaatgcccgaaaggaagaacacgaccaaagcacagttttgaggggctatataaggcagcaatagtgagctcaactcctaagaggtgaaaggaatcatcaccggtcaaaggcatgatccttgaggacgagctaaaggcttgccttaggtccaaaagaaatttgtcccaacagttaagcgagactgaagggaatatgtgggccatcatcgataagtgcacagagaagctaaatctagcggcgactcacg

SEQ ID NO: 213755 - DNA, 396 bp, Glycine max
attaccggagacagctgttctgatacgaactacattctggttcggtaacctcactaccgttaaattcttgatatgaagactttccactgaacaaataaatcaacttactatagattcccgaccatctcatctacgtgtaaatggcgcaacttaagtcttaatatggagacttaatttactctgaataaataaattaagtaatagttgagtgcacgagactttactgataacaagtcagttgcacacacacattatcaagcatgaataaaattaaaatattaattgtttcctttgtataataataagatactgattttaaccccctccctctccttctttctttatgagaaacctatacggatgagagtctacatcttcacaaattaacctctttca

SEQ ID NO: 213756 - DNA, 462 bp, Glycine max
  unsure (1)..(462): unsure at all n locations
tcccttacgttntttcagtttctgtagttgtgtatgcgttgtcgtgtttttagttctgccataagaaacctttcaaagaaagttctacttcttggctactcttgtcgttgttttggttgaaggatcctcctatgttctccctgaatcttatgtataaccttctcctttcgccgaacataaatacaaatagcctattaagcagcatacattatatagtatagttccaatatatatgttagctagatattggtatattcacatgccatcagggatacatagtcaaattgtgtatcttccattgtacaataatgttgcttttaaagatcatagaattagatccttattatcctgtcatactgcgagtccaatacttagtattacgtcaaagttattcactggtataaacctgtttacttaaattcatgatcaaatatcactgttcagcgtatttggatgagtact

SEQ ID NO: 213757 - DNA, 441 bp, Glycine max
cttaatcaccgccgctgcagctttccccaggactaccttgatttattctttgaatcccttttgagccttgtttccctttccttgttttgaagctcactacaagccttaagtgaaaaaccatgatattaccatatccttaaggaattttggagctttggaattgttttgggaataagtgtggggggtttttgtttcattggacaacttgttttgttggctatgcttcatgatgtattttgggccatacttgatgtatattgtatattggctaaatgttggacatgctgaatgaaattgttgttctcatacgcttaagagtaaaaaaaaaacataaattcgaataaaaaaaattctaataaagaaaaagaacagcaataaagtcgagtgaataatatcttatatggcacaagaatgatgaaactcttggctctactcttcatg

SEQ ID NO: 213758 - DNA, 446 bp, Glycine max
  unsure (1)..(446): unsure at all n locations
tgtgtagcccaccatcttttcatagtagaacactgtttatgtgtctactatcatggntatcatctctctttccatcattgggggtgccacttgggctgccaaatccctccacctttgggtgtattctttgaaggattcatgctcctttttgcacatgttctatagttgcatcctatacagatactgcctaacgaaggcaaccattangtccttccaagaatgggctcaggaaggttccaagttagtataccangtggcagctgccccagtaagacttccttggaagaaatatattagcagtttctcatcttttgcgtatgcccccgtcttccgacaatatatcttttagatggttcttgtggcaagtagtccccttgtacttgtcaaagtctggcaccttgaacttgggaggtgtgatgacattgggtactatgaacaacccttca

SEQ ID NO: 213759 - DNA, 231 bp, Glycine max
gcacaacggacaacattataaacaattaatgtccattgaattatgtaggggggcttagcatgacaaaacatgctaagactacacagtgacgattgataagtaattaggcttagcacaaaagcgcgctaagcttgatggtgagaaagtggttggcttacctattataagcgcatacctgctcatctgacatcttatacacaataatgtcattgaattattcatgaagctttt

SEQ ID NO: 213760 - DNA, 408 bp, Glycine max
  unsure (1)..(408): unsure at all n locations
cccatattccctgctatagccactcatgctctttacattgaatttaatttttgctcctacaattataatttgatattgctgcaatcgtatttttgtttttataatcataaaattcgcaaaatggagctattgttttcatctgcttggcgtcagccaaaagggaattggtattaaactctatgctggcattgctgtgttccaactttcaagcattcaggatagttgcccaaattttggattctctatagtccatacttcgtctattgaaaagatggctggcacgtcatgttattacgggctaatatntgttaggagtaagacataatgcatatgtctgcgtcaccttgctctgagtctggcttctataatattgctggcngtaaagtttttaaggtaaatagcgcctgc

SEQ ID NO: 213761 - DNA, 456 bp, Glycine max
  unsure (1)..(456): unsure at all n locations
ntgaaaagtgttgttattctccttctcgctaagccaatctgctggcttagcgagcgttcactatgcgcaacactcatgggctaagcgcgaggaagactttggaagaagatgagttgacaggtttgctaagcgcactgcatcatctcactaagcgcaccgcttcagtccatccgctaagccagaaaggcacacgctaagccaaaattcactaatgtgcgctcaacggtccataattgcgctaagcgcacgagcacgaacaaggccatctatttaagcctaaaatcagattttagagagggagtttggactgggattcagagctttgcatgtctagagattctagagagagaaaggtccaagttccaaagagttttgagagaatttgttgtgtgaagatctgcagagactagagctctaagcaggagccggcttgagagcttgagatgagtttgtgag

SEQ ID NO: 213762 - DNA, 380 bp, Glycine max
tttggtggaaaaaaacccctattacttcggttaacagctttcccttttacttgttgtcttatttcataatccctacaaaagtggcgcattagatatcttctttcaaaagaaccttctttcataaaactctgctaatatcaagcctctttaaacttttaaggagttatttcccttcaagaaagcataaattattagcagagtctaacctcttactatacagattattgatgttcttattccatagcaaagaatattgaaatcgatctatccataatcttgttggcaaatagcttcaaaatctaagcacaacgctcaaaaagcaaacgtgtgtcttgaagcatgctatgcacacatattaacttgtgactgcaacatattat

SEQ ID NO: 213763 - DNA, 453 bp, Glycine max
  unsure (1)..(453): unsure at all n locations
ntattcaagacagagaagattaagatattcgagatggatgatctacacagtctctatagtcttaggaagggcatattaaataggaagggaattcctaactgatgtagcaaaaggttcggccaatatatctaagataaacagtctttttcaagagatttactctatggtaatcgattaccagaggatgtaatcgattaccactggccaataatgatttacaacagctattaaaaatttgaattcaacaattgcactgtgtaatcgattacacatatatggtaatcgattaccagcagttattgaatattttaattcaaattttaaagcttgtaatcgattacacacatactgtaatcgattaccagagaagatattcagaatatattctcaacagtcacatcttttcattttggtcctgaatggccatcaaaggcttatatatatgtgacatga

SEQ ID NO: 213764 - DNA, 340 bp, Glycine max
ctatgcaccatattaagatccactactcaaccttccacccaacaaatgttgaccctcctcccgcaacttgaatcacattcttcgtacatattcttaacttttttcttgccgagcttacaaaaacctatatctaaaatatattaagaatttccgtcaatacatgaaatacataggtacttagattacacaaacaatagaatagtgtgcgtgcaccttcataaagggtatattttcctttctttttttagactttataagaggcttcttgttctcatagcactcttaacattagaacctaaccttaaaggctgtgaaacttgtgaaccatccaattctaaaa

SEQ ID NO: 213765 - DNA, 435 bp, Glycine max
agctataataagtgaaattatgtgctgccatcttccttagagtcctctcacgaggtggagggtgagccatgttctcagtataaaaattagtagtggatgctcaaaatcacaatatttagaatcaccctcaacagaatgcttataatgctcaaaaagcacgagaatgaccaggatgcacactatgcctaactaaattatgaaagggtctatctattttaagatcatagggttgtaaatcacttgggatgaccctagttatgcactatatgcagcagataatgtgttctcaacaagccctaacaaggtgtaagactacagctatactcaatgatatcaaataagctgaaatttgtgaggacaccctaaatcataaaagaagcacaaaaattcaacaaaattaaaggcaacatgaaactaattagcaaattagaaaat

SEQ ID NO: 213766 - DNA, 466 bp, Glycine max
  unsure (1)..(466): unsure at all n locations
gcatcacggacctatgaatctcagctaggggagaatacagggacactcatgattgtgactcagcacagatcccacaaagcgagattgggagatggtaatcacaaatccactcaaggatgctgtaagaacttaaaaatacagctgggagcttatactatggtaggagacttctttctatttgagttgggaggagtggacctaattctgggagttgcttgactggaaacattgcgagaaattaaggtgaattggaggaccctaagtatgtcttttgtccatcaagatcagaatgtgttgattcagggagttcttggtttgtctaagacaatgatcattttgagaacacagcagataatagctagccaggaggttgagatgatgttcatgctgtgggtaactgaaagcaaccacgtggaacanatngatttaacgaaccaagaaagtctgttgcagcaggtgctgacag

SEQ ID NO: 213767 - DNA, 425 bp, Glycine max
  unsure (1)..(425): unsure at all n locations
tgtgttgatcccacatgattataacattctcacaaaacattttgactctgactgttctctctatgattntacctagtgagagtgacctgacttattgatgagtgtgtgatctgtcttgtcatgtactcctaggtgctcaatgagatttttcactgacataataccacatataagattgagtcttagtatatttgttgcataatgcctgtgtaatgatcattatgatttgttacgtgatagtgggtaatgaattgtgtgagtgtgagatattgtgttttacttgagatgtgttgttctgaacacgtaattagtgtgaatgcatgaaatgtgattctatgattaaatcttttgggcaattgatattacgtaatgagtggttaaatgatgcgaagtgtattaagttgagtttggtatacttatattat

SEQ ID NO: 213768 - DNA, 216 bp, Glycine max
  unsure (1)..(216): unsure at all n locations
agcttctggtaccttcaacttatatgccctctatgatgaaaatatggaatgtgcaacagccagcgaagcatgcattggtgacaagnatataccactaccataaatcaatgctttcaaagattcttgacttggagatttgtccccaggaaacacgtcagcagatgccatagcctcctcagaaagatcatacactgattcagtacgaacatatagtat

SEQ ID NO: 213769 - DNA, 432 bp, Glycine max
ctaagatctagatactttctttcttattctctcatctatttttctcttctttatcctctattcacttttgttcttccttcttcttggacaaatatctttgctattctatttgtgatgatcatggaaggctaaacactcaatcaatccaaggatccactccaagcaagactaaatttgaattctggttttgtatttctattctgtgtgaatgttcatcttttacttcaatcctattaggattgaaaatgaattacgttatgggttcatttcctaatttcaaaatttaatcatagattgtatggatgatactccaccttaatttgcgatctcaatgaattaaacgattaatccagtgaactaactctaacgacattgattgaactttcataacatgatcattctctgcaaacatgtgatgattcaatctgcatg

SEQ ID NO: 213770 - DNA, 313 bp, Glycine max
  unsure (1)..(313): unsure at all n locations
cactgtaaacattgaaacgttgcataaanatttttctggctttttcaaaattgtaccgaaggtagtgtgctctatgagtatctcaatgtccttgagaagaggtttgtcggcaattattgcaatagcactcaagtcttcacattcaggacatttaggcctgtcttatcgcccctttcttttgccgactgctttcggttccatcttctgtccgcactctcaatctaatgcctcgtatacctcgctccccactccaggcaaagccacagacccaccactccgcctttcgcattttcacaaccccccatacgcacat

SEQ ID NO: 213771 - DNA, 178 bp, Glycine max
ccttttataacaccgcaatcggatatccgatatcgaacggctgaatattatacagggggcacatggacaatcacaattgaattgtacatgttaccatattagagccctttttttaaacaaagtgtccacaactatgttcgtgagacaagtaagcctgcctaccccttattattttttt

SEQ ID NO: 213772 - DNA, 266 bp, Glycine max
  unsure (1)..(266): unsure at all n locations
agagacgcctaggagtctgtcgatcccactggagcatgatgacccgggctagagctcnaanaaatcttcatctttcgatgttgccgctgaattcataagaatcgctaagagtctgattgatcgactaacatccagtgtgcctcactatctcaaagggcgatgggcatttttcacaagctcttgatcggatgagttgtctgctcgaatgtgctagcgcgatacctcggggattgtcgtttttgttatcttctcatatagtatctata

SEQ ID NO: 213773 - DNA, 454 bp, Glycine max
  unsure (1)..(454): unsure at all n locations
agcttacccattctgtttagggttnttatgatgatgcttgtgatgtttatgtgctgaaattgctaatggaaaactgttagagatgaagggtagagttaacctatggttagaaggtgagaatatggtgttgtgagtggagaaagagtgagactttgagagttggaaggtcaaatctggatttagtggtatttggaggttaaagggagttaatcctagttcgaaatgtcatttacgacttatgagaaagtttgggctgtgcaagagagaanaacaaatgaccaaagtgaacaaagagcgatttctaggataaaattgggtgttgaggagtcatatcttgattcggtgacaatttatgtgtaaatccagttgagcaagtttaaattgatggtatagacttgtgtgaggtgaggttntacttcaaatttaccccattctcaatttcacttctcaaacc

SEQ ID NO: 213774 - DNA, 467 bp, Glycine max
  unsure (1)..(467): unsure at all n locations
gctttgaagctggaatcatntatcctatctccgacagccaatgggtgagtcccgtccaggtagtcccgaagaagaccggcctcacagtgatcagaaatgagaaggaggaactgattcctactcgggtgcagaacagttggagagtctgcattgactataggaggctgaaccaggttaccaaaaaggaccattttcccctgccattcattgaccagatgcttgcacgcctggcaggtaaatcccactattgtttccttgatggtttttctggttatatgcaaattactattgctcttgaggatcaggaaaagaccacattcacctgcccctttggcacttttgcttataggaggatgcctttcggcctgtgcaatgcccctggtagcttccagcggtgcatgattagtattttcagtgattnttttgaaaattgcatagaggtgtntatggatgatttcactgtatat

SEQ ID NO: 213775 - DNA, 384 bp, Glycine max
  unsure (1)..(384): unsure at all n locations
catgatggacttctatgggtttgtaacttgtggtaggtgatcaattgtaaatattttatgcttaagtaagatataagtaaaattacactggtgtatgtggtatcaatagtaaaattatgctttctagcgtgtgtgagtgcatcatatcccgcatcgtgcgtaaggaatntattttagtcttattcgtcaacctttntttatattatgtacgagatacttatactcgcttaatatattttacatgacttcaaaattaagttttgaatttttttacatgtttaaacatcatttttttacttctgttctcttaatttataggagcgcacctaagtttaatatttattttattagtttcgaatacaatgaactggtgatgtcgatatt

SEQ ID NO: 213776 - DNA, 437 bp, Glycine max
  unsure (1)..(437): unsure at all n locations
ntacagcaaatgccactctactccaaattcttgaaggatatgttaacaaggaaacataagtacattcaccaggaaaacattgttgtggaaggaaattgtagcactgtgattcaaaagatccttccagctaagcataaagaccctgngagtgcaactattccttgtttaattggagaagtcattgtgggaaaggctcttattgacttangagccagtataaatttaatgccactctccatgtgtagaaggttaggagagttggagataatgcccactaaaatgactttacaactggctgactgctctattaccagaccatatggagtaattaaagatgtgctggtcagagtgaaacattntatcttcccgggagacttaatggtaatggatatctgtgaagatactgacattcctataatattgggaaggccattcat

SEQ ID NO: 213777 - DNA, 359 bp, Glycine max
  unsure (1)..(359): unsure at all n locations
atttgtagagtatccctgcggaaccttcacccgacgaagacactgactaaaacttatcttcttcttcttggacaaaggatggcatgatgaaggcaagtaaatttcttcccatcagaccttggatgcaactcgcgatcgtatatcccatattctgcttagatccttgacggggtgatatcaaagccatctcctttctgtcttgctctttgaantggttanagggagccgtcnccaaatctacacttgtcaacaatacatattttcttccacatgccataacaatcaagtacatatgtctaaacgtcaagatcacaccagtacggaagataaaagaaaatggacctcttcttccatatgca

SEQ ID NO: 213778 - DNA, 413 bp, Glycine max
  unsure (1)..(413): unsure at all n locations
actctgtccaaaatgggtcatgatcactngatgatctcgagcgagtccataaaaatgtctaagttctgtccatccagccagtagagttgggtttaccagatctcggttagcaaatgccaagtatgctctagttcatccttccatcttataacaaaggacatactaacttcaccataaagctacatttaacaagcaaactaatataagcaaatgtattatatcatgtcatgtttatttgagaataatgctgaaatttctaacctgatccataatatgaactgtgttaaacatttactctgtcttttttttgttaatcttcatcattngcctagccatttccttctaattattgtgatcttccatcattgcttctaaactccatttataatattaaagttactattaaaaataaa

SEQ ID NO: 213779 - DNA, 350 bp, Glycine max
  unsure (1)..(350): unsure at all n locations
gtagaattgtcttcatagcaaccgcactacacacgtgagcccacttaaaggtgagggttgagtttatcgcaactgaggcttaaatgaacatgtgtcggatccttaaaggatcaaattggggcttattcttgngatgcttattgcattataatccttaccatatgattatgtgaaatttcttaaggattttactccacatgttgcgaaaaacatttttggataacttggttgtttctcggacaagatttactagattagcgtgatacattgttatattgtgatcatgaaattgtgattaaaactgcgtgttacggataaattgaatatgtgttgattagtgagatacacat

SEQ ID NO: 213780 - DNA, 421 bp, Glycine max
  unsure (1)..(421): unsure at all n locations
gacctatgaaactcaagctgtgtaaggatcctgaatctaacttctctgattacaattttatgactgggacaagggtttccaacgactttttttctagttacttgttgattttgacagaagaaattaacataacaatcttagctatagtagttatcattgactaagctcttaaggtagtcatgtntgaaagcaagttcatcatttttcctttgaaaattttacgtacggtcaacctatgtggtctaaatgcccatttcttttaaaagttcatcaacaaatctaacataacaggtatgttgcaagcaatgactatgaaaatcatttgaaaaaattaattatgcatacattaaagggaagcagtgaacgacatggtacacagaaaaataaagaaactcatagccttcaactgggattcttctcg

SEQ ID NO: 213781 - DNA, 233 bp, Glycine max
ctcccccttctttccccttttttcttttttctcccccccccttttccttcttttttctcccctcctctatcctcttcattctattataaccctcttcacacactactaaccttcccttacactatttaccacctaatttaccttcaaacccccctttcttaacatacacaaacttttactcccctcctacccctataatccatttactcttctaaaccaaaccatcattccca

SEQ ID NO: 213782 - DNA, 428 bp, Glycine max
  unsure (1)..(428): unsure at all n locations
tctcccctattgtgctataataggggaagaagtgaagaatattatggttcagccccttatgcacttctctctctctctcgaatttgctgaggaaaattattttcgtgaagaaaatccaagccgaggcgcttccgtaatggttccgtaacgtttccgtgagtaattacgcgaagattctcgaccgttcttcaagattcatcgttcgttcttcgttttcttcagtcttcaacgggtaagtacctcaaaccaagcttttcaattcattctatgtacccgtggtggtccacattntgntgcatgtatttttattcttggttttgtctactttttatacccccttttgacgtgcttaagccgtttatttaagtcatttctcgcttaatctaaaaataaaataaatttccaccgaacatttgaatcgtatcatc

SEQ ID NO: 213783 - DNA, 280 bp, Glycine max
ctgcaagctgtgtctcattgactgaaactttatatgttcctccgaccacccggttgtctattgaataactagtctatttctggaactcgtgggtaagcataagaccatttctggattctggtgcaaggattggtgaacctctatgtcacctgatgtacattctactgctataatgtggcctttgtggtcacctgaagaccatttcccctacgtacaatctctccggcattgtcgcttgtgtggtcgaggtacatttaactgcctcatgccttcattgaac

SEQ ID NO: 213784 - DNA, 346 bp, Glycine max
acacctatgttatcatgcttatcttttcttatgtacctctctactatccctattcttcactcttgcttcatttcactctattgagtttgaaggtaaatctctttccattggagcaaattgaccatgtacttatgttataagttaaatatgatggaacttaatctctttagtataactagagatctaacattcctttggttccattatcttgaacttacataatgccaacttagagtgcgtttggtgttgcaagacacctttacaaccttcaaacagaaaaaacatttgtaacatctttcaaacaggaaaatgtggtctaactttattctcgtataatgtacagtta

SEQ ID NO: 213785 - DNA, 278 bp, Glycine max
  unsure (1)..(278): unsure at all n locations
tagagagagagacagtggcatggaacattgaaggaagaaagggagagaagttgaactttgaagtgtgtctcacgagactcttattcatcaaagntgtgacaagtgtacacatgtttctatttatagcctacgtcactaaataaatgaaattcacaaagggaatttcattttcatttcatgtgaatctaagaggaatattccaaggatatgccaaaggcatcttagcatgggaaaggaatatgccacaagaatatgtgactctagcacattttcttgag

SEQ ID NO: 213786 - DNA, 402 bp, Glycine max
gaccttaaatctcagcttacaagcaagcatccataacatgtgatatcccaagacagtatatctgtagatccttctaagatagaagttgttcttaagtgggagagtcctaagtctgtgtttgagattaggagttttcttggtttagtgggatattaccagaggttcatagaaggcttctccaagttagcctttcctttgaccaagctaacttataagggtcaagcttatgtgagggatgcccactgtgagcatagtttccaaacctataaggaaatgttgacggctactcctctgttagttttgcctaacccaagagaaccctttgaggtgtattgtgatgcatcaaagatgggtttagcaggagtgttgatgcagaatggccaagtagtggcctatgtttct

SEQ ID NO: 213787 - DNA, 385 bp, Glycine max
agcttcacttgtagaagagggtgtttggctattcaaagtgatgatagaattgaactgaacaaaatactactttcaagataagaatggacactcacactacatgtgcgcctctctgtacaccataacatatattttctgtaagatgtcttccttaagggttattttaactcaaccctcaccaacccaagtgctacccttgaccatgttatcaagtcctagaaacaatgtctgcggaaaaatggcggttaaatattaaactcatgttctaaacacagcttttggcttttcctgcctcattcacaagctctagatttgctcatagatctaagtcattttattaattgcctagtcttaattcttaaccacccttaagtgttgtttttac

SEQ ID NO: 213788 - DNA, 431 bp, Glycine max
  unsure (1)..(431): unsure at all n locations
gtagctgaagttcttgagaggtgttgaaattggttctgttataacaaaagacacattctcctgctttcgtttactggaagttcaaaggcatttcatctctctcttattttgattaaatattgtaatctttatttttatgtgtttacaacgtacattacattttcatgatagtatttttatgttacgacctctactagttagctaacaagggtaatttattataattttttgtaattcattttttttgatggttccattggtttttattctaaatacctattcttattttataacatatatggtagtagttgtaacataaaaattggtattgaatcttaggttatgcttcttcccccaccaattattctntttagttagaatccttattatagcttttcttcttaatttatattataattttgtgggggact

SEQ ID NO: 213789 - DNA, 246 bp, Glycine max
tttctttctttcctaaaaaaaaaccacccccatctaatttataataattcatattacaggggattaactgcccttagggccccctttgacttaatgcaaaaatggggcaatgggctagccttgtgtttaatacaatagccaggcctttaatcaatctttaccaaaattaacataaacaaccaaacggcctacaaaaagccctttacaattaagcccaaaatgaaaaaccccccgggagctaaactc

SEQ ID NO: 213790 - DNA, 468 bp, Glycine max
  unsure (1)..(468): unsure at all n locations
gcttaacgaccacgacttaattcaacaacatgtgattctagtactgtgcgaaccccatcttacattcgacgntctggaacattgcacaactacacgcttgacacagtgcttgtacagagcttatcttcacccccagcacaatacaaattagtgtggaaaaatgaagaataactggtgtatagctagaccttaaaaccgtaccaaaagatactgtcagtttgtttcactaactaaatcaaataacatggttttgtagcttatatatatcattaagaaaccagtacgacagtacctgaaggaagtgaattgtcttttaatcgagtcagaaaccaatatatatcatttaagatatgtaagtgagtggtgtcttttcagacaaatgaagcattagcgaagcanagacacatcatcatgttgtgcatgtggaggtggcgggagctgaactgcgttttcaatatatgtggcacg

SEQ ID NO: 213791 - DNA, 440 bp, Glycine max
  unsure (1)..(440): unsure at all n locations
ctctaccacactccagacatcttcccatatgtgccaacggncatatcatggacaagtgtcttgtgaagtttaaggcctcatttctagaagatcctactattaatgaaggcttggggtagcgtcttttactcgatgcagcctgcattgtatcttctctctagaaagctacattaagaggcttccttcagaagctttctcgtggcttctttgagatagttttctcaacaggcttctttgagaagctagatccttatctatccacacctctctattaactatattaactctcttaataatatttacggatgaaaataacgtaacacataatcacacatcatacataattactaataatatatagatatatatatcacggtgttacacccttggccagaatgcacagtctatcctccatctctctggatcaaaccttagtcttc

SEQ ID NO: 213792 - DNA, 399 bp, Glycine max
atcctcaattcatggatcctgctactttctatacctctgaatccagatggcgcattgccatccgcaaaggcactagatcctctcgccatcctcatcctatttataactctctaagctatcatcgttagtctacctcatattcttccctttgtttctctctatcttcgcattctgacccttctaatattcatgaggcactgagtcatcctatatggcgacaggctatgattgatgaaatgcacgctcttgaacatagtggtacttgggaactcgttcccctctctcctggcaagaatggtgtgggttgcacatgggtttatgcactcaaatgtgggcctaatggtgagattgatcaacttaaagttcgcttactggctaaaggctatactcaggtatatg

SEQ ID NO: 213793 - DNA, 399 bp, Glycine max
tctatcttaatgagggatctatggacgaatctcagtttaagttagtctataaccaagaggcttgtctaaatcaggcctagtttatcaaaagggatgatgtaagcttcattggagctattaagccttggatcttctttatcaatggattccttagcttctttgaagatgaatggccgctgaatggacaaaggaatagagagatgagatgccactttaaggagaagatgattctctaacactctcaccattataggaggccatggataagagcttacaggaaaaaggagatgaatgaggggagagggagagaatatcacgaaattctgtgctctaaatgagccttgtaatctggagtttaatattcaaatgatgaaggtcaataaaatgcgcacacatgac

SEQ ID NO: 213794 - DNA, 436 bp, Glycine max
  unsure (1)..(436): unsure at all n locations
tcttggagctactggaattgaatacaagctacacgatggtgtaccataagccattgaatccctgcggcaagctggaatcaaggtctgggttcttaccggtgataagcaagagactgcaatttcaattggtctttcttgtaaacttctgagtgcagatatgcagcaaataattataaatggcacttcagaggttgagtgcagaaatctcttggctgatgccaaaacaaagtatggtgtgaaatcttcaagtagagaacaacagaatctaaaatgcaaaattgattctagacatggaggccctgatattcccaatgatacanaatccttgagcatgcccaagtggaatccaggataggaagaagaaactactgctccattggcactcataattgatggaaccagtttggtttatattttagagaacgaattacagtca

SEQ ID NO: 213795 - DNA, 354 bp, Glycine max
  unsure (1)..(354): unsure at all n locations
cttgcctgctaagcccaaagcacttgtaaattctggatgtcttgccatgcactaagtgccccctgtcgcgctaagcgcaaattactctctatttttgtaattgttggatttaggcttaacaagccttctcgctaagccatttatgtacagtagtggtgtcgcgctaagcggaatttggtttttggtgaggaattgggcttagtgagctcgctaagccaattctacagaaaattctgatctgtgtcaactcgcttaggacgtggctatcatgcttagcgcatgaataanttttcataaggtgcgctaagcgcaattgtcgcgctaagcgcctatctgaatttaattatattttca

SEQ ID NO: 213796 - DNA, 417 bp, Glycine max
ttattgtagaccacacaacggtacttggagatatgtcgcgggggtcaagagaccttgcggacgtcaagtggcgtgctattgtccaaaaccaagcttgaccaatcctgacccaaccccggcatacatcgtcagtgataacctgtgatgtacctaaacacgcgagctcctggcattcaacagataaaaggaacaaataccacacagcaaggacgcttgtggaggctggccacctgtgaaacttgattgatatgtgagatatgtgctctggtaaacgattaccaagggtgggtaatcgagtaccaagcttaaacatgaagacaggaggctaacatggtctctggttatcgattatcacggggtggaatcaatacccgcttcgaaacaggtcagaagtagggaacctcttggatcgatacc

SEQ ID NO: 213797 - DNA, 454 bp, Glycine max
  unsure (1)..(454): unsure at all n locations
agcttcaaaccacagcaacacaaaatctaggtatccaaaacccctcaatttagtggattttcaaggtttgaatggtgaaattgagaatggggtaaatttgaagcaaactctcacctcacacaagtctataacatcaatttaaacttgttcaaactggatttacacctaatatttcaccgaatcaaaatttgactcctcagcacccaattttaccctagaaatggctcttgccttcactttggtcatttgtttttctctcttgcatagcccaagctttctcataagtcctanatgacatttcgaactaggattaacttattttaacctctatttaccactgaatccagatttagccttccaactctcagagccttactctgtnntcactcataacaccacattctcactttctaaccctangttaactctacccttcatctctaacagttttcca

SEQ ID NO: 213798 - DNA, 454 bp, Glycine max
  unsure (1)..(454): unsure at all n locations
ctcgcagcttctatgcaaggaaacatgcttatggtttgaatccaaaaatntggnnntagaattatgaaaatatgaaaattatgatttgcttgtgagagattttttgctcgaatttgggctgccccatgtttgatactttacatagaggtagcatggaaaacaccttgcaatagtggtatacataggtaaatataaggagcatgaaattcctagcaaagaatgaataattgttttcttgaattaatgtatgatagtgtggaatgccttctggatgcaagtgtgtgcataatgtaaatagcttgccaatatgaataaatgtgaaggaaacagtaaaaaattttttgatatatatttcacacatatgtaggtagtttgtgataacaaatgtttangatataaattangtgtaaagttggacgcaacactttgagcataaaagtgtgttttcttttta

SEQ ID NO: 213799 - DNA, 281 bp, Glycine max
agcttagccctagaggtgagggacctttccttgtgttggagaggtatcttaccaatgcctataggttgaacctcccggaagagtatggagtcaacaccacttttaacatttttgactcaattccttttgcaggtggagctgatattgaggaggaggaactaatatatttgaggtcacattcttttcaagggggaggggatgatgcaatcctccctaggaacggacatgtccattagccatgagcaataggctccaagaggattgggctacatctactgaag

SEQ ID NO: 213800 - DNA, 452 bp, Glycine max
  unsure (1)..(452): unsure at all n locations
gaccttcacaactctgacattctccatgttagcttctgcgaaaaatactgtatcatcagcgtactggagaacattcacaggctccatgctattccccaccaagaaacttctgaagcaattttttgaaactacttccctcattaaaccagtcataccttcagccactaaatcaatagaaggggtgccaacgggtccccttgtctcaaccctctttgaggcctgaattcagaagttgggcttccattaacaagaatggatatggaagctgaagtgaggcaagccctaatccacccaatccatctttcatgaaaccccattcttctcagcatgtagaaaagaacatgccaagacacagaatcataggccttctcaaaatccactttaaagaccatgcaaggcttctttgatcttctaatttcttcaatcacctcattagccaccanaactccatg

SEQ ID NO: 213801 - DNA, 331 bp, Glycine max
ttcactaagtcaacggatcattttaatgtcctacgccttataacgatcatcactttagtaaataagaatcgtttgcctgaaaagaactacgtagggctgattatctcatcccaaattgaggaatacgtactgacaaagggaaacacccttgtcaaccacccaatagaataaatcttaattgggtctaaaggatttcagatcatcctagggaacctaaatatcaaaggcatgtgtgcacattcaataaaggctgccgtcccttgagacaggctgtgaggggtgctaatacctttcccgtgcgtaaatacaactcccgaaccttacactaaaa

SEQ ID NO: 213802 - DNA, 414 bp, Glycine max
actacgctgagataagaagtgtgaaggtgtacttcctgctttttttttgaccacagagtggtacctggagatatgtcgcggaggtcaagagaccttggggacgtcaggtggggtgctattgcccaaaaccaagcttgaccaatcccgacccaacccgggcatagtcggtcagtgagaacctgtgatgtacctaaacaagcgagctcctggcagtcaacagataaaaggaaaacaagaccacaaagcaaggaggcttgcggtggctggccagctgtgaattttgtgtaatatgtggattgtggcctctggtaatcgattactaagggtgggtaatcgattacaaggcttaaaattgacgacaggaggctaagatggtctctggtaatcgattaccaaggggtgtaatcgattacc

SEQ ID NO: 213803 - DNA, 422 bp, Glycine max
  unsure (1)..(422): unsure at all n locations
tctttattgttaacaatggattttatagaggaaaaatggatacaacattattccgcaagaagattgactnccaatttatattagttgcaaaatatgcgggcaacataatatttggtgcttctaatgaacctctatgtgaggatttctctaagttaatgtaggttgaattcaaaatgagtatgatggctgaatggaagttctttttacgactactaataatacaaaccaattatgtgaatctatatccatcaaaccaagtttgtcaaggaacttatcaagaagatctagttcaaaatgcaaaagaaatgaatactcctatgtatacaaagacatgtttaggaatggaccaggtattccattaacaggataatctcttaatacagagcaatgattggatccttaatatatctaaatgcatctag

SEQ ID NO: 213804 - DNA, 400 bp, Glycine max
  unsure (1)..(400): unsure at all n locations
agctgcaacattcaatttctagcgtctcgatatatgacaggactcaaccagacatccgagttanaagttattgtcgattgaattggctcacagcttcaactttcaatttcgagcgtctatatatatgacaggactcaatcacacatccgagtaaaaagatattgtccgttgaatttgctcagagcttcaacattcatatttgagcgtctcgttatatgtcgggactcaatcacacattcaaagtaaatgttattgtcgtttggattggctcagagattcaacattcaatttcgagtgtctcgatatacgatgggactcaatcagacatccgtgtataaagttattgtcgttggaattggcttatagcttcaacattcaattccgagcgtcttgatatatg

SEQ ID NO: 213805 - DNA, 447 bp, Glycine max
  unsure (1)..(447): unsure at all n locations
tagagccaatgcngacgacaatatttttttactcggatgtctgactgaggcccgccatatatcgagacgctcgatattgtacgtcgaatgtctgagccaatccaaacgacaataactctttactcggatgtctgatagagacccgcaatatgacgagacgctcaaaattgaatgttgaagcatagagccaattcaaacgacaataacttcttactcggatgtctgattgagtcccgtcatatatcgagacgctcgaaatggaatgttgaagctcttagccaattcaaacgacaataactttntactcgaatgtctgattgagtcctgtcatatatctatgggctctaaattgaatgtagaagctctgagccaattcaaacgacaagtaacttttactcggatgtctgattgagtcccgtcatatatcgagacgctcgaaattgaatg

SEQ ID NO: 213806 - DNA, 211 bp, Glycine max
  unsure (1)..(211): unsure at all n locations
gatgaaatggccatatttaaacaatctattcactaccaccaaaatggcctcataccctttaagattttgagagtctggtgaagaaatccattgatatatcctcccaaatttgttctggaatattcaatggctgaagcaacccttctggagcagcagctaagtacttctggcattgacanacattatatgccatcacaaatttctgtacact

SEQ ID NO: 213807 - DNA, 471 bp, Glycine max
  unsure (1)..(471): unsure at all n locations
gcttctatatgccanatngaaggaaatttagtatagaattcaaattcaatgttaataactatattcggngtcaattacccctgtcaaaacataaagggctaaggggtgttttagattctactaaaaggagacatcattttgaaattccaatcaagccaatgtgattcgggttcaatgaaggtcatgaaaataacatcaattttataaaaagataacttttacaatgtctaatttttaagggtttttcaaaggaagtgtaaaagtaccctattacagtacccaaaacacaagagacactaagagaaactcaaactaactaagagaaaggcttagaagtcaagattaccttagagaagccacgaaagaaaggattggtggatttttctccactgaatccttgaggtggatattgaggattatgctctaattaaaatgttcctcttggtgttgtggttcggcagcgagcaatgg

SEQ ID NO: 213808 - DNA, 395 bp, Glycine max
agcgtcaatgaataaataaacctggagaaaagaacacgaaatgaattggagcacttcattgataaaatcatgcatgacaaaataaagataatattgttaaagaaaaattaaagctagaagataaggtttacaaatacttatttaaacttgttttttacacaaacaatttacactataaatgttaattttaattagataatttgagtcattacacatgatgaagtgaataagaattgtagtccacactacctattttttagtgtaaatactgatcattattcacgtcgatatccactgtgtgatatatatggctatttatgagctcttatagatatttattaacagtgaagagcttttcaaacacatttttaaacttcaaaatacattgtgctcga

SEQ ID NO: 213809 - DNA, 459 bp, Glycine max
  unsure (1)..(459): unsure at all n locations
tcaagcttagaactacgtttagctctacncaccctcagtactgatgggccatactgaacgtgtaccatctcagtcgcgtggatggatcttcttattagttcccttntcaatattctcacaaagagtcggtctctgtggcatattcaaatttgcatctacccccgccttttttcttagcctccacaagtgtcttttattgctttctcaaccttcataaataatatctatgaatccttcttacatgggtcgaattacattgttgttccaagtaaatgagaatttgacatatgaaacgttgcctttatgatcgaggataggctaacaaagcactaagaaggaaagaaatatgttggccaaggaatctggggacgtgcattaggagaagacgcattgtgggacttgagagtctaatgccaaaccctatcagacttgttcaattaggaattccgggacgatatt

SEQ ID NO: 213810 - DNA, 452 bp, Glycine max
  unsure (1)..(452): unsure at all n locations
cccgtcatatgtggtactangtggtgatcgggtgatggttcatatcaactctcccatatccacaaatcaaacatgaacccaccatccccagttgcccaccttcaactgagctcacgtacccgcacgtagcccttaatctcgcgtctctcagcaccgggtccccattaaccccttcaagctttcacaatatccaagaaattcaatatcaaaacatcatgaactaccctaaaccaagaaaacagggcagaggcagaaaactctgtccaaaacacattccaataccacaacattccctactcaaataccccagtaacattctcttcatttcgattcgttaaccgttggatcgactcgagaaatttactggaggtccctagtacataagtattcatgttgaccgctgggatctgctagaaaatatccagaacccaatatgtactaccttctccata

SEQ ID NO: 213811 - DNA, 327 bp, Glycine max
tatagagctacatacgtcttggaatcgatacactccgacatttgtgggccatttcatacaccttcatggaatgtgtaacactattttaccttcctcatagacaaattctccagatatgcatatgtgcttctatacatgaagagtcactatctctacatgtgttcaaacttctaaggtgtagttgaaaatcaactctttaaaagaatcatgagtgttagatctgaccatagcgatgaattatatggcagatatgacagttcacgtgaacatcgtccgaggtctttgcctctacttagaggatattgactcctccacattcaacatgtc

SEQ ID NO: 213812 - DNA, 449 bp, Glycine max
  unsure (1)..(449): unsure at all n locations
ttctanagatttctgggtttccaaaccttgaaaacagaagtgtgctatatcctctattctcttctccctttgccataaagaattcgccaaggacttaccgcctgaattatntntgagtctctcttctccctattttcaaaagaacagaggactaaccgcctgaattcttttgtggctccccttctccttgtcaaagaatncaaaatgaccccgtctaagaaattctatgatgcttccctttcccataaacaaaagatatcaaaggactaaccgcttgagaattcttttgtttccccttcacaaagtttctaaggactaaccgcctgagaactttgtcctaacacattggagggtacatcctttgtggtacaagtagagggtacatctacttgggtttgtgtgactgataacaagagagggtacttcctcttgggatctagtctatggag

SEQ ID NO: 213813 - DNA, 414 bp, Glycine max
  unsure (1)..(414): unsure at all n locations
agcttgagatgaggaagagttgaanggtgaatctttctgcttttattgttgaccacagagtggtacctggagatatgtcgcgggggtcaggagaccttggggacgttcggtggggtgctattgcccaataccaagcttgaccaatcccgacccaacccgggcatatgtcggtcagtgagaacctgtgatgtacctatacaggcgagctcctggcagtcaacagataaaatgaacaaagaccacaaagcaaggaggcttgtggtggctggccaactgtgaactttgattgatatgtgggttatggcctctcggaatcaattaccaagggtgtgtaatcgatcactaggcttaaaaatgaagacaggaggcttagatggtctctggtaatcgattaccacggcgtgtcatcgatta

SEQ ID NO: 213814 - DNA, 430 bp, Glycine max
  unsure (1)..(430): unsure at all n locations
tgaaactcagctggttgattactccactaggatcacgttactaatttattctctacatataacacaaaagcatcattgattagagaaatatctttatatacatcaactggtctgttagaaagacccaacatatttacctactgctgtcaattgtacttacattgttattgtttttatcctacacttagtttaattctgttttaaaccatcagttatcaatgtttctttcaacaatgccttatttatgaaattaacccggtcttagactagttccctgagttcgatactcggattcatccattttaattntaaatacttgatgatccagtacgctcttcggcaaactagatttcccttgaacatatatgtacaaagaanaaatggaccaaagagtaactgcaggggaaatccaacaaagtatttatggcat

SEQ ID NO: 213815 - DNA, 356 bp, Glycine max
tgcacaacaagttttccacattcacaatgcgcgcataaacccacccatctcctgatggccaaccttcaactgagctcacgtactcccacgtagaccatatcctttgttcttctcaacaccggggccccatcaatccttctcagcttccacaacatccaagcataacaacattcagacaggataagctatcacagccaagctaatcagagccaaagcagaatactctgctcacacattaaccatagtcacagcttgtctcattaaagaccacagtaacaattcctttgatccattcgctacacgtggaccgactcagaatttactggaagtctatgagcatagcctacttttgaccg

SEQ ID NO: 213816 - DNA, 398 bp, Glycine max
  unsure (1)..(398): unsure at all n locations
gaacaacggaagctctcgataaattcgaatggtcataacatttcactccgatgtccgattcggggacataatatatcgagacactcgaaattgaacaacggaagctctcatgatattcgaatgctcataacatttcacacggatgtccgattcggggacataactcatctagacgctcgaaattgaacaacggaagctctcgagaaattcgaatggtcataaaatttcacacgaatgttcgattcggggacataatatatcgatacgctcgaaattgaacaaccgaagctctctagaaattcgaatggtcataacatttcacttggatgttcgattccgggacataatatatcgagacgctcgnaattgacaacggaagctctcgacaaattcgaatg

SEQ ID NO: 213817 - DNA, 175 bp, Glycine max
cacatgcattaagtgaatatttgatgtgtgtggtgggaacataacttaattgaataggaagaagcccaatccatataaattttacaggggtaggtgagcatttgcttgctacaccccattgcacaatatacatcacactttgagcatgtcctcatgctttacatgactcatgaca

SEQ ID NO: 213818 - DNA, 342 bp, Glycine max
  unsure (1)..(342): unsure at all n locations
agttcaagtccatagccatcagagtctgaaaagagtatgatgaactaagggacgtcaatatggccacagctgaagccttggaacgagaaaccaagatagcccgaaaggaagaacacgaccaacgcaaagttttgaggggctttatagggcagcaatagtgagctcaagctccgaagaggtgaaaggaatcatcacgggtcaaaggcatgatcttgaaggacgagctaaaggttttccttatgttgaaaagaaattngtcccaacagttaagcgagactgaagggaatatgtgggccatcatcgataagtgcaaagagaagctaaatctagtggcgactcacg

SEQ ID NO: 213819 - DNA, 434 bp, Glycine max
agcttgtttgagaagctattacttacctactctctcctataatagcttagctcactcgcatgacacacataacatgataatacaaaaaaaaatatctattacaaagactactctaaatgcctcgaataacaaggattaaaccctatactactacaatggccactatacaatgctccaaagaagaaacaacctattcttctattatcaaaaaaagtggacccaaccttggctcatgggctcaaaatcctaccctaaaggttatgagaactctatagtcttttttaataactctagcccaatccttcttggagccttttgctcatggctctggaaactggttctttctagggatgattgcatcaccatgttctagtacctcagggtgcgcttaacataggctttcattggcggaccgatttgatattgggcaaaca

SEQ ID NO: 213820 - DNA, 445 bp, Glycine max
  unsure (1)..(445): unsure at all n locations
tctatagaaggttagttcctaatttctctacaattgcatcttctctcaatgagctagngaagaagaatgtggcatttacctgnggtgaaaaacaagagcaagcctctgctttgctcaaagaaaagcttactaaggcacctattctagctcttcctgactnttctaaaacttttgagctagaatgtgatgcctctggagtaggagttggagctgttttgttgcaaggtggacaccctattgcttattttagtgaaaaacttcatggtgccacccttaactaccccacctatgataaagagctntatgccttaataagagcactccgaacttgggaacattaccttgtttccaaggaatttgtcattcatagtgatcatcaatcacttaagttcattagagggcagagcaagttaaacaaaaggcatgcaaaatgggtagagtacct

SEQ ID NO: 213821 - DNA, 298 bp, Glycine max
ttctcgaacattgcggatttctatatccctcatagcaatccaagcttataagacgtttgtctgaaggcacaatactcacattagtgacaaaatcattaattacagcgctgatgatttataaaattaccttctggatttctttgaaggatctcaaaagtggttgcaaaatcctcataagaggtgatatcagatgggcaagaataatgctgctctattaacactggttagttgtatgtgtcataaacaggttaaggttcatgtcataaccttatagttccacttattatgtattatatta

SEQ ID NO: 213822 - DNA, 212 bp, Glycine max
tggctctgaaccatatacaacactataccatgccttgcatgtattgttgaagtatacatcagtctactattgcacaccacacatatattctacaacaggctgcaccactaaaacatgggaacatgcaaaacaccctcactaataacacaactgacttctggtttcaatattgctgtatagcaaccaagcatactatatatacgttcacatac

SEQ ID NO: 213823 - DNA, 415 bp, Glycine max
cttctgtattattacttatttttcttgtaacttcttttttaactagctatagaatctgtattagctattacctgcgcacatttgttgctcttcgtaccttaattgtgaagcttgtttgcatttccattcgtttcatatgagtgcatttgcataatccttcatttaatttcttctcttgtattaaagtatgatttttttttctcaatctcatttttatgaaaatgaatcttgttgttagttaattttactcagtagtgataagtcatgcaacctttttgtctatacgtcctgtttcaatttcacaagaataccattagggatttgtaccacagcgccttcgctacaataatgagtgggatcttcctccaggagaaaggtgaaataagaccaatgatgttacctttgagttgagtac

SEQ ID NO: 213824 - DNA, 418 bp, Glycine max
  unsure (1)..(418): unsure at all n locations
tacatttcatctctagcatgcattttctttctttctttacccactcctcacgtttggttntttaaggaaaaacaccataactaaacgcgccacaaggcatacctatcgcaccagatccaaatctaaaacgatgggtgatcaagaggagacacaggaacagatgaaagccgacatgtcggctctgaaagaacacatggccttcatgatggaggccatgttaggtatgaggcagctcatggaaaataacccggctaccgctgccgctgtcagttcggctagccaagcagacccaactctcttggcaacatggcaccatgcttcttaaacatagtatgaccgggaagggaccccttgcggaatgatggcatcccccacctggatacaaccggacggcttacctcatagtcggcccccccta

SEQ ID NO: 213825 - DNA, 446 bp, Glycine max
  unsure (1)..(446): unsure at all n locations
agcttaaaatactactaggtgttaattnttgaatggaggtgcttatttggtatacacttacgaatactttgttctttataggcagaagcaagattacattttaaggataacggctgttatgtggatcctaatttttttactggtcaatgatattcatttcaattgtcttgaaacgaacacgaatttccgggctgaaaatatttgtgtatacttgaaaaaaaggaaattacaaaaactagagtgaacccctgcagtagcaggattctttaaaaatcaaaaagagaaagtgagagagtaacagagaaaagtataaaaaatatataaaacattgctattcactatcaagccaacgcatgaccatggctggacagttntaatatatattgagatgaataagacatattctcttttaagtctaatgcctttcattcacaccaaatttctta

SEQ ID NO: 213826 - DNA, 471 bp, Glycine max
  unsure (1)..(471): unsure at all n locations
actcagctaatccnagtgatctttgttttggaactatccagctgaatatcagcatattttcagccttgaactttatattttatttgtgactattcttgtttaagagtggtttatgaatgtggtattgatatttgatgcacgataactggccttctgtcaggtaaaggttcaacaatcttattgccattactttaataactntaaatactaattctttagccgctcccagattgagttagatgagctggaaagtgtttccattctgtcaatgacccttgcatgggatgaattttccttctctacttttcaagaagcccattattcgcttcaagattctctagaccaggtgcctaacatgcctttntgatatcttttctgtttttgttgctttatttaccatcattccctgcttctatcattnttcatgtaattnggaatatntaaagntaaatggtcaattcttttttgtat

SEQ ID NO: 213827 - DNA, 397 bp, Glycine max
  unsure (1)..(397): unsure at all n locations
agcttgagatgaggaagtgttgaagggtgaaactctctgcttttattgttgaccacagagtggtacctggagatatgtcgcgggggtcaggagaccttgnggacgtcaggtggggtgctattgcccaaaaccaagcttgaccaatcccgacccaacccgggcatagtcggtcagtgagaacctgtgatgtacctaagcaggcgagctcctggcagtcaacagataaaaggaacaaagaccacaaagcaaggaggcttgtggtggctggccagctgtgaactttgattgatatgtgggttatggcctctggtaatcaattaccaagggtgggtaatcgattacaaggcttaaaaatgaagacaggaggctaagatggtctctggtaatcgattaccac

SEQ ID NO: 213828 - DNA, 458 bp, Glycine max
  unsure (1)..(458): unsure at all n locations
nggattgatntagtccaactagggatcgacgtttcttaatttatgctacaacatataacacataagcatcattgattagagaaatatctttatatacatcaactggtctgttagaaagacccaacatatttacctactgctgtcaattttacttacatttttattgtttttatcctagacttagcttaattctgttttaaaccatcagttatcaatgtttctttcaacaatgccttatttatgaaattaacccggtcttagactagttccctgagttcgatactcggattcatccattttaattttaaatacttgatgatccagtacgctcttcggcaaactatatntcccttgaacatatttgtacaaagaaaaaatggaccaaagagtaactgcatgggaaatccaacacagtatttatggcatcgttgtcggcgattatatttaagaagatttag

SEQ ID NO: 213829 - DNA, 429 bp, Glycine max
  unsure (1)..(429): unsure at all n locations
agctngtgagatgtgctaataccttcctcattcgtaaatacaactcccgaacttagatatttcatcttgaccggttttctttgtgtttcccgacgtnttccacaaataaacattggtggcgactccgtccatttcttctccttatgaaagcgcacncgtgagcctcgtctcgatcgcccgcaaaagggcacattgcgacaaggtccaatgccttaatgtttctctcttctcataaccaagagatcgttanagatccagtcccttaaatgtttctcttcttttaanaaacaagagatctgtataggtccaacgccttaatgtttctctcctccaaaaaagagatcgttacggtccaatgccttacatttctctcctttcaaaacaagacttgtttagacgtcacaccttactattctctcttttaaatca

SEQ ID NO: 213830 - DNA, 426 bp, Glycine max
  unsure (1)..(426): unsure at all n locations
cttggtgctgatataaactatatatcagcaccaaggttctagtttagggcccncccncctctctccctcacgggagactctctctctctcctctctctcttctatttttcgnttttagttttagtctctcttctctttctcttttattttcgttttttttcaattccagttcagacttttagttttatcaataaaatttcattctctatttgattaatggaaggctaagtccgcagcgttgttttcccttgaggatcaagcacagttctctttgaggttctattattactgttaaattctgtttagtttttcctcttcactaattactctgaatttgttgcttttaattcatgcatgcttagtgctngattaattgtctctgcgcttaatttacgttcatgcttaatggatcgttatgagtaattg

SEQ ID NO: 213831 - DNA, 391 bp, Glycine max
  unsure (1)..(391): unsure at all n locations
gccattgtgcacaacaagatttccacatccaacaacaacattcaaacagcacaagctatcacagccaaacaaaacatggcaaaggcagaaaactctgctcacacaccaaaccaaatcatatctttntctcacttaaagaccccagtaacaatttcttcgatccaattcgttaaccggtggatcgactccaaaattttactggaagtctatagtacataagcctacattttgaccgttgggatctactagaaaacatccagaactcattctgcactatactttccacaggcaaccacacacaagcaattttctgcacaaagccaaaactctgctgacctattntgacagcaaaatctgctaagtgcagattccgatactacacttccctcat

SEQ ID NO: 213832 - DNA, 469 bp, Glycine max
  unsure (1)..(469): unsure at all n locations
cggaccttagaatctcagctaactctgatgtgtacacattagaatagcttaaagacttcattaaatactctatgtctgagattcattttgcagaaaactgtgtcataagacattttcctaagatatatcgaatcctatgaagaataaataaagttcaagatctgaaagttgccaaacaacatcaaaaggcacactctattatgatagacctactctaacgcaaagtgttaagtcaaaataaatttatgtcttaagatgaatcaagacctttaattattttgattagatgtaaataaatacaaaggttagaagttgagtcttatgcactataagaacatgccttgtanagtatgcatttgatgtttcagacaatagccaaataaaagcatgatctgataccaccttacaaatgacatttaagacttcatttaatantttgtgtttgggacctattttgcataaacattcc

SEQ ID NO: 213833 - DNA, 321 bp, Glycine max
atgagaatgtgaaggtgaattttctgcttttattgttgaccacagagtggtacctggagatatgtcgcgggggtcaagaaaccttggggacgtcaagtggggtgctattgcccaaaacccagcttgaccaatccccacccaacccgggcatagttcggcaatgaaaacctgtgatgtacctaagcaggcgagctcctggcagtcaacagattaaaggaacaaagaccacaaagcacggaggcttgtggtggctggccagctgtgaattttgtgtaatatgtggattgtggcctctggtaatcgataccaagggtgggtaat

SEQ ID NO: 213834 - DNA, 309 bp, Glycine max
aattgaacataaaaggttttcatagaagaagaagctcttcagcctagtaagttctgtataagttgacttgatgtttaacctcaaagtggtggcagcacctccgtatccctcagccgccgccgccacaagctgtcgccggcgtcagtggcgaagaagaactcgtggtcggtggattcatggcactgggtaatggagggtgtaataatggggtatggaagtgtagtagtagtttgagtggagaaactttctatctcaaaaagatcagaacttgcatcactagctgcatcatcatccatggcacgtgacttg

SEQ ID NO: 213835 - DNA, 294 bp, Glycine max
ctctgagtcacctgcggcatcaagctgaagagtagagtctctttcgcgtttttctttacattggcgttcgagacagtgattgatttattcaagagcctctactttaatcgagtacgaagtggattaatcgactacttctcgctcgcgtaggagttcaaaagtgaaacacaacactttagtcgattacttagagcatctcatcgattaccttggtcttgagtttttttcagatggttgggaaaacactctattctattacttagataatctaatcgatcacttcattgaattaat

SEQ ID NO: 213836 - DNA, 457 bp, Glycine max
ggacacataaaactcagcttaagtataaatgagccaatttgtcatagctgacttttgactgaagcctatatataagatgaaactcaatctggtctgcaattgcacactcattctgattctattatggtcttctcattggtagtattattatcattattattaagggtaatgctaacctgtgcctaagacactggttaagaacataataaataaaaagctcttattaaaagcatatgttggggttgtattaaaaatcacagaagagtgcactgttatatttttcgataaaaactttgtactttgattctttaaccaatatccctaaatattgattatcattcttctattcttaaaatttaatttctatgtattgccaatataaacactctcagctagtccaaaatagatatgattttaaagtagatactaacactattaaagcaataaactatcataa

SEQ ID NO: 213837 - DNA, 409 bp, Glycine max
  unsure (1)..(409): unsure at all n locations
ttatctaaccattccaatccattcanattatacaattgatcattcaaatcattctcaaacactcatttcataccaaacaatccactgcatatctttttcaatcaattcactgttcaaacattcttttggtacaagcaaacaactcaaagtgctgaaattttaaataactgaaacataaaaactgaaattaaagtaactaaacataaatcataaaataattgaaaataaactaaaatgttcaagatgcacaaatttaaatgtcctactgatggaagcttgcttgtggtaggattgcatcacctactcatcctgtggctgatcttcattaagatccagtgctggagctgctgatgaatccttgataggctgctttggctctatgacnggtgtagatggctgaatcttctca

SEQ ID NO: 213838 - DNA, 393 bp, Glycine max
  unsure (1)..(393): unsure at all n locations
ttgcttctacactgtcaaaacctcatgcaagcatgtccttattcctatgctcgntaaaaccaagattcaccctctttttgcttagttccatctccacaggaactcaaggtatgcaaggtctacccttgacaatctttcctaaccctaactgttatctgagcaggagttcaagtctgcagtaatatcaaaaacccaaggcccgcccttggtactaaaaatccaaggtctacccttggtaaacactcttacaaaacccaaggtacccccttggttctcttactcacaacaactatgatgaccatagttcaaggtctagcttccacaggtcaagatgatctacccaagactaattgacatgacattntactagaggcaaccaaacatatcctcata

SEQ ID NO: 213839 - DNA, 302 bp, Glycine max
tcacatttagcaaaaactcaacatatctcaaccggccgttatagatctcaattatggcattctgcttaaactacggaacaaatgtggtcacaaaataaaacatatgaagataatttttttacataaaattaactccgtgaaaaatccatgtgttgggtcagctctgtaattactgattcatcgaatataaaacaactcttcaatatcacacctattattgctaaaatttggaagctaaattgggaaaatcttaaatatagcacccttcctttggaattaaacattaacaaaaaatttttaaa

SEQ ID NO: 213840 - DNA, 436 bp, Glycine max
  unsure (1)..(436): unsure at all n locations
ttggtggtgtgattctnccaaagttcttatcaatctgttttctatntcagaaatcaagaatgataactgttgggtttcatctacattgatcttaccaatggattggaagttaaaagatttcacattcattgctttccaaggttccttacaacaaacaatgcaaaaacaacagctttaactagagaatcataattgaaaatacttatttccctctggaagaagctacatcatgtntagttgcctgttacaaacatttggtggctttcatctaatttgttgtggtagtctctattttaactagagaatcataattgaaaatatagattgagactattttggaaagaccctgtctagtaattctttggttctcaaacaaaatgaaaatcttcattgtcttatacatatganacattatgctgcacgctacttattattg

SEQ ID NO: 213841 - DNA, 354 bp, Glycine max
  unsure (1)..(354): unsure at all n locations
agctcntatataacttatgaaatatcaatatctagcttgtacgcacatcgttcgcgtgtatgatatccactccacaagggttgaagtatatgagaccttctatcctataacgcaacgtggcggacaaaaatgggcagttaacttgaatggccattattgtcaatgcgaaaggtattctgcgctatactatccatgttcacacattattgcagctcgtggttacgtgaacatgaactactaccaatatatcgatgttgtttacaccaatgagctcatcttataagcatactccgcacagatgtggcctcttgtgaatgaagcggaaattccttcttctgatgaggcatggacact

SEQ ID NO: 213842 - DNA, 405 bp, Glycine max
agaaaaagtggtgatttctaaagttgatgaaaactctgttatgacaagtaaaggttagtggatagcttctttttttcatgcattatatttctatcctttttcattaaatcatattaggattttcttaaactttctatatcatctctggtattttgttaatgtatttgcaccatgatcttcaagttttttttattatatttgtacttgtattaacaaattcattgcttgaaaataggtttgttggcaatgtagatctttgtgggcgagaagttcaaaaaccatgtcgaacatcacttggtttccctgtgtaccacgtgccgaaagtgaggaagttgtagacaagtatatagttggaattgacttccaaatgctatctgatttactagatttataactaatatacat

SEQ ID NO: 213843 - DNA, 367 bp, Glycine max
  unsure (1)..(367): unsure at all n locations
tactaagcttgtgtattgttacactganttggtaatcgattaccagtgattgtttctgaacaaaatcaaaagatgtaaccttccaatagttttcaagtttttctaaaagttgtaactcttccaaatggtttttaagtttttctaaaggttataactctcttaatggttttcttgaccagacatgaagagtctataaaagcaagtccttaacttgcattttcaagacaattgattacaatcttttatatactttgaatctctttgaacatcctcttgaatttcttcttcctcttccttttgcaaagctttcttatagtttcacgtttttcaaaccttgaaaacaaaacttgtgctattcatctttttc

SEQ ID NO: 213844 - DNA, 430 bp, Glycine max
gccttcatcttcttctcctcttcccccccagagagcttgatgctccttaccggcatcccaatcaccgcagcagcaacttgcaaaccaggcaaccgactcatttcatgctcgtaaacccaaagccacccttggtgaacctctctttcgcttacctcgatgaccaaaaaactcatgctacccaaggcccaccgcttgacaacgctttctaatgcctaactctgattccagcacaaacgctagaacattaaaaacccaacggccacccctggtactccctccctttaaacccaaggtccacccttggcgacgactcgctcaaacccaaggtaccctacttaggttcgctcactcctcaagaaccatagagaccatatctaacacgctttcttcccttaaagataccccacctccaccagactggaagcaagac

SEQ ID NO: 213845 - DNA, 489 bp, Glycine max
  unsure (1)..(489): unsure at all n locations
tctaaggcacctgcagcatgcaagctttgagaagcacataacacaaacacactggttttagctntgagttagggaacaaactcgagttaaagaggaaaatgcagcttgcaagagcacttggcttgcagccaaaacaaattgctatatggttttagaacaaaagggctaggtggaaaatcaagcagttggagaaagactatgatgttctcaaaagacagtatgaacgtgtcaagtcagataattgttggatcgagtggcctcaaaataattaagaagggggggtggaattaattattcctaaacctttactaattaaaaaattaactcttctaaggcttttactatgtggctaagtaaataaagagtcgaaaagaaacttaacccaaagtaaaagagggaattaaaatgctcagtggaaattaaaagagtatggaagaaggagacaaacacacaagaggttttatactggtctgcaacaacccatgccta

SEQ ID NO: 213846 - DNA, 452 bp, Glycine max
  unsure (1)..(452): unsure at all n locations
cgtcgatgccgagtgtatactatttttcttccatgtttcagttgtacgtagcttatgtcttcttacagatagggcatgaacgatgtcctttaacattgtatccactcaaattcccgtatgttggaaagtcattaatggtacaaaatagcattgcacacaacttgaatgtctcatttcgatacccatcaaacacaacaaccccctcatcccacaactttgtcaagatttcaatcaatggattgataacatcatgtattttttcttcatgcacaaccaatgaggcaagttgtaaattgtgaatgtataaatacatgattntgatgatgtcaaagaataatcaaacaaggttgttttcaagattacttcaacaaacatttaaaggttaagcattgcttcaagataatacanggtgcttcaacaaacagcattgcttaagataattcttgatcatc

SEQ ID NO: 213847 - DNA, 408 bp, Glycine max
agctggaagatggttcatctttgacatttcctattctcttgagtggcatttgcattggttgatatatcgaatggtgcatcttagtccatatcatatattttgtgcattatgcatcatcatgagtaagggagaagaaactttctaaagttagaaaatctcttcagaaggcagaactctgtttaaatttgttatagccttatcataatcaaatacataagttgtcttaagctggcaaagttatgtcctatatgttggatcgagtggcctcagaataattaagaaatgggggttgaattaattattcctagaactttaccaattaaaaattactcttttaaggcttttacttttgtcgttaagagaatatgggatagaagagaatcttaccggacagtaaaagcgaaaatt

SEQ ID NO: 213848 - DNA, 255 bp, Glycine max
tgttagaactatcatcacataatgctgtattaacataaaataagttgctttttatgaaacttgagattttaacaaaacacttgggtaagtggccaccaaattggctattggtcaacccacctaatctttcggtttgcaaggtataaattgtaccatctcgggtgaggctcatgaaacaagcttatgtatttcccttggaaaaacactctcaaatgtcctctatgtgggaaatccacagacacagcgatatactca

SEQ ID NO: 213849 - DNA, 466 bp, Glycine max
  unsure (1)..(466): unsure at all n locations
agctttgagcaacatgtggagatgtttatgaaacancgagatgacgcgctccatgagaggttggatcaaatggagaatcgagatcataatgaagaagaaaggaggagaagagggaatgatggtgttcctagacaaaaccgaattgatggtgttaaactcaacattcctccatttaaaggaaagaatgatccggaggcctacttggagtgggagatgaanataaagcatgttttctcatgcaccaactatgaggaggaccacaaggtgaagcttgccgccacggagttttccgactatgctcttgtgtggtggaacaagctctcaaaggagagagcaagaaatgaagagccaatggttgatacatggacggagatgataaagatcatgaggacgcggtttgcgccggctatttactcaagggacttgaaattcaagcttcacaaactaacccaaagcaacaaggggg

SEQ ID NO: 213850 - DNA, 250 bp, Glycine max
  unsure (1)..(250): unsure at all n locations
gacacataaaactcagcttctcgaatacatgcaccgaatggactccgtgtgtttgttctgaccatnttaattattggagagcttctgtgttcaatacccagcgtctcgatatattacccatctgaatcggacttgcgcgtgataagacatgaccatttgaattactcgagagcatgcgttgctcaatgtgaagcgtttcgatatgttatgcgcctgaatctcacgtccatttgacaagatatgatcattt

SEQ ID NO: 213851 - DNA, 337 bp, Glycine max
  unsure (1)..(337): unsure at all n locations
tattgtcgttcgaatntgctcagagcatcggtcttcatattctagcgtctcgacatattacgggactcatcagacatccgagtaaaagagtgattgtcgtttgaatttgctcatagcttcaacattcaattntgagcggtttgatatattacgatactcaatccgacatccgagtaaaaagttattgtcgtttgaatttgctcagagcttcggcattcaagtccgaccctctcgatatactacgggactcaatcagacatccgagtaaaaagttattgccgtttgaatttgctcagagctttggtattccatttcgagcgtcttgatatattacggg

SEQ ID NO: 213852 - DNA, 196 bp, Glycine max
cagacagccacagaaagaaggggccagcaaacggagagacagcaccccaaccccggcgcctaaaaacaaatatcgtccaagcggaagacagaaggaaccgaggacaccgatccccccagaagggagacgccgggaccccagccgaagacaccaccgcggaaaagcgaaaaaagccaccagactgggacaagaagca

SEQ ID NO: 213853 - DNA, 404 bp, Glycine max
  unsure (1)..(404): unsure at all n locations
ngatactcttagctgctgtaggtgtgatgacacgactcatttctattgtcactctgggagaaatgaaattgggctcgcaccactatctatcatcactcaataagccacattctgcttcttacctttaaccgtcatggtgtgagactcacccatgcttcccaatacccccatcaatgtacattccaccttcacatcttcttcactttccaccgtcacattctccatacttagaatgtccccttgctctgacatgggtgcatcttcttctatgattacaaccctaagagctcgttctggacatttatgcaacgaaggcgggatcttcccccacatttgatacaaagaccctacgctctcctctattccaattgagcatagtggatacttcgtatacccttccacct

SEQ ID NO: 213854 - DNA, 462 bp, Glycine max
agcttagtatgataccaggcgattccattctttggacgcttgcaataaatacaccaatagaatcctcggccgaaatatccttccggagagaaatgtgcagatttatcatactgagtttgacgagtttaaagcggaattggagaggcataatctacacaaatgcctcgccaatctccaagatggaagcatagatgtagctgtggtgaaggagttttatgctaatttatacaccacagaggagcaagcacccaagcaagccagagtacgagggcacctgatcaaaatagatgcaggcagcctgaatgagtgccttcatacgccagtggtattggaagagggggaatctttacccacttactctagatattgcaggttgaggacaaatcctcaagagattgaagctaggctcttgtattcccgcacggagtttgtttgaatgctgagggtcaccatggaagcttt

SEQ ID NO: 213855 - DNA, 462 bp, Glycine max
  unsure (1)..(462): unsure at all n locations
ngtagaatggctagacatgatacatgtcagggcttggtttgtttcatgggtaaaaagggatgccccacatatttccatgacacanatgcaaaaatgatgatttggaaactttatgcaaaactggtcatgcatgcatctatgcggacactcaaatgtcaaatttttatggtcatgtgatgctagggcccaggattcatttcctctattttatatcaacccaatgtttccaaaatatgttcttttatccatttgtgcattcatccaagtccatttcgggcgtccgggaaaatttcacagcattcacccttcaggtttacacacantttttcaaaaattggttatgatcaatgagatttttttttttttttcaaagcatgttggcttttaactagaaacttattttcttttttctcttttttcattcggcatttattttttttatgaagattttgctcctaacat

SEQ ID NO: 213856 - DNA, 352 bp, Glycine max
  unsure (1)..(352): unsure at all n locations
agcttttatgtgaaaggatgtgagtcttttcattngaatttgaatttcaacgttcacaggcactggtaatcgattaccaaaacattgtaatcaattacagctctttgaaatcaattggaacgttgtaaattcatttgaaaattttttcaaatccattttgctactggtaatcgattacaacaatctagtaatcgattaccaaagagtaaaaactctttggtaaacatgttttgaaaaaaacccatgtgctactcaattttttagaaaacctttacatacttaccttgatcaagccttctcttgattctagaatcttgatctcttgaatcttgattcttgaaatcttgatctc

SEQ ID NO: 213857 - DNA, 435 bp, Glycine max
  unsure (1)..(435): unsure at all n locations
taaaggaagtgaaagaattagcatgggcagaaatgtctctttattgattggtaaatatgttccccaaatcctaaaaaatggaaggatccaagtacattctgcataccttgtattatagagaacagtaagtttgacaatgccatgctagatgtaggagcttctgttagtgttatgcctctgtctatttttaattctctatctcttggtcctttgcattcaactgatgtggtgattcatttagctaatagaagtgttgcctatcctactggtttcatagaagatgtcttagttagagttggtgaactgattttccttggtgatttttatgttttgaatatggaggagggattntctcaaggatcaagccccatcattctatgcagaccttttatgaaaactgctagaactaagatagatgtatatgcaagcacacta

SEQ ID NO: 213858 - DNA, 385 bp, Glycine max
agctagccacccagctcttccatgcgagcatggttgcttcctccagaagcaacaaccttctggaggaatcttctggagggccaagtgggcctggttgctatttgcacccccatttttactaagtacacccccctgcctttttttttgagattcttttttcgtaaagttatggaaacttacgaatttcgtaacgatacttgttttctttccgtaatgttacggaaccttgtggattacataatcatcccctttttgacttacggaacgttacggaacctcactaattgtgcaacgatgcttccatttgatttccggtgtgtcacggaaccttacggatggtgcatcaatattttcttttgctttccggcatgtcccggaatttcac

SEQ ID NO: 213859 - DNA, 353 bp, Glycine max
  unsure (1)..(353): unsure at all n locations
tgaattgaggaagtgtagaagggtgaaactttctgctnttattcgttgaccacagagtggtactagagatatgtcgcggnggtcaggagaccttggggacatcaggtggggtgctattgcccaaaaccaagcttgaccaatcccgacccaacccgggcatagtcagtcagtgagaacctatgatgtacctaagcaggcgagctcctggcagtcaacagataaaaggaactaagaccacaaagcaaggaggcttgtgtggtggctggccagctgtgaactttgattgatatatgggatatggcctctggtaatcgattaccaagggtgggtaatcgattacaaggcttaaaaat

SEQ ID NO: 213860 - DNA, 458 bp, Glycine max
agcttgatgaactacagggacatggaacatcatcggaatcattgagaagagagagcaggaaaaagaaaaaatagggttaaatatagttcagccttataaaccaaggacaaaagtgaatgccaagaaatagtttctacaaaagaaagaaatgatgttatatgtaccttggattcctctggatagatttattcttcattgctgcaagattttttacctcatgactgtagaaaattgaaaagaaaaaaaatttaagtcattcagttgggcatacaagctttaagatgaatgatcacaaaacagaattacagcagacaaaattccagtaaaattcatgataaaattattatttttttcttttttaactactttaacatataggcccggctagttgattcggcccactatcaatgcaaggcccaaatgtgacaaactttgaggtcaagacccttggattggat

SEQ ID NO: 213861 - DNA, 473 bp, Glycine max
  unsure (1)..(473): unsure at all n locations
ntaagtctattaaaaagaacatatatatatatatatatatatatatatatatatatataatatttaaatgtaaaattgatttgaacatataaattagataaatataactaaatgttttcactgtgaactttattgataattattttaataaaacatttggaaaacaaaatatcaaatgtaaataaatgtattgactttctaatatcataaataatacagtaaaagagtaaaagtatgtttataaaaagaaaagtcatataataaagaaaattaaatatttagaaaattttaaattttataaatgagcggagtaatatggctcacaataaattattataaatattaagaataagagaaataatctattataattccatccttaataaacaattactaagcttcctaacataaactaatctgaaaattctacaaaaatttgaatgtatttgttacaacaatataatttaatatta

SEQ ID NO: 213862 - DNA, 215 bp, Glycine max
agcttaccataatcagatacacagttcattgtttactctgactgacttgtcaagagtctaagctttcaaggattaccagataatcttaacataatactctgaatctgaaagtgttaccagaagtgatcttgaacactttagtcgattccatacgcaattggatcaattacgtcgcactttgaagttttccggattttgggaataacactttgatc

SEQ ID NO: 213863 - DNA, 156 bp, Glycine max
tgcaactctgcacacaacctgaccatgtgtctccagttacttcatgagaatgcaatgaactatcgttccttcacatcattattaatgacaggtgatgccccgattccactgcacctgaagaagcccactactgtgggtgcctgcgctagacccaag

SEQ ID NO: 213864 - DNA, 419 bp, Glycine max
  unsure (1)..(419): unsure at all n locations
agcttcatccaagaggtcatatatggctctgtgtgttgcatttncacacgtttattctttggttagcaaggagctacatatatagaggcaaccagtcactaacgtgtacaataaaatactcgcagcactatcaataccattaaacactataaatctaaagccaaacaaaaaactttctaattttaaagacttgtaagttcgcaaaggaatttgaccaagtaaaagataacttcctaaaattaatatatcaatagaagtaatgagatgcttttatgtttctcatagattaattctgaaagcattttatctctacaaaacataatcgtaaaagaaaatatatttcaattctaaatcttaaattataagaaaatgtttctcacaatctccactaattaaaattaagaaataatatttaataa

SEQ ID NO: 213865 - DNA, 320 bp, Glycine max
  unsure (1)..(320): unsure at all n locations
ttatttatttatatatagagtaaatagctattgtgtcatttaatgtgtaattcaccaataaatgtgtctttgaagatcaaaatataaaatttagtccccanaagtataaaatgtgtgacaaatatatccggtggttaactttcatctgtcaccattaataaaatagtctatgtgacacagatgaataaatttgtcactgaaatgattacaaacatgatcatctctaattgccaacataaggacatatttgtcatataatattttcttgacttttcgtcttcccactctctggaaatatgaatgggtaaatagtcattttt

SEQ ID NO: 213866 - DNA, 166 bp, Glycine max
ggggcaaaggctcaccccccccagagagatgatcacagagccccccccaaccacgcgcagcacgggcaaaagaaacccaagattcacagccgacgaggccggccagcacgaaacgaagccaacacccctaaaccacaggggcacgcccccaagcgcagaaaaaaaa

SEQ ID NO: 213867 - DNA, 187 bp, Glycine max
tgaccatatgatttgatgatgaattccgagcgtttagatatataatctggctgaatcgaacctccgagcgaagacttatgacgaataagctttctggataggtatcgttggagattttttagcggccatatatgagatgctcccgaattggtcatcccagattgaacgtttgaccaattgaatatgt

SEQ ID NO: 213868 - DNA, 318 bp, Glycine max
  unsure (1)..(318): unsure at all n locations
agctnaaggcactaacaaggaatatagtttggttttatatgaaacgccgaaagtgcctatatcacaatgattgttcgcgtcggattataaaacacgcccgtgatcgatcaaaatctccactatgctgggttgaagcccacatccccaaccttctcctgtgcaaagagcaacatgcttccacccatgacttttgagatggcagcgttctgccgcgaaataaatcaaaccctgagttattcttaagggtcgatctctaatgggaaaacatcccctacacaaaaagagcacatgtcgttctttatcttgcaaaacatttca

SEQ ID NO: 213869 - DNA, 398 bp, Glycine max
  unsure (1)..(398): unsure at all n locations
ctgatcaaacatttccaaacgtgcaaagacaagactngatgcttctttcttcatcaaatactatcaagcgtgcaaagttggaccttaagcacaagcttcatcaaagactatcaaaagtgcacaaccaacacctaagccataagctttattaaaaattgtcaaaagtgccaaggttgcaccaccaccaagttcttaatcacaacctggtacacatgtctttgaggattagaaagtgtaccaacttggtgagatttcaagtgatgatgaacattatgttgtatgtgacattaattttgttagtttatatttgtagggaatatttttttttgggcgaggcaatgactaataaaaaagtcaagtgatttgaaagatcaatacctgtcacatgaatagcactt

SEQ ID NO: 213870 - DNA, 443 bp, Glycine max
agcttcgtgtatacttgtccaaaatagattattttcctcggatccctgtctgatacaatactagaaggaattccatgcaaccttactacttccttgatgtacaactccactagcttctccattctatacttcatattcaccggaataaaatgggcagatttggtgagtcgatctactatgacccacacagcatcatgtccacgactagtcttaggtaaactagatacaaaatccatagatatgctctcccatttccattccagaatttccaatggcttcaattctcctaatggtcgctggtgctcagccttagccttttgacatgtcaaacatcttgctacatatttagctacatctttcttcatgccatgccaccaaaaacttcttttcaaatcttgggacatcttagtcatccctggatggaaactaagacgacttttatg

SEQ ID NO: 213871 - DNA, 426 bp, Glycine max
  unsure (1)..(426): unsure at all n locations
ntacattgggacgtgtatacggggcagggaatggattccttgtttataataaataaacgaatcctaaatctagataaataatacatgtctataattaacaaagtcatatgatagatgattatttattagtttattttgtgacaattttgcaatacatggctattaaaatttaattctaaaaccacaacatgatcaacaactccatagtggtccttaagagttaagaaataggagaacttgtcttcatctcattgctgttgagtacacgctcctacgcttaaaagataactctaaacgcatgtgttcaatagaaaattacactggatttattttttgaattcacatgatatttccgcactgtttccctcttgtaaattgtaataactctaataattatttaaaatatctctcatcatataagaacat

SEQ ID NO: 213872 - DNA, 368 bp, Glycine max
tggccaaactatcttgaaagaaatgcattaataacttctcagccctggaatacaaacccatcttctaacaatacatttctaggagatgtttaggacaaggcatccctttgtacctatcaaagtcaaatactttgaactttacggatcacctaacgatgggtgttaagtacctctaggcagacaagcgaaagatgcttgccaccaaacagtggttcgccggacaaaattagggtatgacaatgtcctaacctttcaagggtacacgccctctcctttagaggacagcacgttcttacctttagagaactacatgttctccacttcagaggactacacgtccttcactttagaggactacacgttctctc

SEQ ID NO: 213873 - DNA, 346 bp, Glycine max
  unsure (1)..(346): unsure at all n locations
cacatagaaactcagcttagtcgaaccaaggacacagatggggtcttttgacctatngncgccaagcgcaataactacggccataattgaggtccatgatgctaagcaccagtcatggcagcttagcaagattcattgtggcaatatgagcgctaagcgagtccctctcagctaaacgcatgctcctctgtacttaagatgcatcattttatctaagttggctagagcctggcttagtgagagttgcaacttttctgatatgcagacctcactaatcggatgtaccctctcgctaagctgagtttctgtccaaacaaaaacaaaatgattttgaatgtgaaacgtc

SEQ ID NO: 213874 - DNA, 411 bp, Glycine max
  unsure (1)..(411): unsure at all n locations
agctntaaacaacttgttgtaatcgattactttgaggttgtaatcgattaaaacaaagagcttttgtctctgaagaattttctttaacttagaaaattttcttcacacacactatgatgattgttagttctttggcaagtgtaccaaatcgctcgtagtaataatttctcgataagccgagtgtcgtaccacatggattttgttacacttatatgaagtacttttcagtttgcaaattgtaaatttagtgtataaaattaaagggaaatttaaatctaagaaaaactcaagcaataaataaagaataaagtctataaaatattactaaatctaataatcctaaatacctactcctaaataaaataggggatactacttctaagaaaacccaccaatataataaggaataac

SEQ ID NO: 213875 - DNA, 158 bp, Glycine max
  unsure (1)..(158): unsure at all n locations
tgcgtaaagaaagatattacaaagagctgtctgtgtttttataacaatatccttcctatagcaaagaaaatcactctcttctgaaacacgaggggtagtttatcaaaatatattaaaagcagtatanaagaacacattggaggtttttatattggatt

SEQ ID NO: 213876 - DNA, 447 bp, Glycine max
  unsure (1)..(447): unsure at all n locations
agctnngagtatcacactgccntctatgttgttgcattgggaannggaagctgcttctaccctttaacatcatctatacttgtttcatttttattttctttcattatgaataaatatacacaagactaaataatttcttcttggtataaggttagacatattgagtgaaaacaggatnttggaatataacactcaattagagtcatagacctaaagatgtccttggctgttttagttttgaattgaccagctctagacattctagtactggcagcaccagatcagaatttaaaatctgagtgctataggggctatatctgatcgggcttgaatgttgacttcactgagtcggatttgtattcactttaactagcttaaaactaacattctctcccttgtgcatatacgagtaatgttaggtgaatatgctgtatataaatctatgca

SEQ ID NO: 213877 - DNA, 281 bp, Glycine max
  unsure (1)..(281): unsure at all n locations
gacacaaaaacncaaccccncacannaggagcccaaaacggcaagagaacaaaatccctcggaggggcngcacaatcaccgagacactagcaccagctgtgaactcggagccaattgtatagactctatcaatcatatcatcaccagcttctgatgcattgtctaccttcttcaaataggaaaggacctcatctatcttcctaaagcgaggagaaccaatcatatactcagggcacaatgaagatgagccacaggaaaattacctggaatgttgagcccat

SEQ ID NO: 213878 - DNA, 402 bp, Glycine max
tcttcatgtcgctccccctacctctaacatatgagataatacatacctccatctaggatgggaaacatattctccatatttgtctctatgacgaggaagagagtgaaaccttattgcataaatatgagctctatgaacccttcgaataatatgcgatccatattggttctgaaaatcaaaaagtcgagtctagttctgactaatattatttatcatttcaagagcttaatctattttaaaatattcattatcttaaaatatgaagaaatatgttgtctaacatctattcattagtatcaaacctacactcaatcaattttactgtactctaacctctctaatacggatattaaaagaaaccatgttatcataataacatgtatagttaactgacttatgcat

SEQ ID NO: 213879 - DNA, 332 bp, Glycine max
  unsure (1)..(332): unsure at all n locations
ngagactctnagcctcncacacgcgaggcctgaggtgtctgttctctcttacagcctcaaacgctctgcagatggcgaccaactcggtaggccaaagccatagaagccacccacaaggaccacaactacgataaattcgtgttcaaatgatgacacagcagcgtctgtgactcactcctactctcaccctttctgacacaaccaaagatgctcactcacccgaaaatcaaccgacaatcttgagtattcacacagcaaagatgatcaaatttggcattgtggagaggggactaatggctcaggtcatatcaagctcaagccaatcggagaag

SEQ ID NO: 213880 - DNA, 476 bp, Glycine max
  unsure (1)..(476): unsure at all n locations
tgagaaaaatttaagaaaataagtactagctcaaatggtttatagtttctataattntgaaaagtataattacattaacattagtgacaaaatagtaaatggagtagttatacccgatccaagaaatatttagcaacattgggaagattatgtaattccttttttgtcttgtatgtttcttgaacagcaggatctttccagatttcatctaccataggagcatactcacgcgttgcagcagggaagaaggcctccaaatctccgatggccataatatccagtaatcagtcagaaaagtgcttgaatctttgattatagagtaaacactcaccttgttttcgtcagctgctgtctctgctaaatttattatacaattagattcattcacataactctagccttcgctttttattatacaattagagacanaaattaaggcncaatatatatatatatatatatatatatatatatat

SEQ ID NO: 213881 - DNA, 456 bp, Glycine max
agctttggaaaatgatttctatacaaaagttagtcgtataaagcgactaacaaaatcccccaaatttatagttttacttgtcctcaagcaaagaaagaacaattcacttgtccttaagtgataaagacagtggccaatcaaaagaaaatggtgtttgattcatcaaggacatcaagcatatgaacttaataccatggaatgcttaaatcaattacttctcacaagcatgtagtttttcaaagataagagcacaagtattagagtcacagctgaaataagctagtaagcatgacgaaaatcaaggaaggatcatcaaccaaaacctcacagtcattgtttcactcaaactcaagtgtttaggcttattccttcataaacaaccaacacaagttccaaccttcgcattcatctcctatcatacagtaatgaacacacaaaaatgaatccgaaggactt

SEQ ID NO: 213882 - DNA, 395 bp, Glycine max
  unsure (1)..(395): unsure at all n locations
tatgcgcatatntccttacagacgttctcttgtacaagatattctattaaccgaaaaaaatgccccatatacaatcaaggcagcttcgttacctagattatttacacgtacttccaaggtgtatttgttacttacatcacacacctccttggctaaattcacatacatgcatactcaaagcattctggggtaccaaaaattgcacatgtgcacatcttggtatntctaacacctatacatacacaaacttcatgatgaatcttgactatctacacaataaggtgctacatctcatgctcttttcaagtttttgctacctaaagccgcatgcaaattcaagtatattctcctttgctgacttaatatgtattcaaaattacagggatacacttttt

SEQ ID NO: 213883 - DNA, 416 bp, Glycine max
  unsure (1)..(416): unsure at all n locations
gaccatagaaactaagctttacaagaattgaagttgtaggctgatagcccaatcntttttatgacccggaatgacccanaaatcttttggcgagcttggagtacccaatgggttgacccgaaacggaggtctgccagtgtggcctgagtttgaccagaaccaaatctccaatcataaactaaacgttgcgacgtttagtgtttgcaaagtgcttcatgtgagcctaagccttttctagtttcttcttaacttccgcaaaaattgcctctcgatcagtgagcatgttatcaacaacgtcaatgttagaatcacctgccagatattgtggaaaattaaagggctttttgccaaaagtgatttcataaagaaagaagcccgagcccgaatgccaagatgtgttgtatgaccattcaacc

SEQ ID NO: 213884 - DNA, 372 bp, Glycine max
  unsure (1)..(372): unsure at all n locations
agcttgnaagaagattgagacgactgttatctattaatcctgttatacctgatcagatcgttggataatcgctcccgagaatctagggtccttctacaggttaaatgcccgaccaagataaccggttgcacattctgcgataaacagtaagacggaaactttgaaacccatctaccgcgtgtatgctctaagactcttacggggtattataaattacgccctagaaactggctcacctcctcaagggaggtgcgctcggggacgacaaatgacatatcacatataggcgtgacagctgttaaagccttgatgttggccaggctttacatcctatgaatgcgaacataccagcattaacatacacgatccaca

SEQ ID NO: 213885 - DNA, 233 bp, Glycine max
cccccgcttcatttattccaggtatgttccattctaataaatacacaaatcatagtttacaaatatatctatgaccgatgaaagataataggaggcaaccttattctttccatgcataaggagtaggttgcagcgacatcacggattggataattttggtgcctatgacgaactttgttataatatatttcttggtggactgaagaaactttcactgcaacgagcaatagctc

SEQ ID NO: 213886 - DNA, 494 bp, Glycine max
ttaatcacctgaggcatgcaagcttgtctcagcgtctatgcgagacagattctttcttgttgctatcatcgccaagtaccaagaagagttgggtctagccacggcccacgagcatagaatcgcggatgagtatgcccaagtatatgcggaaaaagaggctagaggaagggtgatcgactctttacaccaagaggcaaccatgtggatggatcggtttgcccttaccttgaacgggagtcaagaacttccccgattgttagccaaggccaaggcgatggcagacacctactccgcccccgaagagattcatgggcttctcggctattgtcagcatatgatagacttaatggcccacataattagaaatcgttaggaaacttgtatggtctctcagaccttgactagatatgacttcctttttgaaataaaatgagttgggcccatgtttctactccaaagagctggtgcaaatcaaatcactggcacatctcatc

SEQ ID NO: 213887 - DNA, 379 bp, Glycine max
aactaagctggtcgggtcttcccgtgagacgatgacgtgatatatgttgatgaacgtcgaagaacggtggaatctttgcgatattcctcacggaaaacgttacggaaacgtttcggaagcgcctcggcttagaatttcttcacggaaacaattgttccaagcaaatgcgaaagagagagaagtgcctaaggggctgaaccccttccttcttgccttcctcccctatttatagcaaaataggggaggtggttgccgcccagctcgcccaggcgagctcagctcggccaggcgagctcagctcgcccaggcgagcaagggtgcttcctccagaagcaaccgtcttctggaggaatattccggagggcccaagtgggcctgg

SEQ ID NO: 213888 - DNA, 469 bp, Glycine max
  unsure (1)..(469): unsure at all n locations
agctnttctttctcaatcaatatgcctactgactaacaattctaattgcaagttcacattcttgttctttctttgtctaacatacacacttgctcaaaatcatgaagaggaacacaaactccatcacaatcatgcattcaattcaaaataaagacatacacccatttttcacaaaaaagacaaaagtgttttactgtcaagtcataaaaaacaagtcaaactgttcaaaatgcttcaggatgagcaaactaactacccataaataaaactagcagtgtatataaatatagaagaaattatgtactaaaaccataattaaaataagaataaaccaaaaaccaaaaagtgttattaggaatcaaaattcctgtgactggtcatgggtgtccagagactgaacattctcttcatctgtcagacgtaatactggagtatctataggagaagtgtcatatccaacactgatgta

SEQ ID NO: 213889 - DNA, 482 bp, Glycine max
  unsure (1)..(482): unsure at all n locations
ctcaagctntaagcaagcatataggactngattccctcttgtcctcttctctttcacctatattaagngaaanagactnttcaaagttntaggaattntacggaagcattacgaaagcctcagangctccggaaaccaatttccaacaaaacgtggaggatcttgataagttcacccctcccctttgccaaatgcactcctctttatttacacacccctgtttacgaaatacactccccttttgcttttttttgttgattctttttccgtaacgctatggaactctacggattacgtaacgatacttgttttctttccgtaatgtcgcaaaactctacggattacgcaaccatcccctctttgacttctggaatgttacagaactttatggattgcgcaataatgctccctttngactctcgacatgtcgcgggacttcacggattgcctaacgatgggtgtcaagttcctcgaagcgatca

SEQ ID NO: 213890 - DNA, 470 bp, Glycine max
  unsure (1)..(470): unsure at all n locations
agcttctacttatgtggcagggcgggcttccttcaccttcttgtctccaacacgaactttgaccattgntcttccttcccgcgatgcttcttttcgtgtccgcctgagtgggcttatagcctaaaccatacttcccacgatttccttgggtatttatcaggctagttatgccgcccgtgttttttcctaaacccatcccgggttcataaccgttccccaacataactcgggccatcattatcgctgcatcggacagacaaggctgcccaaagagggagtccacagaggaaatgctgaccacctcaaaagactggaaagcagtttctaacgattcttctgcggctttcacataaggcatggaggatgggcagcttaccaagatatcttcctcgcctgacacgatgaccaagtgcccctccactacgaaatttcagcttttggtggagtgtagaaggcacaactcccactgc

SEQ ID NO: 213891 - DNA, 405 bp, Glycine max
  unsure (1)..(405): unsure at all n locations
tagaattgcattngggcactcatctcanatcctttatgctgtccctatatatataaaacagccccacaatcccatcttacaaaaccatgttcatatgtcattgaggcattccaccgagcacttgctgggcgcatgtttaggcatgaatagcaagagagtgggggcaatgtggcatgccctattgcttcaggatgcaacataggcctaaggccattccctacaacaacgcaattcaaacaaatcaagcatgaaaacaacccacaattgccccacaaatttgagcacattctcacaatttagagcaccaaaagatgaacaagatgcaccaatggaaagctagaaaactcaaggattaaatacttacttgttggagtgagtaggagtaccacaaatgaaagccaaatg

SEQ ID NO: 213892 - DNA, 389 bp, Glycine max
attttaaaaaatagaaaagaaacatttctctcacatctcttaagtagcattcaacatttctatcacctctcatgtttgtatgagaatgctatgcacgggattcttctttgctattttgtctgaaacaccaaggaaagagaaaattataaactgcccatacaaacttagaagaatgaaggagcctacatataagtccgaataataacatataacaagaaacaagaattggctttgacaatcctacctaagagtaattagaaaatagggcaccacctgaacatgctagattggagaacacaacaaaacaacaaaatggtcacttatgaagaaaatctgcttataactctcttgtctaatgggagcattatcaccatatgtagcaactcatg

SEQ ID NO: 213893 - DNA, 392 bp, Glycine max
ggcagctgggcatgtccacaagaaataaagcttcgatgacgtgttgagaggaaaatggctaccacgaacatgagtacatggctcccggaagcagtaatacaatagaaagtatccaaataactggaagtccagcaagaacgcattagtagaaagtgagtcctagcctaaagagaagtcagcagcaaggacagtcaatagcatcccttactgccccaagaattcatcaagaacattgaaatctttaactgcagaagaagttgatcatagagcttggaatcgttatttttactgtcctgatcagttcaccaacgactgggatttccctcactgcagaaggatgcaattgcagatgaagaagttactgtagtagaagacgctgaatgtgataatga

SEQ ID NO: 213894 - DNA, 418 bp, Glycine max
ctgcaagctcgcaagcttgaagtactcgatagagtattattcttagcattaatgcatgtaactatcatattgggattatacctacaaacttgcttagataaaaaattccaatgttaattggtgataactttgctaattgcaaagaacaaattcttctgacattggggtgcatggaattggacttgacacttcgtgtggatgaaccacccattcccatggaaggtagtgctcaagttgaaaaggaaaactttgagtgatgggagcaatcaaattgcttaagctcgatgctcttaaagtctcatataagcaaaagcatacaaggatccattccaggtaatgatcacgctaagacttatatgaaagctattgaggagcaatttgttaggtcagacaagtccatgagcagtaccataatgat

SEQ ID NO: 213895 - DNA, 427 bp, Glycine max
  unsure (1)..(427): unsure at all n locations
tttacaacagatttagtaatgacccactaacctagaattttaatntcttaatgccattaacctagggaataataaaaacttaatggctgagtgtaactgaaattgtggcaaccaaaagtcacccccaatagccaacaagtcagccaccatttggtctcccaaaaggctgatgcctaagttgccaattgggcccttattacaacttgaactaaacctaactaaagcccttttagttgattaacccaaaacatatttttggtcagccaactctacaaggattgggccattatttatacagactaaacactctaaaattgaaacaaagtggtgtcatttagtcctcctccatttgggccatgatacaactcacaacctttgacttttctcctcgaaacttgngcttgtattcaaatagtatggacagcac

SEQ ID NO: 213896 - DNA, 364 bp, Glycine max
gaatcatgcgcaagctattgcgcatagcatatcaacggggcgaaccacaccatatgattatgacgatggatggttcaaatgttcacataggcacacccgtctcttcgataatcgagctttcaaaactattatgacatgtagaagacaatcaaggatttcaagtcccaaaatgtcaagaacttttattttcaaaacaatcacccattctttgaactaatcctataattcatagaaaaacatgcaaagttcgtacatgcacacaaaacttgacccaaaatattaaactaaaatcttaccaaactaacacctgtacaaatccaacataactagcaacaccaaagaacacttcctcccccccccatac

SEQ ID NO: 213897 - DNA, 452 bp, Glycine max
tgtccttggtttagacatgattggtacatgatttgtgacttgtatggattcaattgggcaaaattggatggggaaagagtggttttcgaaatctgcactttatacagaattttgctgttggaatgtgcagcagaaatttgtataagtgcagaaaaatgcttgtgtatggctggttgtgaaaagggtagtacatgtggggttctggacatttgctagcagattccaacagtcaaaatgtagacttatgtactagagacttccagtaaaatttttgagtcgatccaacggttaacgaactcgaacgaacagcatgttactgggtaattgaatgtgaaaagatgtgatgttggtttgtgttttgggcagagttttctgcctttgccctggtttcttggctgtgttagtttgtgatgattgaatgtggaattacttggatgttgtggaaacttggg

SEQ ID NO: 213898 - DNA, 442 bp, Glycine max
agctttaagacttagtcttcatattgcttctcctatctcaaaaaatcttcccccttttggctttgatgatgccaaacttgaatttccatttgagtgcattcagagagtcttgagagtaagagacttttcttagaaaaacctgaaagttcctaaacattaagagaagtatcaattcatatcatcatcatcattaagtagagttatatatgactgtatgtatgcagtgcactaatctaatgcaatgcaaatgaaatttttctcccacttttggcataacaaggccaaaaagtcacaactactcgtagaataaaaacaaacaaacatatgacgtgaaaagggaaaagatcatagcatttcattcattatgaatacattacaacttaatcattaaaccattataatataccatagctacttaatccaacagagacattgaacaaaa

SEQ ID NO: 213899 - DNA, 440 bp, Glycine max
cttgatgaggaggctattagccagttgttgtgcgtgccattgcaggacttttcccggaccgcagtggggaaagggtgcggatcatgcacacaagcatgaccactctcatgcaaatctggatgacgttgctgcttagcaacattctcctcagtgaccataactcagacctccccataccgaagtgccagctggtctacgccatactgacacaggtgagtgtacatgtggctcagctgatctctgatgctatttaccagtttgtagggattgcacctacgagacacccggtggacccggagaagtccaacaaggccttgggatttcctgctttgattacaggcctctgtcagttctttggagtgtcgatcacccccagcaagcttatctgacctcctattaacaggctttcattgagaagtactgcatgcccaggcaagcat

SEQ ID NO: 213900 - DNA, 372 bp, Glycine max
agcttttctttcacaatcaatctgtctactgactaacaattctaattgcaagttcacactcttgttctttctttgttcaacatgcacatttgctcaaattcatgagaggaaacacacatttcatcataagcatgcattcaatttaaaacaaggcatacaaccattttcacaaaagaaataaactacttcattgccataccatcaaaagttaagttaaactattccagatgctttaagatgagcaactatttactcataaataaaactagtagaaaagtaactaatgtactaacatcaaagttatactaataattcaaaaagcataaaaaaataatcaacaaggatttaaaaatcctgtgattggtcttgggt

SEQ ID NO: 213901 - DNA, 446 bp, Glycine max
  unsure (1)..(446): unsure at all n locations
tanggatgagagcaataaaagaggaattattgttcttatggaatgtagcattcacatagaatntgcaataaaccttagaanatcaggttttagctccttccaaaagtgtttaataaacctgaaattaaacccatcaggtcccgggcttttgtcgctaccacaattccacacagcacaccttatctcctcttcattaaaaggctcaaccatcatctccctctgagtaggagacagagtattaaaataaaccccatccaagttaggtctattcagatgagggtcgttgaatctactctggaaatgctgcaaaatttctggcttaatcaagtcaggattttctaccccaaaaccatccatcatcagccccctaaaagtgtttctccttccgctatagctgataattttatgaaagtaagagcgttactattcccctcctaaacatttgc

SEQ ID NO: 213902 - DNA, 422 bp, Glycine max
  unsure (1)..(422): unsure at all n locations
nntctagctttcattggtgtagtttgatcttcttttggtgttctatattgnggggatgtgctcaatatgtggggcaattntggtttgttttcttgcttgattgagttggattgagggtttgtatgagatggccctaggcctataattcattttggagcaatggggcatgccacattgtccccattctcttgctattaattcctaaatgtgcgcccaccaagtgttcggtgaaatgtctcaatggcatttgcgcatgattttgtagggaaacaacctatgggacaatttgatttgtgcgtgtttgctgtctttggagcatgtattcagtttcataagggctagaaagaatgccccacatataccctatgcctangaaccgaagcttgtttntggatgcaagagaacacgagaatgggtgcata

SEQ ID NO: 213903 - DNA, 400 bp, Glycine max
cgcttattaagcccaatcaaaacccacgctctttcaaacccacacacaatcgcggcccacggttccacaacggcacagcccgatgtaatggcagcgaaccctgcaagcaggccgttacacacgtcaatcacgtttcagtggccagccaataaccgtttgctgaacaacgtcgtcagagccgcagtgctcccagccaatgtcgttgagacagctgtcctccctatagcgctccattgaccataataccctccacttccataccccttggctattgtcagaaacgaaccagggttgaagccgtaccagccgaaccataacaaaaacgaaccaagcacaactaaagacgcgctgtggccacgtaaagcaaccgaccgtgctcaacggtcgaaccggccgattc

SEQ ID NO: 213904 - DNA, 466 bp, Glycine max
tgttgctcatgtgctaaagtgtgtgggatagtattgaggattttatgaaacttaatatttataagattaagtaaagttgtgggtcattgcttgtagggatcattatagtctttgcagatcattttcgacttatagataataactggtagattgcaaataatattagaaataaactgtagcttatagataaaagctagaagataattgtatcttgtagataatgtgtgattttatagataattaattatctaccgatagataaagatattcaaatattaatagattagagataaccaatcattttaggagtctgactgctaagggcaagtgttcatgctcttgttacatgtctgacacgtgtctcgtaatttcatgtagaatgtcatatatcttttgtgggtcctaaataatacaaatatgcataattataaagataatatcaacatattcacagaatatattaaat

SEQ ID NO: 213905 - DNA, 263 bp, Glycine max
ttcatttttctcatcaatatcggtgaataatcatttttttgccgaggtgggctaactgttttcctggccgaataaaccagaacatgccagttcgtggcgaaaccaaacatcggatgagctcgcaagaaaaaacctagccgacctacattagaagtttcttttcaacaccgaaacaagaaaacttcccctgtcgtaagaaataacattatcggccagcgagcgtcttttttttaaaaaaattgcgcaaagtcggctaaaaatat

SEQ ID NO: 213906 - DNA, 325 bp, Glycine max
tatgaccatgtcaatttctcgagagctatcgttgatcaatttctatcgtctcgatatgtgatgctcctgaatcaaccttcgtgtgataacttatgaccattcgaatttctcgagagcttccgtagttcaatttcgagcatctcaatatatgatgtgcctgaatcggacatccgactgaaaaggtatgacaatctcaatttctcaagagcttccgtgtgtcaatgtacggcgggtccatatgagatgcgcttgaatctgacatactagtggtaagttatgactatcttaatttctcgagaagctccgttgttcaatttggagagtc

SEQ ID NO: 213907 - DNA, 456 bp, Glycine max
  unsure (1)..(456): unsure at all n locations
tggggtacccatcacatgtggtactaggtggcggtcgggcgatggtgcaaaacgattctccacatccataaatcacgtacaaacccaccatcccctgttgcccacctccaattgagctcacgtactcccacgtagcccttatcctcgttcatctcaacgccgagtccccatcaatcctcccaagctcccacaacatccaattaattccacatccaatcatcatggactaacaaaaccaagcaaaacagggcaaaggcagaaaactctgcccaaaacacaacccaaaatcacagcttttcacatacaaataccccagtaacatttccttcgttcgaattcgttaaccgttggatcgactcgaaaatcttactggaagtctctagtacataagtctacattntgaccgttgggatctcttagaaaattccagaaccccatatgtaatactctctttac

SEQ ID NO: 213908 - DNA, 375 bp, Glycine max
  unsure (1)..(375): unsure at all n locations
tctcggctcatgcggngaacgcctctagttcaacacccgtgcagtttatggctcccacccagagggaagctcccaagttccaactccaaacacgactcgaccggccggtaattccaacacgacaaggaacttccctccgaggccattgccggaattcaccccgctcccaatgacgtacgaagatcttctaccatccctcatcgccaatcatttggccgtgataactcccggaagggtcctcgaaccccctttcccgaagtggtatgaccctaacgcaacttgcaagtaccatgggggtgtcccggngcattccgtcgaaaaatgcttggcccttaagtacaaggtccaacatttaatggatgctggatggctgac

SEQ ID NO: 213909 - DNA, 457 bp, Glycine max
gagctcgaattgataaaccgagcggatattattgtctgcaagcttaaaacaacttttgttatcgattactataagattgtcgttgattaaaacacagagttttatcttctgaaaaaattttctaactctgaaaattttcttttcactcacacatgatgatgcatgaggcccaaatgatatgatataaactaaaaagcaacatttaatataacaaatactacacatgtcattgccgagagttggaaatgtaaaagataaaacttcttcaagcttcaaaactaagtcttcaatgttgctcatgtggctccctctatctctaacataatattcaagtatttctttatcatcaagtgattgttaactttcacaaaccacgtttaaaaatagttccaaagaaataaactctctcataaagaataaaggccatgcaaaatgaatactctcgaataactttgct

SEQ ID NO: 213910 - DNA, 398 bp, Glycine max
ggcatccttcgcaagcaaaaggaaggatgaaatggcaacattcttttatatttaacgtgtccaatgttttcaagaacatatttccttgtttccgacaattagagcaatcacacggaacacatattttcactgacaagataacttcaatccatggttttcgtaattacagtacagtagagatggggacaactgctaagcacaactaaaactcgctaaaccaaaattgtgaccgaataattatccaaaaattgaataatggtctaaaatgaactgttacagatgatgagaatgcatggctaaatcttcctggagaggcgaaaattggcactcttcgctaggacaggtgaatacagaaatgtccaaaatttcagaacaggaaggctcattacattattctt

SEQ ID NO: 213911 - DNA, 444 bp, Glycine max
  unsure (1)..(444): unsure at all n locations
agcttatcagaattccaaagttcttaaattgttgcagaggcttgactctattggcgtaaagaatgggtgcctctatgacatgaatggtatgaaaaggtttggagaatcagtgatgttaaagtttcttttactcgggccatataatagtattttctttgaactcttcattctaggagtattgaagaagtctaaggaaaccatatttcaaaaattgaagaatgcaaaatcctttgtggtaccatataatcgtttcccaactgattgcttctttcttaatatattaataaatatgttttctggtttatgatttaaaacttcctgtgacttgatgtgtcttgtatatttgccatattaaccactttgggtatggcacnctntgcgccatttattttactgatctttatttgtttttggagaggaagtgtctacataaattggtttatg

SEQ ID NO: 213912 - DNA, 451 bp, Glycine max
  unsure (1)..(451): unsure at all n locations
tcctcggggccatttcctgtgaaggcaaacattnggaatgttagttntaccaaggaatgctactcttaagacaaaatggcgtacaacctccttcaataaacacaaacatcaatgtaaatttagagcaaacttatgcacatatttccttacgaacattcactcgcacaagatattcttctaactaagaaaaatgcacccatgcacaatcaaggcaccttcgttacctagattattngtatctacttccaaggtgtactacctacatcacatgcatttccttggctaaatttacatacatgcatactcaaagcattttggctaccaaaaattgcacatgtgcacattctggtatttctaatacctatgcatatacaaactttgtgatgaatcttggctatctacacaataaggtgtcacatttcatgctttttttcaagaggttntactacct

SEQ ID NO: 213913 - DNA, 469 bp, Glycine max
agcttatagctagactaattatgcacaatatagctcactccatcactcttcttggcaagcactcattgcagctacaacatactcatcttcacatgttgataaagccactatggattgcttcttataactccacgatattggtgttgcaccatacatgaatatgtaacctctagtactctttttgtcatctctgtctcctccccaatccgcatcagtatatcccactaattcctctgagttgttgttgtctttatttggaaatagaattccagtattgatggtcccttttatgaaccttagaatcctcttatcagctaggagatgaagaattctaggtcttttcgtatatctacttaccactccaacacacaaatccaaatcaggtcttgaatgacacacgtacctaagagaaccaacaatctgtttgaactcagtttcatcgactgtgtcttcctttgccctcctttca

SEQ ID NO: 213914 - DNA, 423 bp, Glycine max
tatatgaatctgttgcagaagtaccaacaacctcctttgatctaaacccgcagcatcctccttcggtgttcctttgttgccactatcaccttcattaataagcgaaaattctcaaattcctccttatttctttccctacttgccactaccaccaccagtaacttataagaattccccttataccaaaaattctcaaagttcttaaacctttccttcaatgccacaagacacctccaccacatttcgtaagtctcttaatagttctagtcgttcacaaaatacttcaattgatgatgttgatacacaatttccacaatttttacccaaattaggttagagaatattacagtacaggaaggaggagggagttctacatagaagaccatgggcacacgattattgttgcacctacccttcgacggg

SEQ ID NO: 213915 - DNA, 380 bp, Glycine max
aacaatgagtccgcgaagattaataatgctttaagctcatcgtgagaatattcaaacgcccaatccttttacgagaaagacaaaagtagatgttcgtatatgaaatattcaaatgtttcatatatccttttaaatgatgttgaagtgtttacatgtaaatatccataatatccgtgttatctattctttctcatactacttttggactcaatatagttctatatatacatatatataatccactactatcgattctttctataagaaacaaatgatacttcaaaacatttcatgcatccgtgacagaagattaaaggcataagctagaccatccaaacaagaatacaagtttttgtgctcgacaggattttgtcagacaa

SEQ ID NO: 213916 - DNA, 420 bp, Glycine max
atatcggaatcggatactttgtcaactgacttacctttgtgattgtattctacttttgggagcatgttttttctgttcaaactaacgttcgtcgtgaattcagtagtgcaccaacgtgaaaccattctctaatttatttattttcttatttacgctatgtttaaaactttttctcttttacatccacgtcagaaatttgtctcgtctaaattggaatactcacaattgaaacaccaacaccaaatgtgtctgaatccttgtaaccttttgtcacagttcacctcgaaagatcccaaacctgatagccaaacttgtcccctatgaaagttcagaacccaaactcatgagacttgtatgtacgcttgttacttgtgtggggtgtctttacactaagccactcctactaatatgatgttcttt

SEQ ID NO: 213917 - DNA, 451 bp, Glycine max
  unsure (1)..(451): unsure at all n locations
agctttttatcataggaggggtagttgatggtggcaccatgaagtttttcactaaaataagcaatagggtgcccaccttgtaacaatgcagctccaactcccactctaaaggcatcacattctagctcaaaagttttaaaaaagtcaggaagagctagaacaggtgccttagtaagcttttctttgagcaaaacaaaggcttgctcttgtttttcaccccaggtaaatgccacattcttcttcactagctcattgagaggtgatgctattgtagagaaattaagaacgaaccttctatagaagcttgctaacccatggaagctcctaatatctcccacactttttggggtaggccattcttagatggccttgattttctcaaggtccacttggacctcatntctaccaattacaaacgctaagaaaactatattatctacacaaaaagtac

SEQ ID NO: 213918 - DNA, 387 bp, Glycine max
  unsure (1)..(387): unsure at all n locations
tacggacactatgaatactcagcttataacatggagttgaagagnttttgtcatttgccgaaatttattagcaaccacagatggcaacttttctgcccttgtgttaaatgtgtcaacgggaggcgtcattcgttggatgacattagatcgcatctgatatgtgatggctttagcccgacgtacacaaagtggatatggcatggtgagttggttggtcatacagcaacatgtccacctcatccggttgatctacaaagcggagatctcatggaagacatgatacgtgatcttgggcaagagggctttcgggaatgtcatgcagatatttacgatgctcttcaaacagatgcgcatacgccattgtatgttggatgcaaaagctttact

SEQ ID NO: 213919 - DNA, 485 bp, Glycine max
  unsure (1)..(485): unsure at all n locations
acacaagaaactaagctatagaacaaataacaagactgtgaatgggagcttatgtttttgctgttccatctcactnnggaaattagtatatatatatatatatatatatatatatatatatactaatcactttgttgtcaatgtattcatctatagttcaaagagaccacgttacctgatgttgatctaaaaaaaatgggtaaagcttacttggcacaattaaatatgaaaataataaatgggtagttttaaaatcagatttactcttaaaatcaaaattaactaccgctcatgaaagctctccttttaacttatcacaactaatgaatatgactggtgttgatcttctttttagtatatctgagttaaattcttaaaaatgacaaaaaaattaatagtacaaaatatttaaaattctaaagaaatgaacaacatctatagtttcctttctagattattaaaatatgttataaacctattaatat

SEQ ID NO: 213920 - DNA, 415 bp, Glycine max
tgcagcatgcaagctgcatgataacattctcctttttctaagcaaattcttaattcttcgtgacatcattaaaatcttcatgatttacatttttgtcgcaacctacccttttgcgggcgaacgaggcgaggctcacgggtgcgtcttccaaaggaggaaaatgtgcggagccccccccaacgtttatttgtggaaaacgttgaaaaaaccgaaggaaaccggtcatgaaaaatattccacattcgagagttgtatttacctttgaggaaggtataaacaccttctacgtttgtcccacaggaccacagccttatattagaattgggcgaaattattgatctaaacttttatttccttttttattttgagggggacaaaagcggggctttggtcctacgtacccttccatgaaaag

SEQ ID NO: 213921 - DNA, 422 bp, Glycine max
  unsure (1)..(422): unsure at all n locations
tctagcgtacccgctattggtgctcagaaaaatcctaaattttatccctcttattactagctattntgaatctttagttcctgaatgtacaaccttcaaattgttgctcgttcccgtatttgttttttgcaaaaaagaaaattaatctgaaacaattcaggctgaattgttatcgttattattactcgaaccataaggaataacagctaaacaaagtaattaaaatgtaacttttaaattatgtggtatttttttaattacaattntacttcaatatctaatttggtaatctacttaggtcgtttttaaatataaatatgaatttaaggtgatctactgataatataaagtacttgctaatcacanattatgatacgtatcattttaaatttaacttaattttataatattaataaaattat

SEQ ID NO: 213922 - DNA, 415 bp, Glycine max
  unsure (1)..(415): unsure at all n locations
agctngagatgaggaagtgttgaagggtgaaacttcctgcttttattgttgaccacagagtggtacctggagatatgtcgcgggggtcaggagaccttggggacgtcaggtggggtgctattgcccaaaaccaagcttgaccaatcccgacccaacccgggcatagtcggtcagtgagaacctgtgatgtacctaagcaggcgagctcctggcagtcaacagataaaaggaaaacaagaccacaaancaaggaggcttgtggtggctggccagctgtgaaacttgattgatatgtggattgtggcctctggtaatcgattaccaagggtgagtaatcgattacaaggcttaaaattgaggacaggaggctaagatggtctctggtaatcgattaccaaggggtgtaatcgattac

SEQ ID NO: 213923 - DNA, 381 bp, Glycine max
  unsure (1)..(381): unsure at all n locations
ntgagccaaaatcctgactcaccataaaccttgacccatgttgttaatgtcaatccttaccctggaagcaaaaaagaatagaagggaaatttccaatcaaagaaaagagaaggaaaatttccaatgaaagaggaaaaaagaaaagaaaggaaattcccaatcaaagagtgggagaaagaaaaagaaaagaaagaaaattcccaaccaaagaatgggagaaagtaaaaagggaaggaagctcctggtcaaagaaaccagagaggtctttggaccagataatatctgaacagtacagaattgtcaccaaatgaacaaaaaggaaggaaaggaaaccacgacctanaatggtcttctccctttaattaccaaccaaaatcccgt

SEQ ID NO: 213924 - DNA, 295 bp, Glycine max
agcttagccagttgcccatacgtgcttattctacacatgtgcacttagcctgcacttgtgcgcttactccaaatacgaaatattttaaaacatggaattctttgggcttatcgcagtgtgcaagcttagcgcaacaaaacaacatgtgcttgctaaacgaacacatgcacattgagcgcatagcataatctgacaacatacaccaccatacatttgcacttaaatcaactaacacaaatattcatagagtcatgagcataacccaaaataacctaacatcaacccacaacccact

SEQ ID NO: 213925 - DNA, 431 bp, Glycine max
  unsure (1)..(431): unsure at all n locations
accttagaaactcagctatctctatggtcacgatatggctattccttgtaattgttgagncnatgcctcggctttaaaattattattttcattttgaattcttgcatgcatcacaatttactgattttatccttgttaagtatgtggatcatctaatcatgtcttcttgtcttacacttctctgttgtcatcattgtttttctgtaaactagatcctgctacatcatcaatatgaccataaatcatgtctagttagccatattgatgtgcattgngagttgaaacttgaaattatgaaatataatttttgcttaattctgcatggagtgaaataattttattttttctgcttaattttgtgcatggtggtgagtgatgaacataccattttgattatcattcatagttgtattatctttttcaattatctt

SEQ ID NO: 213926 - DNA, 378 bp, Glycine max
accttcggctctcgaacaggaacgagcactatcctattttttatctgcaatctcgccaggtgcgcgtttagcccttgttcaagaaatctgccttcttagtaacagactagttgcattcttgtttgtgtccttatttcgctcttgttcttgtacttgtcacactccagttctggttcttgtgtctagagtctctcaaactttgcgccaaaaaaaaaaaatctgtttgagttttgttagcgccagacgcaatgtacttcgcctgccgcttatacctttatttccgcctatacaatatctgtttgagtcaaagttgcctaattgccaacatgttccattgtcaaattttcctaatgaagactgccttttgaacaaatgcta

SEQ ID NO: 213927 - DNA, 287 bp, Glycine max
tatctcctcccatcgtgatcatccatatatctatccaatttcttgattaccctctttaacaaaatcatgagtttattagtcttctggtattctacatttttcagccactctaacaactagttgtaccaacacttataacttactaagctaattctgaatctccaggtcttagctacaagctaactctccagcttccgattaacataagctattcgttggataactagctgaacagctacgtcaaagttcgaaagttagttgcgactcgaaaactatcttataaatta

SEQ ID NO: 213928 - DNA, 409 bp, Glycine max
  unsure (1)..(409): unsure at all n locations
cttgttctgacaacatatcgtgcaactcatgggatncaattgtaagaacagtttcttatttcattaaatgttggtcaatacatatgtgtaagaagtatacaaagtatgtcccttttttagcaatgatgaattcaattcggtattagttaatattcagtgtgtggaattattacgcttgcaagactatntttttattttttggtgttattggaattcaaatgatctattagcaagtgttattctattatagaatttttttttcacatatatactcagattaacataatataatttgtcgctaaaaaaaagatgtatactatatgtgaaaataggaaccaagttattataccacacatagttcatataattgcatgtcatgtaaacaaaaatacataccattgacaataag

SEQ ID NO: 213929 - DNA, 430 bp, Glycine max
cttgatgcaacatttggagaggttaatgaaacaacgagatgattctctccatgttaggttggatcaaatggagaaagagatcataatgaagaagaaaggaggagaagagggaatgatggtgttcctagacaaaaccgaattgatggtattaaactcaacattcctccatttaaaggaaagaatgatccggaggcctacttggagtgggagatgaaaatagagcatgttttctcatgcaacaactatgaggaggaccagaaggtgaagcttgccgccacagagttttccgactatgctcttgtgtggtggaacaagctacaaaaggagagagcaagaaatgaagagccaatggttgatacatggacggagattgaaaagatcatgaggaagcggtatgtgccggctagttactcaagggacttgaaattca

SEQ ID NO: 213930 - DNA, 317 bp, Glycine max
  unsure (1)..(317): unsure at all n locations
gaacaaaaaccaagcctgaatgaccgaccanatagcgggagcgctgttttttgattcacacaaccacagccgatctctatggcataacgagagagaaccgcccaaatatctgagagatgcaagaacacacctggctgggtcaaaggacctccacaacctccgtgtgtcgccctcactggaaaaagtgaggtcttacttcctatcaactgcacgctggatctttcgaaccacaactccagaaaaaccacctccgcccaaaaggaactcaggagcaaaattcccaagcgcacactcaaaataagtgattcttgagccca

SEQ ID NO: 213931 - DNA, 436 bp, Glycine max
  unsure (1)..(436): unsure at all n locations
ntctagcttttcattggggataatgatctccttctggtgtctctatttatgggaatgngctcaaatatgggcgcaatcttggtttgttttcttgcttaattgggttggattgggggtttgtatgggatggccctatgcctataatgcattttgaagcaatgggacatgccacattgtccccgttctcttgctattgatacctaaacgcgcgcccaccaagtgttctgtgaaatgcctcaatggcattagcacgtgacctttgtaatgaaacaacccatggggcattttggtttgcacatattttctattttttgggacatgcattcattcccgataaaggttagagtaattgccccacatatatcctaagcctacgaaccaaagtttgtatgcaacagaacacaagaggaggtgcatatcgcgtaaaagtaccctt

SEQ ID NO: 213932 - DNA, 412 bp, Glycine max
acctatgatactcagcttgtcttagaagaaattatgcattgtctagatattctttttgttattgctagaaataactctgtatattgattcataaatgttactgaaccatggtggagattgttggaagatagaggtgactgaacaacatcgtctatatcgtccagtctagtcttctatgttggaatttgtctcctgtctagtggagcgtccaacatgtctaacagtgtatcattcagtctatttagttagttgttagataagttatgtttgtaaccattttctgttatttttgtttcagtttgttatactcctatataagagagttagttacaatagttaagtgcgatgagagtgcttaacccacacattggaatttcattgttgcgatctttataaatagtatacttctttt

SEQ ID NO: 213933 - DNA, 454 bp, Glycine max
  unsure (1)..(454): unsure at all n locations
tgaacacccacttattcttcaaggctgttctgccttctgtttctnttcaagcttataagtatcattctttgcaaggaatctatcttttcttacatcactttcctccaatagaatctatccttatgaatttcaacttttgcaaaacttcctggcttcccttcattgatgatgaagatgtactccaaaccatggtaccttctagatgataggtgctctttatttgatcttctgaacagcaactgcttttcttgctcaacaccttcatcatcaccatactttattgctagctcatcatcaaccctaagttcattatcaagatctaccccttctatggcaattcttctagcaggggtgactggtgtaagatcaacctacaccctgtcactggttttaaccatcagaaccaacatatttgttgatatgaacactacgtttttctttgaaactccttttt

SEQ ID NO: 213934 - DNA, 340 bp, Glycine max
  unsure (1)..(340): unsure at all n locations
agctngcataagttccagcgcaaattcctatattcatacacttattatcaaagcttaaagaaaccccacaaatttcccccaataaatcaatccccagaaagcaagctataaacatgcacaaaatctacaagctcagcaacacaaccctatctagctaccgctagcccctctcactggggcattgnttgctacattcattattacaaatacctgaaacagagttgcaaaaagtacctaagacacaattgtgaaaaggggcgggttgtcaatgtctccataaggttgcagacacagagagatatattctcgaagaaaaccttacactaacaaaaaagagagt

SEQ ID NO: 213935 - DNA, 391 bp, Glycine max
tgtaagaagcctgaccaggatgttatagaacccatttcgaatctattcattgataccagctcaatgcagctcgtcgagatagaaggaggccacaatgatcctttcttcttccggtgtatgttggtattcgaaaagctgtgagatcttgaagatccagcccatggggtcacggccgtcaaaccttggaatatctagtttgattgtgttgcgttggtggacttgggtgttgataccggcgtggtcgcgtactggagagcgtaagtggaggtgatcaagaattgaatcaaccttcccggagatctctgaatacttgtcaacgaggtcactgtgtttgtctaatagggtggcgtggctggtagatagacgagtgattgcatcctctaatctgtca

SEQ ID NO: 213936 - DNA, 228 bp, Glycine max
ccattaagggatgggcgttctccgggagtgacccgtccacctcagggacaacgattatactgatttccacgatgaaataaggcgccggcgtgggacatcactggttacccccatggccaagttcgatccagaaatagtccttgagttttatgccaatgcttggccaacaaaggaaggcgtgcgtgacatgaagtcctgtgtaaggggtcagtggatcccgtttgatgc

SEQ ID NO: 213937 - DNA, 408 bp, Glycine max
  unsure (1)..(408): unsure at all n locations
tgtagatgcttcgaggctctccaagggcaaaccttgngtttgatgagcctttggagaagcaagctcactaagggtggatcttgggtttgacgagcctctggagaagtgagactcaactaggacagaccttgggtttgacgagcctttggagaagtgagattcaccaaggatagactttgggtttcaaaaacctataagtctcaccaaggacaaaccttgggtttgatgagcctttggaaacacaagactcaccaaggacggaccttgggtttgatgagcctttggagaagcgagactcaccaagggcaaaccttgggtttaacgagcctttggagaggcaagactcactaagagcaggcattgggtgatgagtcttagactanggaatgctcgacttgggttttgtcg

SEQ ID NO: 213938 - DNA, 393 bp, Glycine max
cgaaggtaaactagatgccttggttaacctggtaacccatctatccttgaataaaaaatctgccctgtcgccagactctgtggtttatgctcctctgccgaccaccacacagacctttgcccttctcaaccttatgctacaaacatctacaatagacctcctcaacctcagcagcaaaatcaaccacaacagaacaattatgacctctccagcaacaggtacaatcacgggaggaggaatcatcccaaccttatatggtcgagtccttcacaacagcagcaacaacaacagccttattttcagaatgttgttggcccaagaagaccatacgttcctccaccaatctagcagcaacaacaacaacaacagcaacagccccagaaacagcaaaca

SEQ ID NO: 213939 - DNA, 400 bp, Glycine max
acttgtgagttgtcagaaaggttctattttctttgcaagaagcttgttttgacgtaatagtgcatcatgagaggtgagttcaagaaggctcttctttgcgggagtatatgctctatcatggaggatggcatgatcactagttgtcatattctcaataagctccatggcatcatcaggagtcttcaacttgattttaccattggcagaggcatcaaaaagttgcttggaatgaggtcataacccaccaatgaagatattgagttgaattggctcactaaacccatgagtgggagtcttgtggagcaaaccactaaaatgatctataagacctcactaaaattcatcacgaaattaatgaaatgatgaaatatctgccttccccttggtggtcttggattct

SEQ ID NO: 213940 - DNA, 443 bp, Glycine max
  unsure (1)..(443): unsure at all n locations
nntaaaattccttaacanaagtgagaattaaaataagagtatattctttattttatagnngaaannatgatccaatgggtctctaattccgaatcgtcatgcatactatttttatngaatcttataataattattttaaaatttatattagtgataactgtttattggttgacagtataacaaactttcataatgataaccaatgtatattaaactgaattaaaaaattgctaaatgtgaaaaaaagtacacttgacgtgtgcattgaagctgatatgtctgcaagtgcaaaaagtaataagacggtattntactgccatacaaatattggaatcatgaaggttgaggctaacaaagcaatatgatagattaagagataaatgaaccacaaccacacttcagttgtgggaaatcagaccacaaagccatggcttttgtgccga

SEQ ID NO: 213941 - DNA, 448 bp, Glycine max
  unsure (1)..(448): unsure at all n locations
agctntgcgganttggtcttcgccagtgtaaggatttaactggatctgacaagaggcaaatttaatcatcatgcttagacgaatgagaaaactggggcaaataaagagggtgaggatgagggaaaaacccatgctgtgactgccattcctgtacggccaagtttcccaccaacccaacaatatctttactcagccaataacaaactttctccttacccaccacccagttatccacaaaggccatccctaaatctaccacaaagtctgtctaccgcacttccaatgacgaacaccacctttagcacaaaccaaaaacaccaaccaagaagtgatatttgcagcgagaaagcctgtagaattcaccccaattccagtgtcctatgctgacttgctcccatatctacttgataatgcaatgggagccataactctagccaaagttcatcaa

SEQ ID NO: 213942 - DNA, 318 bp, Glycine max
  unsure (1)..(318): unsure at all n locations
acctataaatctcagcttgttataacggaagaaaagaaaatgggatatgaacgaaattattatattgctcaaaaacaagaaatgaatggaagtctcagattcgaaaacttacccgttgaagaatgaagaacgaatgaagaatgaatgaagaacgacggataaccatcatggatttgctcacgaaaacgtctcggaagcattacagaagcacctcggcttggattntcttcacggaaacaattttttttcaccagaacagctgaaatgcatagccagtggatccgggatccttggaacaaccncctttttcttttttat

SEQ ID NO: 213943 - DNA, 432 bp, Glycine max
  unsure (1)..(432): unsure at all n locations
ntagcatataagagatntggagnggctatgggctgttactattcttctaattgtttntcctatacatacccctcttacatgtgccaacgcccaaattcaagttcaataaccattacagatcccccatatacaaaacacatggaatttcatgcacattttttattagtgagtttattaaataatttaaaatttattttcttttgtattttaatcaaacacttatccacgcaaataagaaacactatgacattacagtactcaccatcatattatgacttgccccaaggttttaatatatctccatatataatcatggtactatgtcttaaatttataatttttaagataatttttattaattttgtatgaaaataggcgattcttattagaaaaattatacccatgttagacctttttaaacattattttagt

SEQ ID NO: 213944 - DNA, 413 bp, Glycine max
  unsure (1)..(413): unsure at all n locations
actcaagccttctccctatttggctatanataggggaagaagtgaggaatattatggttcatctcccttaggcacttctctctcctcgaatttgctgaggaaaattattttcgtgaagaaaatccaagtcgaggtgctttcgtaacgttttcataacgtttccgtgagaaattacgcgaagattctcgaccattcttcaagattcatcgtccgctcttcattttcttcagtcttcaacgggtaagaacctcaaaccaagcttttcaattcattctatgtacccgtggtggtccacattttggttcatgtatttctattcctggtttcatttgctatttataccgccctttgacgtgcttaagtcatttatttaaagcctttctcgctcaatcgtaaaataaaataaatttcca

SEQ ID NO: 213945 - DNA, 476 bp, Glycine max
  unsure (1)..(476): unsure at all n locations
tgtaagatttgcaagatcatcttccttgacaactccgtgaaattgattgccgtcaatatgaagagataacaattagagagtgatcgaagactttcaaatggatttccactgaatttattgatagagagatcgagatatcttaatgatgaaagttttccaaatgatctaggaagagcaccaccaattgagttgttgtaaaaccgtagctgctcaatatttttaaatgccccaatatgatctgtcagattgcctgaaagtcgtgaactctgaactgcaagtcttgtgagtccatgggaaatacaaggagcaagaatttctaaaagttcattaacctgttggttgagtttgagatatgataaatctatcacccttaagttgcagagattacccaaagaagttggaatgtttccttcaagttgattagctgataaatcaagttcaacaagagaagtcanatttcccaaagaaaatggaat

SEQ ID NO: 213946 - DNA, 468 bp, Glycine max
agcttgtcacttatgtgagtcactcaagatatccctaaatttacttcaattggagtctttatagaacgtgtcttttcttaatacacttaagcaaactcataaataggcattaattgaaaaggtttatgatttgtgtttataaggtttgtaataattaaagcatcaagggttttggactcaacaaatttcccataaaataagatgtaaaaacaattatcaaagagacattggagaacattcaccatacaaggatagagagcaaatatgaactaatcaaactgaatggtacacatactgaaataataagggactaaacaatacatatctaaacttcatataaccggttaaaattacctgctacaacaagtctaatttggtgattcatcgtgcactacccatttcaaaacatttctaaaacttatgatggggtgaaggggttacattgttgaattcaagaacccgctacat

SEQ ID NO: 213947 - DNA, 418 bp, Glycine max
tggagaggatgcttcaatggaggaaaagaaagagggatatattgagatacggcggggggggggggagtccatattgaatcgacacaaacgtctataagttgaacttttagctgcctcctcacacgactcttattcatctcagttacaactcgtgtttcacacgcttctatttatagactatgtagcttccttgacaagctttattgatataacttccttgaaaagcttctttgagaaaactttcttgaaaagctagtgcttatctacacccacccatcgtaaaacttggctcaccttcttgagaagcttctttgagaactagagcttaactaccctccccttctaaatactaagctaccctgcttgataacttcctaaatacataacaaggtcctatttctaacacactcatatgcct

SEQ ID NO: 213948 - DNA, 260 bp, Glycine max
tagtcctaaaatgtaaaagaacaaaaagcctatggtagtccctaagggggcaaaaaggcgtcaaattaggcattgtcgaggcatttcccattgtcggtgtgcaccaaataagattaaagggactgatctttcgcaaagtcagaccaatagaagatttctaaatctcacggactgaaaggtcaaacacatacaatcttgggactaatttggagataaaaggatggcaacaaaagtgttagtcaatgcggttgacctaactg

SEQ ID NO: 213949 - DNA, 385 bp, Glycine max
  unsure (1)..(385): unsure at all n locations
ttgtggcacatccacggttggagggctaggttggactgttattttgatgagngggattcataatcatgatcggccaagatattagatggacatccatacgctgggtgattgactaaagctgaaaatacacttattgctgatttgaccaagttaatggtgaaaccaaaaaacatcctgctaactatgaaggagcacaatgtcaatagtcgtacaaccatcgaacaaatatacaatgcaagaagtgcataccgttcctccattagaggaagtgatattgaaatgcaacatctaatgaagcttcttgaatggatcaatatattcattggcatacattaaacgatgaagacggggtatgtgatatcttttggtgcacccggatgcaaga

SEQ ID NO: 213950 - DNA, 390 bp, Glycine max
tgcggcatgaagcttttacattacaaagtaagtgtgtgtataacatacatgcaatttacaattgtgctttgcttgcacacaaatctcaaaccctgtacctacttgccaagccaggcaacctatcattttttacaagtaaccggccattcattctggttctggacaaataaaaaagacattttaattgaaacaaacaatcaaacaataactaaccaagtaaccaaccaatcacatcatgaattgcattagttggaaccaagcaaaaccagcaccaccaccaccacatccctggctctctttctttgcctctttcgcacaagacgcaaacgacgtcgttacgctaccttccactgtctgggcaacctttttcggacacagaaaaaagatcct

SEQ ID NO: 213951 - DNA, 213 bp, Glycine max
atttaattaaaattttcttttatcccttaggctcagaccccctacatctatacaattaaagtaagaacgggcaaactagtgcctacatagggaaagaataggttgattcatatgctcaacttaacctaaaaaaaactaaaagaactcggcttatatgacatgtttaccactaaaataggcagacttataaaaataaatcgttatagcatatat

SEQ ID NO: 213952 - DNA, 420 bp, Glycine max
  unsure (1)..(420): unsure at all n locations
agctttataagcgcgggggtgggatacttatgtcttgtggtcncaatatgcgaaaaagatgttcctagtacattgaatttggtacgaccatgccctcctgattcttatctgggaaattggcgagtggaggaacgccccgcgttttacgcaacgagcataatgtaaacctttacgggtttaaaagctctatagttgggcctaggctttaaagatttctcttctgttaaagctttgagtcttttagtttttaatacaaggatctttcttcatctgttcctacggctctacccattctcattcatttgcatgtgtacttcttttttctggaacggccgatcccatgacgagtccccccaaggtactaatacctgggacccgcttattgcttctacaagaatgagtcaaccgaaatgaggaatg

SEQ ID NO: 213953 - DNA, 284 bp, Glycine max
  unsure (1)..(284): unsure at all n locations
ttgtgaaagattgttntcaccttctcgctaagccaatcttctggcttattgagcatcccctaagcgcaacctactgggcttagcatgaggaagaatctacaagaagatgagttgtacaggtttgctaagtgcaacgcttcagttcatccgctaagggagaaaggcacgctaagccaaatatcactaacatgcgctaagcggtccatacatgcactaagcgcacgagcacgaacaaggtctcctatttaagcatgaaatcacattttgtgaagagagtttggact

SEQ ID NO: 213954 - DNA, 386 bp, Glycine max
agcttgagtgaaacaatgactcttaggtttttggtgatgatccttccttgaattctgccatcctaactagcttattttagttgagactctaataccggtgctcctatctttgaaaagctgcatgtctgtgaaaagcaatttattgaagctttccatgatatgcacttcatatggctgaatttctctatgaagcaaacaccatttttgggtgaccactgtaggttgccacttgaggacaactgaactgttctttctttacttgaggacaagcaaaactgtcaatttgggggagtttgttagtcgtcttatacgactaaattttgtattgaaaacatgttccaaaacttgtataattccccaatggatgggtattcttgtaagcaatt

SEQ ID NO: 213955 - DNA, 365 bp, Glycine max
tctacttatgtggcagggcgggcttccttcactttcttgtctccaacgcgagctctgaccactgtcttccttcccgcgatgcttcttttcatgtccgcctgagtgggcttatagcctaaaccatacttcccacgatttccttgggttgttatcaggctagttatgccgccattgtctttgcctaaacccatcccgggttcataaccgttccccaacataactcgggccatcattaccgccgcatcggacaaacaaggttgcccaaagagggagttcacggaggagatgctgaccacctctaaagactggaaagcgggttctaacgattcttctgcggcttccacataatgcatggaggatgggca

SEQ ID NO: 213956 - DNA, 397 bp, Glycine max
  unsure (1)..(397): unsure at all n locations
agcttgccaaagctctctggaatgcctttatctgcatcaaaactattggctactaatccaaataacgtgaattcttgggacccttcaccccatttgaggccagcacttactttgcctcaaatgccagtttttgcagcttggacagatgcatagttcatagctcaatagtccttttaattttttgttctctcaagagaaatttcaatcctttttattgtctttttttgcatgcatgaacaacacaagaggaaggggttgtagctagtcaaatggagggtctaaatattatatcatcacatcactgtcagcaagtttaatttaaactttcaaatcattacattctagcattntactaattaagaattcctgaattctattttattttcaaatatccttg

SEQ ID NO: 213957 - DNA, 474 bp, Glycine max
  unsure (1)..(474): unsure at all n locations
ccttcttgcgtagcccctcttggtgctcagaanatcccanaaatatatccctcttatcactagctatntgaattctttatttcctgaatgtacaaccttcaaattgttgctcgtttccctctttgttttctgcaaaaaagaaaatcaatatgaaacaatttaggctgaattgttatcgttattattactcgaaccataaggaataacaactaaacaagtcatttaaaatgtaactttgaagttaattggtatttttctaattacaagtttacttcaatatctaattttttactctacttacgtcgtttttttaatatgaatatgaatttaaaggcgatatacagataatataaatgacttgctagtcacaaaaggcgatacctatcatttttaattttaacttacttttataaataataattaaattataataacacaattttttaacatgtagcttgcgttatattatacccg

SEQ ID NO: 213958 - DNA, 463 bp, Glycine max
agcttcgtaccccatagcccagaggctcttctctatgcgaaggtatgggggagggatgttgtacacacccttacccttgcatatgcaaagaggccgtttccggattcgaacccatgaccaacaagtcaccaaggcacaactttaccgctgcaccaacctttacacaactaatatacttaaaaaaacatagagggttggtttaaaatgatgaatatgccatcaatttagatattttgttatatgttactcatatttcatttagttagaatctctttgttagggagtatgcattgttcccgtgtcctatattttagacattgactgtgtcgaagtatttgcacccgtgttgtgttcggcggcagtatcagagtccgcgcttcatagcttgttagcagcacaacctataaaataaatggaagcatctgttaattatctacgagattctacagtaaaatcctatttg

SEQ ID NO: 213959 - DNA, 479 bp, Glycine max
  unsure (1)..(479): unsure at all n locations
ntgcttctacagtttcaaccatagtttctattaccttgtgttttcttacccccaacataaaagaaccacaacttgaaaccaacatgagtcttgattcttcatctagtgttaatggtaagggttctactcccaaggaccccttgtataagatattagatgagttgagatcccttaagttgtggaaagaaaaacaagagagaaaagaacaatgaaaaaaaaatggaagatataagtcaagatgaaaagagaaaataagggaagaagaaagaaggaaaatactacaagagttaagaaaagaaaaacatgcctcctatagtagtcataactcttgcaagagcctaagtgaagaactctgtgactattatgaaggaagggcatatgccacatcttatacctcactctcataggagataaaaggaaagaaagcatcaagaggctaacattaacctnccatacttacatgacttagattgagaaat

SEQ ID NO: 213960 - DNA, 399 bp, Glycine max
agcttgtgcaaatcaaatcactcctacatctcatttctagcatgcattttcttcctttacccactcctcacgttgggttttttagggaaaacaccataactaaacgcgccgcaagggatccctatctcaccagatccaaatctagaacgatgggtgatcaataggagacacaggaacacatgaaagccgacatgtcggctctgaaagaacaaatggcctccatgatggaggccatgttaggtatgaaccagctcatggagaagaacgcggccactgccgccgctgtcagttcggctgccgaaacaaacccgactcttttggcaactacgcaccatcctctctcaaacatggtatgacggggaaggcacccactggtgcacgatggcattcctcactctg

SEQ ID NO: 213961 - DNA, 467 bp, Glycine max
  unsure (1)..(467): unsure at all n locations
tgttgcggagcttngatgtcaccgaatgtgctgcaccattattgatctgagcttccctgagttctttaagtaaactcccaattccttattatgttgttcaagttgaacaattttacgttccagttctctcaccaccatctttttctctcttattgagtttctcatctgtgctatttcttcatttctcataattgtcaatagttgtatctctgacttctttcctactctactgagaactttaaaaagtggagtggttaaaaggttcaatgttttgtctatcttacaataacttcgtttacctttctgcagacagtatagttgtttgcatataaataacctctacataagaacatgcacactcacaagcacaaaatgtctgtttgcacacctcaatgcacaaaatagagaagtataacactggtagatttattctttaataagacgttatgtcagttgactctattcaa

SEQ ID NO: 213962 - DNA, 312 bp, Glycine max
cctaaattggcttcccacacagtgagcttgatatattgaaaccagatattgaaaaacttgtttcaagttataaagcacccgcgtgtggttgcgctcctacatctcttaatatggatgattgccaatcttcgctagaagagttgtgaaaagttttaaaatgatccccatgaataaagtatgaagttgtaaactgagaatctctatcttaaagatcatttgaataaaggaaaaagggaacttattcatctactcagtgtgcaaaacctactaacaataatactggtctgggggataatgaacaaaatagacttt

SEQ ID NO: 213963 - DNA, 269 bp, Glycine max
  unsure (1)..(269): unsure at all n locations
ctcttgcgtccancccccataatcttgttatccttccggacttaattactgagctgcacttaaatgaataacgtcaattctgtggtatctataccatatatgtgaatcgatacacatgcaattttaattcaatttaataactgttgtaaatcatttttggccactggtaatcgattacatcctctggtaatcgattaccagagagtaaatcttttggaaaaaaaattctaaccttaaattcttgggcaaaccctttgctactttcatta

SEQ ID NO: 213964 - DNA, 457 bp, Glycine max
  unsure (1)..(457): unsure at all n locations
cttgaagaaagcaacaattcattngtaggagggagggcctcgttgttcacatggtgattgataaactcttgactnatttatataacttgggaaatatctcaatggtgagcaactccaaccttgcaatgtcttgcaatatgggaacccaatacccaatgaaattggcagcaatgtctaccaatcctatgctctgtcctccaaagatttcttgtctttcaatacttcctgcaggattttcaatgcttccaaggcttcctccactgctttctcacgcccattctcatcactccagctagcattccatataataggcaagatctaaaaccaaaaaagacaacttaaaaactctaccctatagtagtacactgctagcaaataatctctgaacaacaaatagaagaagagaacccccaattccgatctctaacactatcattcacttgtttatacaaatcat

SEQ ID NO: 213965 - DNA, 287 bp, Glycine max
agcttgatgtataagaagaggaggcaccattgggtttttatgaacgagaaggagaggccctaagtgttggtattgccctgatgccttaacatttggaatttgctgggagatgaaccagaagacgatgatgattcttcatgtttcagtttcatcggcacaatataggacagagatttgaggtaaaagcgatgtagcaccataacagccttcttcctaacgacgttcttggagtggttaagaagctcgatgacacgaggaagcatggcggggatggtctcctcgttgat

SEQ ID NO: 213966 - DNA, 443 bp, Glycine max
  unsure (1)..(443): unsure at all n locations
actcaagcttgaagcaccaaagttgcagtcggaggagtcacagattaaattcttcgcttctttaacctttgtgtttctcttttcataccattgtttctttccctatagctgctttaattttcttgtgagagtcagaaaagtatcactatatcaagtgacatgatcatcagaattgaattatgtgcatgttgtgcaagatggagaagcagggcacgtgcaatactaactcatgaacactacacggngcgtgaactcggagaatcatattctcttctgcttcatttcaccaacaagagagatcctattagttagttcttcatgtgcccctctttcccatcatgacaacagcaccttatatatattgcatttggaaatgttgaacgatgaagttcgcttggcttctgctcataaatcagcaccgagntttataggttatgctccat

SEQ ID NO: 213967 - DNA, 425 bp, Glycine max
  unsure (1)..(425): unsure at all n locations
catccccccccagagagtttgttgctctgccaccggacttaatgccgcggctgcactcttacgagggtgaattatttatacatgctcttatagacaaagctcttctttgatgctacaatatactcttttgaacacacaatttataattaattggttagaaatttattgaagactataaaattaggatatattgcctttaaataataagtagtacccacaaaaatttgtagntttaataaattttggctaataattgagtatgttaaagagtgtattgttaaatttttcttgagatttattacattcctaacttataaaaattcttataagtctattggtaactatatatagagcaaaatatggtttagtccttatactctcagctaaatttaactttagtcgctctagctttaaaggggcaattt

SEQ ID NO: 213968 - DNA, 462 bp, Glycine max
tgtcagtcttcatcacagaaaagtacctgtgaaggaatgatttgtagcattgagcaccaatggtgattctttatcttgaagtgctcctagccactcccaaggcttcttggttagagtgaaggaaaatacaaccaatcttatgtattcgttactaacgctggactgcctaatagtgtcacacaacctcaaaaaccaccttaaatgcatcatggagtctttgtgggatgctccactaaacaggttactttcaatcatttgaaagaatgcaggtttgaaatcaaaagtaaccccttgaggaagtgttggcagttgaatgttgttggtttctcccaccttgggggtgagataatccatcaatatcttcaagagattctttaccacaacgttatccattgctcttgttctcttaacaacacttgtaacataagaaaaagtgatcacacacaattggcaatatgcaca

SEQ ID NO: 213969 - DNA, 334 bp, Glycine max
ggaccttaagcgcctgagctgcagcttataggggatgtttacatgcttgacatgacggcactctatggggctagaactcgaggtaggtgatcacttgtaaacatctcatgcttaagtaagacataagtaaaattacactgcggtatgcgggtcaattagcaaaattatgctttctagcgtgtgtgagcgcatcatatcccgcatcgtgcgtaaggaatatatattagtcttatttgcccaacctctctttatattatgtacgaaatacttatactcgcttaatatattttaaacgacttcaaaattaagtcttgaattcctttacatgttgaac

SEQ ID NO: 213970 - DNA, 270 bp, Glycine max
tgctctcacggggtaaatcgctcagcggtaggttctgctattcaagtttatttagcccatgacacccagaggagataaagggaagcaccttggcggactatctggctcagtagcgtctcaatgattatcaacccatgtattccgagttccctgatgaggacatcatggtctcatttgatgagaagctagacaacgacagggacaagtggatcgtgtggcttgatggtgcgtcaaatgttctatgccatggcgtcgggcaacattggtctc

SEQ ID NO: 213971 - DNA, 351 bp, Glycine max
  unsure (1)..(351): unsure at all n locations
taactaagctnagcacttagagtgaggggcgcaggcggatttagtctgacacatactatagacactgtgctggcccgtggtgatcagttatgcatgtgggatcagcctcttccattatctgagatttcgaacacagtggctattgcaggataaactgacaggagggcgtttgcagaatgtgaagacatctcacatgacatttagcttctgcttgtgctcccccattctacatgcgtactgcaagcctgtgtagcagatcctactcttctacaggaggacaagacatatcctgtgacatcacctatctgatgcccctgccttgatgctattactgcaacactgtctagtatc

SEQ ID NO: 213972 - DNA, 288 bp, Glycine max
  unsure (1)..(288): unsure at all n locations
agcttagaggattatggggtacctattatatgtggtactagggcggcggtcgggcgaaggtgcacaacaagatttccacatccacaatgcgcgccataaccccaccatgccctattgcccaccctcatttgagctcatgaactcccacgtacccatatcctcgtttctctcaacagcgggtcccaataatcctccaagctttcacaacatccaagccaaacaaaatttcaacagctcaagcctattcagcctagtcaaacaggaaangggagaaaacttttgttaaca

SEQ ID NO: 213973 - DNA, 422 bp, Glycine max
  unsure (1)..(422): unsure at all n locations
tatgcgcatatttccttacatacgttctctggcacaagatatttatcttanaaagngcacccatatacaacaaggcagcttcgttacctagattatttacacgtactgcctaggtgtatttgttacttacatcacacacatctccttggctgaatatacatacatgcatactcaaagcattttggggtaccaaaaattgcacatgtgcacatcttggtatttctaatacctatatatacacaaacttcatgatgaatcttgactatcttcacaaaaaggtgctacacttcatccctttattcaagtttttgctacctaaagccgcatgcaaattcaagcatattatcctttgcggactataattgtattcaattaaaaggatatttcttgtatatgtttcttcacaaacatgcacatattat

SEQ ID NO: 213974 - DNA, 440 bp, Glycine max
agcttgatgaagaatcaagagtgattcttttatacattgacgaggacgaaggtgatgacttatagctcaaaggtccagaacactctctgatatgatctccagaaacaagtgttcagaatcaagatcatgattcaagactcaagattcagcactcaggagaagacttgatcgagatcagtattataaagtttttccaaaaattgagtagcacatgaatttttctcaaaacctttataccaaagagattttactctctggtaatcaattaccgaattgccgtaatcgattaccaatagccaaatggttttcaaaaagctttccactgaattttcaacggtgcgatgatttaaaatgttgaatcgatcacatgtgttggtatcgataccaggtgcttgacattgaaatcagattcaatgtgagagaccattctttcacaaaaa

SEQ ID NO: 213975 - DNA, 463 bp, Glycine max
tgtacttatgtggcagggcggactatcctcactttcttgcttccatcgcgagctctgaccactgtcgttcttcccgcgatgcttcgttgcatatccgcctgagcgggcttatagcctaaaccatacttcccacgatctccttcggcattgatcaggctagttatgccgccgttgactttgcctaaacccattccgggttcgtaaccagtccccaacataactcgggccatcattactgctgcatcggacaggcaaggctgcccagataaggagtccacagaggaaatgctaaccacctcaaaagactggaaagcggcctctaacgattcctctgcggctaccacataaggcatataggatgggcagctcaccaacacgtctttctcgcctgacacaatgaccaaatgcccctccactacgaattgtaacttttggtggagtggaagggcacactcccactgag

SEQ ID NO: 213976 - DNA, 338 bp, Glycine max
  unsure (1)..(338): unsure at all n locations
ccccccccacaggcctgatctctgaccctgcagacccggaccctaagtcactgcagctgcagctagtcaaggatgtatgttaatgtttctnattaactggacactcccgtgttcaaacaatactcttataaatcggccaaaaccccaaaggtacgcttctcttataacctgaatgtatcccttatcatcaagccagaagcctataccaaagcaagcgtttcctaaatgtaggaaataattgaccatcgactggcaggatctcttcataatcggtgggccctttacaaaaaccaacatcatactaagaaaatacaactctccgcatcttaggggcaccc

SEQ ID NO: 213977 - DNA, 466 bp, Glycine max
  unsure (1)..(466): unsure at all n locations
atatatgnnatagaagcaaagaaactagatgctcatcgtttatttattaaanncaagcctcatcctgtcaaagtgtttcgccacaatttaagaataaaatacccacgtgtttttgggaagaataatcatcactcgattgatagcaaaaaattatcttacagtaaaatactcaatttatcttcaggagtcccaaactccctagacgaataaaaggcaatgaaggaaaactttcaaactagatggactcgagccattaatgcaatgtagtgaataaatattataatatcatataattcctcattcagataaattataactaatataagcaagaaaaacatgtggacacagtgcttgctgtcagaaattcatcttgaataaatgtgtaccatgaactcatcatcaacccatagtaggcgaaagtgcaaaacaatacgcaaagagggaacagagaatcctttttagggaa

SEQ ID NO: 213978 - DNA, 444 bp, Glycine max
  unsure (1)..(444): unsure at all n locations
agcttctttgagaagctagagcttagctacacacacccctttcataactaagctcacctccttgagaagcttccttaagaagattcctaaagaagctagagcttagctacacatacctctctaatatctaagctcacctccttgagatgagaagctagagcttagctacacaccccctataatagctaagctcattcccatgacaaaatacattaaaatacaaaaaaaatccctactacaaagactactcaaaatgccttgaaatacaaggcgtgnnccctttactactagaatgaccaacatacaaggcctaaatgaaggaaaaaaactattctgtatttttccaagataagcagggttatacttagcccatgggcttcaaatctaccctaggctcatgagaacctagggccttccttagatcttggccaactattggagctt

SEQ ID NO: 213979 - DNA, 463 bp, Glycine max
  unsure (1)..(463): unsure at all n locations
actaagctntcagcagattntagtgatgacccactaacctagaattaaaataacttatttgttttaacctacggaattaaaaaacttaatggctgagtgtaactgaaattgtggcaaccaaaagtcaccctcaacagccaacaagtcagccaccatttggtctcccacaaggctgatgcctaggttgccaattgggcccttattacaacttgaactaaacctaactaaagcccttttagttgattaacccaaaacatatttttggtcagccaactttacaaggattgggccattatttagacagactaaacactctaaaattgaaacaaagtggtgtcatatactcctcctccattggggccatgatacatctcacaaccttggacttttctccttgaaacttgggcttgtatacaaataaaatggacagcacttgttgaagaagcttcttggctttccttgc

SEQ ID NO: 213980 - DNA, 308 bp, Glycine max
tttgtaatatttgaaattggggtaagagtgcaggcacaggctaagcgagtcatgcattcccgggaagcctgtggtgctcgctaagcggattttgcaggaaatttcctcctgcaaaactctctaagccctatgtggcatgctaagcccaataatatctctgaagttgcaatttcattcttgggcttagcgcacaagtttgggcttagtgcgcaacaaaaaaaatcaaaatttcttgtacttctatattgggatgtctcctacgcagcaagcttagtgcgcacttacacgctaagccgtagtgttcctca

SEQ ID NO: 213981 - DNA, 418 bp, Glycine max
  unsure (1)..(418): unsure at all n locations
tcctttacaacanagagaagaaaggatgaaagattgcagaaattcttgtagtaggggtgtctcctccacctctagacttcacaatcactcacaaactcatctcaagctctcaggacggcttcctcttccagctctggtctctgcagatcttcacacaacanaatctctcaaactctctggatcttggacctttctctctctagaactctccaattatgtagaagcttcaagaaaaggccaaactcccttccaaaataagatttcacgcttaaataggtggctttgttcgtgttcatgctcgtgcgcttagtgcgacttttctcgctcagcgaatggaccaaagtggtgcacgtagtgggatggcccttcgctcagcgaacaagcacaactcatccttcttccaaattcttcctcgcac

SEQ ID NO: 213982 - DNA, 340 bp, Glycine max
ctcttacctatttaatcacgagctcactatgatcatacaaagtttaacatgtgtttttagagctattctaatgtaccataaatacgatactgctctttaaaggtatcaaggataaaaacttttcatacttaagttatcatacatggtttgaaagttcagtttggaaaaactgacgatgaagatatataccaatcttttcaacattgatacattgatttaatgatacatgcgtaaatattttttataaacacttggtttcttaaaacttattacattttaagcaaatattactgataatgataaaaaaaaaggctaaacaggatccactttatttgtataa

SEQ ID NO: 213983 - DNA, 410 bp, Glycine max
  unsure (1)..(410): unsure at all n locations
ctcagcttatagctgccagtgctaaaattttcacacaactgtatatgttagaatttatctagtgcaaaatcaatcacttaaatgggaacattaaaattgcctgcttactcacaggataaagggtgtgtttctccctctggttaataggatgccgtcctctctcttcacgctttagttctgcttcatatactgcactctttgccctgcacaaatatatgagaagtactaatatatatagaggagaacgtacttgagtgagggggttgaaaccatgttttttttgtacgacaaggagatgaattaatctcaagtttgtgaaacttagatnttcttaaaggctctgatttatacgtagagacaacgagtaagtgagtggtgctggattgcgatcacaataaattttcacacat

SEQ ID NO: 213984 - DNA, 440 bp, Glycine max
  unsure (1)..(440): unsure at all n locations
agctcgagtcttaacataactggtgcattctctttctaatggnttattatgaaatcgatgtggtattatgtcttgatcggagtgtgcgattcctgtgcattgtgattgatgattgaaaggcgtgattgatggatgaaaagtgtgatcgatgaaaggccaactgatgaaataatgcgagatatgctaagcaaattgtatttggctactatatgacgcggtgttcctctctagccgttagaaatgtgataactcactcccgcgttgctatttgtgttggatcctgtgatagatattgaacttctgtgttcggggagcacattaatacgtggatgactatgaagaacctcatgctataggacacgagaacaccaccctgtgataggatgtgacactaggatatacgtcctatattaatctgcatgaaacttagacgacctact

SEQ ID NO: 213985 - DNA, 466 bp, Glycine max
tggataaggaataacaacataaatacaaggtcgtgcaccatcattgaataatggactcacacgggttctgtgttctataccagcagcacaaatacagtttaaccatgaaacccaaccatcatctgctgttgacccttcgtgcgtatatttctaagtgtaaagcaaataagcaagctatacaaaaaagccaacccttaccaactccttcaacattcacgtaagtcctgtatcatcatattaatcgatctcctttccttcacaaagagatcgaaacaatcataacgttaaacaattcaaacaagccctgggattcatctcccattcacaataagagaattttcttcctttccctttcgcattaatcaatgcccaagctctatgttttgccagatcccatgcggccacacaacacaacttctcaattcccattggcccctctaaaaataacatatgttgggttgggagg

SEQ ID NO: 213986 - DNA, 375 bp, Glycine max
ggacctctaagcactgcgcctcaactttgaggaaagtttttcttttcattaaattgaattcaacttacagcactggaatggatacccaaacattgtatcgaaacagccttttgaaatattggaaccgtgaaattattttaaaaaaaactattttttactggtatcgattacaacaatatggtaatcgattaccacagataaaaacctttggtaaggttttgcaaaaactctgtgctattcaaattttgaaaaactttttaaactcacttgatagagttttcttcttcttgaattttgagctgaatctgatcttgattttgcatcttgagcttgatcttgatctaggcttcttttgagcttgaattccttgattct

SEQ ID NO: 213987 - DNA, 380 bp, Glycine max
  unsure (1)..(380): unsure at all n locations
ntgcgaaaagcttgtcgctggagctgactcatcaactgctctaactctttcagactggtgatcctaggatcttgaccttgactagatagaacctctctttaagcgaaggcgtctgactcgatccaatgttttactaaagtgaaacaaaatccagtgcgaatcaaaactctgacatctatcatgggtggaatggatgaatacatgaagaaatgcatatgacacagatgcattttatgaatacgggagcccgggaaattgtccccttcttagatacaacattcgggcagcatcgcgcccgacgtatgcatttaataaagcaacacggaccctctgtcggggtgacaaagtgacgggatcaagacgcaaatcgtggatgatgc

SEQ ID NO: 213988 - DNA, 449 bp, Glycine max
  unsure (1)..(449): unsure at all n locations
gcatgcacttggaacagagaaggatatctttataacaaactacttgtcgaattaatgactaattaagacgaaatccatcccttctcggtaatgaattttgaactctataataaaatcaagaccttggtcaggacaattgaatgaatgaagaaatgagttttcttatgacagaataaatttattaatttattcgagtttgacataaatatcatactctaaagataattcagaattgtccatgctaaaagaaaatattacattatttgtctatttggttcttataagaaacaaatattacttcatgttattcggacgccgagtagagctgctagatgtgtatcttgactaatatattaatttgattaatatattattggcttanttgtgaacccacaagatcacacagatgagtgttcttatatctgtcacagaaattatttgatatttga

SEQ ID NO: 213989 - DNA, 345 bp, Glycine max
  unsure (1)..(345): unsure at all n locations
ntatcaacatgcctacacggaactcttaacagacccactcttttatcttcaaaaacttatagtaacttggaaacggtggagataacttttctctttctttgtcgagaaaccaaaatctcattaatgggagaacacaagatgcttgttccctcttacattccattccaaatattattatttccacccgaatggtttaaaaaagaatgcgcaaggtggagctatattgaatttattccagatgtggcgcattaagtgtggttgaaagcccaaaatatatgaatatgagagttttagagcgtaatatcacgtgtcaagctttggctcgggatatggcgcccccaaaca

SEQ ID NO: 213990 - DNA, 407 bp, Glycine max
  unsure (1)..(407): unsure at all n locations
tattttcaaatatgcatgtgaattaggaagcatcaacaagaatcaagccaaggctattgtgcaagcaatcaatggggcaaaacacaccaaatgattatgatgatggatggctcaaattctcacaaaggtaaactcatcactttcaaattgagctttcaaaactatcatgacatgtagaggagaatcaaggatttcaagtcacaaaatgtcaaaaacttttattttcaaaacaatcacccatttcttgaacatatcctataactcaaagaanaacatgcaaagtcgtacatgcacacaaaattgacccaaaatattaaactaaaaatccgacgaaactaacaacattaacaacataacacaactaacaaattaacaaaaccaacaaaactagcaaaaccaaagaacac

SEQ ID NO: 213991 - DNA, 412 bp, Glycine max
  unsure (1)..(412): unsure at all n locations
acggacactataaatactcagcttttatccaggcacattcttggtggcgaagctccttcttctatggcttattccttagtggatggtgcctccctctcctcttctcctttgccttccgctgcatctccatgctggaaaatctccattgaaggacctcattgaagctcaaagatccagcctccatagaagttccacaagcaagcttccatcatctagtgtcaagggagattgctcggtgtcgagggtggtaacctcgactagtgtaagagttgcaggtttgtgaggcatgtcaagctcccctagcttggaccagtgttgcttaggcttcttctgtcaagttgtctggggtggacaagcttttgatcttgcaagcaaaattagacgtgtcaggtggatgatgtncttatatatg

SEQ ID NO: 213992 - DNA, 402 bp, Glycine max
gctttataagcgcgggtgtgggatacatttgtcaagtgttcgccatatgcgaagatgatgttccgagtactctggatttggtacgaccatgccctcctgatttccagctgggaaattggcgagtggaagaacgccccggcatttacgcaacgagcataattgaaacctttacgggtttaaaagctctatagttgggcctaggctttagagttcttccttttgttaaggctttgcgtcttttgtttttgaatttataatacaaggatctttcttcatttgctcctacgtgtctacccattctcattcatttgcatgtttacttctttttctgaaacgacagatccgatgacgagtccctcgaaggtactaatacctgtgacccacctattgacttccagcaag

SEQ ID NO: 213993 - DNA, 446 bp, Glycine max
  unsure (1)..(446): unsure at all n locations
ntcaacaagagtcttcacaaataatgatcatgaagcttatttctaacaaaactacccatcatatctcccaaaccccatacccacgaaatttaagagagaaagaagtccacccaaacctgaattttcgaagtcccactcgtagccacgcacttcacgaccccgaaaatgctctcctttcacgatttggggcagaaatgagcaccaaaggttgaagctttgtgtggagcttcaatggtgaatgagggaggaagataagcaacgtgagggagagggagagagagcttctgaaaatgtggggctgagtgaggagagagagggttcgcttttgggtttaataaaagggttttctctttttctattattntattcaagctctgccacatgtccctatttgagtggagcaagaaaggcccactttctcttnttgactgtgacccatactcagt

SEQ ID NO: 213994 - DNA, 390 bp, Glycine max
atacaccgataacattatcgaccagaatatccttccggagagaaatgtgcatatttatcatactgagtttgacgagtttaaagtggagttggagaagcgtaatctacacaaacgcttcaccaacctccaagagggaagcattgatgtggcccttgtcaaagaattctatgctaactcgtacagcttggaggatcaatcccctaaccaagccagagtaagagggcatctcataaaaactgatgcatacagcctcaatgattctcttgagacactagtagtcctaaatgaaaaggagtctctcccacttattccagatttgcaggttgaggactatccatcaaagacaaaagctagattatgtcttccccccaggtgtttgtgctgaatact

SEQ ID NO: 213995 - DNA, 447 bp, Glycine max
  unsure (1)..(447): unsure at all n locations
gaccatagatactcagcttaagaggaacctanacagggatgctagcctaccatttatgttctgtacttcttgaaaggtggtggagagcgcatctccaatataatggtgcatttgttggggttggcttcaatcccctagtgtgtgatcatgaagccgaggaactttcccctgcctaccccaaaagtacatttattagggttaaggtgcacttcgtatttgcggagttgcccaaatacttcttccaggtctgccacgtgttgggatatgctttgagacttaacaaccatgtcgtacacctatacctcaacatttcatgtgatctgttgtttgaagaatttgtccatcagtcgttggatggtgcgtctgcattnttacgccgaaaggattgccatttacaaaagttggatcttcagtgataattgcgtttctctcgttgaagatgcattc

SEQ ID NO: 213996 - DNA, 399 bp, Glycine max
agcttccatcaacatgtgttctctactaatcctcatggacttcctcgaccatgtgagttgcctctttggcatccacacatcacatgagggtcatgtcatggtttcatttgcacagggcggcaccactcacaaagaaaccactagccaatctccttaacattttcttgtcattggcggaaatccctggcggatattctttgttctcgacatactgtttgatgtcaaaataccacagtttcccatcttgctctttctctatcgcacaacaatgtgccggcttgccccgagatctgaattcaatttacggccgatccccatgtggggccagttgaaacatggatgccaaggggcgcactgcatccgccatttggttctttccaaggactgtgggggaaaaaa

SEQ ID NO: 213997 - DNA, 396 bp, Glycine max
  unsure (1)..(396): unsure at all n locations
tccattattctttccatcgcgggaaccaattgttttattctccttctttgcttgctaagagtcggcccagtttgcctcctttntctcggtgcatgagtggtggccttctatcgggcaaacaggtctcacctcttggcgaaaaaggtgtgaaaccaaccatacgtagagggccagtgtacaacaaacgatccttgcactgtgtttctcacatcttcggtcgaatgtgtcatataaatcggctaagatagcgataaccaggctttccctgcggtcgtaaaaggcgagaaaagcatcaatcgctgctcggccaccaacccatccacatttggaaagaggaccaccctgaagatcaagagtgccaggatgtccatgaacggtgcccatttgtcttgactt

SEQ ID NO: 213998 - DNA, 370 bp, Glycine max
  unsure (1)..(370): unsure at all n locations
ccgcgattgatctaaggctcttaanacgacgttagtctctgcgtgctatcaagcttttctgcttacagatagcaaacaagaatgtttatacggataaccacttgggtatttccgcccgtcaacgtgactcaaatgtccgtatgaccaatcttgtgagcgtggaagatgacgtaaatcttctcgtgtcaacggtcttgtcggccgcgattgacgaagggcgcaaaaaactacttcagtctctgcgtgctatcaggcttttcgtcttacagacaacaaaaaagaatgtttattcggatatccactcgggaatttccgcccgtcagcgtgagcgtggaagatgacgtatatctccgcgtgtcaacgggcttgt

SEQ ID NO: 213999 - DNA, 322 bp, Glycine max
tacgaagatatcgcgactctctggatttggtacgaccatgctctcctgattaccagctgggaaattgcctcctggaggaatgccccgacctttacgcatcgagcataatgtacacctttacggttttaaaagctctatagttgggcctcggctttagagccttccctttagtaaaggctacgtgtctattgtttttgaatctataatacaaggatctttctcgatctgttcctagactctacccattctcatccattggcatgaatacttctttttttgaaacggcagatccgatgacgagtcctccgaagggactaatacc

SEQ ID NO: 214000 - DNA, 357 bp, Glycine max
  unsure (1)..(357): unsure at all n locations
agcttctcgctggagagagcattattactcccatcgaccgcttcaacgcctccaagttccgcacgtgctttggcagccaaatccgcggcttttccgccgagggctacatggacgacaagaacaatctgccggtttaacaaatagcctccattactgctttgttcccggctaaaagagccctcgaaaatgccgactctgcccaaaacaagcactccaagggttcagatctattctctcttcccacatttccttcttattttgttagatcacatttccgagagacaatcctttttgaggcactgagagagcgtgggttaggntgactacactttttaattgcttgaccattgcatcgca

SEQ ID NO: 214001 - DNA, 411 bp, Glycine max
  unsure (1)..(411): unsure at all n locations
tatgaatgtgtttgttgagaggttttgctatacatgactgtgattgataaggnttactgaaaaaggatttcttggattaaggtatgcccggagtctacatctatttcagtcttggtcaatgggagtcattatgaggaattccatcctgngagaggtcttagacaaggagatcctattgctcccttcctctttcttattgtggctaagggtttgagtggtttcactaaggaagctntgaggatgacatgtattctggttataaagttggaagacagcaggtggaggtcacattactccaattagtagatgaatatattttctttgcggatgattntatggagaatattatgtgcatgaaagctattatgagatgctttgagttgatgtggggctttgagggtaatttctaca

SEQ ID NO: 214002 - DNA, 354 bp, Glycine max
  unsure (1)..(354): unsure at all n locations
gattaattgttatactttaagcattataggagtnggtaagttattatttttacatctggaccttaatgggtcatagtcagtcgttagtgttgtagttgttgaaccttattggaccttgggaaaaccatggttgttacacttaaaccttcttatttcaaatcttctttcccttacacaattgcacactctcctcccaaccatgcactccttccatgacaacaaaacattccctctttctttattagaatccttcctctctttcactccatttgtcactccaatttgatatcttgctgtgatcttcctttcttcctcactttcttggttttcctaatctgatagctttattctctt

SEQ ID NO: 214003 - DNA, 362 bp, Glycine max
ctcgtaatatattgagacgctcgtaattgaaaacggaagctcgttgcaaatgtaaaccgaaataactattaacttggatgtccgcttgagtcccgtaacatatcgagacactcgaaattgagaacagaagctctgagcaaattcaaacgacaataactttttactcagatgtcggattgtgtcctgtcatatattgagactctcgaaattgaaagggaaagctcgtagcatattctaacgacaataacctttgactcggatgtccaattgaatttcgctatatatcgagacgctctagattgaaacacatgctcccaccaaattttaaccatcacaaggtttgactcggatgttcgattgag

SEQ ID NO: 214004 - DNA, 366 bp, Glycine max
ggtgacctgtggccgaactgctagtggtggtggcgaaacgctctttatcggaggtgtggtgtaccgtgttcagtgctacattctccgcaaattctggtacccgccaatattttctgtgttccgccaatattgtgtgtgtcgatgatatgtaaactacttgtcttcggtgttataaagttgtatgatatatctattctgcatatatatgttaatattataaaagtatatgctacattcatattcacagatatctatattctgttaacttactttattaatcttgtaataaatcgtatgaattttctatgcatattaaatccagtatatctcatgtcattcaaatacatatgttgcaatatatatatt

SEQ ID NO: 214005 - DNA, 418 bp, Glycine max
  unsure (1)..(418): unsure at all n locations
aagcttcaccagacttataagataaatgtattcttcaagnncggatattcctcccaaacgtcaaattctctgcctatatattcaatctttccatcactggcacgtggagtgaatcttcctccatggtgcaatattaaagatatattgtcattcattctacacaatcagaaaccacaaacattgtcatatattaggaaataaaaaacctaactcaaactcaaacataggcacatcacacaacaacatgcaatgtcatctataaaaatagagcatcataaacgaaaataataaaggaccataaacctccctacgaagcacgaaggcaatgcanatgataccccttgaacatataaaaccccaaatgaatccaccaaaacaatgcanacgaaatgaacgcaaaaaaaccaccaacctgact

SEQ ID NO: 214006 - DNA, 490 bp, Glycine max
taacttaaaactcagctatgctgcaacatctacatagatctgctcaacctgtatagctaaatctgtcacatcagaacaattatgacctctccagcagcaggtacaatcccgggtggaggaatcatcccaaccttagatggtcgagtccttcacaacaacagcaacaacaacagccttattttcagaatgttgttggcccaagcagaccatacgttcctccaccaatccagcagcaacaacaacaacaacaacaacaacaatagccccagaaacaacaaacagttgaggccactccacaaccttcccttgaagaacttgtgaggcaaatgactatgcaaaacatgtagtttcaacaagagaccagagcctccattcagagcttaactaatcaaatgggacaattggctacacagttaaatcaacaacagtcccagaattctgatagattaccttctcaatctgtccataatcccaaaaatgtgagtgccat

SEQ ID NO: 214007 - DNA, 256 bp, Glycine max
agctgatatcgatgaagagtaactaacataattgacgtcaaattctctttaaggggaaggggatgatgcaatctctcctatgattggaccaactcctaataccatgtacatgacgctcctagaatattgcgctacatcatgctgaaaaatgccctagggttctcatgaaccttatggtaaatttcttagcccatgggccaaggttgggttcaataattttgtacatataaacaaagatgtcatatatttgatcttg

SEQ ID NO: 214008 - DNA, 301 bp, Glycine max
ttctgaattttcaaaacccaaattttctaaaacattcataccgttaacaaaatgctccacccccttttttatctcaagcaccttcctgtaagctttcttctataagcttcattaataaagctttctccacaaacttcctcatggcttctttgagaagccctcttaataggattctttgagaagctagatccttatctatccacacccctctattaactaaattaacttccttaaaaataattaccgatgaaaataatgcaaccaataatcaaacatctaacatatatactaataatatata

SEQ ID NO: 214009 - DNA, 463 bp, Glycine max
  unsure (1)..(463): unsure at all n locations
tcgatcacattgttagaaagaccataagaagatgttgagtaaggccaaattgatgagccatgaattgtgggttgtaaggctcgacataaaatttgatatacctggatccagggtgtaacacgctaaaggtattatcataattacacttttgattctaaaatatgaaaaataaaaatatttatacaacaatctcatgcgaaagctaacatataaacattacaacttgattccattgataatatcaatacaacttatttctcatagctttcacattatacaaaatataagaaaatacagacaaaataaaataactaagctacatataccatgacgaggctccatgctccaacaaattgcaccatcacctatttcctgaanaagaaggaaacttaaaggggtgagtgatcgangccgtacccgaatcanataaacattaaaaatgtagtatctaggaagtgatcct

SEQ ID NO: 214010 - DNA, 438 bp, Glycine max
  unsure (1)..(438): unsure at all n locations
ctcgaccgggatccttaagtcgactgcgcatcagctgcataggaaggtttttggtttcnnncgcttttttgttgaccacagagtggtaccgggagatatgtcgcgggggtcaggagaccttggggacgtcaggtggggtgctattgcccaaaaccaagcttgaccaatcccgacccaacccgggcatagtcggtcagtgagaacctgtgatgtacctaaacaggcgagctcctggcagtcaacagataaaaggaacaaagaccacaaagcaaggaggcttgtggtggctggccagctgtgaactttgattgatatgtgggttatggcctctggtaatcgattaccaagggtgggtaatcgattacaaggcttaataatgaagacaggaggctaagatggtctctagtaatcgattaccacgggatgtaatcgattacc

SEQ ID NO: 214011 - DNA, 412 bp, Glycine max
  unsure (1)..(412): unsure at all n locations
tgagaagtgaaaatgagaatggggtaattttggagcaaactctcatctcacacaagtctataacattaatctaaacttgctcaaactggttttacgactaanattccaccaaatcaaaatttgacccctcaacacccaatttaccctagaaatggctcttgttttcactttggtcactcattttcctcatttgctcagcccaagctttcccacaagtcctaaatgacattttaaactaggatttactcactttaacctccaattaccactaaatccagatttagctnttcaaatccttaaagcatcacactnttccactcatatcactacattctcactttntaaccctangttaactctacccttcatctctatncaatttccatcagcaatntcagcatacaaacatcac

SEQ ID NO: 214012 - DNA, 427 bp, Glycine max
  unsure (1)..(427): unsure at all n locations
ggatccttaagtcacctgcgcatgcagcttaccctcagatgcgtgttgtaaataannnncctccatcacccctcgtaagtttagactaacttaaactaagctttgtcgtcagatccctcttgttggactaagctcaacttaaatagcttacgaaagtttagactaatttaacctaagttttttcctcagatccctcttgttggactagacttagaccaaacaacattgttgtaacatcatatttaaaaccaaaacttaatccgcaaatccctcatttaagactaagtttcaatcctgcttctatcaagttctaaggcaacaatacattttccaatgctaaagtcacctaacagtacacacaagtgggtgatcagaccaagagcatgcaatctttaagcattgaaaggagcattgaacacaatacaca

SEQ ID NO: 214013 - DNA, 430 bp, Glycine max
  unsure (1)..(430): unsure at all n locations
aaactaagctggcttagnctcttctatacgagcgcatgtagtcttgtttctgancgggcggattcngacatggagctcaatgaaagcattaagttgttgtgatcgaaaggagtggttctagaaatctaggtttatggccttcaaaacaaggtaagggagaagagaaaacttgtattatatgctcgtccattagaaatacataaattctgtatttataagtattctgttataattctagaagatacaattctaacatattttggcattgtgtgtgccttggacgaattgagaaattgcacttcactgctagcaggagacagtctctaacggccaaggaatcttggatagcttttagaacgttgctgacctggcttgaagctcagctacaccttgctacgtaatcttccaggtatcgttggctgatgattct

SEQ ID NO: 214014 - DNA, 422 bp, Glycine max
  unsure (1)..(422): unsure at all n locations
ncgcatgaagcttgcactaattgattcttaaataattgtnnnttgcggatatataaaaaagttacctataaataaatataataaataatatcttttgttatcctttgtggatggtttgaaaggacaaattctgtgcatgattcctaagtatatatcactcatatttattattctcttaaccactttttgttctactgctatgtgctcatattttgttctatctaagcattaaggaaaatccttccaatgcgagcttgtctttgccaagatgggaatcaagtgagtaaatgttgtatatatattactactacaaaacagaacacatcagttatatacattactacattagcaactctagtgcattataacttagtacctagcactcagtagttgaagtgtgttccaatgacatctctaaatgg

SEQ ID NO: 214015 - DNA, 452 bp, Glycine max
  unsure (1)..(452): unsure at all n locations
ntaagagtactgtatcaaacatatgttgcccatgttccttcaggttatgacgggaattaactaacgagatggtttatcttttgtttgtttgtttgttatgatttgtaactttcaacattaattcagaaaacaaagttctcctcttcacattaaatattgatacctaacataattaagaggtggacggtggtcagtttcattgactgtcttataagtatctactatcctaaatcaggttcccaaaaccataggcacatgcatattaattatatgtctggatcatgaattgcactcattctaatgacaaatttcataagcttcttctaaaactctctcaatatgaggttctattngatgtcaacaagcanataaaatattgatggaaaagacagtagtgaaccgaataaagatgtttgctatgatttaataagtagatgggagcacataaatat

SEQ ID NO: 214016 - DNA, 451 bp, Glycine max
ggacaacaggccaaagagctttgaatgccttaaatgatatacctttccatgtatcagagcaccaaccacatgttataaatattagttgaccaatattaggaaccatagtgccaaacttgttggtttaagtgcatgttacttttgacatccataaaaaatatcctaattttcaaacaaaatttgactttagtggcctgattatacaggtggatagggtagcagctgatgcaaacaatcatgctacataaggttgaagaaaacgctcactgaggtaattgacgttattaattgaatcctcctcctttctaagggaaattgcaagtttacattaaatttcaattttcctatcctctacagataacgcctagtcgaaatttctgcatccacatcattctgctcgatgttcttgttggaaatcatttgtatttatacaagttagttcatcatcatc

SEQ ID NO: 214017 - DNA, 396 bp, Glycine max
  unsure (1)..(396): unsure at all n locations
ccgggatccttaagtcacctgccgcatgcggcttcttttggatctgatcttccnnnnctcctcttcagaaccatgctatgtgctcgcgactggtccctttcttcccttcgcaacttgagttcactattgctaccccatagagctccgcgaaatttgttccggccatactcttccttgcgagccctcttggtctcttgttcaagggctcttgcggtaattgcattctcttcccgtaacccggcatactccttccgaacgtgtgtagcagccaacttgaacttctccttggcgagttttgcctttcctaactcgcttttgagagcttggacttcttcgtcctcttccggtgcttcaaaattctcttcgctgacgacttataacttggcgagccaatct

SEQ ID NO: 214018 - DNA, 412 bp, Glycine max
  unsure (1)..(412): unsure at all n locations
ntgcggatatggtcttcgctgggatatgatcaagtgtgtctaaaaagaggcaaatctgatcatcatgctntgataaatgcaaaatactggggcaaatgaagagggtgagaatgagggagaaacccatgctgtgactgtcattcctatacagccaagtttcccaccaacccaacaatgtcattactcagccaataacaaaccttctccttacccaccacccagttatccacaaaggccatccctatatcaaccacaaagcctatctactacactttcaatgacgaacaccacctttaacacaaaccaaaacaccaaccaagaaatgaattttgcaacaaaatagcctgtagaattcaccccaattccggtgtcctatngctgacttgctccatatctacttgataattcaatg

SEQ ID NO: 214019 - DNA, 363 bp, Glycine max
gaaagcccgattttaattttatatgcgctaaaagtgctccaacacatttttacatttccaacttttccatctaatccaacgtgtatcaacacaatccaatttcaacgccatataaacaccagtctttgaacagggaacatctcaccataagagttcgttacccacggacatggagattacatgagacgattataattaatatatgcctgcatgttgctacacatacaaaggacctgcatttattttcttgttccatcgataaaaaaataagagtaaagaatacttttaattgtggatattatgatatatgtgagtgtgacatccttcaatgttaggagagaattataatgcttcaagattaca

SEQ ID NO: 214020 - DNA, 320 bp, Glycine max
cacaacctataatgccatgcatataagtatgaagtgaagtctaagacacacgtacataaacttccgaacctattttgcaatatgatactatgcttatgacattatctctatagtgaacatactgatcacatggtgatctgatccatcaccctttatgcatagcgaatcgtacactaggagactcaagtatcatgatgcaccctcttatgcgaccttgagacgagaagtctatatactgaatctgaggcagactcttaatgtgcagatgtggggatagcctatgtgaatctcgaagaacggaggtatgtgattactgaacc

SEQ ID NO: 214021 - DNA, 441 bp, Glycine max
  unsure (1)..(441): unsure at all n locations
acccgcgatcctcagagtcacctgcngctgcagcttctactttcgatgatgcagattgttttgttccannnntgcactctctaatgactatggcatcatttctggcgctaaactgctgggagttggaagccatcttctcaattaaatttctggcttcagcaggagtcatgtctccaagggctccaccactggcagcatctatcatacttctctccatattactgagtccttcataaaaatattggagaagaagctgttttgaaatctgatggtgggggcaactggcacatagtttcttaaatctctcccagtactcatacaggctctctccactgagttgtctaatacctgagatatccttcctgatggctgtggtcctggaagcagggaaaatttttctaagaatactctcttaagtcatcccaactcgtgatggacctt

SEQ ID NO: 214022 - DNA, 305 bp, Glycine max
  unsure (1)..(305): unsure at all n locations
tctacgaacgtacgaatgttcgagcgctcgctggatttcttaccgaacaattttccaagcaattcgaaagagagagaagtgcctaaggggctgaacccttnttcactttacttctccccctatttatagaaaattggnggaaaagcttgccacccagctcgcccaggtgagcagggttgcttcctccagaagcaacagttctggaggaatcttctggagggcccaagtgggcctggtctctatttgcacccccatttntactaagtacacccctgccttttttggtgattctttttcgtaaagta

SEQ ID NO: 214023 - DNA, 436 bp, Glycine max
  unsure (1)..(436): unsure at all n locations
gacccttaagtcacctgcggcatgccgctccacctatcttttaaggagatttttttttgtgnnngcgcatgccaccggtgattaattgaaccatgtattggcattgctcttagctccaacattcatccaaatgaggggtattgtgagaagagtgtaaaaaacgcggttttgtagattaaaacaaatgccattgtagctaacgtggaaagacaaagaaattaacaattgcatataaaaagggggtttctgttggtagacaatattgtaagagaatagtgttggaggaaaataccttaatttgaagtaaacatggtatccaaacctgtggccaactcgatgctttttctgaggattgttgctctcgctgcctcagctgcaactgtggccttactatttactaacaaggtcaaatttgatgatggaacaaagntgagat

SEQ ID NO: 214024 - DNA, 326 bp, Glycine max
ccaggaaacagggagaccccattttaaatgccgcgcacttgatagttcgttacactggctggaaaattggcacatgttacccgcaactaatgcctttaataaattcttctacgattatatacttttaggctcggtattgtcttattttcttattcctaatgtatcatctcttctatgaaccattactgtcatcgatatctggtcaactgaagacttcacttcacaacttaaatattgctaatgaatatttggaacaagctgtgcaacttgtcaccaatgataatcatgatctacgctgtgcagacattgaacaggctgctactgac

SEQ ID NO: 214025 - DNA, 417 bp, Glycine max
  unsure (1)..(417): unsure at all n locations
cgctctcaacaagacggttcacaaataattattatatgttnnnnactgaacaaactacccatcatatctcccaaaaccccatacccacgaaaatcaaaggagaaagaagtccacccaaacttgaattttcgaagtcccactcgtagccacgcacttcacgatcccgaaaatgccctcctttcgcgatttggggcagaaatgatggccaaaggttgaagctttgcttggagcttcaatggagaatgaagaagaagaaaatggcaacgtgagggagagagagagctgtctgaaaaagtgtgggggctgagtgaagagagagaaaagcttcttggttttaaataaagggttttctctttntctattaatttattcaagctctgccacatgtccctatttgagtggagcanaagggcccac

SEQ ID NO: 214026 - DNA, 463 bp, Glycine max
  unsure (1)..(463): unsure at all n locations
ngacctgtcaggctaagcgccactgtgcttctgtagttttcatttgaataaggttaagcacgtctatgcgctaagcccttgttgtgtgttgagctaagcgccctgctgcactaagctcaactctctcactggttttttaagattttgtagtcaggctaagcgcaccctgtgcgctaagcttgagtgttattcggttgaggttgagctaagcgcgccatgctgcgctaagcctattctgcagaaagaaatgttttttgtgtcttcgagcttagtgccagcctgctgcgcttagcgcctgagtaaaatttcataaggcgcgctaagctcagcatgttgcgctaagcgcccagtcaaaatttcagttttatttttctgtatgtgaaaataacctgtgttaatctcttgtgtttaatttacattttgcagatggcatccaagaaaagaaaatctccttctacaccta

SEQ ID NO: 214027 - DNA, 421 bp, Glycine max
  unsure (1)..(421): unsure at all n locations
gccttgatgattaacctgacaaatgaattctctttatcnnnntctctgtattcatccataacccgaaattaaatcctaaatgaacaatgcaagattgatttagggggaacaatattctcagatcttaaccataggttgataattaaaataagaggtattaaccaattaattggtaatcgagagttctaaattaaacaaggaattaggaggaaaatggtacatgtgaaatcctaattcgagtcacttttattcaaacatatatcttctttgaaactcttgtatgtctttagtttttgaacgcaaacacaaacaatctccaaatcaagataaaaactgaaatttttttagtttaagtgatttagattatttgggaacacaattagtctctaggatacgatatttggactntcaagtccattat

SEQ ID NO: 214028 - DNA, 462 bp, Glycine max
  unsure (1)..(462): unsure at all n locations
ctaagcttgtattcctttagtagagaatctttccttcctaagatggagccaaacccagtcccnctcattaagaactagctcctttcttcctctattgcccttagttgaatacacctttgtttggttctctatttaggtcttaaccctctcatgcaacttctttacaaactttgacctagattccccttctttatgtataaaagaagtgtcaagtgggaggggaatgaggtcttaaggtgttaagggattgaacgcatagacaacctcaaaaggggattgcttggtggttctatgaacccccctattgtaggcaaattctacatgaggaagatactcatcccaagacttatggttgccttttagagagcccttaaaagggggataaagacctattactacctctgtttgccatcagttgtggatgacaagggagaaaaagagctntgtcctacttacccatat

SEQ ID NO: 214029 - DNA, 279 bp, Glycine max
  unsure (1)..(279): unsure at all n locations
aataaaaatgcatagtagaaatcacttacttggattgcagtgtagagaagcaaacaaaaagctcagagtagcataaggcataatggaagcacattgcatagagtgcaagaatgagtgagaattgangagtgaatgcacatatgaaactgcctaaggcagttaaaccttatttttggcagtttcaaatgcctcgcttagtgtgggtcactcgctaagcgagcactcaatgacttttgggttttcaaaattcaaactcacgcgcttagcgggcagactcgc

SEQ ID NO: 214030 - DNA, 449 bp, Glycine max
  unsure (1)..(449): unsure at all n locations
accgcatgtaagatacatcttcttcaaccttagtcattcttgactccatttcattgaagcgcatatccacttgcagttccaaagtatcaaacctctcaccaacaaaggtttgaaggccatcaaacctttccaaaatctttgaaagaagagatgaatcttctccctcatgtccttcttcaccaatatttctagcacccttctttacccatgatccatcatgctccttaatataaccaaaggatgctatgactgaagcatctataaggaatgatctcttgattggaacataaggttcagaatcaagagggatgttgaaatgttgaatgaaaagggtaacaaggtgaggataangcaatggggcatttaatcgcaatgccttatgcatgcgatatctaacaagaatgtgaccaatcaattgtaaacctttatgataggcccacatgacaatg

SEQ ID NO: 214031 - DNA, 414 bp, Glycine max
  unsure (1)..(414): unsure at all n locations
gctctctaagtgaaatcatgttttatttctnnnncccagtcctctcacgaggtggaggttgagccatgttctcagtatgaaaattagtagttgaatgctcaaaatcagaatattctgaatcaccaacaacagaatactcagaatgctcaaaatgctcacaatgctcaaaatgcacagaatgatcatgatgcacactatgcctaactaatctatgaaaagttctatctatttcaggatcaaagggttgtaaatcatctagattgcccctagtcatgcactatatgtagcaaataatgtgttctcaaacaagcaccagaggagggttaaaactacaactatagtcaaatgatatccaaatgagctgaaattntgtgagcaacaccctaaaatcatgaaaggatagcacaataaaat

SEQ ID NO: 214032 - DNA, 425 bp, Glycine max
  unsure (1)..(425): unsure at all n locations
ntgccgcatcacgctcgcgatcggagtgagatttatgtttcannnnatatgatcacgctcaaaaggctacaaattatataatccaaacaatagatagacaattgtgagctgagatgtcgagttctatgaagaaggcacatggaattaggaggagaaagaagacacttatgattttttcccgtactttgaagaaatagatgaagaagccttgactccaaatgattcaactccaacactttcaccaactccttcaaccaatgaagcctcatcatcttccgaagggagttcaagtgaaaggccaagaagaatgagaaatattcaagaattatatgatgaaactgaagttataaatgatttgttttgtctctttgttgacagtgaacccttaaactttgatgaagcaatgaaagacaaattgtggagac

SEQ ID NO: 214033 - DNA, 238 bp, Glycine max
  unsure (1)..(238): unsure at all n locations
atgaaganaagagcgtatgttccccatgaccatacaccgagtgtgcaaaatgttcatcctatgtgtttaatcgcaatccttacacacactgcctgatcctataatatctccatgctgccctcacctctgcatacacgtcgacgtcttcgtgagaatacatagatgatcctacctctcttcaatgctctacattgtcgatcgtcgactcgccaactgtgatttaaaataccccatgtga

SEQ ID NO: 214034 - DNA, 422 bp, Glycine max
  unsure (1)..(422): unsure at all n locations
cgcatgaagcttgcactcatactcaatatgtgttttgtgcnnttaaaaaattgatttaatatagtaaaattcaatatttttgtatttaacgttaaaactgtcaaaaattactgtatttcataatcaattttaaatacaaagtcaattcattgacttgaaacctaatctatgaatatttgtctcaaatcacgttaactgatatttaatgaattttacagagcttaatatgaaaccaaatacggactcaatgaactattgaacgactttttatctaccatataatataattgaaaagtcaaaattattcatatcatacttcctcttctttggcacgttntcactccactcacatatcactctcgcttgacaattaccatttttattcaattaacagtaggaaaaanaacaaaaaaaaaaaacga

SEQ ID NO: 214035 - DNA, 472 bp, Glycine max
  unsure (1)..(472): unsure at all n locations
tactaagcttccaatagaccatgttaaggctaaccactatgtttgctatctcttgatccttactccatcagcttgaacacctatatgttgaaggaaatgatgttttgggcttaggggaaaagcacctttatgtgcatccatgacatagttttccaccaaatgggttggattttactgcagtgaaagaataaatgggatgcaccctcctctttaattttacagaaaagacataacatttctgtgagctgcacttgtctcctctgcaaaatttgtcttgtcggcaatctgtctcttattagcctccacgcaaatacggcaattctggttggaatatttattctccataatntctcgaagcactcctcctgacttccggctgctgattcctcccctatcatattatatgcattgtgtgttgagtattggcctgctgggtctccaatccactcccaaacatccgatcccttgtact

SEQ ID NO: 214036 - DNA, 353 bp, Glycine max
ttttgctttttcttagaaattactaaactagaaagtttctttgcattgtaaacaacttgcaaatgtccttcgttggataaaacataataacaacctactttaattatgctatgaaattgaaggtttaaaatgagttgatcttaatatccaagtatcattatatcaacaaaaaaaatgaagcaaattggcaaggtgtcctgttgataacgagacaccatcctattgagtttaaggtctagcctagactcctagataaatctgtttcaacaatggcacttaacataaacatcttggcatcgactaatcaacaatacaacatggttataagtatatgacaatcgatttagactacc

SEQ ID NO: 214037 - DNA, 437 bp, Glycine max
actcaagctgcttatctattagcgatggcggaacttatattttttgcttgacgaccggttattacgatgaagcatgaaatgtgcccaatcttcacatcacattgctcctttggtacatactgtggtcactacttatttactacattatgacttaatctttcttaactaattacttatttatgacagcctgcacaatggattaataaaggagggatggtacctgaagagattgcagctgcctcatcagaggaatgtgacagaatgttgattgtcattacccattgacatgtgaaatccaagttcacaaaaaattcaaactaatgatatacgatataatgtttaagttccaactttcaagtgcatacattgttggcggatacttgatattaagtttcaacaatccttctttcattatattattgtttcaagaaaaaata

SEQ ID NO: 214038 - DNA, 321 bp, Glycine max
  unsure (1)..(321): unsure at all n locations
acctcanagtcacctgcngcatgcggcttncggaagggaggaccactattattaggtgtggggccncacagatactaggagccaacttaaagtggaaataaacaaggaatatactcggagtgcataaaacagctaaatactgcttacaataacgcaatgctagcttaaatcttaccctctccatgatggcacccgaatgctgcacctacgacacattgaatacctctatgaatgctaccacagacgtcagtaaagtttacaaaccggctcgaataccacaattataatatgtgacattcgtgtccatttcagggacacaca

SEQ ID NO: 214039 - DNA, 408 bp, Glycine max
  unsure (1)..(408): unsure at all n locations
gctttgaatgctctattcaattagcnnnaagaatatttcagactgatcaacacatgcacagtggccaaggatgcatgggagatcctgaaaaccactcatgaaggaacctccaaagtgaagatgtccagattgcaactattggccacaaaatttgaaaatctgaagatgaaggaggaagaatgtattcatgacttccacatgaacattcttgaaattgccaatgcttgcactgccttgggagagaggatgacagatgaaaagctggtgagaaagatcctcagatccttgcctaagagatttgacatgaaagtcactgcaatagaggaggcccaagacatttgcaacttgagagtggatgaactcattggttcccttcaaacctttgagctangaactctcgatagggct

SEQ ID NO: 214040 - DNA, 320 bp, Glycine max
aactgactctctctctcactattgatgatggtctcgtttagacgtatgtccactgaaccatcacaccctgtcttagagcatgttccactgctcgacaataccacttcttcgacaacagtactataccgttactctactctgccgcacggatgtcctatacagagccttttattacagacaagactgggggataatattacgcgctgatcctgatgaccgccttagtatctattttatttaaccttatctgtgagcaggatacatatgtcatcaactcttgctgagctcattgtaatcgtcacagtctacttcatcttgga

SEQ ID NO: 214041 - DNA, 449 bp, Glycine max
  unsure (1)..(449): unsure at all n locations
ntgataagcagaatggagagtgaagactatgaaggagttgcaaagtgtgaaaattctaacaagctttatcactctctagacgattacatacaagctctaaaactctcatattctntgtaatcacaaagttattgtgtttgtgcttatcttgtaaaagctcatgagttatctttcaaagacttatctttgcgacaatttggtgtggcgtgaaatagaatacttgggtaaggttatcttgagttaagataatgtcggtcatagcaaattttttaagaacgaacttcctaaatcatcttatgtttcctcttcactttggattggtttgaagccttgcatttcaagcattntagaaaattctgttaaattggcggtccaatgaatattagaattggatggtccaatgtgttatatctcgacgatccaaannatatccataatttgataatgac

SEQ ID NO: 214042 - DNA, 404 bp, Glycine max
  unsure (1)..(404): unsure at all n locations
tccttagacncacctgcggcatgagcctttagcaaatcacacgacaataatttttactttggnnntgttgtgcccgtagtatatcgagacgctcgtaattgaaaacagaagctctgagccaattcaaacgacaataacttttaactcgggtgtccgattgtgtcctgtaatatattgagacgctcgaaattgaaaacataagctttgagcaaattcaaacgacaataacttttgactcggatgtccgattgtgtcccgtagtatatcgagatgctcgaaattgaaaactgaagctctgagaaaaatcaaacgacaataacgttttactcggatgtccgaatgagtcccgtaatatatcgagacgctcgtaattgtaaacagaagctttgtgcaaattcaaacga

SEQ ID NO: 214043 - DNA, 462 bp, Glycine max
  unsure (1)..(462): unsure at all n locations
atgacccactaacctagaattattataacttaatgctctttaacctaggaattaaaacaaaattaatggctgagtgtaactgaaaatgtggcaaccaaaagtcacccccaacagccaacaagtcagccaccatttggtctcccaaaaggctgatgcctaggttgccaattgggcccttattacaacttgaactacatcccttttagttgattaacccaaaacatatttttggtcagccaactttacaaggattgggccattatttagacaaactaaacactctaaaattgaaacaaagtggtgtcatttagtcctcctccatttgggccatgatacaactcacaaccttggactattctccttgaaacttgggcttgtatacaaatagtatggacaacacttgttgaagagctttcttggctttccttgctctagcccttgtcatangtcctacaagtcctt

SEQ ID NO: 214044 - DNA, 424 bp, Glycine max
  unsure (1)..(424): unsure at all n locations
ttaagtcacctgcagcatgagcttgctcatccgtatgcgagacattttcatttggnnaaacatcccaagtaccaagaagagttgggtctagccacggcccacgagcatagaatcgcggatgagtatgcccaagtatatgcggaagaagaggctctaggaagggtgatcgactctttacaccaagaggcaaccatgtggatggatcggcttgcccttaccttgaacgggagtcaagaacttccccgattgctaaccaaagccaaggcgatggcagacacctactccgcccacgaagagaatcatgggcttctcggctattgtcagcatatgatagacttaatggcccacattattagaaatcgttacgacacttgtatggtctctcagaccttgactagatatgacttccttttcgaatataatg

SEQ ID NO: 214045 - DNA, 478 bp, Glycine max
tggttcgaggtactcacccgtcgaagatcgaagaacgatgaacaacttttgtaaaacgtctaagaacggacgaaatctgtgccaaattcctcacggaaaacgtcacggaaacgtttcggaagcgcctctgcttaaatattcttcacggaaacaatgtttccaagcaaattcgtaagagagagaagtgcctaaggggctgaacccgcttcttcttgccttcctcccctatttatagcaaaatatgggaggtggttgccgcccagctcgcccaggcgagctcagctcgcccaggcgagctcagctcgcccaggcgagcagggttgcttcctccagaagcaaccgccttctggaggaatattccggaggtgccaagtgggcctgggtgctatttgcacccccatctttactaagtacaccaccctgtgctatatgttggtgattcatttatcgtacagctactgcaacttacgaatttcgt

SEQ ID NO: 214046 - DNA, 417 bp, Glycine max
  unsure (1)..(417): unsure at all n locations
cgatccttaagtcacctgangatgnagcttgttctacactaacaggaaagttattattggtnnntttaagacattgacgattgaccatcaatatcttgaggcaagaaaaggaaaagaaataaaccattaagagttgtaattgagttttcaaatttacagattaatcatgactactatattatttagttaaaagaaaggtccaaccaaagacctatttgatggagaaacatattactaaatgcactgtaactgctgggttagcaatagaacccaggatcaagtatttccagaagacacatgttttgctttcaccaatatgtctgagtgtttataaattggaataagtcattgcaatacctattataaagaagaaaagcatgaatccagctgatatttggatgactttgtgacttccta

SEQ ID NO: 214047 - DNA, 428 bp, Glycine max
  unsure (1)..(428): unsure at all n locations
tcttccgcattacatgtaaactcgattcattgtctataagtacctttgcgacaacgaggtccatacatcttacccacacatgtagagccttgttgtgttctctcccctcaacgggaatctcttcttccgcaaacgcgatgtagttgttggtggttatatgattaacaatgccttcgaaaccctccactgagatatcatgtgctacatgggcatcgttaatgaccttcatcaacagcgcacgatgaggctcggagtttatgagtagttcaagcaaagagatccttgctggagttttattcagttgctcgactaccttanactcgctttgttggatgaggcggangaactcatgggcctcttccagagtcactgtttatccttgaagtccctctttcttttcggtccctcttaccactggaggatctgct

SEQ ID NO: 214048 - DNA, 392 bp, Glycine max
  unsure (1)..(392): unsure at all n locations
aggntgncgctcgacaatcgcacaaggaaaaaattcttggtgcttttcggcgttagaaacatgttggacgaggcatgaaaggttgtgagaaacaaggcaagactggttgccaggtgtaactcacaacaggaaggtatagactatacaaacacctttgttcatgttgctcttctagaggcaatatgcattttactctcatttatagcttatacaacaatgagactatatcaaatggatgtaaaaagtgcatttctcaatggactaatacaagaagaagtctatgtagaacaacccccttggtttgagagtaaaacttttccacaccatgtttttaaactctataaagcattgtatggacttaagaaagcttcaagagcttggtatgaacatat

SEQ ID NO: 214049 - DNA, 309 bp, Glycine max
ttgaccactggtccttctttccgcgatgctacttttcatgttccgctgaatgggcttatagcctaaaccatactttccaccgttttcttgaatatttattaagcttattattccgccgttgtcattgcctacacccataccgggttcataaccggttcccaacatatctccggccatcattaccgctgcattcgacagacatggctgaccaagagggagtacacggatgaaatgctgaccaccttcaaagactggaaagcagattctaacgattcttctgctgcctccacataaggcatggatgatggg

SEQ ID NO: 214050 - DNA, 339 bp, Glycine max
  unsure (1)..(339): unsure at all n locations
ctccaaagcaaccgccttntggaggaattttctggaacgcccaagtgggcctggttgctatttgcacccccatttttactaagtacaccccctgccttttttggtgattctttttccgtaacgttatgaaactttacgaatttcataacgatgcttgttttctttccgtaatggtatgaaaccttacggattacgtaatcatcccttttttgccttccggaacgttacaaaactttacgaattgcacactaacactttcttttaatttctggcatatcacggaacttcacggattgtgctacaatgctttcttttgacttctggcatgtcacggaactt

SEQ ID NO: 214051 - DNA, 314 bp, Glycine max
  unsure (1)..(314): unsure at all n locations
attttgatngagncctatcttgattcttgaatcttgagtcttgactcttgatcttgattatacttgattctcgaatcttgaaaacttgaaacttgaaacttctcttgaaactatctcttgattcttgaattggttttgaactaatcttcggatcattctcttgggctttttgcatcatctttgatatcatcaaaccaccttgaatcaatcttgattcatcatcatgaaacaatgagacttgcttctacactaagagccatttcaccatatatatatcaccctgcatagcttccgtctcaagctcttattccact

SEQ ID NO: 214052 - DNA, 353 bp, Glycine max
  unsure (1)..(353): unsure at all n locations
acactctctacctgtatatttnctacctctgcttatgactttgaagggcacaaattcacttcatagatgggccagtttagattaggatcatggctcctcttgtttggtcaattttagctgagacttcattcttcgatctactatgttctattgagttgttacttctactttttttttacagggataacatttgaattacaatcatgcaatagtttatttacaatatatagtgttgtctaactatataaatttgatcgagttttatacaattattttgttgaataatcagtaacgttattatgcacgtaagaaattattggctgatattcgataaaaattaacataatctaatg

SEQ ID NO: 214053 - DNA, 487 bp, Glycine max
  unsure (1)..(487): unsure at all n locations
ttcggaacttgaaactaagcttccaacatgcatgggaagtaagtgatggacaactttatcgaatcannccgcaaccaaatcagctgacgactcagtaagtgagggctcaataatttgtagtcattataatttgtagtctagagtagtggattatatatacgcattcataaacatgcatgctagctagctgtttgtaaaacaagagaggaaatgttatgatcgatcacccatntgcataatagaggattcctctgagaagaaagacaatataatcgcttctcttgtgtgaagaaaattagcaagtgtgcgcaatatttacggagctacaaattaatggtccatattaactagcattgttatagccaattaatcgcttctctttgttaacaagcattgtaatacccaattaatggtccatattccgcaacatgcatgcttgctgatgagacattctgctacaaacgatagaattgtcaatgcacactta

SEQ ID NO: 214054 - DNA, 395 bp, Glycine max
  unsure (1)..(395): unsure at all n locations
ttatctaagtgcttgttttctnnnnaatggctcgcgaagtttgttatggaatttgttataataaaggacacgtcagctttatatacatctccaataatgcatgaggagaaggtatccactcaactaagttagccagtgaaaaacaaataacctatacaaatataaaattccaaacagacaagttaaaaaataagtagtgttttgggcatatacagtcctaaccacaatatttattattcaaagttaatctcaaccttagttactcaaaaaaaagttctgctccaaattgaaaattacctgaaccatagttgttagaattgaatgattcgatacaactccacaagccattcatatcatgtgataaatcataaatggctttgaaccatgcaatacat

SEQ ID NO: 214055 - DNA, 475 bp, Glycine max
  unsure (1)..(475): unsure at all n locations
tgcannaattccaatatgaacagaggatacacattccttattgttgctaaatcaaaatctttttacactggcaaaggagacaagagttaagttacctttgctattgttactacttactatgtttggtacaacacaatggccctcaaatcccaaaataaaggctaaccgtgcaagcaaccccaacctaaacatcgttggctaacactactgtaggtagcaggcaagtaaccaaccaatctaactatgccccttactcctcatcacaacatcaagaagtatgtttgtttatcaaaaagcatatttgcaagtttaaggcatattgccttccattanggatatcttcagcatagtttgcactanaatatagaaaagaccanagtatacaataagtgaatcaagccacaagcactccaagttgagcccacaacaatttaattgcagttaaaataatcattatatacanaatatcattcat

SEQ ID NO: 214056 - DNA, 354 bp, Glycine max
  unsure (1)..(354): unsure at all n locations
ttatgcnagncgttattttaaggtgagggaatgatgaaatatgccttaattctaggtgttctgtttctagattgttatgttttctattatttccgatagaattacatcctttattttagggtggttattgcttagttgttaattatcttgtttgaataccacgtaacattatgtgagcttaatgggctgtttcatcccttcatattgctgtgcattcttgatataataattccctgtggtgagcatctattctcaccaataaaccggtaaaattggtatttctaaactaaataatcgtaaaaaaaacatctaactcacttcccctcaataattcttttatggcttattaaaaat

SEQ ID NO: 214057 - DNA, 389 bp, Glycine max
taatcagaactatcggagtgtgagtggatgtttctaatatatagaggtgatacactttcgcaaactatgaaaaaccatcatcttccaaacgcctccctcacttctacgacgagttaggtccacgcttctttccgaatgccaccactacaatcaaacaaatatcaaacttaaaacctatataacgaaatccccacattcacaagctctactattctaacacaacaaaatctgattcttcagtagaaaatggaaaacagagaaaaactaaggatgttgaacattgtgggtataggcatttgaacagctaatgaaaacaagagaggaagataaagttaccggcggtgacgaatcgagggttgtattgcattctattgtgagcacgtccgcgt

SEQ ID NO: 214058 - DNA, 405 bp, Glycine max
  unsure (1)..(405): unsure at all n locations
gcttgcggattatggggtatttatattgcgnnntaggtggggtcgggcgatggtgcaagtcaactctccacatccacagatcacacataaacccaccatccccagttgcccaccttcactgagctcatgtactcccacgtagcccttatcctcgttcctctcaacaccgggtccccatcaatctctccaagcttccacaacatccaagcaattcaacatcccaaacatcatgaactatcaaaaccaaggaaaacagggcagaggcagaaaactttgcccaacacaaaccaatatcacaacttttctcacttaaaaacctcagtaacattctcctcgttccaattcgttaaccattggatcgactcgaaaattntactggtagtctctagcacataagtctacatt

SEQ ID NO: 214059 - DNA, 436 bp, Glycine max
  unsure (1)..(436): unsure at all n locations
ngagcatggtttccgtctcactcaagcatcgtcacaactctctacttcttctccttcgccaccttacctaggtatgtttcgtctaatcctgtataaatatttgattgcattcatctattgcacacttagtgaagtagacatggctaggctatctcatatttaacgcaatatcccttacccttactgtgttcttgtataagaggtgcaccccgtatggcattggatagttgatcgtgcgggtgcgattaggctaagatctagtagggacctccaatgtgtttaaatccacttctatgagcagcaaactgtatgagaattccatatttttgtgcatgagacttggatatgtgaataactgtatgagcaaaaaactgcatacttaatgttaatatgccctaatacattcttctctaaaaagaatatcacaagcatatgc

SEQ ID NO: 214060 - DNA, 407 bp, Glycine max
  unsure (1)..(407): unsure at all n locations
ggatccttaagtcacctgagcctccaggcgtgaggcgcccagctcgcccattatataggggnnnccccccnccatggnccccaacgattgtccacattcacaaattacgtattacccaccatctcctgttacccacctccatatgaactcaccctcctccacatatcccttatcctcttttctctcaacgctgggtccccatcaatcctcccaagcttacacaacatccatgtaattccacatccaatcatcatggactaccaaaaccaagctannanggggttaaggcacaaactctgcccaaanaactgcccacaatcacagcttttcacatacaaataccccactaacattttcttttgtccaataccatacctctgtacaactcgaaatttactggaatccta

SEQ ID NO: 214061 - DNA, 463 bp, Glycine max
  unsure (1)..(463): unsure at all n locations
tctacgantatcgtaagtcagaaggggatatagatctatcccgagcaagtgaacgatatccttgaaatgccggaaccacgcacagagaagtacgtctggggatttttgggcaggttgaattatatcgcgagatttatctcgcaactcacccctacctgtgagcccatttttatgctgctacgtaagaaccacgcggtcctctggaacagtgactaccaataggctttcaagaagatcaaacagagtctcgcgaatcccccggtgctcatgccacctgtaacaggaagacctcttttcctgtacatgaccgtgttggacgagtctatggggtgcgtgctgggtcagcatgatgattctggtgaaaaggagcaagccatgctctatctgagcaagaagtttaccgcatgtgaaatgaattactcaatgctggaaagggacatgtcgtgcttggatgggcatacat

SEQ ID NO: 214062 - DNA, 384 bp, Glycine max
  unsure (1)..(384): unsure at all n locations
gagacttaagcttaagtcttatttgnnnntttgctcccctatctctaataggtcccttcatattctgtacaatatgacattaacttcttcgtccagctatctttaaggcatgcacagatgtgttggaggctgccattcaaagtgagtctttaggtttttcaatggttcattcttcactaaaatttgttattttgctgctttggtttctatatcatatactttttgtttatgtcaattaagcattatcattcctcaaaaaaattaagcattattgttttttttgtacttcatttcaattgtcattcaagctttacttaatggctggaaatcatggtccatatcctctgtcacatcccaattggttggttgcataattgtggatcg

SEQ ID NO: 214063 - DNA, 450 bp, Glycine max
  unsure (1)..(450): unsure at all n locations
ttctaccaatggactaccttgaataatttctttgatagcccttntgagccttgttntgaagctcactacaagccttaagtgaaaaaccatgatattaccatatccttaaggaattttggagctttggaattgttttgggaataagtgtggggggtatttgtttcattggacaacttgttttgttggctatgcttcatgatgtattttgggccatacttgatgtacattgtatattggttaaatgttggacatgctgaatgaaatgttgtttctcacaggctaaagagtaaaaaaaaaaaaattcaaaataaaaaattcaaaaaaaaaaaatcgaaatanaaaagaacaagaaatgacataaagtgagtgaataagatcttaaatggcacaagaatgatgaaactctnggttcctactcttcatgattaattttatctntacttcttttta

SEQ ID NO: 214064 - DNA, 405 bp, Glycine max
  unsure (1)..(405): unsure at all n locations
cgcatgcctgcttgactaggcgagttgatttacnnnnctttcacttagttattagtcaattcggttaagaatgagaaatcccaaaaagaaaatgtccggttgattttccgctttattttactaaaagatgttttttttattattatattattttttacctctttttttgatttccaacgtggttacggttgacgaacggtcggaattcattttaaccgaagtttacagataatacaattcaaacgatcgctggaaatttattttatttttaggttaagcgagaaatgacttaagtaaaatggcttaagcacgtcaagagggggtataaaaagtaaatgaaatgagaataaaaatacacgaaacacaatgtggaccaccacgggtacatagaatgaatcgaaaagc

SEQ ID NO: 214065 - DNA, 437 bp, Glycine max
  unsure (1)..(437): unsure at all n locations
ngctctanattacattgatgttngtatatatgggaggaggttgtacgccatttttgttttaagagtagtgtcccactggtaaaactaactttccaaatttttgccttcgcaggaaatggccccgaggaagcttgcctcaaagaggtccaggaaggacaaggcagccgaaggaactagttccgctccggagtatgacagtcaccgctttaggagcgttgtacaccagcagcgcttcgaggccatcaagggatggtcgtttctccgggagcgacgcgtccagctcatggacgacgagtatactgatttccaggaggaaatagggcgccgacggtgggcatcactggttactcccatggccaagtttgatccagaaatagtccttgagttttatgccaatgcttggccaacagaggagggcgtgcgtgacatgagatcct

SEQ ID NO: 214066 - DNA, 384 bp, Glycine max
  unsure (1)..(384): unsure at all n locations
gatgagttttttcttcnnncttacgcacaacatagtacacaagagcacgattgattagagaaatatatttctttgcatcagcttgtttgttggaaagacccaacatttctacctattgctgtcattttatttaccttgcattttatagcttttagcataaaagtttagtttaaatttggtttgaaaggatgtttccaaagactcctccgcagcctccatatagggcgtggaagagagacagctcacaagaatgtcttcttcccccgagactatgatcaaatggccctccaccataaatttcaactnttggtggagcgttgaagggactatcccaactgagtgaatccaaggccggtctaacaagcagctataagccggattgat

SEQ ID NO: 214067 - DNA, 423 bp, Glycine max
  unsure (1)..(423): unsure at all n locations
gatattggtaatagattactagtgtatctgaacattgacaatcaaacacaattatgaagaatcatatcctttcataaaaagctttgagtaatcgattacatagttttggtaatcgattactagtgacaagttttgaatataaatcaagagatgtaactcttccaatggttttctcaagattttctcaaggttataactcttccaatggttttcttcaccagacatgaagagcctataaaagcaagaccttgacttgaatctcaataattcttacaatctttttcaacatctttttgaacttcttcttcttncatccttttcaaaagctttctaagttttctggtttcaaaaccttgttctttcacagaanacaaaagtgtgctatatcttntcattctcttctcccctttgccaaaagaattc

SEQ ID NO: 214068 - DNA, 423 bp, Glycine max
  unsure (1)..(423): unsure at all n locations
ggatccttaagtcacctgcagctgcagcttcaagacaacagtaattaatgtatattaattacnnnncactcgcgataattaaggttgattaatggtgatctagattccatagaattggaaaaagggtaattaagtcataagagtttaaagtggagggcattttcataaatgactatataactagtttaaaaatagaattttagtttaactagttggtgactaattaaagtgtctaattatatgatgtagaataattaaaataagttagagttgtaacaccctcaaaaattacaattcaaactaacaaacgaaactctatgttgtgttatctgttcatctatgaacttaatttcagnagntatatgtntttaatcatagaatctcctagacctctccgccccccccgattantaagcttgaaaa

SEQ ID NO: 214069 - DNA, 473 bp, Glycine max
ggcttggctgatgtagctcaggcaatcttggcaaagttctaaggatctacacactggtgaataaggaagagagccttacaatccattttcttggattctttgaacatccttttttgtgcttcacctgcatcttccttcaactcctgaagccctatcatagcagactcaagaacatcctgcattccaaagatcactttcatttgaatgcactatgtattgtagttcttcccatccaggattggtagatgcgttgaaggtccgttcccattcatctctgaaacactgaagcttcagggatcccacactgtgaccaaacaagactctcccaagactgttgaaaccaaaagctcttaataccactattggacctagtgcttacaacaccttcaagctagaaatcacaaactaagtttgaagatgaacccaaaggaaagggaatagtgagcaagagatctaatctactcatatcatag

SEQ ID NO: 214070 - DNA, 429 bp, Glycine max
  unsure (1)..(429): unsure at all n locations
atccttaagtcaccgcngctgccgcctccgaaagtgcggcttttcatctcttcgtttccacnncctggctagcgagcatccgctaagcgcaacactcttgggctaagcgcgaggaagactctggaagaagatgagtcgtacaggttcgctaagcgtactgcttcatctcactaagcgcactgcttcagttcacccgttaagcgagaaaggcacactaagccaaaaatcactaatgtgcgctaagcggtccatacgtgcactaagcgcacgagcacgaacaaggccacctatttaagcctaaaatcagattttgtgaagagaagttggactggaatttagagctttgcatgtctagggtttctagagagagaaaggtccaacttccagagagctttgagagattttgctgtgtgatgatctgcagagact

SEQ ID NO: 214071 - DNA, 477 bp, Glycine max
  unsure (1)..(477): unsure at all n locations
atcacgtgaccttgatactcagctgttcttatgctgtgccaactccttgcatagggattattctcataattggtttggtgaattggctgcaagtaaatagggaagttctagataaataaaacaggccaaacacaaatttttgtttgatgaggaagagcttatatgactattaaaggatgaaatcaccatgattgcaatntaatacatggcaagggacctattaaactatataatgtccaatccactgaaaaaaaaaaaaggatcagtaagggaaggatggagggtgagaccaagaacccatgataatatgacctgcaaaatgtctgtctcttgttcgcggggcctttgacatgagatcttcagcagagaagttatctggctttcatttagcccttttgtatatctctggcctccgactatcttgcatgcctgngacaagattcacatgagttctcgatggaaagctagaatcaagta

SEQ ID NO: 214072 - DNA, 421 bp, Glycine max
  unsure (1)..(421): unsure at all n locations
ggaccttaagcacctgagctgagctttcgattctcttcgcagaaaagatttttnnnctgaaaaaggcaaatttaatcatcctgcttgggcgaatgagaaaactggggcaaatgaagaagatgaggatgagggagaaacccatgctgtgactgccattcctatacggccaagtttcccaccaacccaacaatgtcattactcagccaataacaaaacctctccttacccaccacccagttatccacaaaggccatccctaaatcaaccacaaagcctgtctaccgcacttccaatgacgaataccacttttagcacagaccaaaacaccaaccaagaaatgaattntgcagcgaaaaggcctgtaggttcaccccaaattccggtgtcatatgctaaacttactcccatatctacttgatac

SEQ ID NO: 214073 - DNA, 443 bp, Glycine max
  unsure (1)..(443): unsure at all n locations
tgtgagacanaaggacctatgatcatctgaatctttacactatcagcttagatacaaatccatattaggtcccaccacccaaaagtgccatagacatgaaagcatttcaaagggacaatgacaaagaataacacagtaaaatcaaattatttgtaacataaacctgtgggagaattggtttcacaaatctttcccagtttttatgtttatcaagtacacatattgataggctcatgaaggccatgacagaaaaataaaggaaaataagccaaagtagttagagtagatatagaagtagttaggtttggtttaatattagttagttactgaattagtttggtggctagcttaaatagcagaagggaagtataagatcactcattctgcattggtacttagtgtacttaccaaaatccagagccaggacatgtcaaggtagatgt

SEQ ID NO: 214074 - DNA, 468 bp, Glycine max
  unsure (1)..(468): unsure at all n locations
tctgactattcagaatcagatattgcacaaactgagctatgtctatgtgacagaatatggttatggcaagcgattggactcgctggttgtggaggtaaacctgcagtgagagtagagagagtgcaagtgaagcagaatagaacaatagatagatgaaagaagcatgaatactcgatggtgagtgcaaaattctgctgctgaattgcaaagatagtcatgaactcacggtggatggagcttgaatagtttactatgtgaggaagacaaacaaatttgcgaaatttggatgaaacttgaagatgtagtaacatatgagagagaattgttgggagagatgagaaagaaatgctctttaattatataaataggcttaacgattgaatgactgtagtatccttaataaataaatttaaatatcaaagaaatatatttttttggcctaaacattntggtgtaggttgtaacata

SEQ ID NO: 214075 - DNA, 414 bp, Glycine max
  unsure (1)..(414): unsure at all n locations
cccgngatcctctnagtcacctgacgcatgcacgcttcagagcaaaagttttttttttgcnnnctctcccctcctctttggtgattgcccttcgatgagataaattgcatgtccaaaaaccattagaattctacaaaaaacatagaaaaatgagaggaaaatattagatccttggcattttttgctttcacacaatgctctttctggttgtacaatctcatcaaccataagagatcaatatttaaaaaaccaataaagtttgtcaaagagaatttcaaagttcatttgggctcaatcgtgtatatagagaacataagttgatacctcactagagagagagaattctcttactaactcagtttaacaaaccctacaacacattggttttctctcatattgaaaatcttaaattac

SEQ ID NO: 214076 - DNA, 459 bp, Glycine max
tactcagctttcaatcattatatggagcgcgagggttcaattttgttcatgcattattatacacgttttcatttacattttatacccccttttgacgtgcttaagccatttatttaagtcatttctcgcctaatctaaaaataaaatacattaccaccgatcgtttgaattgtatcatccgttactttcgtttgatatgaattctgaccgtgtggtcgtgccgtaaccacgttggatataaaaatagaggtaaaataataatataaatcaaaaaatgtcctttagtaaaatagagcgaaaaaatcaatcggacgttttctctttgggatttctcattcttaattgaattgactaataaccaaagtgaaactaggcttaaatctactcgcctagtcaagcttcgttacaaatataggtcttgaaagttcatcatttcagttctactcctataacagatca

SEQ ID NO: 214077 - DNA, 425 bp, Glycine max
  unsure (1)..(425): unsure at all n locations
tcgacccggatccttaagcacctgcgcatccagcttccccgcaatggatttatttgataannntcgatacccctttgagcctatgttcccctttctttgatttgaagctcattacaagccttaagtgaaaaaccatgataagcttacccttaaggaattttggagctttggaatttttttgggaataagagtagggggatatgtttcattggaagatatgattattggccatgcttaatgttgtattttggccatgcttgatgtatatatatattgcctagntcttgctttaatcttcaaattcgtactgttttaatagaattattttaataacagagaacaagaatataagtgaagttgaataaatgaggtcttgtatgcgaacttgattaggaagcctggtgattttgtgatattagaaggtt

SEQ ID NO: 214078 - DNA, 443 bp, Glycine max
  unsure (1)..(443): unsure at all n locations
aaactagcttaccttcaggacgtttcacctttcattacattatgatattatggaagcaaaatncacattacacagtggtagggatgtctccttcacctctaggaacctaaaaatcactctaaaacctaaaatcctcttgaaagctgatgtttatggtgctcccttgccctgttgcgtctctcatgtatatctctattctttcacaagctaaagactctcaagcatctcaagcatatccctatgtttcgccaacttcagcttttaagggatttatgtccttgaaggctcgcttaacgctattttcgcgctgagcgcgagttagtgaaatttcgctgatcgagctgggcacacttagcgtgagacaagacaaactactcgttgagcgagctgatgacgcgttgagcgcgtatatgcatggagaatcttctccatattctcctaac

SEQ ID NO: 214079 - DNA, 258 bp, Glycine max
ataatggctggatcactcacaatcattttatgccttggcctgaaacactaatattaccagagaatgagaaggaacgcttattaaacatctctgcatctagccactatgatgtaatgttatggtacctgtcgacattggcttctaaacatagtctcatatacaatggctttaaataacacaggaggaagaccatcctgaatctgtctacttgtcaaataaaatatactcacactattctaggactgaattgataagcta

SEQ ID NO: 214080 - DNA, 410 bp, Glycine max
  unsure (1)..(410): unsure at all n locations
gatcttaatgactgagcatgcagcttgcgtagaacttgtctttgtaattctcannnnggcagtgaaaaatacttgtaacttttgatatgttagtagaacttggtgggttgctaagaattggatgtagtctttgtggttgaaacgaactaatataaatttttgagtgtttttggtttattgttttccttagtgtttaactgacaaagagtttgagtttgtttttagatcttctatctattttatgatcgtttaattaatttttttcattttatatgttatatgttcttattaaaaatcatatcagacaataaaatgtatctatttttagaaaaaattaaatttctaaaaacacaattcaacccccattcttgtgttatttacctataatattgatgcatctatcttcaatg

SEQ ID NO: 214081 - DNA, 434 bp, Glycine max
  unsure (1)..(434): unsure at all n locations
ntatccgcanaagtcactagaaatcgttgtatggtccaacgccttatacggtcctctgtgcttttatcggttaacatggaccgttcaaaagcataaaatcaacacataactttaccacttttgcaagaactacgtaggtctgagttcctcaccacaaatcgaggatacgtaggagcaaaagccccgttttggtcgaccaccccttttaaaaaaaaaaacaagagatcgttaatggtccaacaccttaacgtttctcttgtttcacaaccaagagatcattaatggtccaatgccttaacatttctctcctttcaaaagaatcaaaagatcgtttaatggtccaacaccttaaacgactnttgttcggtcaaaatatatctggcgaaaaaagataaaaacaacttaaccaacgtctagttctgaaagaactacgt

SEQ ID NO: 214082 - DNA, 445 bp, Glycine max
  unsure (1)..(445): unsure at all n locations
ntattcaagacanagaaatcaaagatatttatgatggatgatcaagacagcctctatagtcttaggaagagtatagttaataggaagggaattccaattgaagtatcaaaaggtttggccaagaaatttaagttaaaaagtctttttcaagaaatttactctctcgtaattgattaccagaggatgtaatcgattaccagtggccaaaactgatttacaatagctattaaaatttgaattcaaaatttgcactgtgtaattgattacacatatatggtaatcgattaccagcagttattgaacgttgtaattcaaattttaaagcttgtaatcgattacacaaatactgtaatcgattaccagagcatattttcagaaaatattcttaacagccacatctttttatttggttctngaatggctatcaaaggcctatatacatgtg

SEQ ID NO: 214083 - DNA, 271 bp, Glycine max
tgaatatatgactactatatagatgatgcattgcatgagttacataaggagcatgctgtgctcatcagaatcagcatgagtatacacggtctgaaatcgcaaacgtgtactttgtgaaaatgagaaactcagagaaatcaccttggcaacatccgtgtaaaaccttacaatggaagatggcgacaacatgggcacgtgactaaagctagatggctgagacatggacggctgtcacacatgctatagttggagaacgaggattatcgctact

SEQ ID NO: 214084 - DNA, 391 bp, Glycine max
  unsure (1)..(391): unsure at all n locations
gacctataaaactaagcttaatagacgtggagcttgatgcgatatagacttcttctgcatgcgcctaatagcatgagcgagttacatatggcgcattactctgcacagagagaataaggaccacaaagatctatcgaggaagtataccttgctagagccgccttgtgcatagagctgactgtgaacgtacaattcgaatacaacgttaacgacatatgtcaaaaggaataaagaatgtgcggacaggacaatgtaggacttaactcttgtgcactattgcacaaattgcatactgaaccatatatggacgttactattagatgattactntcagctcttgaggattgagaagctcttgctaaacgtgtagcttaagcatgaaaggttgaca

SEQ ID NO: 214085 - DNA, 373 bp, Glycine max
  unsure (1)..(373): unsure at all n locations
cagcttgatcaaaacaattatttatcnnnnaatccactcaaatcatacaattgctcattcaaatcattctcaaacactcatttcatacaaaacaatccactgcatatcattttcaaccaattcactgttcaaacaagctttttgtacaagcaaacaactcaaagtactgaaatttaaataacttggaatttaaagaactgaaacataaaaactaaaatttaaatgattgaacataaatcataaaataactgaaaataaactaaaatgttcaaaatagaagggctcaggaggagtgagctcatcctccccctttactgctactgctggctcctctggttcaagctcctgngctgcagaagccccaccccttcca

SEQ ID NO: 214086 - DNA, 422 bp, Glycine max
  unsure (1)..(422): unsure at all n locations
taaggctgaagtaaccagctcgcctgggcgagcaaggttacttctggaggaaacaagcagctcacctgngcgagctgctgtgcaacctccacccttcatttcctataaataggcatgagggggctgaggagaagggcccaacatcatatattgagagattttgagtaaaattagtgagaagaaggagaaagaagaagaaaaaatgaggctgaggcgcttctgaattcattctatgcacccttaggggtccactcgtgcttttcgcatctttatcttcattcttctaccatcagtaatcattgtaatataaaaattcaaccaatcatttactntgcaagtcctctnttaatgagtttgaaagtaaccaagagaaaccaatgttaaaatcaatacataaacaagctttcatccataaaaatcgc

SEQ ID NO: 214087 - DNA, 337 bp, Glycine max
ctgataatgctcttttttttaaaaaaaaactcgcaccaatcaaaatgattatatgaactattactatcatgatgattatgtacaacacaataaaggaatgtgtatgcttaagaggctcaaggtctaaggccaattctcccaaatgcttaagctgttatgttaggctgagtttcatgaatggctttatatcagtaacacacaccctcaaacaaatacatttgagattatagaatggtgcacaggatcactttacctcatgctgaaattcaactttattttaaaaaatgaggccagcaaaatcacaacttttatgtcctaaccacttcagtcatttgga

SEQ ID NO: 214088 - DNA, 258 bp, Glycine max
tctactattttcagccggcgagataatgttctatcgaatgaaccctgtcattgacgcgactcatcctctggtgatattctcatgaatgactttctattacatctacctgttatatcattcatggatgggagagctcatatgcgtcataatggatatgaactatcgtcgtgatccatattattatcccatcctgtactactcctagctcgtataggctacaccccagctagcatcacgagtcagtaattcctgtatgct

SEQ ID NO: 214089 - DNA, 410 bp, Glycine max
  unsure (1)..(410): unsure at all n locations
cgctttggatgtccgagagttctagatttatatgtcnnncttcccagagtttgagagattttattgtgtgaagatctgcanagaccagagcttgaagaggaagtcatcctgagagcttgagatgagtttgtgagtgattgtgaggtcctagaggtgcacgagacatccccactacttgtatttctgcaatctttcatctttctcttctctttgttgtaaatgaagcttcccagctatggaaagcaaagtcctctgttggttctttcttgtaggtacttgatgcacatatctttttatctatttaatgatgttttgtgtggtcactgggctattagaactttatgctaccatgctctttgcttgatcacgtagctgcatgtgttttcatgatcattcacaatgggaactat

SEQ ID NO: 214090 - DNA, 388 bp, Glycine max
caccggctccccttaccttactgtactggaggctgttgcggtggctttatcctctatggtttattggagctttaacatgacctccgagatggaaaccatttgatcttttaaggccgatagatcagccttcatctgatcctgcacgcgctcttcattatccattattctggatcgagtgttataggggtgccctggtgtttacttagttatgatgaatgttctaaagaattaaacaacggtgagtatgccaccaaaacatgagtatgcatatggatgatcggagcactttgatccacccacagattttagatacgtaatgagtccagaactctcatttataaatgaacatgctttatctgccaaatatacaacgtgtacaaaaacctac

SEQ ID NO: 214091 - DNA, 416 bp, Glycine max
cgatccttaagtcacctgcggctgcaccctcccgcttaatctaatttggtaattttattcttcgcccctatatttaaaaaaatatcaatgacttaatgagaattcaatcataatatttaaatagaaaatataattccttttgctaggtgtagagataaaaataagaggtgccacagtgcatagtaatcatattatcttaatttaaattgtaatacgaataaaataatatattgagttatgaacaagcatagtaataaaattatgtttcttagccacagtgcctcccagttcaatcacacaaacatctgcagggcccttctttctatccacggggaatcacaacaccctcaattcaatctttaataacatcagtgattggcgagagcacctattttaaaacaccaatacctcatcaa

SEQ ID NO: 214092 - DNA, 429 bp, Glycine max
  unsure (1)..(429): unsure at all n locations
catccttntcaattnttctctttcatcaacaagggttttatatcattaattgtttacaatacagcatcccttcgagacagctttattggataagatacatgcatagtaggcttaattatactatttatcactcaactataattattttgtgaattctatcgtaccattttttgtgtacttttcaccatcatattcttcaatttttacatatattatccatccattaaatgagtaatggcattcttacgtgtctttaaaaaattaaataatataaaacaaaacgatgttgtttgattacaaaatcacgccgttttatgacagatgataacaacaaatgttaaagacttaaatatactttcgatccctatatataattttgctattatgcaatttggtccatataaaaaaatatcgcacatttaatcctgt

SEQ ID NO: 214093 - DNA, 424 bp, Glycine max
  unsure (1)..(424): unsure at all n locations
cccttacaagaacaaccttgcctcaatcatttncaatatccnnncgaacttagaagcatcaacaagaatcaagccaaggctattgtgcaagcaatcaatggggcaaaacacattatgatgatggatggctcanattctcacaaaggtaaactcatcactttcaaattgagctttcaaaactatcatgacatgtagaggagaatcaaggatttcaagtcacaaaatgttaagaacttttattttcaaaacaattacccatttcttgaacatatcctataattcaaagaaaaacatgcaaagtcgtacatgcacacaaaattgnacccaaatattaaactataaatccgacgaaactaacaacattaacaaattagcacaacttacaaattaacaaaaccaacaaaactagctgtcataccctaat

SEQ ID NO: 214094 - DNA, 467 bp, Glycine max
  unsure (1)..(467): unsure at all n locations
tctagccgaatggacttaccttgacatagttcctgtgatatccctcttgagccccgattccctttactgcgattgaagctcactacanaccttaagtgagaaaccgtgatatcaccatatccttaacgaatactggagctttggaattgttttaagaataactgtggggggttattgtttcattggataacatgttttggtggccatgcttcatgatatattatgagccatacctgatgtacattgcatattggttaaatgttggacatgctgaatgagacgttgcttctcaaaggctgcagagtaattaccaaaaaaaatatcgaaaagaaaaagataagcagctaagttgagtgaataagatcttaanaatgacaaaagaatgatgagactcttggctctactctttacgtttaaagtttatctttacttctctgtatcttcttacttattctaagatgcactta

SEQ ID NO: 214095 - DNA, 474 bp, Glycine max
  unsure (1)..(474): unsure at all n locations
atatagactnntagagcttgatccgttgagagatatcatgtgccattgtctaatagcttgagcattttacataaggccattactatacagagaaagtgtgggaaccacaaacactttttgtagcatatatttagagaagtacaacctgctagtgtcatcttgtgctcagagctgactttcagtgcacaaatcaaatgtaatgttaacaacatatgacaaaaataattaagaatgtcaagacaagataatttaaatcttcccttttgtgtgctatggtacgaattgcttactaaacctatgaacgttactttcttgataattattttcagtacttgaggatcgagtaactgttccgttgctttcgtactatgagccaagtgctaaagcacttgtattcttaaggttggacactgaggcagtatcatccaatgactgatactttagccatcgttcagagcctttctattcatgctt

SEQ ID NO: 214096 - DNA, 421 bp, Glycine max
  unsure (1)..(421): unsure at all n locations
ntgcggcatcaagcttccgatctattatgcgcttgaattgcnnnncagttaaagttatgaccattaaaatttctcaagagcttccgttgtttaattccgtgcgtctcgatatattatgtgcctgaatcggacctctgagctaaaagttatgaccattngaatttctcgagagcttccgttgttcaatttcatgcgtctcgatatattatgtgcctgaatcggacctccgagttaaaagttatgaccatttgaatttcttgagagcttccgttgttcaatttcgagcgtctcgatatattatgttcctgaatcggacctccgagtgactatgtatgaccatttgaattgctcaacagctttccttgttcaatttggaagctttttatatattattgcgcctgaatcggacctccgagtaaaa

SEQ ID NO: 214097 - DNA, 460 bp, Glycine max
  unsure (1)..(460): unsure at all n locations
nttgagaaattaaatggtcatttctgtacaatcggatgtccgatcaggcgcatcacatatagagacgctcgaaattgaacaacggaagctctcgagatattcaaatggtcataacttttaactcggaggtccgattcaggcacataatatatcgagacgcccgatattgaacaacggaagctcttgagaaattcaaatggtcattacttttcactcggaggtccgattcgagcgcatcacatatagacacgctcgcagttgaacaatggaagctgtcgacatattcaaatggccataacttttaactcggaggtctgattcagacacataatatatcgagacgccgaaaattgaacaacggaagctcttgagaaattcaaatggtcattacttttaactcggaggtccgattcatgcgcatcacatatagagacgctaacaatcgaacaacggaagctgt

SEQ ID NO: 214098 - DNA, 336 bp, Glycine max
  unsure (1)..(336): unsure at all n locations
ttaagcaccgcccccccccccccccccccagtggatttttngatgcnnnagactcgcaagaaaatacatgtttttaagaatgagctgtatgctttgcaagctggtatctatgacagaattctgaatcaattctgagtggcgctcataaactctctccacgagcaattgcggcatgctgctaatgcctatgaatgaacgctgaaacaaaaagctatactgaaatggttaaaggaaagggacacaaattcaacttactttctcaagctgatatatcatacaagaagacataatgctattcaaggattgatcattgatggggaatgggcccaggaccct

SEQ ID NO: 214099 - DNA, 381 bp, Glycine max
ctgaattcggacctttaaactccgctatcacacagaaggcaggtggtttaactttatcgagaacctgcctaaaattcttgatattacaaagtgatgattaataatttatattaacatattttttttataaaaatctttgtgaatttatttacatttgactaatgtgtaaagatattatgcttataatttttatggtctataccatattatttcatatatctacaatttagggtagttatcaatagaaatactactgtatcgttcatacataacctaatcaccatatacattactgggtgaaatatatccaaagccatccatatgcaagtaacttacactatacaataaagaataactaactcttaaatattgctaactata

SEQ ID NO: 214100 - DNA, 254 bp, Glycine max
  unsure (1)..(254): unsure at all n locations
tgcccactcccgctttgcgccgacctgattgtttagatttcgcgcnccacatcatgtgaattaagggctgcacctaattgggtcactctcttacaaattgatgaagatgctttgagcccaacttgaagaatcactttgggaagcctaatttacaagacaagaagcattcatgggttgagttgatcaattatggtgggctattaatattgttggacaagtgacctcaataacttaagaggagggggggggggggg

SEQ ID NO: 214101 - DNA, 421 bp, Glycine max
  unsure (1)..(421): unsure at all n locations
ntaaccaattcanggtgtgataccctaatttcatccgtttactattgctcgacggcatgcaacctttgattgaccgcttctagtacttatcaccctctgttgcacaatatgtgaagtcccgagatgcgccggaaatcaaaaggaatcatggttacgcgacccatgaaattccataatgtggcggaaaccaaaaggaagtattgttacgcaatccgtgagtttacataacttgttcgaaagctaaaaaagagttaatacatgatctgtaaggttacgtactcttacaaaatgaaaataagtattgtcacgaaattggtaaagtctcgtatcgttaccgaataagaatcaccaaaaaaagaaagggggtgtatatataaaaagggtgcaatagcaatacgcccacatggccattcaattcttc

SEQ ID NO: 214102 - DNA, 343 bp, Glycine max
  unsure (1)..(343): unsure at all n locations
ttaaggagtttggggtggggccncggggtggtatcctttntatgtatctaaaatcatatcaaatggccttaatttgtggtccaagctttaagtttcttaaattagcacaaacaatatttaatacaaaattatcactgcaccaaaacagatatgacatgttccgccacagtattcaccacatattctaattgaccctaaaaattatgggaccaattaaatagaacaaacgacatctgaaacttaattactgtaaaagatagatcctaattcgttatacgttgttctcaccaaagctatttaaacaaaacaaaccacattaaaattcttaataataatccttcac

SEQ ID NO: 214103 - DNA, 464 bp, Glycine max
acactatccaataatcaagcttatcttctcttctctcatatcccatcatgttatccaatttatatttgaactctctactatccattctctcaaactcgtgaaacaccaaaggccacaggtgatcacaccaaaattttcaacacaagcattgatgtaatttgaacgccatgttaattacaaaaaacatggatctcatattcattttctaaacgaccaagtgaaatatagatgttgcacgatactttttatgtctgggaaaattgttagaaagaaaattttacttggagaaacataatataattctttgtgtaatttttacatttctagataaagagttgtgttagcttcacactataaaaagtataattctttttggtttgggataggtagaaaatataatttttaacttgctcaactgaatgctcctgtatgctactagtaaatttataatttatcaaatttct

SEQ ID NO: 214104 - DNA, 424 bp, Glycine max
  unsure (1)..(424): unsure at all n locations
ggatccttanatcacctgccgcatgcgaccttcataagtgttataaccannnnctctcccctacgtgctccttaaacctacattaatatttttgctttaccttctcttccattgttgtttcttcattttttcaccatgtatctcctcacatgtcttgtgctaaatgttgttaacatgattctttatagtttccaccgattaaacttgctatacaagctagatttgattttctatggatcaaatttcttgttcttgttcttaaaccatgaattgtgttgagtttacgttcctttgagttttgccttgttattttttgtggctgacacctaaaccataaaattcttacaaaaatattataagagaaaaaaacctaaaaattctatagtgactttgtcacctattgtagttttgcataaaatcatgt

SEQ ID NO: 214105 - DNA, 462 bp, Glycine max
  unsure (1)..(462): unsure at all n locations
ntcttgagagaatctccttgagaagcttctttgggaattacttcttgagaagctagagcttagctacatacaccctctcataactaagctcacctccttgagaaactggcttaagaagattcctaangaagttatatcttagctacacacacctctctaatagctaagttcacctccttgagatgagaagctagagcttagctatacaccccctataatagctaagctcacccctatgccaaaaaacatgaaaatgcaaaaaaaattcttactacaaagattactcaaattgcctcgaaatacaaggctaaaaccctatactactagaatggccaanatacaaggcccanacgaaggaataacctattctaatatttacaaagagaagcgggctcgtacttagtccatgggcttgaaatctaccctaaggctcatgagaaccctanggccttcccttggatc

SEQ ID NO: 214106 - DNA, 448 bp, Glycine max
  unsure (1)..(448): unsure at all n locations
ctcgtacccgggatcctcttagtgacctgacgcatgccggctttgaacaatatacttgtcttcgnnnactgtcgtaggcttggcggccacgctcaactagacatggtaagaaaacccgtacccatgggtacccgcccgaatctgtcccgactttgatgggtaatacccgagttgatcaggaataagttcgggttcgggttttccccgataaccaaaagtcgggtacgggtacgggtatgagattattagacccgtcccgaccccgaacccgaacccgccccgtcacttaaaatctttagaatttttgcataatttaatcaaaagacataatttttattactagttaattttattntagaatttttacataatttaatattattttcttaactatttatgtagacacacacgttataataaatttattgatatataagcagttaaaaat

SEQ ID NO: 214107 - DNA, 407 bp, Glycine max
tataatagtttcataacatgcacggatgcactaatgcttcaaccgtagatatgtgacttgaagcatgaaggtaagcacgttaaactcattgttgcaatcttgcaaatgtccgagacacttcaaacagattctctctcaaacgatcctcacaggcctcatcaccgacccctacgccgcaagcagactcatcaacttctcttcccactccactactctcgttcccttccactattccctccgcatcttcaaccacctccgcaaccccaacaccttcacatggaacaccatcatgcgcgcccacttgtacctccaaaactccccccaccaagccctcttgcattacaagctcttccttgcgagccacgcaaagcccgatagctacacttacccgatcctcctccaatgct

SEQ ID NO: 214108 - DNA, 419 bp, Glycine max
  unsure (1)..(419): unsure at all n locations
agcttgacaagacgtacacactggtgtctttttatcannncaaatacggaaatctactctaaagatacatctaataatacccataattataataattaggattaggtaaaataaaataaaaaacattattaggtgctcttgaactattatatttcgattagttttcacgtgatatataattaagagttattgattctttttttagtaacttaaaaaatttcttctgtaaaaaaataacttaaattttttaaatgtgtcatataaaaagattgattcatatcatgaatacgtgggtggataaagatcacctaataaatttttctattcaagagtagtgagaaaatttaatttaagtgacctataacgtcttagttataagttttgtacttaattatcccaccaaaaatgaatcttatttt

SEQ ID NO: 214109 - DNA, 423 bp, Glycine max
atgggtccaaatattcgaccattccaacgttgcccacatcttctatgtatgaaagcttctcggcataccccatagacatggttgattggtgactcaatgtgctgttatgacagatattctctccaagtccctcactttctttctctctcagaatacagaagaaattgagaagaagtgtgttatgttcttcaaacacagagagagagaaagagaaacatttgtctcttttaaggagaccccaaaacaccaatgtactctcatacactgtatcatccactggaacattatgaatcactagcaaatcacacaacatttaattgcaacaactcattatctaaagatacgactatacttttttaatgattcttagaagtatttacctttaatattagactagatctattgaggtgattcacatgatac

SEQ ID NO: 214110 - DNA, 444 bp, Glycine max
  unsure (1)..(444): unsure at all n locations
ggatccttaatcacctgagggatgaacccttactaaggcttcttatttattctgatttatagcnncgattatatgctggaatttgaaaaagaggcacatcttcccttaaagtttgttgagaagggccgtgctttattaagcaaaattccttgggagtatcctttatcataattaattcttcaaagttcaaatacattaattntacaatggtttcttgaaattggttacacatttacgtttcaatgggtaattttttttctttatttggtgaatntgaattcttgcctcacgaagaacatggtggtatcttattccaggaataaaatccaagatagtaaactaactctcaaagagcttgaaactacgcacaacaactatatgaaaagacaagagggtttgatgacacgggttttcaaattgaattagttcgcatgattatattgc

SEQ ID NO: 214111 - DNA, 441 bp, Glycine max
  unsure (1)..(441): unsure at all n locations
tcgactcattctatgtacccgtggtggtccacattgtgtattgtgtatttctattctcgtttcatttactttttataccccctcttgacgtgcttaagccattttacttaagtcatttctcgcttaacctaaaaataaaataaatttccaccgatcgtttgaattgtattatccgttagcttcggttaaaatgaattccaaccgttcggtcgtgccgtaaccacgttggaaatcaaaaaagaggtaagaatataatataataatcaaaaaacgtcttttaataaaataaagcggaaaatcaatcggatgctttctctntgggatttctcattcttaattgaattgactaataactaaagtgaaactaaggctaanatcaactcgcctagtcaagctcgtccacaaaaatanggtttgaatattaatcattaaatttcttac

SEQ ID NO: 214112 - DNA, 312 bp, Glycine max
ttattgactgattattgagaggctcctgtctacgttggtgtgtatgcttatgtcagaccatgactgcgtgctgattgcaaactcaaatgattgttaatcccttcgactcttcttgctttagcatgatcctcatcttgtacctacagactaccatgtcaattgatgacatacggcttactaaaatgctctgatcgataacgtctttaaacacgccgatttcgaactataggcccaatcggtgatagattaaaggctactagtgtaatgacgatacctatccattgtaatcgatgtaagtgcaaatggataacg

SEQ ID NO: 214113 - DNA, 432 bp, Glycine max
  unsure (1)..(432): unsure at all n locations
accgggatccttaatcacctgcgcatcccctcgacatcgtaggaatatttcttcacnnnnctgaataatgcggatatgataaaatcacctaaattgataaaaaataattataatatcaaaatgtggatatgctacgtcctaataacattaccacattttaataacttatcttttaatcattttatcttatcttttctttatctttatcttaatctttaattttcctatcttttacttttcttatcctatcttttgttgctcatcttctatttttatctttaaaatcttttatcttttctcctgtatctttctctatctatcattcatatctcttgcttgtaaattagaattgcattaatatgagtacaaacaaagtccttgtagattcgacactcagacttncgaatactttactacttgtgacaaatttga

SEQ ID NO: 214114 - DNA, 400 bp, Glycine max
caaactctttggctggatcataatgttgcataagttacctacggaccttacggtgcaacatggtctcatgcactccatatctcggacggtaactattcacttatttcactatcaaacattcttaacacagctattagttgcaacacaaagaacatgtgcatttccatagcttagaagtcgatagagataatataaacaacaaaactaagattaagatgaacgacgtaagaagaaaacaattgtgagatccataacttccctgtcatgtttccttttaccgcgtagctaatattaatattttattaacccttgcacttgaagtatgctatgaagtctatagttggccacatggagcactctaaagttctggtcaatagtgattaattgcttattcccctct

SEQ ID NO: 214115 - DNA, 425 bp, Glycine max
  unsure (1)..(425): unsure at all n locations
ttgtcgcatcacgcttacgactgaataagagtgtatttttatnnncgatgatacaaaggtgatgacaaaaagcttaaaggtcaatcaaagaatgagttcaagatgttcaagatagaatcaagaacacttcaagattcaagaggaaagttgatttcaagaatcaagaatcaagattcaaggatcaagcttccaagaatcaagatcaaaattcaagactcaagattcaagaatcaagagaagacttaattaagattagtatgaaaaagttttttcaaaaactgagtagcacatggatttttctcaaaacatgtttaccaaagagtttttactctctggtaatctattaccactggtaatagattaccagtagcaatatggatttgaaaaagtttcaaatgaatttacaacgctccaaattgattcaa

SEQ ID NO: 214116 - DNA, 470 bp, Glycine max
ggcttctacaatgtacatcactggtcgcaactacacatgtctcgtaaacccaaggcccgcccttggtgaatctcacaagttggttctccaaatgcaaaacctaaggtacacccttggagagtcctatagggtcacatattacatctccagtatgtgccgctccacgagtgagacatatgcaagagcacgacattacgtctctaggacgtaccattccatgagtgacatgtatgtaagagctcaacattaagtctccaagatgtgccactccatgagtgacacatatgcaagagcacaacattacgtctccagtatgtgccactccacgagtgacacgtatgcaagaacacgacattacgtctctagtacgtgccacttcacaagtgcacatatgcaagagcatgacattacgtctctagtacataccactccacgagtgacacgtatgtatgagcacgacattatgtctt

SEQ ID NO: 214117 - DNA, 444 bp, Glycine max
  unsure (1)..(444): unsure at all n locations
gaccgggatcttaagtgactgaccatcccgcttccggccatggtcagttctagtgtcacgnnncccactgtgcatttcaaaagctgaaagacgccattaccacagctcctgtgctcacgctgcttgacttcacgattccctttgttgtggagactgatgcatcgaacataggtatgggtgtcgttctgtcacagggaggccaccccattgcttttttcagcaagcaattctgcccgagaatggccaatgcgtccacttacgtcagagagttggcagccataaccgccgctgtgaagaagtggcggcagtatttactgggccacaaattcaccatcttgacaaatcataggagcttgggagagctcatgagccaagccattcaaactccagaacaacatcattatctcgtgaggttattgggattcgattacacgatccaatatc

SEQ ID NO: 214118 - DNA, 439 bp, Glycine max
  unsure (1)..(439): unsure at all n locations
tcactagatggatgtaaagaccacctttcttaatgatgacttagaggaagaggtttatatgaaccaacctgaagggtttgtttctactggaaaggaaaacatggtgtctaaattaaagaagtcaatatatgaactaaaacaggcatttagacagtggtatcttaagtttaatgatactattatgtcgtatggttntgtagagaacaccgttgatcggtgtatctatatgaaggtcagtatgagcaaatttgtaattttagttttatatgttgatattttgattgttgctaatgatattggtatgttacatgatgtatagaagtatctctctaataactttgatatgaaagtcatgggtgaggcatcttatgtgatangaatggaaatattccttgatagatcacaatgattggtgggattgtctcagaaatgatacatc

SEQ ID NO: 214119 - DNA, 425 bp, Glycine max
  unsure (1)..(425): unsure at all n locations
nnctgaccccttcacgcttggccgataaatagaaattatgtgtctagnnntcatctggcaagaattgcattgtacattgagttgcagtgtaatttgtctttgtgtgagtagactatgtgtgaggtttactccgtgtccatatatccctagggaaattatcacaataaactaggaacttagaacattaatctagacatttaagataggatttatcagttttggcaaaagcattttttttaccatttctgcttatgtttactttggccatttttggttaaaatttcagaaggcagaatgcacataaatagcatgacttgacacgttcaccatggctttccattagtcatttactatttcaattaagctcgtcaacttaagtctaacaaagtgtcatttggacaaagccttaaacctcaccttcatgt

SEQ ID NO: 214120 - DNA, 463 bp, Glycine max
  unsure (1)..(463): unsure at all n locations
taactntggttatttccttgaccgagattcacatgtggtaacagctgagcaagaagaaggggatgagaatgcccgaggtgctaataaaaaatctgcacctaagcctgcaccaaaacatgatattccagagaatcttactaatgcaggagaagctgacaggagtgattctgaggaatctgatgactcagtctgaccaaatcaactaccaaaagaatatttatatcacaatgatgaaatgaaagcctgtatagtataactttcgcagttaaatttgaattccatccagccttaaaatctcacctacagtagatattccattgtaggtgatctgtatacactgttttgtattttacaaatcgtgcattttctcgctatcttttacaaatcgtgcattntcttgtctaatganttgtggatacatttntgatagtaacctttgagccctaaatttccccggatatat

SEQ ID NO: 214121 - DNA, 348 bp, Glycine max
  unsure (1)..(348): unsure at all n locations
aatcctggtgatagagaggagcncctactcgatgtctgattgagttccgtaatatattgagacgctcgaaattgaataccgaagctctgagcaaattctaaccacaataactttttactccgatgtccgattgggtctcgtaatatatcggaacgctcgaaattgaatatataagctctgagcaaatacaaacgacaataacttttttttcggatgtctgattgagtcccataatatattcgaacgctcgaaattgaatgtcgaactttgagccaattacaccacaataacttttactctgatgctgattgagtccctaaatattcagacgcccgaaatgaaaaccaa

SEQ ID NO: 214122 - DNA, 408 bp, Glycine max
  unsure (1)..(408): unsure at all n locations
nggtgtanagctngactgtgtaagagccatatgtgatattgaacaatacttgtagctcgtgtgaagttagtgaaacttggtggttttccaagaattgaacgtagtctctgtagtagagactaaccaatataaagcttcttgcgcttgatctttcttgattttctctaagctttatttgactaaagggtgcgaatttgtttttagatttaaatagacatcttgtgttttctaaaatcatttttacattgtctgataggttttttgaaaaatctattatttgctttgtagaaagttttatcatatgaaaatgttgactctntggcangtgtaccaattcgctctaagtagtaattctcggaagtccgagtatcatttccatagggaatttattacacttttattgaatac

SEQ ID NO: 214123 - DNA, 404 bp, Glycine max
  unsure (1)..(404): unsure at all n locations
ggcttccatcaagtgtgtaatctagccccacagcttcagtatgtgctctttaacctncattaattntttgctttaccttctcttccattgntgtttcttcatttttctccatgtatctccttacatgtcttgtgctaaatgttttaacatgattctttaaagtttccaccgattaaacttgctatagaagctagatttgattttctatggttcaaatttcttgctcttgttcttgaaccatgaattatgttgagtttatgttccgctgagttttgtcttgttatttttttgttgctgaaacctaaaccataaaattcttacaaaaacattaaagtagaagaaaacctcaaaaatctagagtgacttgttcacctattgtagttttgtcataaaagtcatgtcta

SEQ ID NO: 214124 - DNA, 450 bp, Glycine max
  unsure (1)..(450): unsure at all n locations
ntgacttgagtcatcaagagagtataaatatgtgaccatggcatgtatntaatttatgatctatctttcaatcttcagaaataaattaccagtgactgacttcgaaaaataaatttccaaaagtcataattcttcaagtgacttgtttttgaagatttttntaaaagtcacaactttttaagtgactagttttaaagaaattgccaagcgtcacaagctttgacttgagtcatcaagagattataaatatgtgaccatggcatgtatttaatctatgatctatctttcaatcttctctcaacatcattcagtatctttcaactctntctacaanaatttctgattcatttctcttcatctttctaaaagtttttgttcaacactttctcttccaagaaaagttctttgatcaaaaacttgtgttattcatctttatcattctcttctccc

SEQ ID NO: 214125 - DNA, 410 bp, Glycine max
  unsure (1)..(410): unsure at all n locations
cggcttgaaggattatggggtaccatgnnnctggtacaggtggcggtcgggcgatggtgcacaacgagttttccacatccacaaagcccgcataaacccaccatcccctgttgcccacctccaactgggctcacgtactcccacgtagcccatatcctcgtttctctcaacaccaggtccccatcaatcctcccaagcttccccaacatccaagtaattcaacaatcaaacaacacaaattatcacagcctagaaaatagggcaaaggcagaaaactctgcccaaaacaccaaccaaaatcacagcttttctcacttaaagaccccagtaacaattcctttgttccaatttgttaaccgttggatcgactcgaanatgttactggaagtctctagtacataagtctacat

SEQ ID NO: 214126 - DNA, 386 bp, Glycine max
  unsure (1)..(386): unsure at all n locations
ntcaccctataattccaccatatttgggaaatattgctttgaaccaaaatttccttttatgaatgatgctctcctacaacctaagacaaggtagaaggagataaactgtacaagctcaaggttcaataaaacaatcatactttcagctcaaaatgggtgcaagggataaatcaatcatgcacaaggtaagctttttagctaagtggctatcttcaatcaaaacatggccttcatcatcttcaatttcacacattcattctatactcggagattcatgcaaaaatcattactcaatgttagtcattctctcacaattaaagatcacactctcactgggttacgactaatgcgttccttcacaatcaacctgacaaaccaactaacat

SEQ ID NO: 214127 - DNA, 421 bp, Glycine max
  unsure (1)..(421): unsure at all n locations
ggctgcagcttgtaccccatgcccagaggctctttgctatcgannnctgggggagggatgttgtacgcagccttacccttgcatatgcaaagaggccgtttccggattcgaacccatgaccaacaagtcaccaatgcacaactttaccgctgcaccaacctttacacaactaatatacttaaaaaaacatagagggttggtttaaaatgatgaatatgccatcaatttagatattttgttatatgttactcatatttcatttaggtagaatctctttgtttgtgtgtatgcataggtcccgtgtcctatattttagacattgactgtgtcgaagtatctgcacccgtgttgtgttcggcggcagtatcacagtccgtgcttcatagcttgttagcagcaaaacctataaaataaatggaag

SEQ ID NO: 214128 - DNA, 467 bp, Glycine max
  unsure (1)..(467): unsure at all n locations
ttgcttctacagtttcaaccatagtttcttttaccttttgttttcaaacccccaacataaaagaaccacgacttagaaaccaacatgagtcttgattcttcatctagtgttaatggtaagggttctactcccaaggaccccttgtataagatattagatgagttgagatcccttaagttgtggaaagaaaaacaagagagaaaagaaaaatgaaaaaaaaatggaagaaataagtcaagatgaatagagaaaataagggaagaagaaagaaggaaaatactacaagagttaagaaaagaanaacatgcctcctatagtagtcataactcttgcaagagcctaagtgaagaactctgtgactattatgaaggaagggcataggccacatcttatacctcactctcataggagatanaaggaaagaaagcatcaagaggctaacattaacctcccatacttacatgact

SEQ ID NO: 214129 - DNA, 368 bp, Glycine max
catcaacaagaatcaagccaaggctattgtgcaagctatcaatggggcaaaacacaccaaaagattatgatgatggatggctcgaattctcacaatggtaaacttatcactttcaaattgagctttcaaaactatcatgacatgtaaaggaaaaacaaggatttcaaataacaaaatgtcaagagacttttattttcagaacaattacccattacttgaacatatcctataattcaaagaaaaatatgcaaagttgtacatgcaaacagaattgacctaaaatattaaactataaacccaacagaactaacaaaattaacaaacttaacaaaactagcaaataccaaaaccatagaacactcccccca

SEQ ID NO: 214130 - DNA, 470 bp, Glycine max
ctaagcttacattaattttctaaaatggacgttgcgaacaggggtttgccctgtcaactcgggaagccatgtagtagctataatattggatataattaaactatcctgcaattatttcccatcctcatactcgtagtggaccactatgaccaaattattcatcccaagttaaagaaagacttcttatcttgcaaatccctaaaatttctctcctcctataccttccctcacaccaagagtagacgtaatcaaacttcttaaactaacctccacatttatactatacgttacttcaattgtcacttctgcaaatttagtatttggacatatactatatcatactcatccacaattcttattatggctcttgcttctctttgctatgctctaaagaaaagaaagctataattgcataggtaatgagacatagtttgagcttacttgcaaatgttcactccatggtataacac

SEQ ID NO: 214131 - DNA, 337 bp, Glycine max
caccccaaatagcttatgggtgaaataaccaactcacctgtgcgagttaagttacttcatgttgaagcaacaactcacttgggcgagttgcagatccaccaaacccccttatttcctataaataggcgtgaggaggggctgaagaaagggttcaactttcaaacattgagagatttcagtgaaaatcagagagaacgagaagaaagaagagaaaaatgaagccgaggcgctaccaaatcgcgaccgtaatcaacttctacatcgttcattggttggtgttcttcattcattatattaattagaatttatattaaggatttcgatacaatctttacac

SEQ ID NO: 214132 - DNA, 454 bp, Glycine max
tgcatgacagcgacctaacaaagagcatgacacacgttttgtcctattcttagttaacatttctaatggctgcaaatacacgcacgttaaacgaaatggaagttgataacctactgttcgtaattaattcgataccattctatattggaagctcatttcactgttttccgtaagcgtgtggtccttttattagcatatgttatgaaattacttcttttattttctttctgtttgaagaaatggcaacaaatgttgtgtttcttcgaatgacaggctatctttattgtctaatcccgattgggagattcgaatatgtggacgaagtattcgtgatcgttcattctgataataaaatataataataaaatcatggttagaatttctaatgtgaaacacatggcgagagaagtgattatcgtgtgcggagttcggtatcatctgaatcacaacgaca

SEQ ID NO: 214133 - DNA, 430 bp, Glycine max
  unsure (1)..(430): unsure at all n locations
atcctctaatcacctgcngcatgcgccttcgggcgaggacccgacaataacttttacggggnnntgattgataccgtaatataacgagacgctcgaaattgactgttgaagctctgaactagttcaaacgacaataactttttactcggatgtctgattgagtcccgtaatatatcgatacgctccaaattgaatgttgaatctcaaagccaattccaacgacaataactttttactcggatgtctgattgagtcccgtaatatatcgagacgctcaaaattgattgttgaaactctgagccatttcaaacgacaataactttntactcggatgtctgattgaggcccggtatatatcaagacgctcgaaattgaatgttgaaactctgagcctattcaaacgacaataacttttttctcggatgtttga

SEQ ID NO: 214134 - DNA, 478 bp, Glycine max
  unsure (1)..(478): unsure at all n locations
ttgaaactcagcttaacatcagaccacttccagggtgctggaactacttcacatggatttgatggngcctatgcaagttgaaagccttggaggaaagaggtatgcctatgttgttgtggatgatttctccagatttacctgtgtaaactttatcagagagaaatcagaaacctttgaagtattcaaagagttgagtctaagacttcaaagagagaaagactgtgtcatcaagagaatcaggagtgaccatggcagagaatttgaaaacagcaggttcactgaattctgcacatctgaaggcatcactcatgagttctctgcagccattacaccacaacagaatgggatagttgagaggaaaaacaggaccttgcaagaggctgctcgggtcatgcttcatgccaaagaacttccctataatctctgggctgaagccatgaacacagcatggtacattcacaacagagtcacactgaga

SEQ ID NO: 214135 - DNA, 257 bp, Glycine max
  unsure (1)..(257): unsure at all n locations
aaaaaaaggaaagaaggaaaggaaatttccaatcaaagagaaagcaaaaaaggaaggaaaggaaattcccaatcaaagagtgggagaaagagaaaaaaagaaacgaaaggaaattcccaatcaaagagtgggagaaagaaaaaagaaaagaaagatnattcccaaccaaagaatgggagaaagttaaaaagaaggaaaccatgacctaaaagtggtcttctcccttttgattaccaaccaaaatcctgtgcgctaac

SEQ ID NO: 214136 - DNA, 373 bp, Glycine max
gatgctcatggactccatagtgctgcataaactgtcatagatatgtatggcgagctgcacaagagcatagaccatagactcttgcgacacgtgcatattttctattcatggcgagctgagttactatgttaaccaaggcatcaagttttccctcaagctctttattctcagtacatgaagatgaatctgtggccacctcatggactcctgtaaggacaatagcatcattttttgcactgaattgttggctgtttgaagccatcttctaaatcaaattcctagcctcatcaggggttatcaccaatggctccaccactggcaacatcaatcatactgctgtccatgttgctaagtcccttatagaaatattgaa

SEQ ID NO: 214137 - DNA, 410 bp, Glycine max
  unsure (1)..(410): unsure at all n locations
cgcttacagtgaaagggtgtgactntctcatnnnctctcgaattcaacgttcaaggtcactggtaatggattaccaaaacattgtaatcgattacagccttttgaaaatatttggaacgttgtaaattcagtttgaaaaaaaactcatntttctactggtaatcgattacaacaatatggtaatcgattaccagagagtaaaaactctctggtaaaggttttgtcaaaaactcatgtgctattcaaagttttgaaaaactttttaatacttatcttgattgagttttttcttcattcttgaattttgagtcttgaatcttgatcttgattcttgaaatcttgagtcttgattcttgattctaggctttcttcttgagtcttgaattctccttgattcttgtactcttgac

SEQ ID NO: 214138 - DNA, 361 bp, Glycine max
ctcagcttgcaaagctgtcgtggactgatataactgtctactcttcaactgggatcctagatctgaccttgactgaagaacctctctttaacgaagcgctgactcaccaatgtttactaagtaaacaaatccatgcgaataaaactctgacatctatatgggtggaaggagaatacatgaaaaatgcatatgacacagatcattttatgaatacgggacccggaaattgccccttttagatcacattcggcgcatcgcgcccgacgtatgcatttaaaaacaacacgaccttgtcgttgacaatgaggatagaccaatctgatgatcagagcaaggccacacggatcattgacactatcca

SEQ ID NO: 214139 - DNA, 393 bp, Glycine max
  unsure (1)..(393): unsure at all n locations
gctttcagcttttcattggtgtatttgttcnnnnttgcgtgtctaaattgtgggaatgtgctcaaatatgtggggaaattttggtttgttttcttgcttgattaggggtttgtatgggatggccctatgcctataatgcantttgaaacaatggggcatgccgcattgtccccgttctcttgctattgttacctaaacgcgcgcccaccaagcgttcggtgaaatgcctcaatggcattagcgcgtgacttttgtaaggaaacaacccatggggcatcttggtttgtacatattttctatttttgggacatgtattcattcccgaaaaaggctatagtaattgccccacatatatcccaggcctagaaaccataagttttatgcaaaagaaca

SEQ ID NO: 214140 - DNA, 467 bp, Glycine max
  unsure (1)..(467): unsure at all n locations
ntnngggcttagtgggaaagcaatgattagtgaatggattttgacgccactaaagtcctttcccacgaggatcaaaactcggagaatgttccattggtgcccttcaaatgggacccctttctacctccattttcaatttttcattacacgcttataatccaatcccattggtgtgggaggaggaaatgatatgtcttctctttcaattttccttttattggctatggaatcaaatgaagataatatagtttggttttggtatgcgagaactagacctgtacttatcaataggacttgacgatactaaaccattatataaaaaaactaaacaattaatgaagaattttatgaactgtactntaattattttatatttatcaacaatcgaattaatactaaactaataaactacccctattaactanacccatttggaacacaattgatgatcaacgatgtaatcatgt

SEQ ID NO: 214141 - DNA, 252 bp, Glycine max
  unsure (1)..(252): unsure at all n locations
accctccagcttgcgtnangaagtgttgaatggtagacgnnntcttttatgttgaccacagagtggtacctggagatatgtcgcgggggtctggagaccttggggacgtcaggtggggtgctattgcccaaaaccaagcttgaccaatcccgacccaacccgggcatagtcggtcagtgagaacctgtgatgtacctaaacaggcgagctcctggcagtcaacagataaaagggaccaagaccacaaagcaa

SEQ ID NO: 214142 - DNA, 449 bp, Glycine max
  unsure (1)..(449): unsure at all n locations
tgcttgtggagcttctatggaggctggatctttgagcttcaatgaggtccttcaatggtgatttttcaccatggagatgcagcggaagacaaaggagaagaggtgagaggaggcgccatccattaaggaataagccatggaaaaaaagagcttcaccaccaagatgagccttggataagaagcttggaagaatgcttcaatggaggaaaagaaagagggagagaaagagagaggggggagcacgaaattgaaggaagaaaaagggagagaagttgaactttgagttgtgtctcacaagactctcattcatcaaagttacaacaagtgttacacatgcttctatntatagactangtagcttccttgagaagctntcttgagaaaacttccttgagaagcttctttgagaaaactttcttgagaagctagagcttagctacacacacccc

SEQ ID NO: 214143 - DNA, 258 bp, Glycine max
ctaataataaaaatcttaaataaataaataattttaccacaaaaataactttatatatttgccttaacactaatttgctattataactacaatcatttatcaaaaatttattcacatatctttattacacctaattactactatgaaataaaaaaggcaattgatgcatgtggaccacagttgctaaaatactaatgacattttgtgccaccatgtctcttgttcatgtactaaccctccctaaaagtatatctcctt

SEQ ID NO: 214144 - DNA, 443 bp, Glycine max
  unsure (1)..(443): unsure at all n locations
tgttanaatggaaaaagggggtacgaaaagtaagcgatatgaaaatgaaagcatacaaaacatgaatggatcactgagggtgcatagaatgaattaaaagattcgattttgagaacttaccagttgaagaccgaagaacgacaaagaacaaacgaagaacgaatgaagaacgacaaagaacttccacagaatcgctcacggaaacgtctcagaagtgttacggaagcacctcggcttggatttttctcatttttcttcttctcctcactaattttaagtgattcctgagtttctagggtgctaggcctttcccttagcctccaatgccctttaaatagaaaaaaatggggaggaggttgccgcccagcttgcccaggcttcctcagaaagtttcctgatgcacaccccaaattgctaagttcacccctattttcatattttac

SEQ ID NO: 214145 - DNA, 351 bp, Glycine max
  unsure (1)..(351): unsure at all n locations
attattagtactttgatttccaaccttgtatttggctttattattatgatatttgaacaatttactatntctttatttgcattatgtttgaacaaatattaagtatgttacttgactatgtggattttatatttgatctattcatggntcttgcttcatggttcttgcttcatgatttaagaaatatttttccatgaaatgatgtgtggatgattangtatatttgtatgcttcaaatttgttacgcactttttctttttgntgatgtcaaagagggagagaaatagagatttaatcaagaactctcatgaataatcaacttaaatttgaagagaagcataaattcaaaaa

SEQ ID NO: 214146 - DNA, 276 bp, Glycine max
tagaccatctacttggttcctatgtacactgacattataatttacaagcagttaaagtcatgacagattaaggattcaacattgtctacttagctagcgtagcaaagctgacgcattacatgaaatctacaaaggcgaaataaacaaaattattactgtgaccggatctgtaaaaacaagaacaatatctgcaagaacattattttttgaagctaaatgagtactacgatcgaacagcatgcagaaatatagttaataacctaagaaaaatatttc

SEQ ID NO: 214147 - DNA, 406 bp, Glycine max
  unsure (1)..(406): unsure at all n locations
tgctttattattaattatttcaaannnntccaattccatcacgtctaattttaagttngatgattgaacatgcaaatacgctaaattctaaatgaaagagttgtactacttataattaaaaaaaatattgttctccttaaaaaaataattaactttgtttattaattattgttcacatcaagcttgtttatatttaaattttctcaacagttttattgcatattaggcaagtcgaagactcgattctctaaaaaaacatgaatcgatatgcatatttagacaaagaataaataagaaaaagaaatacagcgagtaatataacagtgatttttgaaaaaaaagaagatataatatgattccagtttgctgcaataggacattttttcccactgatgcttcacaacat

SEQ ID NO: 214148 - DNA, 400 bp, Glycine max
tcttccttgttctcttcatccactccatcccatagcaattacctctcctttatttagagcttcgttatctcccacaaggcaaaaatcaccaaccttaaaggatggaatttctctcgcattggtgtaaaggatggaatttctctccacaaaaaaacataaccttaagtttttgcctccataaattcttgataagttaaatgtcacaacccttaccttttctcaacagaattccattgatccccttccttcttcctccttgttgacgttgaaaaggaaaggtctctgttttgagaaaaaaactctaagccattaaaccagaattcatgccatttctcattctaactgcaacttggctgggttgcagcagtttagaaattagctcccaattttacatccctgc

SEQ ID NO: 214149 - DNA, 415 bp, Glycine max
  unsure (1)..(415): unsure at all n locations
tatatgtggatgataacatataaagagacattctntgtccacattagccgcatataaagcagctcgttgcggaagtgggacttcttaattttcaataaaactcatagatgtacaaataagtagtagcatagacaaccttgtgtcagtgattgcattcattatttcatttgtattatgatatgataggtgtatctgaagataaggccctgcaaatattaccccgtacaacatctgtctgtatcgaataagttgtcaaaaacattcaagagatacatacagaagcagaattagctgtgacagataccaaagagaggcagatatcagaanatgagtctgaggcacaaaaggaagtatctgaggttgagcagacttcacaaaataactagaaaccaagaattttcttgactttacactc

SEQ ID NO: 214150 - DNA, 316 bp, Glycine max
  unsure (1)..(316): unsure at all n locations
atcctcagagtcacctgcggctgcagcttctacaaacgtggagttgatttttttattttctnnnnctcacaacacaccgccttgctatctgaacatactattataacttaaaaagctagagcgtaacttccctttgatgacgcatgacgcacctaacatacgagataggataagcatgagcatatctactcacaccctatactagcgttactcatgcgggtggcgcatgcattaacatacatcttcaagctcttctctaagactactcttatgtctagcttacactgtgtcaccctgtcgacatgatgacccccta

SEQ ID NO: 214151 - DNA, 275 bp, Glycine max
gcaaatctgatcattatgctttgattaatgcatacaaaaatatgatgatgggggcgaatcaagagggtgagaatgactgagaaaccgctgctgcgattaccattcctacatggaagcttcccactagccaaacaatgtctttactcagccgctatcaacccttctcactacccgccacccagtcttgcacacaggccgtccctaaatcaaccactatgcctgtttaccacacttacaatcatgagcaccacctttagctcgaaccagatcaccga

SEQ ID NO: 214152 - DNA, 426 bp, Glycine max
  unsure (1)..(426): unsure at all n locations
tctataganggtccgtccctaagatgactacagatgcgtgacctctctatgagctacggaacaagactgtggcatttacctggggagaaaaacaagagcacgcctttgcttctctcaaagaaaagcttactaaagcacctattctagctcttactgactctactaaaacttttgagctagagagtgatgcctctggagtgggagttggagttgtattgttacaaggtgggcaccttattgcttattatgaggaaaaacttcatattgccacactcaactaccccacctattataaagagctctatgccttaataagagccctccaagctcgggaacatcaccttgtgctcaaggaatccgacattcatagtgatcatcaatcacttaagtacattagagggaaaagcatgttaaacaatacgcatg

SEQ ID NO: 214153 - DNA, 332 bp, Glycine max
  unsure (1)..(332): unsure at all n locations
tcacctcagcatcccccaaagagaaatttaaatttttatcttttcacannnnctccctgantcncattttattgnttttatattcaatgttcatcttatccatatcatatctttttccatcatcatcatcataattantgaaacaaaaatttctaaattaaaaatttcttacaaagcaaaactctttttttaatccatttagctttatctaatcgatacacaagttgtctaaactattagagtatttctctatttgctaattgattaaaccttctcatattgatacataattttttgaacaacactaacttatcaattctatatattaatta

SEQ ID NO: 214154 - DNA, 473 bp, Glycine max
  unsure (1)..(473): unsure at all n locations
nggccaatcccgacccaacccgggcatagtcagtcagtgataacctgtggcatacctaagcaggcgagctcctggcagtcaaccaataaaataataaaagtccacgaagcaaggaggcttgtgtggcggctggccagctatctctattttgtgttatatctgaaaaatcccgtctggtaatcgattaccattcgtgggtaatcgattacagggtctaaaaattgaaacaggacgttcagtagcctctggtaatcgattaccaatggtgtgtaatcgattacacaatgttatatgctactggcaatcgattaccaattgtgtgtaatcgattacacagtgtcatatgctactggtaatcgattaccatttatgtgtaatcgattacacagtgtaactnttatgttccaatgtgtaaagggctgtgtaattcatttatgggcactggtaatcgattacatactgtggtaatcgat

SEQ ID NO: 214155 - DNA, 422 bp, Glycine max
  unsure (1)..(422): unsure at all n locations
atcctctaagtggcctccggcggtgcgctttgagcaaattgtaagaggggccccctccctctattactagctattttgaattctttagttcctgaatgtacaaccttcaaattgttgctcgttcccctctttgttttctgcaaaaaagaaaatcaatatctaagaacacatggatgaagtcctaaggatgccatgtacatgtgtatctctaaagatatagtatntatattccatctagcatacattgactggtgattacatgtaatagactttttataacatggttgccccatatcacaattaaaaagcacaactaccaatctttccgaatcccttaggtaaattgtcttttctccttctgtggtgggggtttgcttaataatattatactcttgcccttcaaaaaaaactatgactgatcc

SEQ ID NO: 214156 - DNA, 340 bp, Glycine max
tcaacattcaatatcgagcgtttctatatattacgggactgaatcagacatccgagtaaaaagttactgtaatttgaagtttctcagagcttcaccattcaatatcgagcgtttcgatatattacgggactgaatcagacatcagagtaaaaagttaatgtccgttgaattatctcagagcttcggtattccatttcgagcgtctcgatatattactggagtcaatcagacatccgagtaaaaagttactggtcgttgaatttgctcagagcttcgataatcaatttcgagtgtctcaatatattacgcgactcagtcagacaaccgagtaaaagttatt

SEQ ID NO: 214157 - DNA, 369 bp, Glycine max
  unsure (1)..(369): unsure at all n locations
ctcagcttgcataaaagtctggcttgacctacaagctaaaacctaataaaatattaattaaaaaaagaaacttataaaacttggtataagtaatgtacaaatccaaaaataattgataaagaaaatcatattaaattcaacttatttaaacacaaagcatatcaaaagaaaatgaaatacagagcataatattaaaaaatgtatggattacagatgatttatactaatatagccaaataaaaatatttaaattgtctaaaaatgtctttacaaaatattcttttctttggaagtataatctggttgcataatgctttaaacttgagtcttttttctattgaanaattttcacatgcacgagaactctcc

SEQ ID NO: 214158 - DNA, 411 bp, Glycine max
  unsure (1)..(411): unsure at all n locations
acttgaaactaagctgtccctgctctacagcatatacgctttagngattctactaaaaccctttctacccttaagcataatctctaaggtaagtttggcctcatgattcttcttttgggcttttcctctatctgcaccttggtatgatctgcttgcacccctgctgaatattctaattgaacccctgctctgtggcctgtgagtttcctatcatctatcgggccttgggaaatcaccttgtcctcaatgcgatagtcatggctaatagtggaccaatcctcccaagatgtatcatcttgggataagccatgccattgaaccaagactgtccaagcctccaaatgggttctgcgataatcccaattgctgccggagtgataataagatgatattgtgaaattggtcggtaaa

SEQ ID NO: 214159 - DNA, 446 bp, Glycine max
  unsure (1)..(446): unsure at all n locations
cggacccgggatccttatagtnganntgacgcatcgccgcttccgtcgcacaagatggttataattccnnnnccctgcggttcgtgaaaaaccggatttgaggcaatgtggactgcgcnttggttgtcacagtaaagagttggagttctggtaagctgaactctcaaatctgcaaaaagatacaacagccattgcaactcacaagcagctgaagacagagccctgtactctgcttctgaagatgatctggacacagttgcttgctttttagcacgccatgacactaaagatttgcctatgaagaaacaatatccagatatggattgtctagaatccatacagcctgcccaatcagcatctgaataacctataagttgcatttctgaagttctgctaacgaaataccctggcctgtgttgttcttcatatacctcaatactctacat

SEQ ID NO: 214160 - DNA, 418 bp, Glycine max
  unsure (1)..(418): unsure at all n locations
gtgatgtatntaatctacgagaaggcatgtaactcaattttcgttggnancaaaaactgaagactgtttgacaaataacaataagttgcatatcaagattataactgatttttctttctaaataataaaacatataagcaactggaaaactaaaatgtcctttaatttctatctatgaaggcataatatataataaatatcaataagataagctcgtgaccttgggaatggaaccaatgttgcataactcatttattttgcccaacctcagtccaaagaatacctcatagattacgcaacctatcaaattatgattcttaaatatgttatagaggtatacatagaaaggaaaagacatatagtactcagtgaacctacaatgtttgtccaagattacatgaaaactaaaacgactcac

SEQ ID NO: 214161 - DNA, 360 bp, Glycine max
  unsure (1)..(360): unsure at all n locations
tcctctaatcacctcagccctagagggaggcgtncncttgagagttgcaggaggnnnnccatccttacaancatatattcanatatgatgttccctcccttgttctttttncacaaccaattacatgtaccctctacttgaatctaaccacataagatataccctcccttgtgttcactattacaaccaaaaaactacccgcttcttacacaaaatttttaaaccggtaattctttgaattcactgtttgggcaaagaattttcagacgggtagttctttgaattcttttggcacgacggaaacgaaagaacaataatagaaaaattgaacctaacaccatttttgtttttgcaaatttt

SEQ ID NO: 214162 - DNA, 409 bp, Glycine max
  unsure (1)..(409): unsure at all n locations
tcctcggggccatctgctgcgaaggcaaacattnggaatgatagttctaccaagaaatgctacccttagaacaaaaacggcatacaacctcctccaataaatacaaacatcaatgtaaatttagagcaagcttatgcgcatacttctttacgagcgtacacttgcacaagacattcttataactaagaaaaatgcacccatatacaatcaaggcaccttcgttacctagattatttatatgtacttccaaggtgtatttgttacctacatcacacgcatttcctttgctaaatttacatacatgcatactcaaagcactttggctatcaaaaattgcatacgtgcacattcgggtatttctaatacctatacatacacaaacttcatgatgaatcttgactatctacac

SEQ ID NO: 214163 - DNA, 293 bp, Glycine max
gaaaaccctattcttgcaacaagtcctatggaagtagacacggagatggacatgaaaatccgcagtattgtgagtagcattttgaaagacgcctctgtttctgatgctgagaaagatgttccaacatcctccaccccagatgttgctgtccctgaagctgatgaagatgtcccaacatcttccaccccgaatgtttctgtgcctgatgttgagaaagatgttccaacatcttccggcccaaatgctgaagtactttcttctccccacatagagagatcacctcaggaagatga

SEQ ID NO: 214164 - DNA, 395 bp, Glycine max
  unsure (1)..(395): unsure at all n locations
ggttcttgagttttcctcagttctttaacattcttagtttagtatacttggccttcatttaactgtctttgggcttggcggccacgcttaacaaagtactttctacacctactgtacgttgatttcaccaatgttgttatgtgaatgttgcgacaatcctttaaaaccttattgatacattctgagaggttcgttgtcatgtggccatatcgatgtccttttctatcataagccatcgtccatttttcctttgagatgcgatcaatccatgttgctatggctggactcagttcacaaaanttttctaaatattgataaaaaatgtgcttgctatgagtgtatgcttgcataaattagttattgactactattttaagtataaatgaagtaaaata

SEQ ID NO: 214165 - DNA, 343 bp, Glycine max
ataggatgttgaaatagcatagcaataatttcctaaattggtttaaagatataatctttggagacgataatgcttctgaaatgctaaggaagttagcagatggaactaaaagaaatgttataacttggcaaggatacaatatcaacaagtttttgttctacacaaaatcacaagatgacaagagtacaatccaaaacagtggggttagtctaagggttgaatctcaacactttgccactgcacatgatgataatccccgtggagtttctttgctctactttggagtcattgaagaaatctgagagcttaattatgtaaaattcatgatctgtgtttcaagtgt

SEQ ID NO: 214166 - DNA, 412 bp, Glycine max
  unsure (1)..(412): unsure at all n locations
tcanccctaagcaagtcactcgcttgggcgatctgattgtcttaaccctaagcaagcagctcgcctaggcgagtttcccctacaccaaatgacttttcctataaatagccatgaaggggaaggggtagagaggttcaaaaatgaataaatagaggaaaaacacagaataagaaagagaagaagacaagtaaagctgaggcgttgcagaattttgaccgtggatcattttcgccatttctattgctagccttgtaccctgcacaacgatcggttagttattcttaaagattgaatgtattctttgttccctcgtgggtcctttgtgatattatgtgtggattaatcttttcctactcactatnggcaatatcttnttactcgtaatgcttgattctagtcgatcattggtgtc

SEQ ID NO: 214167 - DNA, 244 bp, Glycine max
  unsure (1)..(244): unsure at all n locations
ccttatccccaaaaaagntaataattattagnnactttcttaattacttnttnaattttttattccataattcttcctaatttatttaatactactcctttttcaatcttctctctaactttcatcctaacttattttttcttctcccatacccaactctctcacccttataccaaaatctactcattttttataaactactaatactttaacttcttttatcctcatcttttcctaaaatctt

SEQ ID NO: 214168 - DNA, 438 bp, Glycine max
actcagcttgtaatacttaccagttgtttgatctgatgagttcccatttaagtggtggaacaactcattttctgtataagaaaaatctgtgtccactgataaaattaaagaatctcgaacttgttattggctcttttccccatctctggtccatttttatctgatattctgacttagcaattgttaccccattccccttccatctgagtttctgtctctctgcattggatgtgctgcaactgaatatttaaacattgggttttacggagtgtgatgtgagttttaatgttctatatgtaaattctacaacaccttgtctatttttagccatctattaatgctataacatcttaaataggatatatctagacagacaatcatagtatatgtacgtataatataccaaacatatcttgattgccataataattttaaatc

SEQ ID NO: 214169 - DNA, 300 bp, Glycine max
  unsure (1)..(300): unsure at all n locations
caccattcagcttaagcattgatgtaagattggatcctgcagtaatttgccagttagtttttctagaatctaaaaataaaattaaccatgtattatggaaacattggtatttgatcaccttttggaaacaaagcatgtcctcaaatgtaaacttctctcgaacttgagggcccacggatcttttagaaaagaatccacgttttccagcagaatgaattntgttatgcatcaatttaagaatccttcacctatacatacaacattaggaaacttgtgatacaatgacatgccataatgtat

SEQ ID NO: 214170 - DNA, 382 bp, Glycine max
  unsure (1)..(382): unsure at all n locations
taaccacacactanaagttatacaaatgttgaaatacattttaaattataataattaaaatattaaatactttaaaatataaaaatttatgtaactcattatttactgatctgagatttctttaattttatgtaatgaaaaacaataaaatattttaaattttaaaataaataatctaaaacttcataataaataaacataactaaaaataataaatccaatgaattatataatagtaaattctaacatcatttcttcttttttgtttatcattacagtaacatcttatcacgatacacatataatgatattttcaaataattaatgcgttaatataatgaatatgtggcgtcaatataatatatataatggatgtaaatat

SEQ ID NO: 214171 - DNA, 377 bp, Glycine max
taatggataatgtggctgcgactgtcacggaaccaacttcattgttctataccacttcatgaaacagacatgcatatgatgaaaaccttgttgctgttgcatgggacagtgaatcggatgctattgaaggagaatcagtcacactcacacatggtggagcggcttcaaagaatgcattgcgtgttctgagtgatctatgatacttgtgagggaggcataatgtaactgagattagagatgaagggtataattccattagaaggacgatttcaatggaccattcgtttcaatggggtaagtgtttttcaattgctgatgttctacatgtgaatgaatagcatgaaaggtgttctaatatggttagtccttcaaagaaa

SEQ ID NO: 214172 - DNA, 300 bp, Glycine max
  unsure (1)..(300): unsure at all n locations
aaacttaaattatctctcataagctatgatctcttcttggaaacagacttgaataattcttgaacacctcatggtatcttatctgcatgaagaattagaaattcaggcttcatttataccaacatgtntatatattattcctgcttctctcacaaagtggagctgtatatatatatatatatatatatatgagcattcatgtgccatcacttaacactatcacctcttaagagagatggtccatatcattatattggtgcctttatggcccacatgaactacaccatgactcttcttgcc

SEQ ID NO: 214173 - DNA, 428 bp, Glycine max
tctcagaatagatggagaagtgatgttcattgaagaactattatctattccaaccccatgttatgtctttacttgtataagacaccgtgccaatacatcatctatcgcagatacataagaactcatatgctgaggatactgctcttcgaaatgtaacggatcagcatgtcactaaaacatcagttgtctatgtcaaccgagatgatatttggtgattcgggacctgctctgtgctaaagtagacagtgcaatgttcgcggaccccattcatattttgcggagaaaaatactctctgatgaacatatcagtcgtatataggacggggctgaaaattttccactcacataaaacccaaaactctgattgcagcgctacctaggaaggctaacagtgacaacacaaatgtctgtctgcactgccatgctct

SEQ ID NO: 214174 - DNA, 338 bp, Glycine max
  unsure (1)..(338): unsure at all n locations
gcaagcttgtctaagnccttcgataatgtggttgaaaattaagagnntatgcatggatgcatgtatgcatgattatgccacagtatggagaaaacatggtgaagttaagtccaaaatgttggagttaagggtaaacacgccatttggtaaggactatgggttcatatgtacctgtatcacgggttctaccaagttcccaaagtcattgaccacttccggatattgtcggattacgggactactcccggtccaacaacgtccataggaaagcctcgtttgagtgtagtatcgcgtatcaaccaattcaagactactcttgattagccaccgcactacgt

SEQ ID NO: 214175 - DNA, 367 bp, Glycine max
  unsure (1)..(367): unsure at all n locations
tagtgattccgtcacattggtccagttatcatgccatgccttantttccactctagtttatattaatgtaattactggagtgtgtatatataaactaaccatatggttgtggaagagaacccatcattcccatcttctctatcagaaactgtgcaagaatgcctccaaaataaacagaataggcaatgcatggaactagaggtagtatgtaaaacattgttgacctggagagtaaaaaaaaaattatggaggtgaataacagatgcaaaaagaaaatagattaaataatagcgtgcatataataacagcaaagacgcaagacaaatctattgtgatgtgaagtgagtcaaatggcattagtggcagt

SEQ ID NO: 214176 - DNA, 381 bp, Glycine max
gtgatcttcagtcacctgctgcatgcacgcttcgagcacactccagatattgtatatacgatcccaacggtcagatcatggaaatttgtcttctgaagttgcagaccaaatttcgaaaacatccaacggttaacgaaggctggacagcgtttttaccgaggcagcttcatgtagctttctctagaagcttcattaagaggcttcctccagaagcttcctcatggcttctttgagaagctttcttaagaggattctttgagaagctagatccttatctatccacacccctctattaactaaattaacttccttaaaaataattacggatgaaaataatgcaacaaataatccaacatcaaacataattactaataatatata

SEQ ID NO: 214177 - DNA, 449 bp, Glycine max
  unsure (1)..(449): unsure at all n locations
tcgatcacattgttagaaagaccataagaagatgtggagtaatgccaaatngatgagccatgatttgtgggttgtaaggctcgacataaaatttgatatacctggatccanggtgtaacacgctaaaggtattatcataattacactcttgattctaaaatatgaaaaataaaaatatttatacaacaatctcatgcgaaagctaacatataaacattacaacttgattccattgataatatcaatacaacttatttctcatagctttcacattatacaaaatataagaaaatacagacaaaataaaataactgagctacatataccatgacgatgctccatgctccaacaaattgcaccatcacctattgtctgataaagaacgaaacttaaaggggtgagtgatcgaggccgtacccgaatatataaacattaaaaatgtagtatct

SEQ ID NO: 214178 - DNA, 354 bp, Glycine max
  unsure (1)..(354): unsure at all n locations
gctatcttgaaagaaatgcatcaataacttctcgtccctggaatacgaacccatcttctaacaatacatttttaggtgattcttaagacaagtcgtccctttgtacctatcgaagtcaagtactttgaactttacggatcacctaacgatgggtgttaagtacctcgaggcagtcaagcgaaggatgcatgccaccaaacagtggtccccggacgaaattatggtatgacaatgtcctcaccttcgaagggctacacgccctcgcctttagaggactgcacgttctcacctttagagaactacatgtcctccacttcagaggactacacgtnctncactttagaggactacacg

SEQ ID NO: 214179 - DNA, 325 bp, Glycine max
tcaacctgatcgctaagtgacaacttatctgttgtcattcgtgacctattgtcgccaagcgcaattccttacggccataattgaggtccatgatgctaagcaccagtcatggcagctaagcaagattcattgtggcaatatgagcgctaagcgagtccctctcatctaagcgcatgctcctctgtacttaagatgcatcattttaactaaattggctagaacctggcttaatgagaagagcaagctttctgatttgcagacctcgctaatccgatgtacccctccgctaagctgaatttatggtaaaataaaaacaaaatgattt

SEQ ID NO: 214180 - DNA, 341 bp, Glycine max
aataaaaatcaaactcatccttcaatcttttgtccatctcatacaataagacacttagaatcaaggaataaaaactccagtgctaaaatatgcctttctattatgagcaatagtttaaaaaaaaaaaaaaaaacttatcataggtatttgcttataggagagatcaaaagatgaaaatggaaatgaataacatctggaattcacagggggaaagaaatataggaattggatacattctctaagaccaagatattatggccacgacaatgatacctcgagtctgtaatgtctctcagcgtcatactatatcaacaaggagtgtaaatgtgtgtctactctga

SEQ ID NO: 214181 - DNA, 429 bp, Glycine max
  unsure (1)..(429): unsure at all n locations
tcagcgaggtagaaatcatgacagcggtgtggtactgtgttagcgaanagagacccaggcccgatggatgtaattttaaattcatcaagcaattctggcagattttgaaaccagatgtcctccgatttatagatgaatttcatgcaaatggtgttatcccaaggggagctaatgcttcatttattgccttaatacccaatgtgactgacccgcaatgcctcaacgatttcagacccatctcgctcatatgctgcgtctacaaaatcgtggctaagctgctagccaacagattgaagagaactatgtcatctattatagatgaacgtcaatctgctttcatagccggaagacacttattacacagccgttgtcattgctaatgaagtagtataggaggcaagganggaacaaaagtcatgcatgatattc

SEQ ID NO: 214182 - DNA, 364 bp, Glycine max
  unsure (1)..(364): unsure at all n locations
agcttacccgcactattacccacttccacttcccaaacctatcaatgttaagataatgacatcggcagaaatgcagttgagaagagaaaggggcctatgctttacttgtgatgacaagttttcccctagccatcgttgtcctaataagcaatattttgttccacagtgggaagaagaggatgaacctgcattacaaccagatccaccagacgaggttgagacagctggtgaccccagtttgcaagatcatcatttgtcttataatgctttanaaggctcatcaggtcttgggacaatgaagtttcaaggatcaataaatggattgggagtgtagattctactagatagtgggaggtcagataac

SEQ ID NO: 214183 - DNA, 437 bp, Glycine max
tgatactcttagctgctgtatgtgtgatgacaagacccatagcagtagtcactttgggagaaatgaaattgtggctcgcaccactatcaatcaacaccaataaatccacattctgtatcttaccttcaaccttcatggtgtgagactcacccatgcttcccaatacccccatcaatttacattccacctccacttcttcttcactttccaccgtcacatcctccatacttagaatttccccttcctctgtcatggtttcatcttctcctatgattagaaccctaagagctcgttctggacatttatgcaacgtatggtggtattttcccccacatttgaaacaaagacccttcgctctcctctcttcgaattcatcattgtggatacttcgtattcccttccacctctacgttgtgccggaacgcatacccacatca

SEQ ID NO: 214184 - DNA, 358 bp, Glycine max
  unsure (1)..(358): unsure at all n locations
ctttgagcttcaatgagggcctttaatggtgattttccaccatggagatgcagcggaagacaaaggagaagaggttagaggcggcgccatccactagagaataagccttggaagaaggagcttcaccaccaagatgagccttggataagaagcttggagaggatgcttcaatggaggaaaagaaagagggagagaaagagaaacggtggagcacgaaattgaaggaagaaaaagggagagaagttaaactttgagttgtgtctcacaagactctcattcatcacagttacaacaagtgttacacatgtttctatttatagactangtagcttncttgagaaagtttcttgagaaaact

SEQ ID NO: 214185 - DNA, 462 bp, Glycine max
  unsure (1)..(462): unsure at all n locations
tcatgatgttgaatcaagattgattcaaggagttntgatgataacaaagatgatgacatatagcccaagagaatgagttcaagactgaatcaagaacacttcaagaatcaagaagaaatttgatttcaagattcaagaatcaagtttcaagatttaagttgcaagaatcaagaatcaagaataatcaagttgaagattcaagaatcaagaaaagactcaatcaagataagtactaaaaaaattttcaaaaaaatgagtagcacatgaagttttcacaaaagcttttaccaaagagtttttactctctggtaatcgattactagtttactgtaatcgattaccagtggcaagttttgttttcaaaaagctttcaactaatattacaacgttccaatcaatttcaaaatggtgtaatcgattacaatatattggtaatcgattaccagtgtgattgaacgttga

SEQ ID NO: 214186 - DNA, 368 bp, Glycine max
  unsure (1)..(368): unsure at all n locations
agctntactatgcaaggaataaccatggttaattccttcatctgacttagcatcaaactttcctaagttttcttttccattgtttaatacaaagcatttgcaaacaaaaacatgaaggtgtgaaatgttgggttttctaccattaaacagttcatatggagttttctttaaaatgggtcttattaaatccctattcatgatataacatgcagtattaacggcttcaacccaaaaatattttggaagaagagtgtcatttaataaggttctagcaatttcttccaaagatctatttttcctttcaacaactccattttgtttgagggttataggtgcagaaaaattatgttcaatgccatgcttatcac

SEQ ID NO: 214187 - DNA, 417 bp, Glycine max
gacacttaaaactaagcttcacaggaaccttattatgtcaactagggtgtataatgctactaactctgccaaagtgtttctccaaaggattttggcaattatggaggaaaatagactatgacaccaagaggctatgcagaatgtggcatccttagaggcggaggtcaccaagtggagggttactgctcgtactctttggcaagtggagcgccctaaggtggccaatgtcatcgttgcttttgctgaggttgtaaggtcgaaccaccaactatcttccaacgttggtggtgtattggccgagttactgcataccttgttagatggtgatgagctatttgggtgctacaagaacttgcaaactgaaaagatggacctggatggcaaagtggagagcttggcgactgagatggatgggct

SEQ ID NO: 214188 - DNA, 165 bp, Glycine max
caagccgagccgagccttacatatgccgaaggaaagacccttgacgagctgctcgactcatttccacccctatacgcatgatatatggtgcactgggttgattgaaataggttaagaaacaattcaattcttatgtatctagttgacgaaaagaaataaatgtag

SEQ ID NO: 214189 - DNA, 418 bp, Glycine max
cgtctatgactctgtgctgttttatatatatatatatatatatatacacacacttgatgctggtctgtgtgaaagctcgagcctcctttctctctgtttatgcttgggccaagcattattggatatgatttcgtgtactggtgtatgaacaatacattatgagtgaatgaaacgccgtttacactctatacaacatgcttgtggtaaagaaacatataaagcggttactttgcacactatactaacacattcttctaagggactgactccaattgactttcaagcttggaacaatcgattatgaatttcaaaatatggtttctaattcaacatagcttacgatcatgtaaaatatataacagtgtatcgtgcctcgtggtatatactcaactgtaacatgctaacattccaagctctt

SEQ ID NO: 214190 - DNA, 362 bp, Glycine max
  unsure (1)..(362): unsure at all n locations
agcttgaaggtgtgtagcccaccatcttttcatactggtaatgtgtctactataattgtcatcatttttttctccgtcattgaggtgccacttgaactgccaggtctctccacctttgggcgtattcttttgaaagatttgtgccccctttntgcacatgttctgtagttgcatcctatccgaagacatcatactgacactgcctaacaaaggcaaccactaggtccttccaagaatggactcgggaaggttccaagttagtgtaccangtaacagctaccccagtaagactttcttggaaggaatgtatcagcaattcctcatctttttcgtatgcccccatcttccgataatacatcttt

SEQ ID NO: 214191 - DNA, 449 bp, Glycine max
  unsure (1)..(449): unsure at all n locations
nttcgcatacttacggtaaaatctgtgacctagccatggtagaagtctctacagaggccatttcctccctcgcccagtattatgatcagccgttgaggtgcttcacctttggggacttccagctgtcacccatggtggaagaatttgaagagatcctatgatgccctctatgggggaggaaaccatacctcttcacagggttctatccctcattagctagaatttccaagatagtccaaatctcggcgcaggaattagaccacaggaagcaagtcgaaaatggggtggtcggaataccgagaaaatatttggaggtaaaagcaagaatcttggcaggtaaaggagagtgggccccgttcatagatattcttgcactggtgattntcggnggagtcctctttctgaatgtggatgggttggtagacctggctgcgatcgacgcttttctc

SEQ ID NO: 214192 - DNA, 284 bp, Glycine max
  unsure (1)..(284): unsure at all n locations
atcttgttattgttgcttggtgaataagcccttctatatggcacatatgcttgcnncatttaatcattgccattagcattaaccttcattataaaaaaatacccgttttaatttgtnggaacccagttactaangttaaagatcannaaatatttgctatctctcttcgtctatgaatcacatttgactacgactaagtttggttcggctatgatagcttatatgacacttacagagtggtagtaatcattttcaattggtacaaaatagctaactatgtcact

SEQ ID NO: 214193 - DNA, 451 bp, Glycine max
  unsure (1)..(451): unsure at all n locations
tgaaactactaacttactccataaacgcattatcaattcttggctagtaagtaaccatgtcattttattgcttgtttgttattattcccgcatttgttttctaagacactcatgtcatgtccagcatacatgctacatgcacttgcactagtccactttcactccacaatccatccattntaccaaaaaagttagttacgtttttcttctccacaagaggtttgcccttaataaagagtcgctccatataaattaagagacaaatatttataaataattcttgactttgactcttaagtgatatggaattttgtgtatcaggacacaagtctttcaagagagtatttcaacttattatatctgataatttgttattagataacactataataaactcctttagaatggttatgcataaactatttacccaaaacttatgaaataacgggga

SEQ ID NO: 214194 - DNA, 316 bp, Glycine max
  unsure (1)..(316): unsure at all n locations
tcaccgatatgaaagaacattgtgattaatgctctagaaggatttaaatccttcttgattaacaaaagcgaaattaccataagaactgattgtgaaacaatagttgcttatggtagtcaacaaataaatactgataaaaagcctcataaaagatgacttttattccaagaatatgtttatcataacagaataaaaataaattttgaacacataaaaggagttaagaatactgctgctgatattctttcttgttttgcgggaatacaacgaaatgaagccatgtaagggttctttacagaatataacacanaaaatg

SEQ ID NO: 214195 - DNA, 343 bp, Glycine max
tccatcgtctcccaccatcaaatcctatcttgtctctgtgttttcttcctcttcacaccatggccattcacttgagcattctgattgtgacgataataagtgcattccaacattgttttctattgttgaaccttctcgagatgctaaacccaccttccataaccaacacaaacattgagtaacttgtgggcaagtttcctccactactttcatttggtacctttttccattgatcagaatgcaggcataatttatcctacacaagtttgtcatatcctcatccagagcaacaaaagttccataagagcacacaatttttgcaaaacattgttttacccacaag

SEQ ID NO: 214196 - DNA, 378 bp, Glycine max
agacaacccgataaggagacattcctatgggtgctttgtaggcagtccgatgtgcccaatgagcatcatcaagcctggtactccaatctttcctgcttggctggacaatcttctctaaaattcgctagatttctcggttagaaaattctgcctgtccattggtctgggggtggtatggtgtggataccctgtgtaccaccccgtactctttaagcagggcatgtcattgcctattgcaaaaatgggttccttgatcactaacaattgctctaggtactcccaacctgcaaaatagatataacctgacaaagtctgggacaaccttagcaacattaattctagtgggcttggccttcacccattttgaaacatatccac

SEQ ID NO: 214197 - DNA, 463 bp, Glycine max
tcgtataaccttctgtgggcttgagcctgtatactcactcttattcatttatagtgtagttcacacagtttacattccaccaaatagctgctttcaatttgcaattgaagattctttcattgctggatcaagctgattttgggacaataagttcattaaatgtgaattttcattattatggttggatcggtaatagatattctatatagagagacacacacacacattggttgaaatagtagctatatttttggggttgttcaccttcttgtttcttattagtgagcatttgcaataacaatttacaataacaactattcgaacgacccatttgtagtttttattaaccctaattgaagctctgcacctctatttttgtatgaatcatgttctttgttcaatctgttcgtatttacttgtgatggttagcaatgactagtaaaatggatgaatatcttcaatc

SEQ ID NO: 214198 - DNA, 423 bp, Glycine max
  unsure (1)..(423): unsure at all n locations
tcacctgggctgcagctgaaagtggtaacatttctttatttacccaataaactatgggcaaatttaggtatctctaannagttttggtctttggacagagattaacttttgaggatttaatcacaatttaaactgttcaccctattttaacatgcttaagttaatattgcaaacaaaacatttgacttatttaaatgccaatgaaaatgctatttgttgacatttacacactacaaacattgtacccgaaaaagctaaaagtccaacattcagtgtgtatttgtggctgtgaagtgcctacggtggccaacatttgaacttgaaacgtggactcaactttaagcttagtggctttggtggtccaaaattgcataacgtatgtcaatgcctatgtaaaaatattcccacaaaatatcgaaacat

SEQ ID NO: 214199 - DNA, 445 bp, Glycine max
  unsure (1)..(445): unsure at all n locations
gtanaattngaattanaacattcagaaactgctggtaatctattaccatatatgtgtaatcgattacatagtgcaaattttgaattcagattttaatagctgttattaatcagttttggccactggtaatcgattacatcctctggtaatcgattaccagagagtaaatttcttgaaaaagactttgtaacttanatttcttggccaaaccttttgctacttcaattggaattcccttcctattaaatataccctttctaagactctagagactatcctgatcatccatcttgaatatctttaattcctttgtcttgaataaagctttgagacgcatgtgaacctttggcatcatcaaaacattcagcttgatcctttgtctacatattggttagccatgaatctctaaccttgcttccctagcatggatataataaatgcatgc

SEQ ID NO: 214200 - DNA, 312 bp, Glycine max
gaaaaataataattctctgagcaaaccgtatatttagttgataaaatcctatggcatcaaatggtacagatgacctcacgaaatacatcatgtatgaaaataaatctcaatcgatgtgtgaatattatctcacattaagttgctatcgcgtatgctgaaaacactttaactggcataaatgattgccagtgggcgaccatagtgaacttattctagtatatgaactaatcagtatcgcacgatcattctatgttgctataacgtgagctatattttataaatccacagcaaaccaatatctgcttttgatct

SEQ ID NO: 214201 - DNA, 401 bp, Glycine max
tccatcatgttacagaaacgcgtatcagatatttcttattgttgcaaatgggttgtgcagacccatcaatgatcaatctgccccagtttacataaccattggagatggaggaaatttagaaggactagctattgcgtacgtatattagcttgccataaacttatctatataacttcaaaataaaaacacccttgaacatacacaagctcaaccaagtatagcaaaattaagcatccaagttccaagatatgatataaaattaaataaaattttaagtgtacatgtatgtcataaaacaagcaacaattatacattgcaaaatcattgtactacataaaactatgaaattaaagacacgaatatagaaaagcacatgacagtgtgacaagacaattgtaagt

SEQ ID NO: 214202 - DNA, 303 bp, Glycine max
  unsure (1)..(303): unsure at all n locations
attatattggaattatacctagaaattcgcttgagtaaaaaattccaatgttaattggtgataactttgctaattgcaaagaacaaattctttngacattgnggtgcatggaattggacttgacacttcgtgtggatgaaccacccattcccatggaaggtagtgctcaagttgaaaaggaaaactatgagtgatgggagcaatcaaatngcttaagcttgatgctcttanagtctcatataagccaaagcataaaaggatccattccaggtaatgatcaggttaagacttatatgaaagcta

SEQ ID NO: 214203 - DNA, 427 bp, Glycine max
  unsure (1)..(427): unsure at all n locations
actaagcttaaacagatttagtaatgacccactaacctagaatttaaataacttaatgccattaacctatggaattaaaaaaaacttaatggctgagtgtaactgaaattgtggcaaccaaaagtcacccccattatccaacaagtcagccaccatttgttctcccaaaatgctgatgcctatgttgccaattgtgcccttattacaacttgaactaaacctaactaaagcccttttagttgattaacccaaaacatatttttggtcagccaactttacaaggattgggccattatttagacagactaaacactctaaaattgaaacaaagtggtgtcatttattcctcctccatttgggccatgatacaactcacaaccttggacttttctcacttgaacttgngcttgattcaaatagtatggac

SEQ ID NO: 214204 - DNA, 327 bp, Glycine max
  unsure (1)..(327): unsure at all n locations
atttgagaaaaggtctctagattgccttgacttgcaagtgacacgtataacttcatgtcaattntagtggtatcagaatccttttgggattttaaggaagcctaactnttgtagccctttctctgacctgaatatctttcagtattatttccaacatggtacaacagaacatttgcaatctttttgcaggttctggccggattttgccattcttgttgttatcaacatgctggcttacttttggtttcatgtaagtataactacttagataataattcctttagcccatgtgaactcctgttgttattcattgacacgtgtctaata

SEQ ID NO: 214205 - DNA, 350 bp, Glycine max
acgagaccaactatatgaagcaaaatatgcctagagtcgtgcgctcatttatagtaagagtgggagacgaagttagaaacattatgttctaaaataatctaggctacaacattcaatccttaaacaagagagaaatttatttgcataagactatcaatgtcgtcatttatttctctaaccatttgtgtaattattctcgggtctctcgtatatatagtcgagagaaagtttctaacgtgggtacaatatttctcattaaagatcttttttgttttactcattcgctaaggatctaagataccgttaaaattttgttattcgccattaaaccctcatgttgtgagaaatct

SEQ ID NO: 214206 - DNA, 404 bp, Glycine max
  unsure (1)..(404): unsure at all n locations
tgagctangtctagtgtcacttagagccgtatctgcttctatgtnacatataaacccaaagagaggggataatgaaacaaataatcatacaagcatagaatactgacatagctctttttaagcatgatcgagtgcaactgctacaagaatcctatacccagatgatattgcaagatgcacacctagataaattgctatgaggtaattcatgatatcaccatgagtaaagcggcaaaacaacatataacacagacattaaaaggatcctataattgatgtaaaaacaaagctacaataaaccaccttctttttacctaccatcactccacatggcactgaagctgagatatcagattcataatccgagtaactaaatatacgttagagtgaggagttatattgta

SEQ ID NO: 214207 - DNA, 381 bp, Glycine max
  unsure (1)..(381): unsure at all n locations
caagcttggagccaaaatttcactatttatgattagtgaatnntagttatggttcagcccactaatccaagatcaattccaagattctccactaagtgtgcttaggtgtcatgagacatgtaaagcatgaaggacatgcacaaagtgtgactatatgatgtggcaatgaggtgtagtaagcaaatgctcacctccccctctaaaatttaattggattgggcttctaccaatttaattaaatttatttcccaacacacatcanatattcacttagtgcatgtgaaattacaaaactacccctaatacaaaaactagtctatgtgccctaaaatacaagggctgaaaaatcctatatttctagggtaccctacctacattatg

SEQ ID NO: 214208 - DNA, 407 bp, Glycine max
tctggtatagttccacaatttgtggttattttgtagcgacttttgtaacaaatcctgtttttcggttaatgctgtctctagaacatttccattggatttaatgatgaaatttgtacattgtcatgtgaaaaagacgctaagttttgaattgcaaatgtagcacttgggctaaactcaacaatgggcttagcacatacctaccgctaagcgcatcttcatcgcgcttatcgcatatgatgatctggcacagcatcatcatcaaagctgcatgctaagcgcgagatcaatgtgctaatcaaagtatgtgtgattgaggccgcacccgaatcaaacaaacattaaaaatacagtatctatgaagtgatcctaggtcgtctcccaacgatcaatggtcaaccaaacgttca

SEQ ID NO: 214209 - DNA, 335 bp, Glycine max
aacatcaggagctgtcctcctccagtctttcttgtcctgagatccctccaaacgccaactgtctttcagtatgggatcagctgagttcacctgagcaaaaagccaagtagatggatatcatcctatcattttccaaagatcaggtaaaacctatggatattaaagggatgaaaatttagcaatcaaacctatagtttaagtaaccactcaaattcaaccataagaacaaaagatacagctacatatgtattcaactattacaaagtaaacctgattaatcaaccaaacagatgtgcatatgtaagagaaactacagaacttccaattacattatt

SEQ ID NO: 214210 - DNA, 409 bp, Glycine max
tgttgctattcctaattataatttgtttcatgtcggaatatataaagccgagaaggaatatcaaatgctagctagcttagcttctaatatacttatcattgtgcttatgctgtcttcttttttttttatcattgtccaatgcaaatatcagatttcaattctcattattaaagctaccacctacttcacttgatatttattgaaaaggtaaataacttaattagaaacattgaccatataacattatgcttcaccagcctcattcctcaatcaagcatgatagttcccattcaatgatattagagtgtaattatatattacctattcataagcatccgcatatgcaatgagatgtcatgattcttctcaccaccaataacccaattgacagctgcttcaacatcttttg

SEQ ID NO: 214211 - DNA, 307 bp, Glycine max
  unsure (1)..(307): unsure at all n locations
catcaagctatggtaaattgtgacctatcttggtagaagnctccacagaggccattgcctccctcgcccagtattatgatcagccgttgaggtgttntacctttggggacttccagctatcacccatggtggaagaatttgaagagatcctatgatgtcctctagggggaaggaaaccatacctcttctcagggttctacccctcattagccagaatttctaaaatagtccaaatctcggcgcaggaattagaccgccaaaagcaagtcgaanatggggtggttggaataccgagaaaatgtttgga

SEQ ID NO: 214212 - DNA, 423 bp, Glycine max
  unsure (1)..(423): unsure at all n locations
tgaanggacacccacatttcatactccctatatctcttctaacaaaatctttcttcctcgacccatactgaccagtcatctcacaaccaattatcacaaatgaagtccttcttctcataccagtgtttgtgtctgacctcataatcaccgccactgcaaaacatcatctcatgtagcaaacatcttgatgcaatcctccctatgaatggaccagtcactatagctatgagcacgaggctccaagaggattgggctagagtagctgaagaaggccctatggttctcatgaacattatggtagatttctaagcccatgggccaaggttgggtccaattatctttgtacatattagactatgatgtcattatatttggtccttgtatttaaggctccataatgtaggtagggtaccctaaaaatat

SEQ ID NO: 214213 - DNA, 306 bp, Glycine max
  unsure (1)..(306): unsure at all n locations
actccacccatatttggccttgacattaactatacttaacactgccgacaacagcgtcaaggaattcttgcaccccgtatacaaaggcttctttgaatcactttgcaatccttcatacataggagcatgtacttgctgaaaagactcttgtccaaggtcacgaatcatatcctccaagtgatctcctatttctacatcaaacggttcagaatgggacctactctgcatgtctgtcaatacaccatgccatatccacgtcgtgtaattcttcttaatcccatcacacaatagatgnctccatatgtc

SEQ ID NO: 214214 - DNA, 364 bp, Glycine max
acttcattattggtatcttgtccagctgtatctgcacatgacattgcacttttgcactgtccactaccgaacttaactcttttccagcttctactcgatgctcgcatatactatggatgcagatacttatcatgacgtagctcacattcatgacagtatacattgtcatatattctgtacttacatgatgctctactttcaagcttgttaaaaacacgccattgcttctaatggacaacacctccaaattacatactatgtcatacgatagcatgttcttattgaccatgctaatatattttatacacccgttactgacatatctacttggaatggactgtataaatgaatgattcattatcta

SEQ ID NO: 214215 - DNA, 402 bp, Glycine max
  unsure (1)..(402): unsure at all n locations
gagctgcagcttttctaaaaatgatgataatgatggaatttagnatcngaaagaataaatgtcgacattgtgaaaataataatcaaagaacaaaacaatttctcatttatcacaaagaaaaatgagtaatgagttttataagtgttaaaaaataccaatcattatgtaactaatgactgatttttaaaaactggcgtcaacatgtaatttagttcacaatcaattaaaaaatacgaagcattaaatcgttaggtgtagtaactttcaatcatttaatatctttagcaataatattaccgatatgtagccctattcgtcataatatgtagccatattcgataatttaattttaaaaatacaaaccataatattaaatttacatattggaatatatgctggtac

SEQ ID NO: 214216 - DNA, 469 bp, Glycine max
  unsure (1)..(469): unsure at all n locations
tactcactatattccaatgttgacgattgctcgattccatttctttatttcntatatttcattatagagatgtagagcagtaacttatattcacaattgtattggaatgtctcacagggacataaaagatgatgtcatgcttgctttcttcttgaaaataaattgaaattctgatactgaggacagatgtcgtacatgatgtcacgacatcccgcttcagaacatgcagattatatatgacagtatgaacagattaaacatgtaaataacacaagagaattgtttacccagttcggtgcaacgtcacctacatctgggggctaccaagccagggaggaaatccactaaaatagtattagttcgaagatctaacagccactgtatacaaccttctcacctaatcactaaccatgcaacttctacctaatatccactcttatatatgagaaccactctcactccctctcaa

SEQ ID NO: 214217 - DNA, 440 bp, Glycine max
  unsure (1)..(440): unsure at all n locations
gaccttaagtcacctgaggcatgcaagctnntcatttgccttgtctctgtgaattctctactaagctacgcngncgcaattgctctctcaactctctccgccaaagctctctatggagctaagaatccctgtcaaagtgtttcttttccttccatgtaagtattgtggttgaatccatggcccctttggctgcgtcgtgtgtggctagggcaacaatgattaatttatttattttcttgattactcaattgttttttcatctatgaacttaggattcttaattctaaaccagtatgagcgagacattgatccattctaagcatttgcaaactctacctattgtcttataaccccattatggtacttctagtgccattttctgtattttttacatccatgtatacaaatatttgctgatttaaaaaaatgttttcttttca

SEQ ID NO: 214218 - DNA, 458 bp, Glycine max
tactcagcttaatcatcttttaaggcagcaatgacagaacgtgcatcattatttatgaagaatattgttgaatgctacaaggtgtttaagcacatcaatatgctggttgacgttggaggtggccttggcgtcacacttaacataatcacttcaaaattagaggtatcaattttgactcgccacgtgtcataaaacatgcctctccctatcctggtatgatctctagtttatagtctagttctagatgttgattgatggttcataagaaaacataaagacccatatacagagctcaatgtccccacaatccaataaccattttctggttataaattccttaaccattagtcatcaaaatctactatatatattagtgaagtaagacaaagcttagatacaattccttatatatcttcaatacagctctctaatctgatttgaacttacttccataattc

SEQ ID NO: 214219 - DNA, 337 bp, Glycine max
  unsure (1)..(337): unsure at all n locations
agcaaccctcacctcttgagctatgctttgagattgcttacggaaagacctttgaaccttgatctctttgggttttctctgaaagattttcagacggtgatgcctctaatgaggtgtgagagtcggggcgcactttatcctaacacgagtccaagaaanatttttgttagctgctgaacacaataaaattgagtataaatactagatgaagcaatntaattttgaagcaaccgtgatacagttatgcctactctcaataattcttcatttgtaattattgatgtaaatggtggaaaactatcacacctagactatgaggagaaagtttttttttttt

SEQ ID NO: 214220 - DNA, 451 bp, Glycine max
  unsure (1)..(451): unsure at all n locations
ggattaccagaacttattcaaaactgtgtgaagaatatatatgtttcaaaaggagatttggaacatcctaatctagttttctatgtgactttgacagtaactcactggtcacttcctcagtatcaagacaagagtaccatatactaaataatgcattacttcccttctcttgtatgctacaaaacccttatagtcctctcctttgtttcaatttcttttatttctcgcttgccctttattcctctcccttgtaaaaccttattgttggtggtgatgattgaagaaccttgtaacttccataggaattgacatgtgtctaaacctaacaactctattgcccctagagtgagtgagaatttgactcatgacaccccctactggaaccggttgtactttatatatcacttaacttcaaaactctatggtatgtacagttntaaatagcaatgat

SEQ ID NO: 214221 - DNA, 335 bp, Glycine max
  unsure (1)..(335): unsure at all n locations
cagccccttaggcacttctctctctttcgaatctgcttaagaaaatagtttccgtgaagaaaatacaagctgaggcgcttccgtaacgttttcgtaacgattctgcgagtgatttcgcgaatgttgtcgaccgttcttcgacgttcttaattcgctcttcatcgntcttcagtctgtaatgggtaagtacctcaaaccaagctcttcgattcattctatgtacctgtggtggtgcacattatgattcaagtatttgcattcttggctcatttattttttatatccccgtttgacgtgcgtaagccatgttatttaagtcatttctcgcttaacct

SEQ ID NO: 214222 - DNA, 415 bp, Glycine max
  unsure (1)..(415): unsure at all n locations
gacactactctgaaaacaaatatggcatacaacctcctcccataaatacaaacatcaatgtaaatttagagcaagcttatgcgcatatttccttacgaacgttcacttgcacaagacatcctatcaactaagaaaaatgcacccatatacaatcaaggtagcttcattacctagattatgtacatgtacttccaaggtgtatttgttatttacatcacacacgacctcttggctgaatttacatacatacatactcaaagcattttggggtaccaaaaactgcacatgcgctcatcttggtatttctaatacccatacatatacaaacttcacgatgaatcttgactacctacacaataatgtgctacatttcatgactttttntttcaaagttttgtacctaaaccacatgcaa

SEQ ID NO: 214223 - DNA, 407 bp, Glycine max
  unsure (1)..(407): unsure at all n locations
ggatgggacggacacttcctacctgtatatttcctacctctgcttatgactntgaaggggccacaaattcaacttacatagatggtgcacaagttgtagaataaggatacatggcttcctcttgttttggtcaagttttaactgagacttcattcttcgatctactatggtctattgagttgatacttctactttttttttacagggataacatctgaattacaatcatgcaatagtttatttacaatatatagtgttgtttaactatatataattgatcgagttttatacaattattttgttgaaataactcagaacgttattatgcagggtaaaaaataatggctgaatttcggtaaaaatttaacataatttaaatgtaatatttattaagttaaaaagtaaat

SEQ ID NO: 214224 - DNA, 420 bp, Glycine max
ctccaaacatgtcatgggaagataattcatggtctactttatcgaatcagtccgcaaccaaatcagctgacgactcagtaagtgaggcttcaataatttgtagtcattataatttgtagtctagagtagtggtttatatatacgcattcataaacatgcaggctagctatgctgtttgttaaaacaagagaggaaatgttatgatcgatcacccatttgcataagagaggattcctctgagaagaaagacaatataatcgcttctcttgtgtgaagaaaattatcaagtgggcgcaattcttccggtgctacaaattaatggtccatattaactagcattggaatagccaatttatcgcttctctctgtaacaagcatttgtatacccaattaatgggtcatattttgcaacattcatgc

SEQ ID NO: 214225 - DNA, 251 bp, Glycine max
ctgatgcaatctatttgattgacaagagatttatactactcttctaatgtagtggacaacgtaaattaatatattataatataaaatactgcttaagccattcaaatcaagtcattttgaagtctaccaatagtatcatgcatgtcgaagataatgagaatcaggcatcgtaatgcataacacaaccaaacattaaaagataacatgctttctaaagccaaccaaggtaaaatatgtattcatatttcatg

SEQ ID NO: 214226 - DNA, 140 bp, Glycine max
tctcatcataagcatcatacatcgataggcgtcaaagagaaagaaaaacatgcatggtaatgcggaacacaacagaacattataagaaaacatgctttctaaacccaaccaaggaaaaaaaagctccatatgtcatgaaa

SEQ ID NO: 214227 - DNA, 73 bp, Glycine max
acgggtagtattatgagaagtcctactctctctctctgtctatgttataaaagcatatgatgagaaaattatg

SEQ ID NO: 214228 - DNA, 284 bp, Glycine max
gcattcggacacttaaaactcagcttatactaggacatatagatgagagaagttcaattgtgcaccacgtaaccacagctatgaacaactaatacattgaccaagagacgtggggcatatttggcggctcactagtgcgcctatatcacgctatttcatgattgaatttagattgatccttgtatataaaatcactcatattgattgaaacatacttacttattgcgtgcttactgagtcctagatggacatttgacatccgattgtgacatgaaatcacttcg

SEQ ID NO: 214229 - DNA, 344 bp, Glycine max
  unsure (1)..(344): unsure at all n locations
agctntntattgtcagtagatgaatatgattctgtggccacctcatggactcctctaaggacaatagcatcatttcttgcactgaattgttgggagttggaagtcatcttctcaatcaaattcctagcctcaacaggtgtcatatcaccaagggctccaccattggcagcatcaatcatactcctctccatgttgctaagtccctcatagaaatattgaagaatgagttgctcacaaatttagtggtgaggacagcttgcacataatttcttgaatctttcctagtactcatacaagctctctccactaagttgcctgatgcctgaaatgtctttgcccatggt

SEQ ID NO: 214230 - DNA, 466 bp, Glycine max
tcatgatgatgaatcaagttgattcaagttgttttgttgataacaaagatgatgacaaaaagctcacaagaatgatttcaagattgagtcaacaagttcaagattaagataaatttcaagagaagaatcaagaagattcaagaatcaagagaagcttgatttcaagattcaagagaagaaatcaagaagacctcacatgggaagtattgaaaagatttaaaaaaaaaaaacaaacatagcacagttttgtttttcaaaagagtttttctcaaaattttctaagttaccagagtttttactctctggaaatcgacttccagtttcctgtaatcgattaccagtggaaaagtttgatttcaaaagctgttaactgaatttgaaacgttcacaattgtttttaaatggtgtaatcgattacaatatattggtaatcgattaccaatgtatctgaacattgaaattcaat

SEQ ID NO: 214231 - DNA, 403 bp, Glycine max
  unsure (1)..(403): unsure at all n locations
gatcctcagagtcacctgaggctgcagctattagaggagttctttgtcttaataagggccctcaattatgattttcagccatggaggtgcagctgaagataaaggagaagaggtgagaggaggtgtcatccactagagaataagccatggaaggagaagcttcaccaccaagaaagtgtcttggattagaagcttagagaggaagcgaatcagagagagagggggggcgtgggaattgaaggaaattacggagagaagttgaactttgaagtgtgtctcacaagtttcacattcatcaaagttatgacaagtgttacacatgtttctatttatagcctancacatgggaagcttccttgagaagcaacgaaggtagattctctggaagctataagaagaaagc

SEQ ID NO: 214232 - DNA, 441 bp, Glycine max
  unsure (1)..(441): unsure at all n locations
tctgggtgaatgaaactgcctaagtaatttccttttattcaaaaaatgtattgctttcttagcgcacagtcgcgcttatcgagtcaatatgacgtttggttttaacaaagccttgcgcttatcccgacctctcgctaagcccaattccaaattttcaaattctagagagttttgggattagcacagcaggcctacacttaaaattgttntgcaatttgcgcttagcctgagatgtcaagcttagcgctaaatcaagctctaacttatagggatagtccaggcttagcgcatcgagcacgctaagcgcaattctatgaatttcaaaaacagtgaaggattggtgcttagtgcatcctgtcgctaagcccaattcgtgaaagttcatatccagagaggaaattgagcttatcacatggaagcgcgcttagcgctactacaata

SEQ ID NO: 214233 - DNA, 315 bp, Glycine max
accatctcggagggttcagagcacacgagcctcatgtgtgctctccctatacccacatttatttgcccttgaccctgtgtccatcgtattacctcattcttctatcgtgtatatcctacatgtcttgcgctttatgtaggtaacatgaattcttataattgccaccatctagactggctctagatactcgatttgagtatctatggttcaagatccctgttcttggacttgaaccatgaattggggtgaacttacgttactttgaccgatgcattgccatttacttggctgaatcctaaacaatacaattcttac

SEQ ID NO: 214234 - DNA, 310 bp, Glycine max
  unsure (1)..(310): unsure at all n locations
catagtacacaagagcacgattgattagagaaatatatttctttgcatcagcttgtttgttggaaagacccaacatttctacctattgctgtcattttatttaccttgcattttatagtttttagcataaaagtttagtttaaatttggtttgaaggatgtttcaaagactcctccgcagctcatatgggcgggaaaaacactacaaatgtttctcccaacatacaatggctcactaattacttgtgacgtaggcatcactagatcagcgctacaccttgcgtgacnggtatgtgtatctactctttgta

SEQ ID NO: 214235 - DNA, 474 bp, Glycine max
attacgagacacttagatactcagctttactgattgcacgtccattgattcaaatttgtattcgattacaagatattggtaatagattactagtgtatctgaacattgaaattcaaacacaattatgaagaatcatatcctttcataaaaagctttgagtaatcgattacatagttttggtaatcgattactagtgacaagttttgaataaaaatcaagagatgtaactcttccaatggttttctcaagattttctcaaggttataactcttacaatggttttcttcaccagacatgaagagcctataaaagcaagaccttgacttgaatctcaataattcttacaatctttgtcaacatctttttgaacttcttcttcttcatccttttccaaaagctttctaagttttctggtttcaaaaccttgttctttcacagaaaacaaaagtgtgctatatcttttcattctcttct

SEQ ID NO: 214236 - DNA, 221 bp, Glycine max
gatatattaacggggacctcatatctagacaatcccgagtataaaaagttattcgtccgttttgaattttgctcaaaagcttcaacaattctaatttcgagggtgctcgatagattatctggactcaatcagacatccgagtaaaaagttattgtcgtttgaatttgttcagagcatcaagattctatttcgagcgtgtcgatatattatgggactcaatc

SEQ ID NO: 214237 - DNA, 418 bp, Glycine max
  unsure (1)..(418): unsure at all n locations
gtgacatatttcaaacgacgaatactttgtactcggatgtctgattgantcccgtaacatatcgagatgctcgaaatggaatgttgaaactctcacaaaattcaaacgacaataactgtgtactcggatgtctgattgagtgccgcaatatatctagatgctcgaaattgattgtcgaagcctctcagcatcattctaacgacaattacttattgctcggatgtctgattgagccccgtgatacatcgagacgctcgaaattgaatgttgaaactgtcacaaattcaaacgacagtaacactcttactcagatgagtgtatgatgtccggaatatatcgagacgacgcaattgaattctgaactgcgtacaaatcatactacgataacttttactcgaatgctgattgaatcccgaat

SEQ ID NO: 214238 - DNA, 340 bp, Glycine max
  unsure (1)..(340): unsure at all n locations
cgctngccgccacagagttttacgactacgtttctttgnttttgaacaagctacaaaaggagagagcaagaaatgaagagccaatggttgatacatggacggagatgaaaaagatcatgaggaagcggtatgtgccggctaattactcaagggacttgaaattcaagctccaaaaactaacccaaggcaacaagggggttgaggagtatttcaaggaaatggatgtgctcatgattcaagcaaatattgaagaagatgaggaggtaactatggctcgatttcttaatggttngactaatgatatctgtgatagctgcacgagtttgttgaaatggatgat

SEQ ID NO: 214239 - DNA, 438 bp, Glycine max
gatgcgcatattgcctgacaaacgttctcttgcacaagtctttatattaaccgttttaaatgcacccatatacaatcattgcagattgcgtacctatattatttacacgaacttgcaatgtgtatgtgatacttacatcactcacatctccttggataaattcacatacatgcatactcaaagcattttgggggaccataaattgcacatgtgcacatcttggtatttataatacctatacatacacaaacctcatgatgaatcttgactatctacacaataatgtgctacattacatgctcttttgaagtttttgctacctatagccgcatgcaaattcaagtatattttccttcgctggctaaaattgtattcaaattacaaggtatacatattttgggtaatgaatcttctttacatagcatgcaacatatctat

SEQ ID NO: 214240 - DNA, 323 bp, Glycine max
ttctaccataagaaagagctagatataaaaatttggagctactcaatagtggttgtgggaagaaatgccgactttgtggaagtacgagaaggaaaaataatgtggtggggaaaagggatgcgtgttgttatcgaattctcaaagaaacttggaggtttacattaaatatgtgtcacgcatttgattatggattcccctcacctttcttatttatgagccaaaaaatcttggtagagcaattttgatacctggactaaagcaaattgctatttttggtggtcccccagagtgtgatatatttgaattggtggtgtggctggctc

SEQ ID NO: 214241 - DNA, 452 bp, Glycine max
tctatagtagtataatgaagtcggctacgatggggagtttttatctgacctccaataccaaatgttgattcagaagctatagtggagatcggaatagttaacacatcccttgcaattgcttgtagtgttggatactttaactcattcaattttcaccatattaagatatcaaaatctgaacttcttggtaaaacttcctcctctaagtaatgatccaactctgttttcatagttgaagtgcttgcctctttctttctttcaatgtatctatcataatcacacaatttacttattccatcactaacaaaatctgacgatcgaaaagaactagtaaaatcttcatgctctttggcttgatatttcaaaaccaaatcataacacaagtttcggatcctattaacttgtggaaagaaatccaaggtgtaaatcgattcaaagaaaactaagtaact

SEQ ID NO: 214242 - DNA, 325 bp, Glycine max
ctgattagctaggccaaaaatactgatagaatatctcatcatatattttataatacattctatcatatacaaactgaataactaagctaagaatacttatagaatatctcattatatgttctatcacatatgtattgttatggaggttatttttacaatttgcgctgtacatggcttatttttttctctttaactctatatttagccatttatagtatcaatgtttatattttgttaaagttattttgaatgcacacttatacaggttattattatataaaacagtgataattaaacatcactttctttttcctttggcttatgt

SEQ ID NO: 214243 - DNA, 366 bp, Glycine max
gatgcttccgtaaccaatgatcttctcaagcaatgaggagaagatggtcacagcgaggaatcaacctcaacgtgccactctctttgaaatcacctatgcatatgtagcacctagaagaaacaacacttgaactacatgaacccctccctacttgaaagtaaagccactgcgaatagcattaacaacttgtgtcaaagtgataaaacacctgttcatcagaatcttcttccgaacgagactggcgagatggaggaataacagccaataagtttagcatcgtacgaccaccagccatgcgaatacgcacacatcgcaaagctatggcgacatgtaagaagaccaagccattacaaaagctactccata

SEQ ID NO: 214244 - DNA, 326 bp, Glycine max
  unsure (1)..(326): unsure at all n locations
aatcgagcgtctganaagggaaggaccatttatacaagtggctccattagcatgcatgatcatgccatgcgtagacattaaacttgttttgatatgtgtttaaaacttaataattttaagattaaatatttatttatttaccatcaatgcttttttttaagggcaatgaaattgtttgttctgtacatattgatgaggtctttcagcaaacctatataagaaaggattttggtgaatttgtcaatgaaagatctaagagaacacatgtcaatttttataaatatttttttcttcattttattcacattactatgttattgaaaagt

SEQ ID NO: 214245 - DNA, 400 bp, Glycine max
tgtgctattccaagttcattaatcatacctttattccatattgcttcgttcactccttcaactatggccatgtattctgcttcagttgttgaaagggcaacaactgattgttgatttgcttttcaactgattgctgtaccaaacaaagtaaacacatatccagttaaggactttcttgtatctacgtttcctggaaaatctgcatctacatagcctgtgattgctgcttcatgtgttgtcttcttgtaccttaatccagctttcaaagatccatttagataccttagtgttcacttcacaactttccagtgtatgctgccaggatctcccatgaatatgcttataatacttacagcatgagccaagtcatgtctattgccaaccattccatacattatgc

SEQ ID NO: 214246 - DNA, 395 bp, Glycine max
  unsure (1)..(395): unsure at all n locations
gtatgcgaanggngtaggatttgtagtaaaagattcaagtcaagcggagaaactgtagaaagagcaccaaaggttcaatcgaagaggaaaggttgttgctgctggtttccatgccagaggaacaaaatatatgccaccaataatttgcgagcattaattttaagaatttacattcttaattaatcacatatatgattattaaataacgtttataaaaaattactaataaacttacgatgtatgagaattttataattatatgacaagataagtacacctaaattaaattatcaatttatgcgaaatataaatctcttctttcctctcgtgtggaaatccttcttattgccttctctcgggtaaatccaacctttattaaaataaggcctaagtta

SEQ ID NO: 214247 - DNA, 433 bp, Glycine max
  unsure (1)..(433): unsure at all n locations
cgacacttnatactcagcttatttgttaacccttggaccgacctgttttactgttacagctgtcacatcccctcattcacttcaactgtgtgtcctcaaaatctccaatggatactctgcctgacactgctgagagtctaaaataaagaatatgcaaataatctggacagaaaaagacttgtgtggtacctttgtgaatgaacgagaggggtatttattatgaaatgagtgagcattgcatcctccatatagtcttaccaatggttttgcctcacaccacacagtttatggatggcaagatcttggggtggagaggctgtaacattagcacgtagattgaaccttttataactacgcactacgaagctctatggcaaaagattccttcacttgctgaaggacattaaatatctccgtggagatcctactcatc

SEQ ID NO: 214248 - DNA, 353 bp, Glycine max
  unsure (1)..(353): unsure at all n locations
gtcacctgcngcatgcaagctngaaggaaaactagatgccttggtctacctattaactcagctggccataaatcagaaatttgcccctgttactgttgcaagagtttgtggtctatgttcttctgctgatcaccatacagatctttgtccttctttgcaacaatctggagttaatgagcaacctgaagcctatgctgcaaacatttataatagacctcctcagtagcaaaaccaacaatagcagaataattatgatctttcaaacaatagatacaatccaggttggaggaatcatccaaatctgagatgggaaaatcctccacagcaacaacagtagcaacaacagtctgtcc

SEQ ID NO: 214249 - DNA, 435 bp, Glycine max
  unsure (1)..(435): unsure at all n locations
tgagatgaggaagtgtagaagggtgaacttcctgctnttattcgttgaccacatagtggtacctggagatatgtcgcggtgggtcaggagaccttggggacgtcaggtggggtgctattgcccaaaaccaagcttgaccaatcccgacccaacccgggcatagtctgtcagtgagaacctgtgatgtacctaaacatgcgagctcctggcagtcaacagataaaaggaacaaagaccacatagcaagaaggcttgtggtggctggccagctgtgaactttgattgatatgtgggttatggcctctggtaatcgattaccaagggtgggtaatcaattacaaggcttaaaattgaagacaggaggctaagatggtctctggtaaatcgataccacggggtgtaatcgattaccaagcttataaggtgactggaaca

SEQ ID NO: 214250 - DNA, 416 bp, Glycine max
  unsure (1)..(416): unsure at all n locations
tgcagcttaaggctaagtcttcatggttcttccnctatctctaacaaacactatatactgtggttaatcactgagattaatacagttaacaactttcaaatattgtgaaacattaagcattatccccataaccttcagattaatgatacatgacacttgtagaacttaaaatgtagtacaattatatttaagcacttgttcgtcataccaaaacacaaataacacacacacacgcacgcacagacatgaagtaaaatatgcaatttcaacatgcatggaatgaaccaaaactatnttttggattctacaaaataataattctcgaatcctaactcaatcatggcaaagacattgactacgtatcgcactcanacatatgactaaacttttggatttcctctcaatacaatattatt

SEQ ID NO: 214251 - DNA, 464 bp, Glycine max
  unsure (1)..(464): unsure at all n locations
tgatgtgaganagcgtggaagagtcagtcttcctacttttgttngttgaccacagagtggtacctggagatatgtcgcggtggtcatgagaccttgtggacgtcaggtggggtgctattgcccaaaaccaagcttgaccaatcccgagccaacccgggcatagtcagtctgtgagaacctgtgatgtacctaatcatgcgagctcctgtcagtcaaccaataaaagaacaaagaccacaaagcatggagacttgtgtggtggctggccagctatgaatcttgagtggtacctggaaattggcctctggtaatcgattaccaagagtgtgtaatcgattacagggcttaaaagtggagacaagatgttaagatggcctctggtaatcgattaccaatggtgtgtaatcgattacagggcttataaatggagacaggatgtcaaggtggcctctggtaatcgatta

SEQ ID NO: 214252 - DNA, 302 bp, Glycine max
  unsure (1)..(302): unsure at all n locations
cataccagaagagattntcagaagatattctcaacagtcacatcttttcatttgattcttgaatgaccatcaaaggcctatatatatgtgacttaagacacgaatntgcagagagntttgattgctcanaaagttttatcctcttcaaagattaagagagttttttttgaattaaaaatatcttatcctctcaaagattccttggtcaaacactcgcatattcaataaggaattgtgattgatcttcattgtacaatctatctctttcaagagagaattcttcttctcttcttcttacttcc

SEQ ID NO: 214253 - DNA, 334 bp, Glycine max
ttgaattcctttacaaatcctttaacattcaaggatgcgattctttatggcatagatcaatacattaccctataagaagtccatacctcaataatgactaatgagatgcatacacttctagactccaaatctgatgataatggtgatagcctgaatatttcaaggggaaggaatgaaaagatgggaacaagaggatagaattccagatcaatgtcatcggattcaaagaatggccagaaaacaaagttcatatgctttaattgtcacaaaactggtcatttgaagaaagactgtctacacaagatcaagaaatgatctttggactctgctgaca

SEQ ID NO: 214254 - DNA, 324 bp, Glycine max
  unsure (1)..(324): unsure at all n locations
ctgcagctatggaaaattgtgacctnccttggtataagtctccacagaggccattgcctccctcgcccagtattatgatcagccgttgaggtgttttacctttggggacttccagctatcacccatggtggaagaatttgaagagatcctatgatgtcctctanggggaaggaaaccatacctcttctcagggttctacccctcattagccagaatttctaaaatagtccaaatctcggcgcaggaattagaccgccaaaagcaagtcgaaaatggggtggttggaataccgagaaaatgtttggaggcaaaagcaagaatctt

SEQ ID NO: 214255 - DNA, 423 bp, Glycine max
  unsure (1)..(423): unsure at all n locations
tgaagggacacccacatttcatactcccaatatctcttctaacaaaatctttcttcctcgacccatactgaccagtcatctcacaaccaattatcacaaatgaagtccttcttctcataccagtgtttgtgtctgacctcataatcaccgccactgcaaaacatcatctcatgtagcaaacatcttgatgcaatcctccctatgaagggaccagtcactatagctatgagcacgatgctccaagaggattgggctagagtagctgaagaaggccctatggttctcatgaacattanggtaaatttctaagcccatgggccaaggttgggtccaattatctttgtacatattagactangatgtcattatatttggtccctgtatttaaggctccataatgtacgtagggtaccctagaaatat

SEQ ID NO: 214256 - DNA, 277 bp, Glycine max
  unsure (1)..(277): unsure at all n locations
acacacacattagtcgcaatcactaccataaaactacaatattttcaagttataaccagtttccagagatgaatggaagtataacagcttatacaaggaattntattataaatcacacaaagctcaaaatgctaagcagtcagttgtgtcataaactagacatggagatctattacgtaataaaatatcttagccaacaattcagggtaagacatccattatggaacttgagaatagaacaattacaaggacacagtttcagcaacatggttttaat

SEQ ID NO: 214257 - DNA, 434 bp, Glycine max
tctacttatgtggcagggcgggcttccttcactttcttgtctcctatgcgagctctgaccactgttcttccttcccgcgatgcttcttttcatgtccgcctgagtgggcttatatcctataccatacttcccacgatttccttgggtttttatcatgctatttatgccgccattgtctttgcctaaacccatcccgggttcataaccgttccccaacataactcgggccatcattaccgccgcatcggacagacaaggttgcccaaagagggagtccacggatgaaatgctgaccacctcaaaagactggaaagcggtttctaacgattcttctgcggcttccacataaggcatggaggatgggcagcttaccataatatcttcctcgcctgacacgatgaccaagtgccccttcactacgaatttcaactttt

SEQ ID NO: 214258 - DNA, 242 bp, Glycine max
tcttatcccagtgggtatttgtaggaccaagagctttggcctaccctaccgcttacctagatacctatcgtccaccatcccaccatcatccttgcctatccccttcgacccaaggaagagtttcatgaacaattaaccaaagaaaggcaagaaaaagaaacttggaagaggagatgccaagagctcgagcaagagaatgagactttgaaagggaagatagcccaacagagccgtgagctttt

SEQ ID NO: 214259 - DNA, 436 bp, Glycine max
  unsure (1)..(436): unsure at all n locations
ntataccttagtttaatcactatgcaatgaatgtacactttgttgcacatgtgtgtaggtgagagaaagagagacaacactgtttctggtgggcattgtaattcagtatgcaaaccccatgtggtgaccacgtggtttggttggtttttcttaactagccttggccagcacaatcaagagatttcatttggagttaaactattttcttttatttattttttaaaaaaggaaactaattcaattgcctattagttagcaaaaaaaaaaaatagtgtacttattttaattagaaaattaattgacttagtgatgaagccactttatatcatccatagattttgaaaagtggggaaggaaactcaacttacattttgttaagggaggaaatgcaattggcataatttatagtattagtggatgccttatttcttttaat

SEQ ID NO: 214260 - DNA, 414 bp, Glycine max
  unsure (1)..(414): unsure at all n locations
tgaaatgaggaagtgtagaagggtgagactgtctgctnttattctttgaccacatagtggtgcctggagatatgtcgcangggtcatgagaccttgtggacgtcatgtggggtgctattgcccaataccaagcttgaacaatcccgacccaacccgggcatagtcagtcagtgagaacctgtgttgtacctaatcaggcgagctcctggcagtcaacagataaaaggaacaaagaccacaaagcaagaatgcttgtgtggtggctggccagctgtgaatcttgtgtgacatatgggttatggcctctggtaatcgattaccaagggtgggtaatcgattacaaggcttaaaaatgaagacaggagactaagatggtccctggtaatcgattaccaatgggtgtaatcgattacc

SEQ ID NO: 214261 - DNA, 341 bp, Glycine max
ttatagaatgaatggcataacttttatctcggatgtccgattcagacacataacatatcgagacgctcaaaagtgaagaacagaagctctctagaaattccaatagtcataacttttcacacagatgcccgattctgggatataatatatcgagacgctcgaaattgaacattgaaagctctcgagaaattcaaatggtcataacttttcgctcggatgtccgattcaggagcataacatatcgagacactcaaaattgaacagtggaagctcataagaaattcaaatggtcataacttttcactcggacgtccgattctagcgcataacatatcgataag

SEQ ID NO: 214262 - DNA, 410 bp, Glycine max
ttagtattgacccactaacctagaatttatatatcttaatgccattaacctaggaattaatacaaacttaatggctgagtgtaactgatattgtggcaaccaaaagtcacccccaacagccaacaagtcaaccaccatttggtctcccaaaaggctgatgcctatgttgccaattgggcccttattacaacttgaactaaagcccttttagttgattaacccaaaacatatttttggtcagccaactttacaatgattgggccattatttagacaaactaaacactctaaaattgaaataaagtggtgtcatttagtcctcctccatttgggccatgatacaactcacaaccttggacttttctccttgaaactcgggcttgtattcaaatagtatggacagcacttgtt

SEQ ID NO: 214263 - DNA, 440 bp, Glycine max
  unsure (1)..(440): unsure at all n locations
gcttgcctgacattgtcaacgaaagagtgttgatgttgaatgccataatcacagaggaagggtggtatctagcggagtcactaaagaaggggacaagtcttggaagaggaagggggaggtgagcgattctagtttgagaaatatttgggaaaatgttataaaggtaatttatgaaaaacattgaaaaattgcgaaacagaggggtgtgtataaattaagggaggctagtttatcgacaagaaaagattaaagattctaattatacaatagacattcaactaataaagaggtaaaactagtgtaactttcaaagtaagagataatatgacagaaagtaaatatgctatcacataaattataagaaaaaatacgcctgacaataaggagataatatgtattangcctatctataacttaattggggacataaatttaacaca

SEQ ID NO: 214264 - DNA, 368 bp, Glycine max
  unsure (1)..(368): unsure at all n locations
tggagcttcgccaagtgtccccattgaaatgtaaaaacctttattcaaacctttcaaagttagtgagaaggcttaacgaaaaattctggcacttagataaactacatccttaactgatggcgtgtcgtgacaaacctggngaattactaaacaagagtggtacttgacttaaggtcatttcagatactccccatgcctcggaaaatacttccaaaatggttacaagaagtacctccaaattaattaattgtattaatgaatatagtgaccaaaactcagataacacaactgatataagatcattgtacgaaaagaatataaatccaattaattccaaacaactgataacacccgtcataatatattat

SEQ ID NO: 214265 - DNA, 401 bp, Glycine max
  unsure (1)..(401): unsure at all n locations
tccatcacagatatgtcatatattgatttttgcaagtcatttcccatcaaatcaaggataatgtgcataatcatcatggatcaatangactttttaagatcggacttgtanggaaatttggctttggttgctctggcctttcctttctctttttttttttgngtgagtaagacaccaaacataaagatttggttagtagcttaaacgggcgatcacttcctatcccctcatgtcttgaccaagttacatttcttcctttccttttcactcttttcaacaactntgtacaaagttcaagcatttgttgttccaaagagncttgattgcttctttatttttcttttgctcttttccattttgaatgatgttattattttcttttcttttttccttctttcttt

SEQ ID NO: 214266 - DNA, 376 bp, Glycine max
taaataatgcctttttagtgacccttaattgttctatgctatcagtttatgttcccctatatagacgattgagaaaactatgtctttctaattccaaatttcgggcaggttccttaacaaagtacttgtcatgataccaagtcagtgcacccaatagcatagtgacaacactaacaataatgaaaaatgcttgttcaagttcttcttcctcctctagtagtatagggttttaaccttgtatttcagggcattttgagtagtctttgtagtagggacttttttttttgtgttttcatgtatttttggcatgggggtgagcttagctattatagggcgtgtgtagctaagctctaacttctcatctcaaggaggtgag

SEQ ID NO: 214267 - DNA, 334 bp, Glycine max
  unsure (1)..(334): unsure at all n locations
ctgcagctagtcaggtaaaccacattaaatntattgtgtgaaagcaccacaactttatttatggagaaagtatccttaaaccttactaaaccaaaatgatgctatatcataaaatcattaaaaaaatttataaactcccaccaaaggacattgaagcaatgtgatcttaacacccatataagtaatgtgctcatgatataacacacatgtgatgagaaccaaacaaggaacaaggacattgaagcaatacaagaaattggcggaccaatgacaatggggcatgctaacaaaagaagggagccttgaaccaaatgatgacactttcactgaacat

SEQ ID NO: 214268 - DNA, 445 bp, Glycine max
  unsure (1)..(445): unsure at all n locations
tatgctgcanacatttataatagaactcctcttcttcttatccaacaacttctgaataattatgatctttcaagccacatatacaatccaggttggagaaatcatccaaatctgagatgggcaagtcctccacaacaacaacaacctgtccctcctttccagaatgctgctggtccaagcaagccatatgtttctcctccaatacagtagcagcaacaacaatagtcaccacaaagacaacaagcaactgaggctccccctcaaccttccttagaagagatagtgaggaaaatgaccatctagaatatgcaatttcagcaagagacaagagcctccattcagagtctgacaaaacatatgggacagatggctactcagttgaaccaagctcagtcccataattctgataattgccttcataactggcagaatccgaaaatgtgat

SEQ ID NO: 214269 - DNA, 293 bp, Glycine max
  unsure (1)..(293): unsure at all n locations
atatgngaaanaaatgatntttttgttaaagatcgtatcttactcgccaaatccactaataaacatactagtccttggacccaaaaatgatttaaaaaaatattttttgaaaaataaataatgcataaaattagaagaattttttctttcatattttaagttaaaatatatcacactaaaatatataaactgttataataagattaaatactaaatattaaagtgttaatactaaaatatatcaacgctcatgataatcctcatatttaaaaattcaaaatatcttaccatac

SEQ ID NO: 214270 - DNA, 460 bp, Glycine max
  unsure (1)..(460): unsure at all n locations
actctccatanatagaaatgcagagtaatgtttgattatgaacagtaattagagtcatttcatagaaacagtcactttctctccctcactttttctttctatttcattcacttgccattactttctcaagaatctctggatattaataaagaataacaggaattataataaactatgctatgacactaatctttgcaatgatacattaactcccacaatttccaatgacatactaattgctattaccatttgcaacactattatatgagttgaattgcgtagattataaatgaccatctactagtagtcgcaaattctttaacaccattttgtttattatcttctctgttagcttaatatgtttgatgactataaataaggataaataaattatagatgtaatggatatcacaagcttttagaacattcttgcttaagcttctaatatgtattcttaaac

SEQ ID NO: 214271 - DNA, 342 bp, Glycine max
gcttaataacgaaggcctgttctattggatatatcttcatatgtgaacatttttgttctttctatactaccccattttggagcttgtcctcgacagcagtggcacccatatagattagattcctctctatcttatccgatacttctttaatcaaggtttcctgatctgcggcaactgaattttttacttcataaaatttatcatccaacttcttgtattcttcttcatcaagtccgcaaaagtgcaagtacttaggtccttatacctgcatcagcatattcacgcacatgttccaaaagtttctcttcaaacttcctccatttttggaagcccttcaacatg

SEQ ID NO: 214272 - DNA, 426 bp, Glycine max
  unsure (1)..(426): unsure at all n locations
tcgatatctntccncatgagtatgacatcaagtcatactttttaatgggatcagaacaatgatctactgcttttttaaatgatgatattaatcctctgatttctattaaatgtatgatcttggttttcttcaattttaataggaatattagatcccctaactttaaaaattaataatttgtatcctcttaatagactattaacaaataattatgactaatctagtattaaattaattataaatcaaccaaaatcatttattattaaatatactaatctcattgaagtataaatacattaaacaagaattatcttataaattgactgtaacattgtttctttcttatatattctgattcgaataaaatcctggtaactaatgctctatactttatgaaaaaagatatttatccgacatatataaaat

SEQ ID NO: 214273 - DNA, 370 bp, Glycine max
  unsure (1)..(370): unsure at all n locations
cacctgcggcatgcaagctnngcctcggagatgaagactaatgttatatctcccttgagcttttcataggcgttaatgattcgcaaaatgaagggtttttgtttagaggtttcgatgaggtagagaacaacctcagtgtcggaggtggtggtgaagatggagttgttgtcctctatgttggttcagagggtcttatagttgatgacgaatgacgtgatgtttttttgcatggactgggcaacaatggagtancgaacatggctgatggagaggttgtcatgaagctggttgagttttgattggttgaagactttatagatgatgcccatgccggtgatggatnggaagacagtgttgttgatggtgacaa

SEQ ID NO: 214274 - DNA, 447 bp, Glycine max
cgtgtctgtattctctttattgtagaaggggattatattttacttttgaataccaataacataaaagttgcatgaattcaaacattaaatcattccaaacataaaataaaattacattaacttcaaacattacattaacttaaacagagtcgaaagatataaaattaacatcaaatacgacaattaagtcatgttaattgtgcgacaaagacatattatcttacattttgattacatgcttactaaaaacagctaatatttctattggctcggattgttttccagtagttagaatgcactaacaccttcaacacgtcatcattggttttcagttcaataatttcgaatttgataattgtatctgaatactcatagtgactcggttggcgataaaataatcgtcgtaccatatgtgtgtgatgaataccataagggggaatctcatga

SEQ ID NO: 214275 - DNA, 368 bp, Glycine max
  unsure (1)..(368): unsure at all n locations
agcttctaaaacaagctttcatcaagttgtattagagcacaatagctntaagtaggtgctccttatacctccattacttttcaactttactttctcctccattgttgtttcttcatttttttccatgtatctcttcacatgtcttgtgctaaatgtcgttaacatgattctttagaatttccaccgattaaacttgctatagaagctagatttgattttctatggttcacatttcttgttcttgttcttgaaccatgaattgtgttgaatttaagttccttagatttttgttttggtattttttgtggctgaaacctaaaccataaaatcttacaaaaacattaaaggtaaagaaaaccctcaaaata

SEQ ID NO: 214276 - DNA, 406 bp, Glycine max
tcttagtctcacctaatgaatatgaattcgtggctacttcatgcactcctctaatgacaatagcattatttctggcactgaattgctgggagttggaagccatcttctcaattaaatttctggtttcagcaggggtcatgtctccaagggctccaccactggcagcatctatcatacttctctccatgttgctgagtccttcataaaaatattgaagaagaagttgctcataaatttggtggtgagggcagcttgcacacaatttcttgaatctttcccagtactcatacaagctttctccaccaagttgcctgatgcctgaaatgtcttttctgatggcagtggtcctagatgcatggaagaatttctccaagaacaccctcttaaggtcatcccaactgaaaat

SEQ ID NO: 214277 - DNA, 345 bp, Glycine max
  unsure (1)..(345): unsure at all n locations
gatgatcgagatagtctctagagtcttaggaagggtgtattacatacgaccggaattcctatttgaagtatcaaaagatttggccaagaaatttaagttaaaaagactctttcaagagatttactctctggcaatcgattaccagaggatgtaatcgattaccagtggccaaaaatgatttacaacagctatcaaaatctgaattcaaaatttgcgctgtgtaatcgattacacatatatggtaattgattaccatccgttactgaacgctntaattcaaatattaaagctagtaatcgattacacatatactgtaatcgattaccacaggagaatttcagaaaa

SEQ ID NO: 214278 - DNA, 392 bp, Glycine max
tgttacgctcagcttctaacttctggaaactattaacattgcatcgcctcgcgtgcatatctatcacgcactcattaactcatgcacgtgcacacatgcacatgctcgcacattcattctcttgctcacgcacacacacacactcatctctcacacactctatgacgcactcgcatcgtcattcttactctcacactcacgcactcacacattcatacgcactgtatcatgtacactcgcactcagttgcttctctctcaacacacgccactcacacactcttcttcactctactcacgccactctcactacgaacacgaactccaggtgaacacacccacattaacgaactgcactgaacactgcgatccttcattatatctaacctactc

SEQ ID NO: 214279 - DNA, 414 bp, Glycine max
  unsure (1)..(414): unsure at all n locations
agctntgacaagacagtacacactgctgtcttcttcaacanaataaaatanggaaatctactctaaagatacatctaataatacccataattataataattaggattaggtaaaataaaataaaaaacattattaggtgctcttgaactattatatttcgattagttttcacgtgatatataattaagagttattgattctttttttagtaacttaaaaaatttcttctgtaaaaaaataacttaaattttttaaatgtgtcatataaaaagattgattcatatcatgaatacgtgggtggataaagatcacctaataaatttttctattcaagagtagtgagaaaaattatattaagtgacctataacgtcttagttataaagtctgtacttaattatcccacccaaaatgaa

SEQ ID NO: 214280 - DNA, 458 bp, Glycine max
tataattctcaagcttctacaatgagaatggagacatggacccactgtctctctcaatttgggatgggtcgaaatattcgaccattccaacgttgcccacatcttctatgtacgaaagcttctcggcataccccatagacatggttgattggtgactcaatgtgctgttatgacagaaattctctccaagtccctcactttctttctctctcagaagaaagaagaaattgagaagaagtgtgttttgttcttcaaacacagagagagagaaagagaaacatttgtttcttttaaggagaccccaaaacaccaatgtactctcatacactgtatcatcccctggaacattatgaatcactagcacatcacacaacatttaattgcaacaactcattttctaagaatagcattatcttgttctatggttcttaaactattgaccctaaaattagactaat

SEQ ID NO: 214281 - DNA, 466 bp, Glycine max
aatactagctgaaggacaccaatttctagacgagatcgctttttactaatatttcttactacacctatacgtgccactcctttcacaaccaattaacacaaacaatgtccttcctctactattagtgtgtgtgtcaaaccttataatgatcgccacaaatccatttgcatgatcaacggatcgagcccactgcaaaacatcgtctcgattgtcaaacacctacaaagtaatccaaacaatgtcagttgtctacaacacattcactgtattaaatcactcacaataatgaacattattacatgagaaatattgaacgcatccgaacaatcaacatgtgattcattcacaccacattcttcttcattttgatcttcgtccatcttaacaataaatcatatatttcaacacaaacatacaacacctaaccacacactatatataatagaaaacactacatattaacttc

SEQ ID NO: 214282 - DNA, 459 bp, Glycine max
  unsure (1)..(459): unsure at all n locations
actttcgattcattctatgtacccgtggtggtccacattgtgttttgtgtnattctattctcgnttcatttactttttataccccctcttgacgtgcttaagccattgtacttaagtcatttctcgcttaacctaaaaataaaataaatttccaccgatcgtttgaattgtattatccgttagcttcggttaaaatgaattccaaccgttcggtcgtgccgtaaccacgttggaaatcaaaaaagaggtaagaatataatataataatcaaaaaacgtcttttaataaaataaagcggaaaatcaatcggatgctttctctttgggatttctcattcttaattgaattgactaataactaaagtgaaactaatgctaatatcaactcgcctagtcaagctcgtncacaaaaataggtgttgaatttatcacttaaatttcgtactaagtaaatggatca

SEQ ID NO: 214283 - DNA, 397 bp, Glycine max
  unsure (1)..(397): unsure at all n locations
tcccataatatatcgagacggtcgaaattgaatgttgaatctctgagcaaattcaaacgacaatagctntttactcggacgtctgattgagtcccgtaacatatcgagacgctcgaaattgaatgttgaacctctgagacaattcaaacgacaataactttntacgcggatgtctgattgattcccgtaatatatcgagaccctcgaaattgaatgtagaagccctgagccaattcaaatgacaataactttttactcggatgtctgattgagtcccgtaatatatcgagacgctcgaaattgaatgttgaacctctgagccaattcatacgacaataacgttttactcagatatctgattgagtcccgtactatatcgagacgatcgaaattgaat

SEQ ID NO: 214284 - DNA, 441 bp, Glycine max
  unsure (1)..(441): unsure at all n locations
caacttacaacagcaatgcccagtaacttttttaaggatgcacaggtcaaagntgagtatgtgaaaagatagtatgaccaagtgaaagtgcaaattgcaaagaagaatgatagttatactaagcaagccatcaataaaaggatagaagtggtacttgaacccggtgatgatcttggacatttgatgacaaatgttttccaattaagagggaatgatgagaatcatgaaacaggccaaatacagtctaaatgcccatgtggagaacgaagaatgcccaattggagaatgacatagcccccgagtggagaacgatgaatgcccaagtggagaatgatgaatgcccataggcagatacactatcatgactattaattgatgctgatcgccaagattaatttgaacgcccataataaatatgttctatgtagttataattgttat

SEQ ID NO: 214285 - DNA, 314 bp, Glycine max
  unsure (1)..(314): unsure at all n locations
tgtgacgangctgtgcgatgaggtgatacttctcgcttttattcatagaccacaaatgggagcctgatgatatgtcgcgcgggccatgagacctcctagactcctggtggcgtgatattcgcacccgtccgtatctagaggaatgccaccccctccgggcgattaccagactgtgaaaacctgttctgttcctaatcaagcctgcccctttggtccttcatgattacaaggttcaaataccacaactctgtcaagcttgtgtggtggctggccatctgagaactacgactgaaattggggatggactggcttat

SEQ ID NO: 214286 - DNA, 348 bp, Glycine max
tcttcagaacaagtcacttgaagaattatgacttttggaaatgtatttgtcgaaattagtcactggtaatcgattaccattaaagtgtaatccattacacatcaacacatgtgactcttcatttttaatttgaaaattaaaaagaataaagactctggtaatcgaatacaagtgttgtgtaatcagatacacaagattaaaatactttaaaactgtttaaacataagttggtactcttgaaatttgaaatcttaacgttttataacacttctaatcgatactaacttctggtatcgatactagagagaaaactcttttgtatgatttgagaaaacttctttgttctca

SEQ ID NO: 214287 - DNA, 264 bp, Glycine max
ctgagcaacggtgcaggtaactggtacctttggctgaataaaatcgccctgcgcagggtcgtggttggctccttgtgacacataagacctttgcccttacatgcagacctgatcaatgagcaccgatactagctgaaaattacacttacctctcacctatcacaaatcaccacgctgacaatttgactttcagaacaatcacctgatggagaatacctacctagaggctaccctataacacacacctgtcttcttcaaatgtgt

SEQ ID NO: 214288 - DNA, 347 bp, Glycine max
  unsure (1)..(347): unsure at all n locations
agctnggacaattgtgccttcctgattttcaattaagaaantggcgagtggttgaacgacccaatgtttctgtggcgggcatagtgtaattctttagctttaaccctatagctgggcctaggctttagagtttttctccctgttaagacgttatgtttttgctatcaagatatataatataagatcttcccttcatctattcttgcgccttcacccattctcattcatctgcatgtttatttctattgcgattaaacgatatagatccgacgacgagtcctgcgaaggtactaatatcgagggccctaacgttgattttgaacgagtagcaaaccgagctgaggatg

SEQ ID NO: 214289 - DNA, 462 bp, Glycine max
tagtaaagctaagcactaacaatctcccactgtggctatatttgtctaatacatacttatacacttcctgagcaggtacgagcagttatgcaagtgggatcagcaacttccattatcagagtaatcgagcacagcggaatctgtagtttatacaagttgcaagtcgtttccaggatgtcaagacatctcacatgacatctgctttctgcttctgctccccctgtctccatgcttactgcagcatcttctaacagctactagtcttctccaggatgtcaagacatctcctgtgacatcagctatctgctccccctgtctccatgctcttactgcagcatcttctattagcttccatcagtcatcatcagcagcagcagtctccccctcataatcgtatacacacaactgccgctcataatatgaatcatgcatacatcgtatcctactactattgcatacata

SEQ ID NO: 214290 - DNA, 279 bp, Glycine max
  unsure (1)..(279): unsure at all n locations
agctttagacaaactatgattgttcttctcttctttanatanctgttcacattaaaggcagcggaattcttatattgtcgatgctacctatttgaaggtggacttcatggactcttaagatgtccaacagctcatcccatgcaagatatttcaaatcttttgcttcttgaaaagttgcggtcttatgtaacaccctgagatgttattaattataaatcgacgtttgattgcgcttaaaacgtcgtttgaatatatgttcgacttgaatgatctgaaata

SEQ ID NO: 214291 - DNA, 420 bp, Glycine max
  unsure (1)..(420): unsure at all n locations
tgcgttcncgatagcattcatatggaagcacttcagcctttccttttgtgtaacttaagaaaaatgtcatatcttcttctttctttcttccaaagccatttctaaagttccaagcactgtctccatcacccacagtcaccattagccaccacaaaccatcattggtctccattgaaaacccactcatgagatggaacccgttcaactgaagtggaatcttccaacttggcttgcggtttcggtagggaacgataaccctaatctgacctttcattctctttccagatgcttgtggggaatcgatgagcaatgacaaaaaggaatcttcaagtgatgcgacgaggactccgtggggtagctcacgataggaaggggaagttatgataaagtttaccgtttaacaccttagtaggggtaggg

SEQ ID NO: 214292 - DNA, 351 bp, Glycine max
  unsure (1)..(351): unsure at all n locations
aaacaaagagcttttgtctctgaagaattttttttaacttagaaaattttcttcacacacactatgatgattgttagttctttggcaagtgtaccaaatcgctcgtagtaataatttctcgataagccgagtgtcgtaccacatggattntgttacacttatatgaagtacttttcagtttgcaaattgtaaatttagtgtataaaattaaagggaaatttaaatctaagaaaaactcaagcaataaataaagaataaagtctataaaatattactaaatctaataatcctaaatacctactcctaaataaaataggggatactacttctaagaaaacccaacaattaaat

SEQ ID NO: 214293 - DNA, 460 bp, Glycine max
tgcacacaagattctccttgcctggcactgcataaccttctctggttggatcatataaatgtcttcctctaaatccccatgcatgaatgcagttttaacatctaactgctccaagtgaagattctatgcagctacaataatcagaataactctgatggtagtcatctttataactggagaaaacatctttatgaaatcaattccttgtgtatgctgaaaccctttcaccacaagtctcgtcttgtacttcttctaccgtcagattcttcctttatcctatagacccacttattctataacactttctttccttctggaaatttaattaaagaccacatcttattcttgtgaagggatgtcatctcatctttcattgctagctcccactcaatataagcattcccttgcatagcctcactcatacattctggctcacaagcatcagttaacaataaataat

SEQ ID NO: 214294 - DNA, 367 bp, Glycine max
  unsure (1)..(367): unsure at all n locations
agcttcatgatgaatcttgattgattcatagaagtattgatgataacaaaggtgatgacaaaaagctcaaaggtcaagaacacttcatgatatgatctcaagaaacaagtttcaagaatcaagatcaagattcaagactcaagattcaagaatcaagagaagacttaatcaagataagtattaaaaagtttttccaaaaattgagtagcacatgaatttttctcaaaacctttttaccaaagagattntactctctggtaatcaattaccaaattggtgtaatcgattaccaatagcaaaatgggtttcaaaaagctttcaactgaattttcaacgttccaattgatttcaaaatggtgtaatcgat

SEQ ID NO: 214295 - DNA, 397 bp, Glycine max
tctacttatgtggcagggcgggcttccctcactttcttgtctccaacgcgagctttgaccactgctcttccttcccgcgatgcttcttttcatatccgcctgagtgggcttatagcctaaaccatacttcccacgatttcctttggcatttatcaggctagttatgccgccgttgtctttgcctaaacccattccgggttcgtaaccgttccccatacataactcgggccatcattactgctgcatcggacaggcaaggctgcccagagaaggagtccacagatgaaatgcttaccacctcataagactggaaagcggtttctaacgattcctctgcggcttccacataatgcatagaggatgggcagctcaacaagatgtcttcctcgcctgacac

SEQ ID NO: 214296 - DNA, 167 bp, Glycine max
gctcatgaagctgatcaccggtctcttgatgaaaatgtgtaagtcctctgacgaaagaggtcctgacctaatgcctctcatagctattaacaaagcttccatcttgcctctgactatgaatgtcaatttttcacaagatcattgggccgaactgatcaaagcaatgg

SEQ ID NO: 214297 - DNA, 365 bp, Glycine max
ttcccacaactctcataaatgggagagaaatgttcatctaaagcatacaagtctttaatattatcaaatcctaaaatttgagctcctatggagcagaacaatgtgtgtctcctagagagggcatcagctaccacatttgtttttccctttttgtatttgataacatatggaaattgctctaagtactctacccattttgcatgccttttgtttaacttgctttgccctctaatgtacttaagtgattgatgatcactatgaatgacatattccttgtaaacaaagtaatgatcccaagtttagagggctcttattaaggcataaaactctttatcatacgtggggtagttgaagatggcactatt

SEQ ID NO: 214298 - DNA, 480 bp, Glycine max
  unsure (1)..(480): unsure at all n locations
gacacatagaaactcagctatatctggtcgagtgcaggtctgagcatacataatactcccaactactgatgcatacggaattgcttccatttgcttccgttccagatcatttttaggacattgtgcgagactaaatttgtctcctttctgaattggaacgggagatgcttagcacttttccatcctaaatctctctagtactgtattgatatatgctttttgagacaagcctaacaatccttgtgatctatttcggaatatttctatccctatcacatagcttgcctcacccatatccttcatttcatagttactagaaagatacttcttagtctcatgaagaagaccaagatcattagttgcaagcatatatcatcaacattcatgactagatacataaccttactcccactgaccttcagatatacacaccgatcaacagtgttntgcttaatatcaaaggaaacattgggatcatta

SEQ ID NO: 214299 - DNA, 300 bp, Glycine max
  unsure (1)..(300): unsure at all n locations
ctctgattcacaacctctcatggcactgtaactccgtcatcgccagcattgcaacctctcatggtgctacaacatcatttttgtcctcagtcacagcgcactacaacctcattgtcactctcacagttntgcaacatcattgtcagggatgtttatatccatactgatgtagctccaagtggagcttgtangccttggatcttctccatcaatggagtcctctgcttcttgaagattaatggcagtggaatggagaaagagaaagatgattggagacgccacttcaaggagaagatgaat

SEQ ID NO: 214300 - DNA, 469 bp, Glycine max
acgcgacactatgaaatactcaatcttcgtctacatatccatcatgtgagactaggcactaactatacagctctattgtaacaacataattaagaccacatcttatcccgcatatccctcatgtctggctaagattcattcgtgcttcaatcaatttattacgcaacacttcatttcccaatgctaaattctcctatctatgaacacattcgtgtgatcacaccaagagcatacactcattatcattgaaggaagcattgaacacagaaaacataatcatttagatattaggcatttacatcagttgttcattataaatccactactagggtgtctatccagccattacaaagaatcccagtcatttgatgagatttaaagccgataatgatagttccttacataatataggtgattgctcctgctcttactatcatctcacactcactctctaattaatattctatca

SEQ ID NO: 214301 - DNA, 367 bp, Glycine max
  unsure (1)..(367): unsure at all n locations
agctntanagaaactagacatgaatcatctactcttaccattctttcattctttcttgtaaattcttgtaatgatacaaagctctcaaaactccttgtatcccttaagagaaaagactaaaagtgttaagtgatatattcttctgttagacgatcataatttagtcagtgggcaatcttacaaaaaatcttgttgatttgtttagagctagtagtggtttgatagaacaaagaatattggtttaagcttggggtaagtaccaactgtaaagccagaagggcaggacaatatttaacttgatagtagggaactgtggtgcaaaacaacgatctgtatgaacaatagataatcttggtgttctgttact

SEQ ID NO: 214302 - DNA, 416 bp, Glycine max
  unsure (1)..(416): unsure at all n locations
agcttaagaagcacataggatagaagcatgattgttcgacagagaattatctgataaagttgcatgctgacagatgtttcaagcccaaacgaggcctcaaagaactccatctagcacaaatcatcaattattcgatataacttgaatattttggcggtattcttagactattggcaagcgtaccaatgttatcataggttacaaattttatgaaagagatcgtctctacatggacttgagttacttagtttctctagataaaagtaaatagttcaatagttatgtacaacaaatttaattgaaatcttattggtttaacgaanataataaaaataacaaatatagaggaaataacaaaactagtgcatccaaaatacaaaattacgaaaacaagtanaatgaaattaattaattca

SEQ ID NO: 214303 - DNA, 412 bp, Glycine max
tgtccaggagagcaacatttatcaacctgatacacagtctatattcctaattcaccaaatcgtttatgctgaatgactgtattccaactaacaaatgaaccctatgaacagactatccttttcaaataaattgttcacaatagcatccattttatgactggcccatttggagaattgataaattcgcatatggataagagcaggagaagatagagatgaatgaactacagtgtggctgtggcaaacgccaagtgactagatgtagcacatttatggtgagaggataaagaaaggtggatacatgattggacaaggaaaaatttagttatgaaattgagtaacagattataaaaataccggaaaaatgataaatcttcagtatagtgaaagcgatgcactgagattcttgaac

SEQ ID NO: 214304 - DNA, 318 bp, Glycine max
  unsure (1)..(318): unsure at all n locations
actggtaatggattaccaaaacatcgtaatcgattacagccttttgaanatatttggaacgttgtaaattcagtttgaaaaaaaactcatttttctactggtaatcgattacaacaatatggtaatcgattaccagagagtaaaaactctttggtaaaggttgtgtcaaaaactcatgtgctattcaaagttgtgaaaaactttttaagacttatcttgattgagatttttcttcactcttgaaatttgagtcttgaatcttgatcttgattcttgagatcttgagtcttgattctcgattctaggctntcttcttga

SEQ ID NO: 214305 - DNA, 436 bp, Glycine max
  unsure (1)..(436): unsure at all n locations
cttgacgctggagctgacacatgaactgtcttaactctntcagactggtgactcctaggatcttgaactcgacttgatagaacctctctttaaccgaaggcgtgtgactacatccaatgttctactatagtgaaacaaaatgcactgcgaatcataactctgacatttatcatgggtggaatggatgaatacatgaagaaatgcatatgacacagatgcattgtatgaatacgggagcccgggatattgtcctctctttagatacaacattcgtgcatcatctatcccgacgtatgcatttaaattgcaacacggaccctctgtagggttgacaagtgacgggatcaagacgcaatccgtggatgatgcagatgcgaaaggcacaacacggtgatgcatattgtacgacaatatccaacaaatttgtacatgcatg

SEQ ID NO: 214306 - DNA, 305 bp, Glycine max
  unsure (1)..(305): unsure at all n locations
agctttgaaaagagttgtttctcaccttctcgttaagtcaannggctggcttaatgagcgtccgctaagcgcaacactcacgagctaagcgcgaggaagactctggaagaagatgagctgtacaggttcactaagcgcaccgcttcatctcactaagcacaccacttcagttcttctgctaagcgagaaaggcatgcgctaagataaaattcactaatgtgcgctaagcggtccataattgcgctaagcgcacgagcacgaacaaggccacctatntaatcctgaaatcagattttagaggggga

SEQ ID NO: 214307 - DNA, 440 bp, Glycine max
  unsure (1)..(440): unsure at all n locations
tangacanataggtagggtggggttgtacttttcaatggtgatcttcttgaaattattaagattgctttcatttccatgctttgatcttgttttcatatgttttttttttttttatattggtattgtaagcatgattggataataggatgttgattattatattgttacgatgctgaatctattttgataaacttataatttttgttatactatattattcttggattgaatagaagggatatgatgaagttgagaataacacatataaatatagaagaacaagatgaatgtggtgaggaaactagatgaatgacccttttgatcctagggaggggtgtgagatacatctccaagtgttagtgacttgttataattaaaatagtgtactgtttataattgattatattgtctagattcagtattataaattgaagtgaaa

SEQ ID NO: 214308 - DNA, 390 bp, Glycine max
  unsure (1)..(390): unsure at all n locations
gtcacctgcggcatgcaagctagtacttttgaacactagcttatcttatccagagctttcagtttctaaactaagtgcttttaaactatntgcataactcttgttgattntgttacttatggtgtgtgtcaagtatttgtgttccattccttgtttagttatgatgcattttttgatgatactcaagtcatgtgtaacttttgaacatctacctagcccttgactggagatatctttcaagcatgcttttgatcatacaaaacttttcatttctattgcactttgatatgggaaaagcaagattttcctttcatgattctagctagtanactctattctagtagtcctacttctattgtggctgatcctatgtctggaaaggtgacatac

SEQ ID NO: 214309 - DNA, 415 bp, Glycine max
  unsure (1)..(415): unsure at all n locations
ntgatgcaacatatggagatgtaatgaaacatcgagatgatgcgctccatgagaggttggatcaaatggagaatagagatcataatgaagaacaaaggaggagaagagggaatgatggtgttcctagacaaaaccgaattgatggtattaaactcaacattcctccatttaaaggaaagaatgatctggaggcctacttggagtgggagatgaaaatagagcatgttttctcatgcaacaactatgatgaggaccagaaggtgaagcttgctgccacggagttttccgactatgctcttgtgtggtggaacaagctacataaggagagagcatgaattgaatagccaatggttgatacatggacggagatgaaaaagatcatgaggaagcggtatgtgccggctagttactcaag

SEQ ID NO: 214310 - DNA, 279 bp, Glycine max
tctttggcatctacgcatcacatgagggtcatgtcatggtttcatttgcacagggcggtaccactcacaaagaaaccagtagccaatctccttaacattctcttgtcattgtcggaaatgcctgggggatattctttgttctcgacatactggttgatgtcaaaataccacagtttcccatcttgctcttcctctatcgcacaacaatgtgccggcttgccccgagatctgaattcaatttacggcagatccccatgtggggcaagctgaaacatggat

SEQ ID NO: 214311 - DNA, 399 bp, Glycine max
  unsure (1)..(399): unsure at all n locations
tccattattctctccatcgtgggaaccaattgacagactctccttcttcgcttgctaagagtcggtcccaatttgcctcctttatctcggtgcatgaatggtggccttctatcgggcaaacaagtctcacctcttggcgataaatgtgtgaaaccaaccatacgtatatggccagtgtacaacaaacgatccttgcactgtttttctcacatcttcagtcgaatgtgtcatatagatcggctaagatagcgataaccaggctttccctgcggtcgtaaaaggcgagataagcatcaatcgctgctcggtccaccaacccatccacatttggaaagaagaccacnctgaagatcaagattgccaggatgtccatgaacggtgcccatttgtctggacttg

SEQ ID NO: 214312 - DNA, 396 bp, Glycine max
  unsure (1)..(396): unsure at all n locations
gctgcagctaatatatgactgtgtaactaacatggcctaanagcaatttgataagaggtaaaagacttgaaaattacctgtaactgaagctctagggtcttaagatattcgatggcatcatcaagcattgaagctntgtccgtctaagtaagagacatacaagacaaaagtatagaattaaaacaagtacaaaaaaagtatagcatattcagaaaaggagggggaagggattatgtatatccaaattccaaaccttattgcaatttggtatgagctccttcaatatacgcatcctcttgttgatcttatctcttcgcttctgccaacatccacaacaagatgttactaattaatctaataatctccaagtactctttctctaatatcttctacata

SEQ ID NO: 214313 - DNA, 419 bp, Glycine max
  unsure (1)..(419): unsure at all n locations
ccatctcttttctttcctgggtcccctacagctgacgcttgactttgttgctctgcggacacaagataggcactgtacacatgaagcacattcagcatcaacacaaactatgttgtattctccattgccattcctggggaggttcagacttcaaaggcagaggaacatggtagagggtctaatctaatgttaggagcactttccccttctggtttcatgtggtgctttcttccctttaaagtgccactgccctttacacaaattattggattntgtcttgttagtactcaatgaataagtaacttctcactcattaatgagaaagttataactgcagatgaatgatactacggtgaagtccaactaacatggcacactggtgatgcatcatttgttaaccgctgatatgcttatatcat

SEQ ID NO: 214314 - DNA, 399 bp, Glycine max
actttctctgaatgtatggttggcatagacagcataccatttatatactccagtatgccgacgacactgtgttttttggtgaacccaccatgcaaaatgtcaaggtcatattgtcaattttgacaggattggaattagtttctggccttaaaataaatttcgcataaagtcactttggtgcatttgtgcaacctgaccagtgggttatataagtcgctggattcttgaactgcatgactttgtcgttccctttcacatatttgggcattcccctcggaaccaatccaaggcatggtcatctgtgagatccggttattatgtagtgtgagaacaaattaactagatggagacaatcgcacttactctatgtggggagagtgactttattcaatcccacta

SEQ ID NO: 214315 - DNA, 336 bp, Glycine max
  unsure (1)..(336): unsure at all n locations
cgagcaccaacaaggaataatggactcacacggnttctgtgtatctataccaccagcacaaatacagtttaaccatgaaacccaaccatcatctgctgttgacccttcgtgcgtatatttctaagtgtaaagcaaataagcaagctatacaaaaaagccaacccataccaactccttcaacattcacgtaagtcctgtatcatcatattaatcgatctcctttccttcacaaagagatcgaaacaatcataacgttaaacaattcatacaagccctgcgattcatcttccattcacaataagaagaatttggtcctttccctttcgcattaatcaa

SEQ ID NO: 214316 - DNA, 328 bp, Glycine max
aacattttttgaatatatgaaccaagtagccagtgtcttagcttctgagtaaagccttcgaaacactgacattttagtattcattcatgcacaaacgcatcattgtacagaataacctcaaataagggtaaaacttttttaaaatcatatttgaagcataatagctcacctacacatcttctatgacataaaacatatgaaatatcaacgtttactcctgttatcacaacatattataatgaccctctactagagcctacataataataataatattaataataataataataataataatagtaataataataataataacaaccac

SEQ ID NO: 214317 - DNA, 374 bp, Glycine max
  unsure (1)..(374): unsure at all n locations
tgaacaatatggcaaccattttgggggacaaaggaccagtggaggacttcacccagctggtggaagttctaagctagttaacaagatgtctcagcctgctggtagaggtagttgtggtggtggtgcttttgctattgtttctacaccactcangtgtgggaagtgtggccggcttgggcatattgctcgtgagtgcacaaatagaaaggtggcttgctttaactttcaaggtaagggccacctcagtaccaattgcccacatctaangatggagaatangagtggaagtttgaataaccanagtggacgaatgangaccacggnngaaagtgtttctcttaatggtgttgatgtcgcacagtccgatgatctca

SEQ ID NO: 214318 - DNA, 480 bp, Glycine max
cattacggaactatgatactaagcttgacacaagattctccttgcctggcacttcataaccttctggtttggtcatataaatttcttcctctaaatccccatgcaagaatgcagttttaacatctaactgctccaagtgaagattctatgcagctacaatactcaaaataactctgatggtagttatctttacaactggagagaagatctctgtaatcaattccttgtttctgctgaaaccctttcaccacaagtctcgccttgcatcttcttctaccatcatattcttcctttagcctatagacctacttattttgtaaagctttctttacttctagcaatttaattgaagaccacgtcttattcttttgaagggatgtcatctcatctttcatttctagcttccactcaatagagtcattcccctgcatagcctcacggaaacattctggctcaccaacatcagttaacataaataat

SEQ ID NO: 214319 - DNA, 419 bp, Glycine max
  unsure (1)..(419): unsure at all n locations
tccccctttggcaacatcaaaaagccaaagaactcgganatcaacacagttataacaatggagtagcaagatataagtatcagagtattaaatccaataagccaaactcataatcaaggaaataatcaaaccagaattcatataacataaaatgtcaacaaccacaaaatatccaagactgaaacacaagataaataagcaaagtacttagcataataatgtaaattctaagaaactaaaagccaaaatacacggcttataaaagataaataagcagaatctaaaatctaagaagacgaaggatgtggtggaagatcaaaactctgacgaatgtatncgacaatcctctcaagctgtgtaagacgaatgtccataccgggcaaacgtgaatcttacgagtcaaagcgggcaccaacata

SEQ ID NO: 214320 - DNA, 462 bp, Glycine max
gtaacatccagcaacaacactagcagagagaaatataagttagattgtctattgaaatgggttctgttctattgtgcaaatttccctaaccggatacaagtagtagagagaaatggaagttggaaggtctatttaaatggacgtaagtcgtaacacttatttatggagaacattacgttcatgaattatggtcttcttcgtcatgcaatgaaacccaatcttgatacacattatacccaaggaatgaagcctagacttctgctatcttatgatttctttaattatctctacaacactaacattttctatggtagacagcattaataatccaactcatcaaacaatagttgctttgcttaagctttcctataacccattaaaatttgaacactaaccacagataatgttcactgctccttatttgacacctaatttattctgcaaatctcccatactctcaca

SEQ ID NO: 214321 - DNA, 379 bp, Glycine max
  unsure (1)..(379): unsure at all n locations
cctggaaaactgaaattttatcttttcacgtctaactcccttgagaggcatttctattggttgttatattcaatgttgcatcttagtccatatcatatcttttgtgcatcatgcatcatcatgagtaagtgagacgaaaagtttctaagttagaaaagtttcttaacaaggcaaaactctttgttttaatccattatagctttatcgtaatcgattacacaagttgtctgaagctagtagagttatgtctcgtattggtttaattgattacaaccttctcataattgattacatagtttntttgagacaacgactaacttatcaagtgttatatatagtggatgccttggatataatcattattctcttctatagagtc

SEQ ID NO: 214322 - DNA, 469 bp, Glycine max
acttaaaactcagctgtgcatcccacccacccggcatagtcagtcagtgttaacctgtggcatacctaagcaggcgagctcctgtcagtcaaccaataaaataataaaagtccaccaagcaaggaggcttgtgtggcggctggccaactatctctattttgtgttatatctgacaaatcccgtctggtaatcgattaccattcgtgggtaatcgattacagggtctaaaaattgaaacaggacgttcagtagcctctggtaatcgattaccaatggtgtgtaatcgattacacaatgttatatgctactggcaatcgattaccaattgtgtgtaatcgattaacagtgtcatatgctactggtaatcgattaccatttatgtgtaatcgattacacagtgtaacttttatgttccaatgtgtaaaggctggtgtaattcatttttgggcactggtaatcgattacatac

SEQ ID NO: 214323 - DNA, 343 bp, Glycine max
aacgttcaaggtcactggtaatggattaccaaaacattgtaatcgattacagcctcttgaaaatatttggaacgttgtaaattcagtttgaaaaaaaactcatttttctactggtaatcgattacaacaatatggtaatcgattaccagagagtaaaaactctttggtaaaggttttgtcaaaaactcatgtgctattcaaagttttgaaaaactttttaatacttatcttgattgagttttttcttcattctttgaatttgagtcttgaatcttgatcttgattcttgagatcttgagtcttgattcttgattctaggctttcttcttgagtcttgaattct

SEQ ID NO: 214324 - DNA, 465 bp, Glycine max
acttgcaatatgcttgtcgctggatctgtcccatcaactgtcctaactctctcagactggtgattcctaggatcttgaccttgacttgatataacctctctttaagcgaaggcgtctgactcgatccaatgttttactaaagtgaaacaaaatccagtgcgaatcacaactctgacatctatcatgggtggaatggatgaatacatgaagaaatgcatatgacacagatgcattttatgaatacgggagcccgggaaattgtccccttcttatatacaacattcgggcatgatcgcgcccgacgtatgcatgtaatatagcaacacggaccctctgtcgggttgacaaagtgaggggatcaagacgcaatccgtggatgatgcagatgcgatatgcacaacacggtgatgcatatagtacgacaatatccacatatatagtacatgcatggcagtgtttaaaatg

SEQ ID NO: 214325 - DNA, 358 bp, Glycine max
  unsure (1)..(358): unsure at all n locations
acttttcctatccccaatgaggccagctgggaaccagctgttcccaacttcccaagccttcactggtaacatggccccattaacacacaaaaccccccacctactccaccttcctcgttaaacactccaaactcaatttcctatcccaccttgatccatcccatccttcctttagatcccattcatccaatatccatcaacactccccacctctccacatcagcaatctgtgccatagactctctttccaccaaaaccaattcacaatttgaggacaaagtgcaagctanagtggatggtattattaatgggccgaatctgttggcctaatcaagatataaaagaacccctcaaaaat

SEQ ID NO: 214326 - DNA, 399 bp, Glycine max
tctttgagaaaactctcttgagaagctagagcttatcttctacacccctatcataactaatttcacctgcttgagaagtctccttaagaagattcctatagaagctagagcttatctacacatacctctctaatagctaaggtcacctccttgaaatgagaagcaagagcttagctacacaccccctattatagctaagctcacccacatgaaaaaatacatgaaaatacaaaagaaaaaatccctactacaaagactactctaaatgcctcgatatacaaggctaaaaccctatactactagaatggtcaaaatacaaggcccaaatgaatgaaaaacctattctaatatttacaaagataagcaggctcatacttagcccatgggctcgaaatctac

SEQ ID NO: 214327 - DNA, 347 bp, Glycine max
  unsure (1)..(347): unsure at all n locations
gtcgaaggaactagttccgctcctgagtatgacagttaccgctttatgagcgctatacaccagcagcgcttcgaggccatcaagggatggtcatttctccgggagcgacgcgtccagctcagggacgacgagtatatggatttccaggaggagataagtcgccggcggtgggcatcactagttacccccatggccaagttcgatccagaaatagtcctcgaattttatgccaatgcttggccaacagaggagggcgtgcgtgacatgaagtcctgngtaaggggtcaatggatcccgtttgatgccgatgctatcggccagctcctgggatatccgttagtgctgga

SEQ ID NO: 214328 - DNA, 338 bp, Glycine max
tctatggaagctgaatctttgagcttgaatgatgttctttattaaagattttccaccttggaaaagcgtcaaattgtggtggtaattacgagataagatgctacaatacctttggaataatacatggaagaaagacgcatacacatccatataatgccttgcatcacaatcttacaaatgaagcttttatggtggaaaacaaagacacaatgatggggggggtgacatataactttaacgatgaaatcatcgaaatatttttaacttcgaactgtattttacattccgatcattatacaagttactaccccattacacatgcatctattttataccct

SEQ ID NO: 214329 - DNA, 131 bp, Glycine max
agaattaagatatgccagctcactatcccaatatttaaaatcacctgcctctctttattaagaatgcactacatgcttacagagcttcttatgcactaattgcatatgatgcactctatgcctaacgtatc

SEQ ID NO: 214330 - DNA, 363 bp, Glycine max
  unsure (1)..(363): unsure at all n locations
agcttctaaactttatacaagaatgaagctctgataccacttgttagacaagtggcctcagatatcttaagaagggggggttgaattaagatatcccaaactacttccccaattgtaaaatttatttcactgtcttttcaagttatagattcccttaataatgatcttcttaaatattaattcaaataaaacaatttgaatatgaatgtaaagcaataataaacaaaggagattaatggaagagaaagtgcaaactcagatttatactggntcggccacacccttgtgcctacgtccaatccccaagcaacccgcttgagagctccactatcttgtaaattccttttacaagttctaaacaca

SEQ ID NO: 214331 - DNA, 447 bp, Glycine max
tgacacttaaaactcaactaagtgtatgctgtgttcatgatagtttattttcataacatctttgccatgcatctactgttacttgcttgtgtaaaaattataaaatcaattggaaggttgatgattcaggtcttcttaaacagggtcaatattttgaatcaatgttgtcaaaccaagattcaaataaaaaattgcaatttgtattgaattataagattcaaatacaatgaatacaacttcaaatgttttatacaaatgatgtataatgctcaatttaactattctaaactagaaataggtaaaacaacttagccataagtgtctcaaaacacaatcatgtcataactgagtgtgtgaagcctctatcctggaagaatgaaagcagagcagtgggatagtcaaatagagtgcatgctttaaacgagtgtgtgactaataaagtagtgg

SEQ ID NO: 214332 - DNA, 376 bp, Glycine max
  unsure (1)..(376): unsure at all n locations
agctttagtcaaggaatgtaaccttnnatttaccaagaataggatgttgaaatagcatagcaataatttcctaaattggcttaaagatataatctttggagacgataatgcttctgaaatgctaaggaagttagcagatggaactaaaagaaatgttataacttggcaaggatacaatatcaacaagtttttgttctacacaaaatcacaagatgacaagagtacaatccaaaacagtgngggtagtctaagggttgaatctcaacactttgccactgcacatgatgataatccccgtggagtttctctgctttactctggagtcattgaagaaatctgagagctaattatgtaaattcatgatctgtgtttcaag

SEQ ID NO: 214333 - DNA, 428 bp, Glycine max
  unsure (1)..(428): unsure at all n locations
tcatccctaagcaagtcactctcttggtctagctgatgtcttcaaccctaagcaagcatctcgcctatgcgagtttcccctacaccaaattgactttcctataaatagccatgaaggggaaggggtagagaggttcagaaatgaagaaatagaggataaacacagaaaaagaaagagaagaagaaaagttaagctgacgcgttgcatatatttgaccgtggatcattntcgccatttctattgctagccttgtaccctgcacaacgatcggttagtttttcttaaagaatgaatgtattctttgttcccttgtgggtcctttgtgatattatgtgtgtattaatcttttcctactcaactatggcaatttctttgtactcgtaatgcttgattctaatcgatcattggtgtcatgaacattggatttt

SEQ ID NO: 214334 - DNA, 372 bp, Glycine max
gggacagcttcaccgacaattacataccatacttcagtgttttatacaacatgacccgaacaagatgggggatacagctaaacagaacaaccgaccagtgatgttggctaacatacaggatgatcaaatcagaatcttatctatattcattacgatgaacgcagcctatgttaataaccaaaatatctatgttaaagagaaatggccactgaccttgtatctggcagcatcatcctgagctgcaagcatagcagcttaatgagatgattcatctctgtcagccttaaccttcattccacctgaatttagaaagctatatcataacgaaaccacaccagtgttcctatatatctactatataggaaagacaac

SEQ ID NO: 214335 - DNA, 287 bp, Glycine max
gctccacggaattgcaccgccatgctctttcttgcgagccctcttgagttcttgttcaaaggctttcgcagtaactgcattttcttctcgtaacccggcacactctttccggacgtctgtagcgaccaacttgtattgataaaaccttttgccaatttgatttgtccccatgtttactaaagtgaaacaaaaacccgatgtgaatcaaaactccgacatctatcatgggtggaacggatgaatgcatgaaggaatgcacatgacacagatgcaatttatgaataccg

SEQ ID NO: 214336 - DNA, 223 bp, Glycine max
catttctgatttaactccttttgccggtggagctgatattgatgaggaggaactaacagatttgacgtcaaatcctcttcaaggggaaggggatgatgcaatcctccctatgaagggaccaatcactataaccatgagcaagaggctccaagaagattgggctagagctgctgaagaaagccctaaggttctcatgaaccttagggtagatttctgagcccat

SEQ ID NO: 214337 - DNA, 457 bp, Glycine max
  unsure (1)..(457): unsure at all n locations
tttattntcatccgtctttaacccattatgattagacaatgatgtattagctacataagaaggcccacaagacactgcatcccctagctcctaatccttaagtgtattactactaacaccccgtacttcattcaaaataatagcactttccttgattgggttctgacgagagtggccctccccctcaatacaagattgggctttagacaacccatatttcctttcagactccatcccacctttattagcacaatcaattgtatttatttgggcctggttgaaagcatccagccaaattattttccccgtttgttccattcgttaattcaatatcctncacaacaccaaagtttgactccccattttcctcgatcccttccccatntacctcaatatcntcttctgtttgaaaatctcttttacaacccaaagataccccttgcatagatttctatgt

SEQ ID NO: 214338 - DNA, 454 bp, Glycine max
  unsure (1)..(454): unsure at all n locations
atatgtntcctcggaatgctcttgtctaaggtttcatatgatgaggcaacaaaatctgctttttcaaatggaaagttctctttcggcatgaaaatagtttgtagatactacaaagtattttaaaccttggtgtgagttagactaatatagatacactatagtatttgatgatacactgcaagtgaaatggtcatccatttattgttctattaatgcactcacaatgtctttacatgattagctgaagatttttctatatgatttgttcttctagactacgccttgtcactgttatatcctcaaagatatctttgatactctttcaatccacttttaagacttgatgatcacttctttctcttcagaaggtaatgatgaggaggatcaccatgagcactggaatggatctatgagtagaagtcagtcaaaacatcctaatcaacaagcttcacca

SEQ ID NO: 214339 - DNA, 368 bp, Glycine max
  unsure (1)..(368): unsure at all n locations
gaatatctataattctgtttgcataaccccacacactggggtttgaaatgtaccaagaaaaatatccgttgtttattttaaaatctcaagctgaaactaagcaaaattcactaaaattccaaaaaggcgtaagcacataaataattnttagaaaggaacctacaaacttaactagctttaatcaaggaaatacgaaactgcccaatggggatattttaagaaagaatttcctgttaagaaattggcacactcaagtcaaagcaatgtcaaactgctaaaaggtagtgggagctgatacctggaataagtttaaaaaaaacaatccttaaaccaatggctatatacactttcacaaacccttgcacaca

SEQ ID NO: 214340 - DNA, 486 bp, Glycine max
  unsure (1)..(486): unsure at all n locations
ggaccttaaatactacctgaaatctgtgaattatttgaatcaaaactcttcataatgggattggtgtcagactgtcagaattcagaatagcctagtttttaattcaatgactaanatcgaaaaggaatcataaaaataaatttaaatactttaacaagatcatggcatacaacaaattaagatctttggatctctgcaacactgttgtctctaaaaattggggtcttgaccattggatttaggggtgataaaaagagttggagctgtcggatcaaattgttttgaccaatcaaaaaataggatgagaacaagtaggagatggttatcaatcttattttgatattttatacatatattnataatttttaattaatttatctttttaaaataaattattattcacaatttaagataacatantctaatttttagtaagtatttattatctaatatttataaaaaaataaaactaattaaaatcaatta

SEQ ID NO: 214341 - DNA, 479 bp, Glycine max
tagaatatgaaccttctctcaattaaccctttgttcatttaattactaaaatagtttagcatagaactatagatttgcccagagaacaaggctcccacccactagggtagatatatgtagtcttaccctcacaagtgggaaactgtttccatgatttcaacctgtgacctccaggtcacaaggcagcaacctgattgttgttccaagactcactctcatagaagtccaaattaagaagtctgaagtctgaacatgccacatgattgatgaaacaaaggaaccaaaagtacataaatccaaggaacaaagcttaagagttaagacttttatgcaactcatgtaacaataatcaatttaatatgttttatcattaaaattataattattaatccaataaattaccaatcaataattgatcatttacaactataccatgggcacattattcaatctcctcatgctctgcccctaatgaacaa

SEQ ID NO: 214342 - DNA, 389 bp, Glycine max
gacggaccataaataattttgttatagtcgccaccttattgcattgccaacttaacagcacacaacaatcacttgataaataagtgcttccagctcctatttcttagtttttttaattaccataacccacagttgacaataatgctaaagcacaataccatataatgagattcgaatcaactgtgtgctattatttatatcccggcaagaaaaaattacctaagacactttcccaaatttgggacaagattgtcttgatccatatatgatctgctataacctgagatagggtatacacaacaagcattgcattcagcttaaggttcaatgacaaattcattcatattaggctgaacagggtgcaagggattcattcattcactggtaac

SEQ ID NO: 214343 - DNA, 456 bp, Glycine max
  unsure (1)..(456): unsure at all n locations
nttccttnggttgctctgctagggttttcaagtgttatttagaatgagaagggattgaagcctcaatttcactgtctctgtgtgaggggacatatctctctttacagacattattttacaaatcccaatggtgataatgtgcaaaaatgagtttcgaagatggtgttcaaatttaaagaccatccaaccgttaatgagtctgggatcgtaattttactgtgacatatttgaatgtatgtggcaaaaaaaaagagttttgagagaggaaaaagagagaacgaatttgggaggaagagtagagaacatacataggtttataaaaactactatgatattaaaaggactatctatatgcttaaatactttaagcctagcatttatcctattttactttattntattattntataaaaaggaattttatttacctctttataaatcaataataaattaaac

SEQ ID NO: 214344 - DNA, 342 bp, Glycine max
aaaactcaatgccattaacctagggaattaaaaaaaaacttaatggctgagtgtaactgaaattgtggcaaccaatagtcacccccaacagccaacaagtcagccaccatttggtctcccaaaaggctgatgcctaggttgccaattgggcccttattacaacttgaactaaacctaactaaagcccttttagttgattaacccaaaacatatttttggtcagccaactttacaaggattgggccattatttagacaaactaaacactctaaaattgaaacaaagtggtgtcatttagtcctcctccatttgggccatgatacaactcacaaccatggactt

SEQ ID NO: 214345 - DNA, 459 bp, Glycine max
  unsure (1)..(459): unsure at all n locations
tctagtcgtccatagacctcctcattggtacggtccatcaaacgttgcatctgtgcattcatcgcatccagtaacagacgttgagcgccgtccaactgatgatactcgtcaccaccaccacctgctccagccataattcaacaggaaaaaaaaatgtgcaataaaaattattaaggtttcaggacctcacaacactctactcacgtgtttaactcttagatggtagtacactcgtgtttaatgctctcaataggcttttgtgtaatgtattccctcttgccttttaccactcgtgtttcctcttaagttcctggatggaccaaattagacacacaaggtaatataaaataaaaggaaagacaatataatgatcacaaacaaatttgatttgggataacaactnggacttgattnggataataatatattagaatggatntggataacaggtgagcctta

SEQ ID NO: 214346 - DNA, 412 bp, Glycine max
taaacaatgcttaaccatcatggacataaatttacatttacaaaatagaagaattacaaaatttgtcttcaatgagaatttttcacaaacaatttgtgaatcaacaacaatcaaagcttaaccattcatggcagaagctaaaagaatacttaaccactatgaacatatgcttaaaatcatcaaatcaagcctaaaaggctgaaaacaataagtcaaagtcttcaaaatcttcaaaagcatctaatcaaacaccttgtcaacaaaaactggcgtcgtgtctgagagcgtgactcccagaagcttgcgagcactttctcaagacacatagttaattggaaaattgcaggaccaagctttgataaaaaaaaacacacacacacaatagagagagattagaaagaataatgaacca

SEQ ID NO: 214347 - DNA, 422 bp, Glycine max
  unsure (1)..(422): unsure at all n locations
actaagcttgctttgctctttctgacttgaaaccccattgttgtttacgcttctctaaaaaccttagagcaaagagactctgtaaaagttatcctttttcgaaatgagtgttattttcgtgaccttcactgaaccccaatcacattggcgtgatcgaaatttcaaaatgatgtccctttctaaaacccgtaatgctctcagcccttttatgtagtgacatgggtgtttgacccagagcattgttgttagctntgtttctgaaatccatattatgtctccttcgttttggcatggtagaggcttacgtggaaccgacgagtggggacgaaaaagaaatctccaagtgacgtgatgtgggacacgcgggtagctcacaatatgtgaggagagtttattataaaatttaccggtttaacaccata

SEQ ID NO: 214348 - DNA, 466 bp, Glycine max
  unsure (1)..(466): unsure at all n locations
tatagaatatataataaaataacaatgacaattgagtgtctatacatgtttcctttgatgagtctaatgccattcttccaaggaaggattttttagatgatatttcagattccttagaagatacacatattcatggaaatgactctaaagaaaaagatgaaggaagcaatgaagattctcaagataatgaagttagagcaaataatgaactttcaagagaatggaaagcctcaagagatcatcccctcgacaacattattggtgatatatcaaaaggggtaacaactagacattctcttaaagatttatgcaataatatggcttttgtatctatgattgaacctaanaatataaaagaagccataatagatgataactggatcatttccatgcaagaagaactgaatcaatntgaaagaaacaatgtgtggaaattggtagaaaaacctgaaaattatcctatcat

SEQ ID NO: 214349 - DNA, 371 bp, Glycine max
  unsure (1)..(371): unsure at all n locations
tgacccttattctcttagagttcatgggaaacccctgattactatctaaaaaattaaaaaaagtaatgcaataaaacataccctttctcgattttcatgttgattattcctaccaaaaagtatgacaaacctaaggtgtcccatatgagtacctaactttgtattganactaaaattataacaaacctacctaatgagtgcctatgtacacaaatcatgaagatggtgggtgcaccagtgattttacaaaaatggttgcaccacttcagacattcatataccacctatttaggatttgggcctaaaaacctacttggcaccacaagcaaaggtttatctttgtgccaaacctattcacactcttatttaga

SEQ ID NO: 214350 - DNA, 393 bp, Glycine max
  unsure (1)..(393): unsure at all n locations
cttatgaaagncacgtgactgataacactacgaagggtaacactataattagacattatgtaatcacaaaaaagagacacaccataactcaatactacgagacgtcaaagatctctttctctaaactctctctaacttctctctctggtgctctccttttctctcaacctacttcacattgcacaagccaaatcacactctgtgccttacatcataacaatgacattggttgtgcgaaacgttgattctctagtatgaaaggatcaatagtttgtggatctttgttatgatgagcatgggaaacagaaaagctttagtagcagtaacacactcttcacctgtgacaaaaaccacgacctctccaggatggaggagaacatagcgttcaaaaac

SEQ ID NO: 214351 - DNA, 473 bp, Glycine max
  unsure (1)..(473): unsure at all n locations
cttcatccaatttcctcttgtgctcctccttttatagttctttaacaaacgcaagcacttattcttccaactcanagggcctctttttcaagcttctcatccaacttggcattcttgcgtacttcggccagagacctcttcttagccttagcaaaggctacaacttcttttcttctgatgacggagagggcaggtttaagttgagtgtgatgagttaaaaagatggtgactgaggtggaagggctaaagagggtgaaggctaaggtgtacgggttttaagaatcgcatcatcatatttttagtcttttagagatgaagttggttaagggtttggaggtgagaaaggtgtacgctaaggctaacgatgtnttatctctatgggtggtctcttgctgctaagatagatattaattcccactcagagtctagagccttcttcttttggggggttatagggtctaaggggtgttata

SEQ ID NO: 214352 - DNA, 243 bp, Glycine max
  unsure (1)..(243): unsure at all n locations
taagtttttctaaaaaagtataactcttctaaatggttgtcttgaccagacatgaagagtctataaaagcaaggctttgattttcttttcaatatacttttacaattattcaatcaatcctttacaagccatgaatctctttgaaattcttcttcttcttcttctttgtgccaaaagctttctaaagatgtctggttntctaaaccttgaaaatttgtgctattcatctttttcattcccttc

SEQ ID NO: 214353 - DNA, 427 bp, Glycine max
cttttatcaagtccatgcaaagacatttgaattcattaggcttcgcgaacagccttcattgatttcattcttaatgttttcaaatataatctttttgttgtgttctgatccaaatatatagttaaaaaatactggctgttgattctttccagagcatattatgtaaaaaaaaaattgtttaagtcccacaaagaaatctataactatactaacaaagtatctaagaacacataaatgagtcaaaataaacttgtgtaagtcttttaaaaaattcacaatgataaataaggtaatataatacttgaaatttaattcagaatgataaataaacataaagacgaggtcacaattttttgatgatcatggctgacgagctcacatctcttgatgatcatggctgaggagcttagtctcctccaatgaaata

SEQ ID NO: 214354 - DNA, 326 bp, Glycine max
acatgcttaaagagccttccagggtagactttgatatatatggttggtgaagcttcttcatcttcttctatcaatatacagttcccttgtagcaattagcctttctgaacaaaacaagcttgtccactactatcttgaacttaatgttggatgtggccacacaaagacacctacccttagcccaatctagaaaaccctattctagcatgcctttagaaattcatgcatacactaacaacatgtaaaacacacaatgttaacaacttacttttaccatgaatgcttcacaaaatgaagtttagaaggtgtgagtcccacaaacttat

SEQ ID NO: 214355 - DNA, 435 bp, Glycine max
  unsure (1)..(435): unsure at all n locations
agaatatctacgcttctacttatgtggcagggcgggcttccttcaccttcttgtctcttacgcgaactntgaccattattcttccttcccgcgatgcttcttttcatgtccgcctgagtgggcttatagcctaaaccatacttcccacgatttccttgggtatttatcaggctagttatgccgccgttgttttttcctaaacccatcccgggttcataaccgttccccaacataactcgggccatcattatcgctgcatcggacagacaaggctgcccaaagagggagtccacggaggaaatgctgaccacctcaaaagactggaaagcagtttctaacgattcttctgcggctttcacataaggcatggaggatgggcagcttaccaagatatctttctcgcctgacacgatgaccaagtgcccctccactatg

SEQ ID NO: 214356 - DNA, 441 bp, Glycine max
gcaagcttgcttttacacatatgacaggagatgtatttatattacaaccatttcccctaagagaagtggacacgttacatatggtgacaacaacaaaggaaaaatcattggagtcagtaaaataggtatgagttcctctactcctattgaaaatgtgttactagtagaaggtttaaagcatagcttattaagtgttagtcaattatgtgatagaggatataaagtatcttttgattctgaaaaatgtgttatcaagcatgagcatgacaaagatattgaacatataggtttcaatgaaaataatgtttacatgattgatttaaaacaaaaatctgaaaatgatacatgctttctaagtaaagattatgatccatggttatggcttaagagaattgctcatattaacatggatcatctaaatagattaatttcaaaagatct

SEQ ID NO: 214357 - DNA, 435 bp, Glycine max
  unsure (1)..(435): unsure at all n locations
gctacaacctttntctccccgcttggcaacatcatttatcctaagaactcggaaatcaacacagttataacaatggagtagcaagatataagtatcagagtattaaatccaataagccaaactcataatcaaggaaataatcaaaccagaattcatataacataaaatgtcaacaaccacaaaatatccaagactgaaacacaagaaaaataagcaaagtacttagcataataatgtaaattctaagaaactaagagccaaaatacacggcttataaaagataaataagcagaatctaaaatctaagaagacggaggaggtggtggaagatcaaaactctgacgaatgtatccgacatcctcttcaagctgtgtaagacgaatgtccataccggcaaagcgtgaatctaacgagtcatagcggtcaccaatatac

SEQ ID NO: 214358 - DNA, 399 bp, Glycine max
tccgctgttattggttaaacgtggatgtttaaagcctaaaatcaacacgtagctttgtcacctctttcaaaaaaaccaagagatcattaatggtccaatgccttaatgttttctctcctttcaaaagaatcgaaagatcgcttaatggtccaacggcttaaatgacctttcattcaatcaaaatatatcttgcaaaaaaggataaaaacaatttaaccaacatttagttctcaaagaactatgtaggtctgatttcctaaccacaattaaggaatacgtaagagcaagggatacacccttgtcgaccacaaaaagataaaatatataaaaggcacataaatacataagaacgtatcatggggagaataaaacaaattgaagtcatgtttgcacacttta

SEQ ID NO: 214359 - DNA, 458 bp, Glycine max
  unsure (1)..(458): unsure at all n locations
gtaacccaccattttccatagtataatactggtaatgtgtctactatcattgtcatcatntttttttcatcattgaggtgccacttgagctgccaggttctccacctttgggcgtattctttgaaagatccatgcccccctttttgcacatgttctattgttacatcctatccggaaccatatcaaaattgtactaatactgcctaacgaaggcaaccactatgtccttccaagaatggactcgggaaggttccaagttagtgtaccaggtaatagctaccccagtaagattttcttggaaggaatgcatcagcaattcctcatcttttgcgtatgcccccatcttccgataatacatctttagatggttcttgggtcaagtagtccccttgtacttgcaaagtccaacaccttgaacttgggaggggtgatgatattgggtactangaacaactctt

SEQ ID NO: 214360 - DNA, 448 bp, Glycine max
  unsure (1)..(448): unsure at all n locations
ctgctcaattgctccaggtagctgcatgtaatgttaaaggtctgtatgggggtcagcagaggagcacaaaccacaaacccttgcaacaggtacagatttctgattcaaggccagctgggttaccaagttaaccaatgcatccagtttgccttcaagcttcttagtttcagatgatgcagatgggttngtagctacctcatgcactcctctaatgactatggcatcatttctggcgctaaactgctgggagttggaagccatcttctcaattaaatttctggcttcagcaggagtcatgtctccaagggctccaccactggcagcatctatcatacttctctccatattactgagtccttcataanaatattggagaagaagctgttctgaaatctgatggtgggggcaactggcacatagnttcttaaatctctcccagtactcatac

SEQ ID NO: 214361 - DNA, 457 bp, Glycine max
  unsure (1)..(457): unsure at all n locations
tgtgactctggaatttcttttaaactagtcactttttaagttgtgactttngaaaaaatcttcagaaacaagtcacttgaagaatngtgacttttggaaatgtatttttcgaaatcagtcactggtaatcgattaccattaaggtgtaatcgattacacatcaacagatatgactcttcattttaaattntgaaaatcaaaacatttagaagctttggtaatcgattacaaaagttaaaaatgtttaaacacaagttgtaactcctgaaatttgaaatcttaacattntaaaacactggtaattgattactaccttctggtaatcgattactagagagtaaaactctttggtaatgattttgtgaaaacttcttgtgctactcaatgttttgaanaactttntagaacttatctttattgagtcctctcttgtttcttgaatcttgagtcttgaatc

SEQ ID NO: 214362 - DNA, 387 bp, Glycine max
  unsure (1)..(387): unsure at all n locations
ttngtgtgggatgcccagtgtgagcatagttttcaatttcttaagaaaaagttgatgaccgctcctacgttagttttgcctaactccagaaaaccctttgagttgtattgtgatgcatcaaagatgggttttggaggagttttgatgtttgatgcaaaatggccaagtaatggcctatgcttctagacaactcaagactcatgagatgaattatcctacccatgatatagagtaactgttgtagtttttactcttaagatgtggaggcactacctgtttggctccaagtttaaagtgtttattgatcataataaccttaagtatttgtttagttagaaagagttgaatgtgtgctataggagatggttagagtttcttaaggactat

SEQ ID NO: 214363 - DNA, 357 bp, Glycine max
agcttcaacatcagaccacttctatgtgtgctttaactacttcacatggacttgatggggcctatgcaagttgaaagccttggaggaaagaggtatgcctatgtgcttgtggatgatttctccagatttacctgggtcaactttatcagagagaaatcagacacctttgaagtatttaaggagttgagtctaagacttcaaagagaaaaagactgtgtgatcaagagaatcaggagtgaccatggcagagagtttgaaaacagcaagtttactgaatactgcacatctgaaggcatcactcatgagttctctgcagccattacaccacagcaaaatggcatagttgaaaggaaaaac

SEQ ID NO: 214364 - DNA, 398 bp, Glycine max
  unsure (1)..(398): unsure at all n locations
tgctaacccatggaagctcctaatactctttggatgaccttgattttctcagggtccacttggatcccatttctaccaactacaaaccctaagaaaactatattatctacacaaaaggtacacttctctatatttgcatagagggtatttttcctaaggactgaaaaaacttgcctgagatgtcctaagtgatcatctaggctcctactatacactaaaatatcatcaaaataaacaactacaaatctacctataaaatctcttaagacatgatgcataagcctcataaaggtgcttggtgcattagtgagcccaaaaggcatcactatccattcatacaaaccanacttggtcttgaaagcggttttccactcatcactctttttcaatcctgattg

SEQ ID NO: 214365 - DNA, 461 bp, Glycine max
  unsure (1)..(461): unsure at all n locations
tctntgagaaaacttccttgagaagctagagcttatctcacacacccctctcataactaagctcacctccttgagaaacttccataagaagattcctaaagaagctagagcttagctacacatacctctttaatagctaagctcacctccttgagatgagaagctagaacttagttacataccccctataatagctaagctcacccccatgacaaaaaacatgaaaatacaaaaaaaagtccttactacaaagactactcaaaatgctccgaaatacaaggctaaaaccctatactactagaatggccaaaatacaaggcccaaacgaagganaaacctattctaatatttacgaagataagcaggctcatacttagcccatggactcgaaatctaccctaaggctcatgagaaccctanggccttcccttggatctctagtccaatctacttggagtctt

SEQ ID NO: 214366 - DNA, 388 bp, Glycine max
  unsure (1)..(388): unsure at all n locations
ttccacatncacaatgcgcgcataaacccaccattctcttgttgccacctccaactgagctcacgtactcccacgtagcccatattctcgtttgtctcaacaccgggtccccatcaatcctcccaagcttccccaacatcaaaggaatacaacattcacacagcacaagctatcacagccaagcaaaacagggcaaaggcagaaaactctgctcaaaacaccaaccaaaatcacagcttttctcacttaaagaccccagtaacaattccttcgatccaattcgctaaccgctggatcgaatccaanatattactggaagtctctagtgcataagcctacattttgaccgttgggatctactagcaaacatccagaactcattctttac

SEQ ID NO: 214367 - DNA, 413 bp, Glycine max
  unsure (1)..(413): unsure at all n locations
gccccactccatcattatgattagttcctgacatctcaaacaaacaaatcgaacgtcacaagacaattatagatgctggttgaatacctcacccactcaagtgtatcacacaattatggcttttctctaatgaaacactcttgccttttaccactctaattccccttgagttcttatgccattcaagagattatggcctcaacaaagaacaattcaccaatatgtgtaaggtaaggctagagagacaaggaaaaggttaaccaagacaaaggctaacaatgtttttaggcacaaatgaacgaaataaaattcagaaattatgaattcaagtaacaacccttcatgcaaccaatatattaccttaaagagatattttntaaagatcttcaagcatgaaccattcagcccaattt

SEQ ID NO: 214368 - DNA, 474 bp, Glycine max
  unsure (1)..(474): unsure at all n locations
ttaaagcatacctcgaagaggacttctaagctatcatattttttgatnnctcttgngaaacggggcgctctaactgactagtgacaaagctacccttcaggaattcacattccaccaactacaaccattaagttcatgccaaatagaatagccttgaggttgcctccattagacctggataaaaagaaaggaaaggtgcctcctcataccaagccaatgcctcatcctggccccaaagacaatattgccttgtgtccaattccctatgattggagcaggtacttcactcgagatgcggctaanaagactattactctgaagctagacgctgagtttgatcaaaatgatgccatgatcttttacttcaaagacatgtatgataccccacgtattgcattcacattatagtatgacaaggatgacacatccaatcatatatgcatggtaaaaatcttgcatccaataaagatttat

SEQ ID NO: 214369 - DNA, 467 bp, Glycine max
  unsure (1)..(467): unsure at all n locations
ctaagctntacagcagattntagtaatgacccactaacctagaattaanataacttattgccattaacctagggaattaaaacaaacttaatggctgagtgtaactgaaattgttggcaaccaaaagtcacccccaacagccaacaagtcagccaccatttggtctcccaaaaggctgatgcctaggttgccaattgggcccttattacaacttgaactaaagcccttttagttgattaacccaaaacatatttttggtcagccaactntacaaggattgggccattatttagacaaactaaacactctaaaattgaaataaagtggtgtcatttagtcctccatttgngccatgatacaactcacaaccttggacttttctccttgaaacttgngcttgtattcaaatagtatggacagcacttgttgaagagcttccttggctttccttgctctagcccttgcat

SEQ ID NO: 214370 - DNA, 477 bp, Glycine max
  unsure (1)..(477): unsure at all n locations
tcanaccacagcaacacanaatctatgtatccaaaacctctcaatttaatggattntcaaggtttgagaagtgaaattgagaatagggtaaatttgaagcaaactctcacctcacacaagtctataacatcaatttaaacttgttcaaactggatttacacctaaaattcccccgaataaaaatttgactcctcaacaccaaaatttaccctagaaatggctctttgttcactttggtcatttgtttttctctctagcacagcccaaactttctcataagtcctaaatggcatttcaagctagaattaactcactctaacctccaaataccactaaatccagatttggccttccaactctcaaagtctcactctttnttccactcacaacaccatactctcaccttctaaccctaggttaactctacccttcatctctaacagttttccataagcaatttcagcacataaccatcac

SEQ ID NO: 214371 - DNA, 429 bp, Glycine max
  unsure (1)..(429): unsure at all n locations
aagtatacataaagaatccacctggatatggtttcatttatggatgaaataaagtctgcagactaaagaaggccctatatggctcgggcatggtttgataggtacactcaacctatggtatctttggtgtacaaacaaagccaaggtgaccatactttcattataaaacacccctaagatggtatctttggtctatgtcgatgatataattattgcaagcgatgatgagcttgaaaaacagaccttaatggaaaggttggctacccaatttgaaatgaaggatcttccttaggatagaagttgcatactctangcacggtatcttcattactcaacgaacatatatacttgatctcctcaaagaaactggcaagttgggctgtaaaccattggagtgccatagagaaatattccaggatataaatgatg

SEQ ID NO: 214372 - DNA, 373 bp, Glycine max
cacaaaggcatgcctctgtagagatagaaattgatttgttctttcagttttactgtaatgatattgccatgaaataatccatgacagaacaaaactggaaaaatatttaagatctactggaattcatgattcctgagaattgaatcattttttaaattgagcaaatccttgttgaacctgctgttggaagatctctagtattgggccaaggaaatcccaccactgactaaaccaatttgggaagttatagattgtgttagtctgaaaataaatcaaccatgagtgcttgaaatgggtgttctagtgccaaaataccttggtccaaccatcaacgtaatcccagtaggtataacctaccggatcaaacgacatg

SEQ ID NO: 214373 - DNA, 430 bp, Glycine max
  unsure (1)..(430): unsure at all n locations
tacgctggagtaanctcttgctgccttcacttgttatttttgattnnccgcnnggactcaagaagacccatgagtctagcataacaccatctaagtatgaaaacgtgactgatatttctgaaactctagactggatggaaaaaggagccgttactccaatcaaagaccaatgtcaatgtggtaagatcaagaagatcatataagtacttttttgtgctccatcacattatcattactggctttcctcggattaattatgtgtgtcttttgaaatatttctgaatctcgaattatttaatttcgcaccttaatatttttatttattaatttatcaacttacaatatattaattactcctttttactatgtatttactgccacaatacatttatggaataaacatatcttagtgatacatatatgattcata

SEQ ID NO: 214374 - DNA, 427 bp, Glycine max
  unsure (1)..(427): unsure at all n locations
ggcttctacatatattntatgagtaagcaatagttagtttttgtttaanaagccttggtttagggtctagtaatcgattaccactccctgtaattgattaccatagaacagcaggctgtaatcgattaccagaaagcctagtcaattataggatatgcctataatcgattacaagaggctgtaatcgattatagatcatctctgcctataaaaagcttcattttctctctctttacgcagaaccctaatttttctcttctccttgacgacgcccaacctcttcttaatttcaaatcctcataactttcttgcttcttagccaaataacttcaaacaaagcccaaacttcttatttttcaattatctacaaagcccaccaattagaattagttgaaacaaccttcaatggtagaatcattgaagaaat

SEQ ID NO: 214375 - DNA, 465 bp, Glycine max
  unsure (1)..(465): unsure at all n locations
tcacgatccgagaatgaggttgtggtagacactacctttctttacgataacaacaatgaggaaccaacctcgttgtccttaacgtcgtccctgaattctatactaacaaaattccatgcaggttacttcagaataagcctctccctcggtggccaagctttgttgtggaagacactgatcgaatcatcatcatcaccaacacacgacacaagcgccgctctacgacgcgttctttgcacgcttccttccgcagcagctattcttgcactgtggtcgttggctctctttgctctcgagatgctctctcttctttacctactacggtgcttgttttactntaagatggtaaaggcggagttcttgcatcccgtaggggttaactacctcttcgctccgaggatttcgcggcttctattgcttcaatctgtgccattcgtggtgcaacaacagccacctacttggttc

SEQ ID NO: 214376 - DNA, 407 bp, Glycine max
  unsure (1)..(407): unsure at all n locations
cattatggaacgactacaaccatcactgtatttactatggccatagngaattcaccaaggccatcgtctgaaggctaacactgttcaaaaggggagtcatcatattaccatggtcgtactgcttaccacgaccatgttgaatctttaaataccatggaaattttgattctttatactcaattgagcggcgtcataccctaatttcgaccggggtccatctatttggtgggatgcgaccttcgctagaccagttcgaggtacttgacacccatcattaggcaatccgtgaagattcacgacatgtctggagtcaaaaggaagcatcattgcgcaatccgtaaagttccgtaacattacagaagtcaaagatgggaaggttgcgtaatccgacaagtctcgtgacatta

SEQ ID NO: 214377 - DNA, 355 bp, Glycine max
  unsure (1)..(355): unsure at all n locations
ttcttctggcttcaattcattagtgggctttccttctgtgtccagcatcttgggatgttcccagcctctgatgacagctttccaggttctgctatccagtgatttgaggaaggccaccatccttgctttccagtattcatagttggttccatccagaattggtggtctgtttactggtcctccttctttctccatgttcatcagaatttatctccctagatctcactcagtgatttcgagtgcctgctctgataccaattgaaattctgatacagaggtcagatgtcgtaccacatgtcacgacatcacgcttcagaacatggagaatatattcgactgtntgaacagattaaac

SEQ ID NO: 214378 - DNA, 446 bp, Glycine max
  unsure (1)..(446): unsure at all n locations
tgtgcgaatcaaatcactcctgcatttcatctctagcatgcatttttcctttctttacccactcctcacgtttggtttttttagggaaaaacaccataactaaacgtgccacaaggcatccctatcgcaccagatccaaatctagaacgatgggtgatcaagaggagacacaggaacagatgaaagctgacatgtcggctctgaaagaacagatggcttccatgatggaggccatgttaggaatgaggcagctcatggagaaaaacgtggccaccgctgccactgtcagttcggcagccaaagcagacccaactctcttggctaccgcacgccatccttcctcaaacatagtaaggcggngaagggaacacgctgggcatgacggcaacccttatctgggataccactgagtggcttacccttatggattgtcgcccaactactca

SEQ ID NO: 214379 - DNA, 363 bp, Glycine max
  unsure (1)..(363): unsure at all n locations
atcaggcgatggggcaagtcgactctccacatccacaaatcacacataaatccaccatccncagttgtccaccttcaactgagctcacgtgctcccacgtagcccttatcctcgttcctctcaacaccgggtccccatcaatccctccaagcttccacaacatccaagaaattcagcatccaaacatcatgaactatccaaaaccaagaaaacagggcataggcagaaaactcttcccaaaacacattccaataccacagttttcctcactcaaataccacaataacattctctttgtttcgattcgttaaccggtggatcaactcacaatttttactggagggccctaatacatatatctac

SEQ ID NO: 214380 - DNA, 419 bp, Glycine max
  unsure (1)..(419): unsure at all n locations
tcaagaataatggcctcatcaaattatttatttcccgtatggaattctataaataagtctcctattcttaatggtgtgggttaccattattggaaaaaccacatgcaaatttttatagagagaattcttcttcttcttcttcttcttcttattcatgagattgattaagggatcgagggtttcttaagttgtaaggaattctgaacacaagggaagggttgtgcctatgtggttcagactttgtaaaaggcattttacaagatagtgaaaatctcaaacgggttgtttggggattagacgtacgcacagggcatgaccgaactagtataaaaactgagtttgcattctctctctccttaaaattcttttatttattggtctttatcttttgcattaaagaagtntactttgaattggct

SEQ ID NO: 214381 - DNA, 439 bp, Glycine max
  unsure (1)..(439): unsure at all n locations
gatccttgagtcacctgcggctgcagctcttcttcatgggcttatcctagtgtatggtgcctctcctctcctcttctcctttgccttctgctgcatctccatgggggaaactcaccattgaagctcaaagatccaacctccatagaagctccacaagcaagcttccatcattgagtttagtccaacaagaggaatctgcgaacgatgcttgatcaagattaggctaaactatcatgaggcatcggggtttagtatctcaggagacaccataggaacacatgagcattgttagatagagaatatctttttagcatcaggcacctattaggaaggccaacgtgttttctacacatcatttctctcgcgtgattntcctttttgcacagatagtttacacacttgntcatattcatgcttatctttacacaccagacaccta

SEQ ID NO: 214382 - DNA, 442 bp, Glycine max
  unsure (1)..(442): unsure at all n locations
tgagatgagaaagtgtagaagggtgaaacttcctgcttttattcgttgaccacagagtggtacctggagatatgtcgcgggggtcaggagaccttgtggacgtcaagtggggtgctattgcccaaaaccaagcttgaccaatcccgacccaacccggacatagtcagtcagtgagaacctgtgatgtacctaaacaggcgagctcctggcagtcaacagataaaaggaacaaagaccacaaagcaaggaggcttgtgtggtggctggccagctgtgaactttgattgatatatgggatatgggctctggtaatcgattaccaagggtgggtaatcgattacaaggcttaaaaatgaagacaggaggctaagatggtctctggtaatcgattaccacggngtgtaatcgattaccangcttgaaaacgaagtcaggaagctat

SEQ ID NO: 214383 - DNA, 320 bp, Glycine max
ctactctatccaatataaaacaggaaaaacgaatgtgggtacagacgctctgtcgcagtgatcaaagttacccaatgcttcatacttcatcctctctatgccacattatgtgtttcttgaagatctctaaaaggagtggcagtcgcatgacgatttcaccactttaagagagaagattcaagcgaacccagaagattacccgaagcacgtgttaacacccaattcgttttgcatcaaaggcgcatctggctaccttcagaatgcaccttcatcaaggctctactcacagaattccatcacacaccaatagggggtcatat

SEQ ID NO: 214384 - DNA, 297 bp, Glycine max
ccccaccccccattatttaaaggacacccaacgtttactgtgacctgaacaccctacctcgaaaagctgcagctaaagtattcaccgaagggaacacaagtcgcaaaatccaaccaaactaggcaaaggacaagaaaaagggcctctgcgcgcgaaaccggaaagcaaagggattggctgaccaggccgacaacctgacgacgacgaaacctgtctgaacttcttgaggctgcataacggaacaaaagaaaaaaacgatacatgtgagaaaacaacaatgagtgaaggaccgaaaag

SEQ ID NO: 214385 - DNA, 464 bp, Glycine max
  unsure (1)..(464): unsure at all n locations
tatnttcatccgtctttaacccattaagtttagacaatgatgtattagctacataagaaggcccacaagacactgcatcccctagctcctaatccttaagtgtattactactaacaccccgtacttcattcaaaataattgcactttccttgattgggttctgacgagagtggccctccccctcaatacaagattgggctttagacaacccatatttcctttcagactccatcccacctttattagcacaatcaattgtatttatttgggcctggttgaaagcatccagccaaattattttccccgtttgtttccattcgttaattcaatatcctccacaacaccaaagtttgactccccattttccttgatcccttccccatttacctcaatatctccttctgtttgaaaaatctncttttcacaacccanagtatcacccctttgcatagatttccctatgt

SEQ ID NO: 214386 - DNA, 152 bp, Glycine max
gcctcgaaaaaaatataaactgctgcgagccaatggttgaattaaaacatattgacaaaatcgttgagatggctttgcattcatgcatgaatagaaacaaacaactgaccccgcgataatattgacaaactagcttagacaaacctattggt

SEQ ID NO: 214387 - DNA, 426 bp, Glycine max
  unsure (1)..(426): unsure at all n locations
atactagtacagnttacatgaacagtattaatatactataattcctttcaattctgtgaatttcaattggaaactgcaaaagtttatgtcatggtgttatgttattttgtgtctacatatttctaacttaataaatataatataggtatcgatataagtaattaaattcattaaaaaagactaacctaatttatgtataatgtgcaaccaacagggagtgagttatcagattcctaactaatagagagaaacaaaataacatgtangtataaatatcatataaataaaataaaacttacttaaacataactcacgtcatttcgtcattttgtcgtccaacatcacatcacatcacaacacaacacattttattcattttcacaacattcacgtactcaaggattataacacaatatcatcaagtca

SEQ ID NO: 214388 - DNA, 455 bp, Glycine max
  unsure (1)..(455): unsure at all n locations
accttaaatcncagctagcgcacactatgcgctagccataaggtggtttgtctttcaccgcggcttagcgagctccatgcactatgacccaatggttctcacacttctggtgtagtatgcgtatcacgcctcacacgctaancctacacataaaataatgttcttacacctacgcttagtgtgcaccctcgcgttaagacttttggaaagcataccaatagtcgttgtacgtttcacatttataaagagttcgcctccacagggacttgagttacttaattaattcggataaaggttattagcctaatagctatgtacaaattcaatcgaatgtcatttggtttggaaagtacagaatagacaactatagattatggaataacaaatgacagaaatcaaaatatagaattaggcggcaaattggaattgcgaacgatttaattattcaacaccta

SEQ ID NO: 214389 - DNA, 372 bp, Glycine max
tgtagaacggctggacatgatatatgtcagggtgttggtttatccagcggttcatggataaaggaatatcccacattatttccatgacacgcgtgcaacaatgatgattcagaaattttatgcaaaacttgtcatgcatgcacctatgtggacactcaagcatcaagttttgtggtcatgtgacactagggctcaagattcatttttcctatttaagtcaatccagtgtttccaaaacatgctcttttatcaattcatgcattcatccgagtccattttgggtgttcgggaaaattttcacagcattcacccttcaggtgtatacatattttttcaacaaaacacttttgtgttttgatcagtgaatctttt

SEQ ID NO: 214390 - DNA, 349 bp, Glycine max
atgggggtctggctctgctaacattctatgaagctaatcgagcctacttaatgaaaggtggttgggagttacccaccaggaataatgatctctgggtgcaaaccattcgaacaagaaataagagtgggaactctaccattcctaacaacggatgtgtataggacacgttctaacttgtggatagggttattgaacacttacccctcagtacacttccaattacattgtaatattcgagatggagctatgggttatctctgaaataacttgggcgtacctgtagataagactctacttgacgtgactatatgtactcgccctctattgagccattactacttctaatgtg

SEQ ID NO: 214391 - DNA, 457 bp, Glycine max
  unsure (1)..(457): unsure at all n locations
cgcttgatgccgcatattggttnttcattggcacattcatgtgggtcattgngtgcttctcttagtttcagcatagtggcaaaatggtctgtgtttgtttgatttgagggtagtagctttgtgttctttttcatattgaggcatgaattttcttgtggggtagattttgatcttcaaaccttaagtgatagcaccccatttggcaaaagtgaggatttcagtgaattgtagtgaagtgggcattttttgttttttgaaaaaggcaaaaggatgattcagttgttgctcttggtgattcttgttgagggggttctggcatttcttttgttggtgaagataggacctttgagagatcttgtgataaagagcctggatcagttgaagatggggaagggtccagctacagtgaaaaccatcgctggtaccatgtctgtgattcttctttcaagtctcatga

SEQ ID NO: 214392 - DNA, 368 bp, Glycine max
  unsure (1)..(368): unsure at all n locations
actgcaaatccctctttgtaatctctcgtgattgcataccgaggatcttctttactagacctaagtccttcatgtcaaattcttttgacaactgcatctttaagtttttaatttcatccatatttgatccagctactaacatatcattgacataaaataacaaaataatatgactagacttatatctcttgaagaaaaaaatggttggcgttgcacttctagaaattttccttaagcataaagctttcaaacttcttgtaccattgtcttggggctggttttagaccatacacgatctctctcaatctacacanccatattctttttccttcttctgagaaaccttcaggtcggtgcatgtaaatctc

SEQ ID NO: 214393 - DNA, 468 bp, Glycine max
  unsure (1)..(468): unsure at all n locations
taccctccgggtcttntatagggtcaagagatttatataaagcaaccaaacgtttggcgggaagctgccaaggaagggtctcgaggaaggctaggttctcctgttcctcttcctttgatcaagaaatccttatgggatactcgttatatgacgtggcacctcaacctagtaaaatggaaacaatacattttcatccttataaaaaaaaaaaaatgaacccttccaagaattggccttatgataactttaaaaacctagtcttaaaatttttatgcttagctatcaaatttatctttctattgtgtctattacactaaattgatcatttgttttttaattcaccatttgagtctcattatatattanaatatattgtcttattgactagaaagttgacaaatattttcttaaaaaataagtatgtctaaggaagaactaaaatcataattcttaaaataaaacacacac

SEQ ID NO: 214394 - DNA, 468 bp, Glycine max
  unsure (1)..(468): unsure at all n locations
cgctagtattagagatatcttatattatttctaaaaatggtgctgatgccatggtaaaatcccttcctacatacttttaggtacttacagtttaggatactaacacccccaccacttccatggacaatgctgcagtcaaatactgcattctcctctctggttgcctagccttattgataacctatgatgccatcaaagcatgtgtaaacattatcctatattttgttgaaaatagtattctaactatgatgctgatcttgctgactgtaggaagctgcagccagaggtatccttcccagattagttntgatctcttcaccattatttttatgagttaaatttcgatataatgtcaggatgtgtntttntatgttgtcattgagtattaactcttgtcttatgaatgtagcctggtatttttcatgctttttgttctcttgataacaaatcaagtgtttcatctgatga

SEQ ID NO: 214395 - DNA, 407 bp, Glycine max
  unsure (1)..(407): unsure at all n locations
attgagaattaccatctctaaagattcagggttattgagatttacctcttcccaagttggcttctcctcctccttcttctttctctttagaggnggtatcgtctaagtcctcctangtgctcataagacttttcttgtcctttgacttgaagaatttcttcttgtctttggacctctctaattttggaaattcaagcttgaagtgtctatgctnttttcactcatactttgacttgaagtgtttcttgttgtgtttgaacttctctaattctagacattcatacttgaagtttccaggcttttttcactcgtagcatattataaacacttntctctgtcttttctctccttgaatacattcttggatgagttctttcatgtagactcattcttgttcttccacatct

SEQ ID NO: 214396 - DNA, 413 bp, Glycine max
  unsure (1)..(413): unsure at all n locations
cttgcgganttggtcttcgttggcaaaaaggtcgaagctggtatgataagaggcaaatntgatcatcctgctttgatgaatgagaaaactggggcaaatgaagaggatgagaatgaggaaggaacccattttgaggttgtcattcctacatgaccaaacttcccacaagccccacaatgtcattactcagccaatatcagctcttctcattacccaccacccagttatccacaaaggccatccctaaatcaacacaaagcctgtctactgcacttccaatgaggaacaccacctttagaacaaaccaaaacaccaaccaagaaatgaattttgcagcaaaaaagtttgtagaattcacccncattccggtgtcctacgctgacttgctctcatatctacttgataattcaatg

SEQ ID NO: 214397 - DNA, 461 bp, Glycine max
tagcaactaatctttaatagtaaacagaggcataagcttcacttacagcataaggtataactttgaactaaaataaaataaagtataaggagtaaatgacacaaacatttatttagcacattagttcaatttttcttacattcaatgttatttgaccaacgtattttattttacaaattaatgtgacttcattatgaagttgcactattgatatgagtatttgtatagagagaagagaaatagctttaagatttgcttaaaatggatgacacatcaaaacagtatattctgtacaaagctgcatgctgttgtttgatttaaggcaattgcttcctgcacatccataattacttcgtgtaccattctaagcttccataaaggctaatctagaatgcaaaattacattatggaatagctctccagaatgtaaacttttgcattctgcaaagcctaatccaaat

SEQ ID NO: 214398 - DNA, 452 bp, Glycine max
  unsure (1)..(452): unsure at all n locations
tatcaacatcaaacttggagaaagagttcttgcggtctagacatgagaagcaatcaagtgtaatgttacttccttcactaaagcggtgatccatctccacacatattatatcaatagcaacataaaaaatctctgcacgggaatgatgaagattagtgatagtcctcccttctgctcttgaacgaccccgaactggtatttcagcatccatatttggtgccagaatacttttagcaacacaaaatccttggacatcggcaaaaaaattattccagccactctctcattgtgcccaaccgagctgtgacaacatcaactaattccatggcattcacaatattaagatcttttctttgcaatatatttgaaagctcgtttgtttcctatgacctgnatcacgcacaatctcatgtggttaaactcattaaccacattaggtggcgggtctaatt

SEQ ID NO: 214399 - DNA, 395 bp, Glycine max
tcactaagcgccacccttgtgctaagcgaaattctctataggcgctaagcgagctgtgcttgcgctaagcgccttaacccctgatcattggctggagtggttgttcgctggttccggcaagtgcaccggatagcacaagtagtataaaacggtaagaaccgagtatcgaacactcggggaactttgtgttattggtaagctatttcagcaaataggtgtctggtgtgtaaaaggaagtgtgaatatgaacaggtgtataaactatctgtgtaaaaagaaagaaaatcacgccagagaaatgatgtgtaaaaacaagtggagaacacgttggtcttcctaattggtgcctgatgctaaaaagatattctctatctaacaatgctcactgtgtctta

SEQ ID NO: 214400 - DNA, 446 bp, Glycine max
  unsure (1)..(446): unsure at all n locations
gccccactccatcattaggattagtacctgacatctcanacaaacaaatcaaacgtaacaagacaattatagttgctgtttgaatacctcacccactcaagtgtatcacacaattatggcttttctctaatgaaacactcttgccttttaccactctaattccccttgagttcttaggcaattcaagagattatggccacaacaaagaacaattcaccaatatgtgtaaggtaaggctagacaaggaaaaggttaaccaagaataaggctaacaatgtttttaggcacaaatgaaggaaataaaattcagaatttaggaattcaagtaacaatccttcatgcaaccaatatattaccttaaagagtttttnttttaaattcttcaagcctgaaccattcagccccaatttnntttttttttttttaattatgcttatacgaaaatc

SEQ ID NO: 214401 - DNA, 323 bp, Glycine max
attctcctacatgtaatttggcagccaccacaagatctgatattgggctaatctccccaagtgggggaagaagacctccagaagaaagtattccaaaaccttgacaagtagaaagggaaggacttgagggtgatatctgaggatcatgcaaagggaaatattttgtcgaggggtgatcttttcctattaatctgtggctaggacgtaacaggattttcgagcacccagactcaggtatttctttcctgatcatttagtatatagtgctttttttatttagctgggtagtttcaaattattcatagcaattatttagtgcttta

SEQ ID NO: 214402 - DNA, 473 bp, Glycine max
  unsure (1)..(473): unsure at all n locations
tgatgaagtgtacaangggggaacttcctgcttttactctttgaccacagagtggtacctggagatatgtcgcgggggtcaagagaccttgtggacgtcacgtggggtgctattgcccaaaaccaagcttgaccaatcccgacccaacccgggcatagtcagtcagtgagaacctgtgatgtacctaaacaggcgagctcctggcagtcaacagataaaagtaacaaagaccacatagcatggaggcttgtggtggctggccagctgtgaattttgtgtgatatanggttatggcctctggtaatcgattaccaagggtgggtaatcgattacaaggcttaaaaatgaagacaggagactaagatggtctctggtaatcgattaccaacgggtgtaatcgattaccaagctggaaaactaggtcatgaagctatgagggcttctggtaatcgattacgaaaggggtgttatcc

SEQ ID NO: 214403 - DNA, 416 bp, Glycine max
  unsure (1)..(416): unsure at all n locations
ngagatgagcaagtgtagaagggtgaaacttcctgcttttattcttgaccacaaagtggnacctggagatatgtcgcggtggtcaagagaccttgcggacgtcaggtggggtgctattgcccaaaaccaagcttgaccaatcccgacccaacccgggcatagtcagtcaatgagaacctgtgatgtacctaagcaggcgagctcctggcagtcaacagataaaaggaacaaagaccacaaagcaaggaggcttgtggtggctggccagctgtgaatcttgtgtgatatatgggttatggcctctggtaatcgattaccaagggtgggtaatcgattacaaggcttaataatgaagacaggaggctaagatggtctctggtaatcgattaccaatggggtgtaatcgattaccaggc

SEQ ID NO: 214404 - DNA, 446 bp, Glycine max
  unsure (1)..(446): unsure at all n locations
ntaccactntatgatacttttgacggagtgtacttagataactatatgacttttntctctggcttgaagccatgaaatgccttgtattgtagtgacatcatatccaatcatgtttctttaaacttcgtgaaatttgctatgcttgtgtaattaaaaagattgaacgattacaaattacaaattagaaaatgaaaatgaggacaactttacacaagtttgaaagaattgaatttgttggtaaccatttatatcattttctcaaacttatcaagcatttttaccctttgcatggatctgacaaatagtgtcataaaaatacctgcacatcgaaatgctatatctatcagccttaagaataatttgaacatgattagacaataacttgagagaaagctgtataatatatagtcacctgcaccaatgaaagatccattcgcaatagttat

SEQ ID NO: 214405 - DNA, 467 bp, Glycine max
agcttccatcaccgcacacaacagatgagcattattttgttcaactacatctctatggaggtcttggttcaatccactaataaaacaattaagcaacgcctcaggagtcaaaccttcagagcgatgagctaaccccataaacttcagataataatcagcaacggtaccaacttgttaaaggttgaataactcagccatagggcaaccaaatagtgaggggtcaaatcgagattccaatgctcgtcggagctcagcccacatattaaccgtctgtaaccgttgaagcatctagaaccaaggtatcacatccttctagaatgaatggaagcaatatccacacgatcctgatcaggagtgtggtgataattgaagaatctctcagccttaacaatccactcaattattggtgattgaccatcaaaatggggaagactcaatgaaagtttcttcacacctatagtagatga

SEQ ID NO: 214406 - DNA, 428 bp, Glycine max
  unsure (1)..(428): unsure at all n locations
tatagaatactaagcttgcnattanacaatcgatcatttcatacacaggtggttatatttattggctncttaacaatctaagtcaatcacatatgtgaaataatgttcagtaattaatgatattaatataactactacttaaaatatttaaattatgggtatatttttagaataaaattttaatttaagttaaattattcatttggtccttatagattcatgattcttacctttttagtccctatagtttaaaagtggtgtttttaatccctataatttatattttaattctcttttagtctcagtttaaaaatattaattttattctttatagtttgtattttaattctctcttaatccctatagtttgaaagaaatatttttagtccctatagtttgtattttaattaccttttagtctttactac

SEQ ID NO: 214407 - DNA, 324 bp, Glycine max
ccttggaagatactaagaaaccatctgtatgggtcattatggagggaaataagttccaagagttggaaaaaaaatggatcactgaagaagggtttgaggaaaggaccaaagggagaggccttataattcgaggttgggctccacaagtgctaatattatcacacccttccattggaggattcttaacacactgttgttggaattcaacacttgaagggataagtgctggcgtgccaatgattacgaggcctctatttgctgatcaattgttgaatgagaagctcttcactcaagtgttgaatattgttgtgagtgtcgggatgg

SEQ ID NO: 214408 - DNA, 400 bp, Glycine max
  unsure (1)..(400): unsure at all n locations
ttactactatatttagcaatctatattggaataacaatattagtataataatgaaacagtaatctacattggatttgcaatgtattttgttacctatgtttttgaggagtcaaaagaagccatatgcaatttatgaatatntaatgctagaaatatttaaacatccaattatcaaatatttgtaccaatgaaatttcaaattgacttttgtttctccatgtaggtaaatctataaaacaaaatcgactgtgcaagaattgatttcttcctttgctagccaagataagatgaattgaaagttatatcttactttgagcagaanaaagagaaaatataaaataattaacttaactctaaaatcattagatatgagtttggtgtatagctcataatctaataa

SEQ ID NO: 214409 - DNA, 430 bp, Glycine max
  unsure (1)..(430): unsure at all n locations
ngctctanacttacatngatgtttgtatntatgggatgtatgttgtatgccacttttgntttaagaatagtgtcccactggtaaaactaactttccaaatgtttgccttcgcaggaaatggccccgaggaagcttgcctcaaagaggtccaggaaggacaaggcagccgaaggaactagttccgctccggagtatgatagtcaccgctttaggagtgctgtacaccagcagcgcttcgaggccatcaagggatggtcgtttctccgggagcgacgcgttcagctcatggacgacgagtatactgatttccatgaggaaatatggcgccggcggtgggcaccactggttactcctatggccaagtntgatccagaaatagtccttgagttttatgccaatgcttggccaacagaagagggcgtgcgtgaca

SEQ ID NO: 214410 - DNA, 459 bp, Glycine max
actcagctgatgtaaacaatactggggttttaagcttatggaatcttttgtaagtctaatggggtagaaccacaagagacaatgaacgattcttataccttttttgataaaaatagtgaaaagatggattgtcaagaattgaacataatctcaataataaagacggattagtataaaattggtgtgttcttggtcttttgatttatctacttagtgacctttgagaaagattgtagtgaacaatattgtttgttaccaattgtgtcatacccattaaatgaaagaaaattaatattattgtttgatacgaaataaaagagaactaatacaaatgtagtcaagtttggtttatatttttatttaattatttttttgcataaatgagaaatcattaattttataataagatttaaaagactccttaataatttaataataacaaataatattttatataat

SEQ ID NO: 214411 - DNA, 346 bp, Glycine max
  unsure (1)..(346): unsure at all n locations
tgtcaactatatggagcccccaacggtcttcttaatgtctttgtgaggcaattntgaaggctatgaagaaaaggttgaagcatttcaaatctacaacatattgtgctagatctcttagtgagaaatttgttttaatttcaaccctctctatgagagtgacccacttcagtattgtgctttcaaagcatgtaataatcttagatagaaacgtgagattaagttcttgagtggaatttcacttgtgaggagaaaatttataatctatgaagttgagtacatacccattttctataaagtccaacaatggttggcagaagagaaatccagtggtgtagctggtctagta

SEQ ID NO: 214412 - DNA, 439 bp, Glycine max
  unsure (1)..(439): unsure at all n locations
tattntgatgatgccaaagactcatgtcaagattcattattccagcaagtttgaagaatcaaagagtcattcaataaggaatcaagattcaagagaagactcaagatatgcaagaacctcaagaacagcatcaagataagtataaaaagaattattcagagaaaagattgaatagcacaatttgttcaaaagaattttttcaaagaaaaatcttttaccagtttttactctctagtaatcaattatcataaggcagtaatcgattaccatgggcatgtaatcgattaccaatatttttgaatgtcgaatttcaaatttcaagagtcacaacttgtgataaaacattntcaaacttgtgtaatcgattacacaacatttggaatcaattaccagtgttgctaaatgttgggtntcaaatctaaacatgaagagtcacaac

SEQ ID NO: 214413 - DNA, 331 bp, Glycine max
agagcccgagtagtcgaagagaagttcaagtccatagccatcaaagtctgaaaagagtatgatgaactaagggacgtcaatatggccaccgctgaagccttggaatgagaaaccaagaaggcccgaaaggaagaacacgtgccagcaaagttttgaggggctttatagggcagcaatagcaaactcaagctccgaagaggtgaaaggaatcatcacaggtcaaaggcatgatcttgaaggacgagctaaaggcttaccttatgtcgaaaagaaatttgtcccaacagttaagcgagactgaagggaatatgtgggccgtcatcgatgagtg

SEQ ID NO: 214414 - DNA, 410 bp, Glycine max
  unsure (1)..(410): unsure at all n locations
ngagatgaggaagtgttgaagggtgaaacttccgcttttattgttgaccacagagtggtacctggagatatgtcgcgggggtcaggagaccttgnggacgtcaggtggggtgctattgcccaaaaccaagctttaccaatcccgacccaacccgggcataggcggtcagtgagaacctgtgatgtacctaagcaggcgagctcctggcagtcaacagataaaaggaacaaagaccacaaagcaaggaggcttgtggtggctggccagctgtgaaacttgattgatatgtgagatatggtctctggtaatcgattaccaaggatgggtaatcgattacaaggcttaaaattgaagacaggaggctaagatggtctctggtaatcgattaccacggggtgtaatcgattacc

SEQ ID NO: 214415 - DNA, 346 bp, Glycine max
gtgtgtacaaggtgtctttaattacgagctaaattaattaatttagtcagcaacaaagtagctggctaaaggaatgttgtgcatgtgggtagttttgtaagggaattattttgatttgattgtgcttgctagttggggcaagagtgtttgctgctgttaaagttggcgatgacgtacagttacaacgtgccttgcatactcttttactcttttattcacaaatattatttgtaatttctattaatgaaaaaagtaaatctcaacctctcacctttttttactatccaataatctatattttcatatgcgactacttctactaccatcttcatcacttttcattatg

SEQ ID NO: 214416 - DNA, 437 bp, Glycine max
  unsure (1)..(437): unsure at all n locations
ntctagctnttcattgggggtatttgatctccttttgtgtgctcttaaatgtgggaatgtgctcaaatatgtggggcatatttggtttgttttcttgcttgattgggttggattgggggtttgtatgggatggccctaggcctataatgcattttgaagcaatgggacatgccacattgtccccgttctcttgctattgatacctaaacgcacgcccaccaagtgttcggtgaaatgcctcaatggcattagcgcgtgacttttgtaaggaaacaacccatggggcattttggtttgcacatattttctattttttgagacatgcattcattcccgataaaggctagagtaattgccccacatatatcctatgcctaggaaccaaagtttttatgcaaaacaacacaagaggaggtgcatgtttgggtaaagtactc

SEQ ID NO: 214417 - DNA, 425 bp, Glycine max
  unsure (1)..(425): unsure at all n locations
gcctttatggcaaagatcaagacattaccctataagaagtccagacctcaataaggaccaaggagatgcaaaaacagcacgactccaaatatgaggataatggtgaaagcctgaacatttcaagggtaaggagtgaaaagaagggaacaagaggaaagaagtccacatcacggtcaagggattcaaagaatggttagaaaacaaagttcaaatgctttaattgtcacaaaactggtcatttcaagaaagactgcccggacaagatcaagaaaggatctttggactctgctgacatagttgaagcctctgaaggttatgagagtgcaggtgttctaatagcttctaataccaaaacacanacagaatgaattatggatgctggatgctcatatcacagccagcccgagaaaggactattttgagac

SEQ ID NO: 214418 - DNA, 445 bp, Glycine max
  unsure (1)..(445): unsure at all n locations
ggtcgtatctctgcgtttatgctcctctcttatactgctactactccactatacatatcattctacaactcagaaacacaacacaacacctttccacatattcatccttattatatcccttttctggtngataaaaaaaaaaacacaaagaaagcaagttgactgagaaaacaaaaaagataaacacaacaacagaattggaaagcaaaataacactatttttgttttggtaaaaaaaatgttaaattgatttccaagactttcaccagagtctagactcaaaaaagataattagattttacgttcttatgtttttatataagatatgaactctnttattgctaattactagattaactcttgttggcaaattatactttntaattttaatccatattaaagtgtaccatcacctccataagtttcccaagaaattaatccatat

SEQ ID NO: 214419 - DNA, 369 bp, Glycine max
aaaacaacacaatagcattcatataattcaatataacacggaaacactaaaacaaaatataatccaaacattcttaagtcaaaccacagataatcctaagcttaaaagactaaataccaaataccgaaagataatgaaaatcctgataactaaaagatatagacaaatacacggcttataataaacgataagtgagaatctaagacttagacggtagtggaagatcaaagcaccgacgaggataagtcacatcttcttcaagctgggtgatgcgggtatccatgccttcaaagcgaccatccaaggaatcgaatcgctcaccaacatatgtgcggagaccctgtaactctgaaagactttatcataatg

SEQ ID NO: 214420 - DNA, 460 bp, Glycine max
  unsure (1)..(460): unsure at all n locations
ctttntagcttcaatgcaagagaacatactcatgactaggaacccanaatttggttttaaaattagaaaagcatgaaaatagggacttgcttgtaagaattcgggctgccccatgattggtactttgcacctaagtaacgtgggaaatggttttcaatggtatgtagatatatgtgtaaatataagcggcataaaattcctcgccaagtatgaataattgttttcttaaatgaatgtatgatagcgtggaatgcctttttgaatgcaaatatgtgcaggatgtaattagctttccaatatgcatataaataaatatgagtgaaacagtaaaaatttgtatggtgtacttcaaatgtatgtaagtagtttgtgatagcaaatgtttaggatataaattacgtgtaaagttcgacgcaacactctgagcatgaaagtgtgttntctttttcagaatgtatat

SEQ ID NO: 214421 - DNA, 472 bp, Glycine max
caacttcctcttccaatcgggtaaacacgagattcttctcttcatcgctggcagctacaaactcctttaccaatacatccaagctttctactataccagcctatacagaaatatcaaatgtatgaataagataccaattgcaacaattttaacttttatccccgaccaaaaaataaaatacaacaaaactctagatttcactaacttgggaagaaagttgtcctttgtcatctcgacttgctccagatttctcattgataaaagccacaaagtcatccaagtctctttcaactgcgtagtcttcaccagctttgttgccctatgggaagaacttcaaggtaagaaatccactcacgtcgtacctgcataaatattattccagcagacctcaattatttatcatgttgtaacgagtcgtatatgccattacattatgacttgaaaggaagacaactatgaataagcactacac

SEQ ID NO: 214422 - DNA, 487 bp, Glycine max
  unsure (1)..(487): unsure at all n locations
tgacctataaatactaagcttgaagaggacatatttctatagaaagctcttatccatatttccattgacttgctccttatgctcccttatctctattgtgatctttacaaatggctgcaaatcatcacttcttgtcttccaggaatttaagccataatttcttggatggacccattggcaatgtatttactggcttagatgatctcaaagaaatgtatgttttcttccggagtcttctgctattgcattctaattgaaatgaaaggacaagtgattcaatcatttacaaattttaggttcctaanacctaaaccatttccataggtaggtttttctgtatgttactaatcttgaatattcaggatctgtaagaacaaacgatgaagccaatcaaaacctcattttttaataattcacaacggaaagaatagaacgtgaaatcatataaaatatacactacatatatcactaccaaaaatatatacta

SEQ ID NO: 214423 - DNA, 472 bp, Glycine max
  unsure (1)..(472): unsure at all n locations
taattcgatctatctatntgctgagtaactattacatgatagactggaaaatgaactcactgattctcattgaaaagaaaactggtttatatacagaaaacagttgcaacacataaaactagagaagaacatcaaacacactaactatgtagttaaaatgttgacaatttgatctctcaaaacacttaatgaaattacatggtttttttgtatgtctgatgaaatctattcagaaacaaaagccttgactaattggtttcataataaatacaaaaactctaaagaaaatcattcaaagatcaaagatgctcactaacagcgggttctagaacaactcaattgattctcataaagtcataatctactaaacgaaaacatgtaaaatatgagtatgccttcttccanaaatgcttaaagttcctacttccatttggtaagtattgaatcacaatagagaaatcataatcagaac

SEQ ID NO: 214424 - DNA, 473 bp, Glycine max
  unsure (1)..(473): unsure at all n locations
tatacgcatatntccttacaaacgttctcttgcacattacattctattaaccggaaaaaaatgcacccatatacaatcaaggcagcttcgttacctagattatttacacgtacttccaaggtgtatttgttacttacatcacacacctccttggctaaattcacatacatgcatactcaaagcatttcggggtaccaaaaattgcacatgtgcacatcttggtatttctaatacctatacatacacaaacttcatgatgaatcttgactatctacacaataaggtgctacattttatgctcttttcaagtttttgctacctaaagccgcatgcaaattcaagtatatttngctgactaaaattgtnttcaaattataaggtatacatttcttggtaatgtatcttctttacataacatgcaacatatttatgtatatttttttgtgagacattctgactaccacaaattatat

SEQ ID NO: 214425 - DNA, 401 bp, Glycine max
  unsure (1)..(401): unsure at all n locations
ctatcatcgccaaggaccaagaagagttaggtctatccgcggcccacgagcataggattgcggacgaatatgcccaagtatacgcggaaaataaggttagaggaagggtgatcgactctntacaccaaaaggcaaccatgtggatggatcgggttgctcttaccttgaacgggagtcaagaacttccccgattgttagccaaggccaaggcgatggcaaacactnactctgcccccgaagagattcatgggcttctcggctattgtcagcatatgatagacttaatggccccacataatagaaatcgttaggaaacctggatggtctctcacaccttgactagatacgaactcctttttgaaataaaatgagttggtcccatggttctactccaaaagcct

SEQ ID NO: 214426 - DNA, 439 bp, Glycine max
  unsure (1)..(439): unsure at all n locations
ntntggagtaganacatgggaccaactcatttattttttaaaaggaagtcgtatctagtcaaggtctgagagaccatacaagtttcctaacgatttctaattatgtgggccattaagtctatcatatgctgacaatagccgagaagcccatgaatctcttcgggggtggagtaggtgtctgccattgccttggccttggctaacaagcggggaagttcttgactcccgttcaaggtaagagcaaaccggtccatccacatggttgcctcttggtgtaaagagtcgatcacccttcctctagcctctttttccgcatatacttgagcatactcatccgcgattctatgctcgtgggccatggctagacgtaactcttcttggtacttggcgatgatagctagcatggtggtctccgtctcgcataaatgctgagacaagc

SEQ ID NO: 214427 - DNA, 397 bp, Glycine max
  unsure (1)..(397): unsure at all n locations
atcttatatagaagtatgagattaagttcctgagtggtattntgatgcaatcctcccatggagggggcccatcaccagagtcatggttaagagactccaggaagattgggccacggatgcaagagaatgccttatggttctcatgagccttatggtagcttttgggcccatgggttaagtatgtgcccacttatctttgttcatattagattatgggttcattatttttttgggccttgatttatggcaccacagtgtagggagggtaccccataagtttagggtaccctagtaatgtaggattnttcagcccttgtattntagggctcacagactnagttttgtatcanggatagttttgtaatttcacatgcattaagtgcactatttgatgtgt

SEQ ID NO: 214428 - DNA, 461 bp, Glycine max
  unsure (1)..(461): unsure at all n locations
tcatggtgaatcacagtgattcacagatgttttgatgataacaatgatgataacaaaagatgatgacaaaggtgatgacaaaaagctcatagatcaatcaaagaacaactcaagtgaatcaagaacaattcaagagttcaagataagaatcaagaagaattcaagactcatgaagaaagtctagagctttctgaagttttctggtttttctaaaccttgaaaacttatgctattcatccttttcattctcttctccctttgccaaaaagaattcgccaaggactaaccgcctgaattctttttgtgtctctcttctcccttttccaaaagaacaaaggactgaccgcctgaattcttttgtgtctcccttctcccttgcaaagaattaaaatgacacagtctgagaatcttttgattttccctttcctaatacaaagtgttanaggactaaccgcggagaa

SEQ ID NO: 214429 - DNA, 456 bp, Glycine max
  unsure (1)..(456): unsure at all n locations
ntgcctctcctgtgacttcaaatttagtcctatagagtgagagtcaatattagtgattactgatcatgaatcaaagtgatgtatgtatattcttagagtatgtttggatattggtaagggatgagatcatgagagctagcaaaatcaaagggaaaaaagggaaggaaatggaagaaaaaaaatgaaggattaaataatgttttttctccctttatttggatatttaaaacttttcaaatcttctaaaattaggagattntgaaataaaagtgcatggaagttcatataattaagaattagtacatttttgtttattataatttcatccttttgtaaaattactaaatgaaaaaaaaaactagaatgctttttgtccacgcctctacactggctttaccttctttcttggttctggtttctagaagtcaactntntaacttttctcactaccgacat

SEQ ID NO: 214430 - DNA, 470 bp, Glycine max
  unsure (1)..(470): unsure at all n locations
gctggcatagatcacaaattacatgaggcacatacttttagattacaaattttgacaatgcagtcatagtccacagataaaataaaaaaaaaaaactggcatgtcattgatatattgtgggcagagatggagcagcaaacacaacctgacttgacaagcagattaatgcaggaaaacaatgagtagctatggcacggagtaaagagaagaacttgagccgatgctctgggtaatcttcaaaattttttgtaatcatctgtacaacagaacaaaaaggaaaatataattcagtgtatgtttacctgcagatacccaataattatttggcttcagttgtaaaaatacaagttatatgacgcatatttgcagaacagaacttctataatatataaatatgcatctaaaaacaaccaccacctccaagcctttntccatttggtcaggtatgtatatggatgagacaccataat

SEQ ID NO: 214431 - DNA, 476 bp, Glycine max
tctccttccatggcttatcctctagtagatggcgccttttctcttctcttatcctttatctttcgctgcaactccatggccgaatatcaccattgaaggaccttgttgaagctcaaagacccatcctccatagaagcttcacaagagagcttccatcaatattatacttagactatcctaaaaaatgatagctttttcaattggaaacccaagattgctaaccagacctttaagttagatcccatcctttattgcttctattagagcatgcactctacccttgtagtggataaaaccacaatgggctaaagagtttccttccaactatcaagagagttgccagtcatgaatgcgcaccttgtcacagttctgcttgcatccaaatctacagcatagtcaaaatctaaataaccagcaagagcacaagacgtgtctccatggtagacaagtgttaaatcagctgtacccattaatac

SEQ ID NO: 214432 - DNA, 327 bp, Glycine max
aacaacacaatagccttcatataattcaatataacacggaagcactaaaacaaaatataatccaaacattcataagttaaaccacagataatcctaagcataaaagactaaataccatataccgaaagataatgaaaatcctgataactaaaagatatagacaaatacacggcttataataaacgataagtaagaatctaagacttatacggtagtggaagatcaaagcaccgacgaagataagtcacatcttcttcaagctgggtgatgcgggtatccatgccttcaaagcgaccatccaaggaatcgaatcgttcaccaacatat

SEQ ID NO: 214433 - DNA, 467 bp, Glycine max
  unsure (1)..(467): unsure at all n locations
cttttagcttcaatgcaagaaaacatactcttgactatgaacccaaaanttggttttaaaattagaaaagcatgaaaatagggacttgcttgtaagaattcgggctgccccatgattggtactttgcacctaagtaacgtgggaaatggttttcaatggtatgtagatatatgtgtaaatataagcggcataaaattcctcgccaagtatgaataattgttttcttaaatgaatgtatgatagcgtggaatgcctttttgaatgcaaatatgtgcaggatgtaattagctttccaatatgcatataaataaatatgagtgaaacagtaaaaatttgtatggtgtacttcaaatgtatgtaagtagtttgtgatagcaaatgtttacgatataaattangtgtagaagttgacgcaacactctgagcatgaaagtgtgttntctttttcagaatgtatataggtgtat

SEQ ID NO: 214434 - DNA, 351 bp, Glycine max
  unsure (1)..(351): unsure at all n locations
tgacaggctgaaatctactttactccagattggttttgcgggaagcaaatatgattcttctctgtccatctataagcctcaagggcatgtcgtctatcttttagtctatgtggaagaatcatccatccaggtagctctaccccctttgttcagcagctgactaccaatctgaacactgccttctctcttaagcaactgggtcatttggattattttttgggcctacagaacaagtactcgcctaataactctatattgatgactcagagcaaatatattcgngattaactccacaaaactcacatggctgaagctcattctatttccctccccatggnatctaactacaca

SEQ ID NO: 214435 - DNA, 337 bp, Glycine max
tgcttgagaagcttctatggatgctgaatctttgagctttatattggtccttcaatggcgaatttcaaccatggagttgtagcggaagataaggagaagaggtgagaggaggcaccatccgctagagaataagcaatggaaggaaaagcttcaccaccaagagagtgccttggataagaagcttagagaggaagcttcaatggaggaagagaatgagagagaggggggctctttcctctccctcttctttcctcttcttcttgtcgctttttcgcttttgttctgctcctgccttttgcttctcttttggtcttcttcctcttactcttctcctttc

SEQ ID NO: 214436 - DNA, 457 bp, Glycine max
tcatgatgaatcaagattgattcaaggagttatgatgtattcttttatgatgacaaacagctcaaaagtcaagatcacttcatgataacaaagattatgacattcaagaatgagttcaagattgagtcaaaaacacttcaaggatcaagaggaaatttgatttccagaatcaagattcaagaataatccagatcaagattcaagactcaaagattcaagaatcaagagaagacttaatgaagataagtattaaaaagtttttcaaaacattgagtggcacaagaagttttcacaaaatcattaccaacgagtgttactctctggtaatcgattaccagattatagtaattgattactagtggttttaaaacgttaagattttcaaaattcacaatgaagagtcacatctgttgatgtgtaatcgattacacccttatggtaatccattaccagtgac

SEQ ID NO: 214437 - DNA, 449 bp, Glycine max
tgagagcgtgtattctattcatatagaccatatttgtttatcttaagcaaaaaagccaaaagccgaatgaacacgtaagtcacttgtgttatatatgcactgcgatttgcagcgcgtgtttgagaatcaagcagacacgttagtaagattaagtttgttaagtatagataaacgcatatgttatatttattttaacatcttaattttttttaacagcggagtatgacccgtttagtattatatcattttaaatttaatataatttacattttcccaaagaaaaaaaagcagaccacagttaacgatttaattaacttaaagaactcatcacgtaaacaaaatgtcgcaagcgttaattgatccaaaattagtaatatttatccgcaatgatagacacaaataattacaatctaaatctctcgattaaataattcaaaagaacgaacata

SEQ ID NO: 214438 - DNA, 438 bp, Glycine max
  unsure (1)..(438): unsure at all n locations
ngctaacccatggaagctcctaatatctcccatactttttgggtgtgccattcttggatggccttgattttctcagggtccacttggaccccatttctaccaactacaaaacctaagaaaactatattatctacacaaaaggtacacttctctatatttgcataaagggtgtttttcctaaggactgaaagaacttgtctgagatgtcctaagtgatcatctaggctcctactatacactaaaatatcatcaaaataaacaactacaaatctacctatgaaatcccttaagacatgatgcataagcctcataaaggtgcttggtgcattagtgagcccaaaaggcatcactagccattcatacaaaccaaacttggtcttgaaagcagttntccactcatcaccctttntcatcctgatttggtgataaccactttta

SEQ ID NO: 214439 - DNA, 417 bp, Glycine max
  unsure (1)..(417): unsure at all n locations
tgacatctcaaacaaacaaatcaaacgtaacaagacaattatagttgctgtttgaatacctcacccactcaagtgtatcacacaattatggcttttctctaatgaaacactcttgccttttaccactctaattccccttgagttcttaggcaattcaagagattatggccacaacaaagaacaattcaccaatatgtgtaaggtaaggctagagagacaaggaaaaggttaaccaaaaaaaaggctaacaatgtttttaggcacaaatgaaggaaataaaattcagaatttaggaattcaagtaacaatccttcatgcaaccaatatattaccttaaagagggtnttttttttaagttcttcaagcatgaaccattcagccccaattttttttttttaatttgcttatacgaaatct

SEQ ID NO: 214440 - DNA, 463 bp, Glycine max
  unsure (1)..(463): unsure at all n locations
tcctcttaccggtgaaaaacattgtcggccattgcttgtaaaanaattgcgcaatgtcggctgaaaaacatcagttggggctgtttaactaccgatgctggctactgttttttctattccacccctgaataatacttggacgatgtcgatttggaaatgttcgatcggagtcatccggtcatgcttctttttaagacctcgatctgtcatcttttcctggccgacgtcggctagcatttttttcgatcaatatcggtgaatcatgctttttgccaaggtgggctaacgttttcgtggctcatgaaatgagagcatgccagtgtcggccgaaacacaatctcgcacgaaaaaccctagccgacctacattgtaatttttgtaggcaataccgaacagcaaaacttcgtctaccataaagaaatattatcgaccagtgtttgtaaaaaattctgaatgtggctga

SEQ ID NO: 214441 - DNA, 445 bp, Glycine max
  unsure (1)..(445): unsure at all n locations
ntanngctgttgaatgcttcagattgttgcacataatgtcaaaggtctgtgtggtggtaggcagaggagcataaaccatagagtctgtcgacaggtgcagatttttgattcacggccagttgggttaccaggttaaccaaggcatttagtttaccttcaagtttcttagtctcggctgatgaagatgaatttgtggttacttcatgcactcctctaatgacaataacatcacttttggcactaaattgctgggagttggaagccatcttctcaattaaatttctggcttcagcaggagtcatgtctcctaaggctccaccactggcagcatttgtcatacttctctccatgttactgagtcctttataaaaatattggagaagaagcttgtcgcaacctacccttcggcgggagggcgacgcgagactcgcgggaagcgtgtcca

SEQ ID NO: 214442 - DNA, 452 bp, Glycine max
  unsure (1)..(452): unsure at all n locations
tngttttactgttcctattaaggaatctttgtatttgttgtgcctaatatccctaagacacattaatacaacaacatctatgcccatatcaattaaaggcttgatggctacttgtacatatcctatgtgtaggtatttgtattttcaactgtgttcataaattgagtttttttgaaagtagatgaaattcttcccctatgtcttgacctaaaggaatactattttttacaattttgattatataatcaaaattatgtttgtctttaattgtctcaggaacatacagggtgtcctaggggatttctggaatactccagtcatccatatttcgatttatctcttcgaagtggaccttcccatcgaagagattatgttttggggcgaccacatgggtctggttttcttgttcattgagaaaanttaagtgtcttgaggaactatntgaagatgaa

SEQ ID NO: 214443 - DNA, 425 bp, Glycine max
  unsure (1)..(425): unsure at all n locations
tcccttaatcattccgaatntgtgcatatctctaanattggtcttcaatagggttttcacatcttccacccttaatcacacaagttgcgctacaccttcgtcaatagcattaactagtgtccctcctattggatcaagtggcctcgagataattaagaagggggggggggttgaattaattatgaacgtgtcttgactaattaaaaatctatccttcttaatgttactagattcaatttggcttttactacaaagttaagaaagtaaagaacaaaaacaaaaacttaaccaaaagtaaaagcggcaattaaaagtacacagcggaaattaaagagtgtagggaagaagaagacaaacacaagatttatactggttctgccacaaaccgtgcctacatccagtccccaagcaacctgcggttcttg

SEQ ID NO: 214444 - DNA, 422 bp, Glycine max
tgctcgcgactggtccctttctttccttcgcaacttgagttcactattgctaccccataaagctccacgaaatttggtccgggcgtactcttccttgcgaagcctcttggtctcttgttcaagggctcttgccgtaattgcattctctttccgtaacctggcacactccttccgaacgtgtgtagcagccaacttgaacctctccttggcgagttttgcctttcctaactcgctctcgagagcttggacttcttcgtcctcttccggtgcttcaaaattctcttcgctgacgacttttaacttggcgagccaatctaaacctcgtatgcgaactttcagccattcgtggtacccaccaatgatgccattacgaatgcctctaagctcttgatctttcctttaacggggttcccatgccttat

SEQ ID NO: 214445 - DNA, 469 bp, Glycine max
  unsure (1)..(469): unsure at all n locations
cgcagcccaccatcttttcatagtagagttccgattatgtgtctaccatcacgattatcgtctccctttccattattgggggtaccacctacgccgccagatccctccaccttttgggcgtgttctttgaaagatccgtccccctttttgcacatgttctgtagttgcatcctatccggaaccatatcaaaattgtactgatactacctaacaaaggcaaccattaggtccttccaagaatggactcgggaaggttccaagttagtgtaccaggtaacagctaccccagtaagactttcttggaaggaatgtataagcaattcctcatcttttgcgtattcccncatcttctgacaatacatctttagatggttcttgagacatgtagtccccttgtacttgtcaaagtccagcaccttgaacttgggaatgaccatgcttgggtattangaacaacttttctaggtac

SEQ ID NO: 214446 - DNA, 436 bp, Glycine max
  unsure (1)..(436): unsure at all n locations
gtatgcccgagtcattcatccctatgagatgttgttgaattattggcgatcagaattgccattccttggattacggngttgaaccaagctcatgcttttacaaaaaggttcatcaagtcaagttgaaatatggaagtaaccgtcttgcaaaattggggcaaaagatgaatcgagtcacatcactgcttcgtttactgccaaacatatttaggattgtttatgtccttgttacttccagtttcaccttgacaaagatgtcatggaccatgttgaaaatctaaattgattcaaccccatatcctgcgtaaaaattcgcaatacttcaactgtacatcattcgcatacatccatgctnttcattggttgcattgctcattgcattctttcgttgaaaaataaaataaaataaaatgaacttaatcattgttatcaaaaa

SEQ ID NO: 214447 - DNA, 434 bp, Glycine max
tctcccatgataagacatcacaattctctctcttatacctcttttcatgacttgccaagtattaatcaaaggtcttttcatcctcttaacatcactcatcacttggttccaccacattaatgcatatccctcaaactccaagaaggccagcttgatcttcttctcttcaatgtagttgcagttgtagcaagcaaagacttgctcaaccttcatctctcactcaagatacatttctggattacaagtccctttaaaagtagggatcgacacctttactcccttaatcctttcctctgatttcctaccttcatatcttctatgatttcttctctccctatacctctcattcctccctcattctcttcataccccttatcttctccatgagaagaattagatgatgcgccctctcttctttgtctatattttcaatc

SEQ ID NO: 214448 - DNA, 397 bp, Glycine max
  unsure (1)..(397): unsure at all n locations
ccgcttataagtgcgggtctgggagacgagtggtctagtggttttatatgngaagatgatgttccaagtaccttggatttggtccgaccatgccctcctgatttccagctgggaaaatggcgagtggaggaacgccccggcatttacgcgacgagcataatgtaaacctttacggttttaaaagctctatagttgggcctacgctntagaagtcttcattcgttaaggctctgtgtcttttgtttttgaatttataatacaaggatctttcttcatctgttcctggtctctacccattctcattcatttgcatgtttacttctttttctgagacggcagattcgatgacgagtcccccgaaggtactaatacctgngacccgtctatcaacttcgag

SEQ ID NO: 214449 - DNA, 473 bp, Glycine max
  unsure (1)..(473): unsure at all n locations
ctccgcttagcgtgccttctacgctaagcccaagttcttctttgattcttatttgggcttancgtaccatgctcgctcatcctaattacccctctattttgaattaggcttagcattcctgtggcgctaagccacctcttctcctgattctattggcactaagcgcgaaccttatggcttaccaccctcataatatctatgcattggcgctaagcctgaccctcacagcttagcatcctcatgctttttgtgcattggtgctaagtgcgaccctcatggattagcgccctcatccaatctgtgcattagcgctaagtgtggccctcgcggcttagcaccctcttgatgttagtcgcctctatctctgatctatttcatgctctgatgctattgccttggttctgccttatgagtgttccgtagatggcatctaataagaagcatgcttctttcttctcgcatcattaaatcta

SEQ ID NO: 214450 - DNA, 456 bp, Glycine max
  unsure (1)..(456): unsure at all n locations
tctatagaagggtcgcgcctaagtgctctactattgttttatctctcaacgagtaggagaagaagaatgtggcattaacctggggtgaaaaacaagagcaagcccctgctttgcttaaagaagagcttactaaggcacctattctagctcttcctgacttttctaaaacttttgagctataatgtgatgcctctagagtgngagttggagctatattgttacaaggtgggcaccctattgcttattttagtgaataacttcatagtgccactctcaactaccccacttatgataaagagctttatgccttaataatagccctccaaacttgggaacatgacctttgttacatggaatttgtcattcatagtgatcatcactcacttaagtacattataggacaaagcaagttaaataacaggcatgaaaatgtgtagagtacctagagcaattcca

SEQ ID NO: 214451 - DNA, 409 bp, Glycine max
  unsure (1)..(409): unsure at all n locations
tcactgangacatacaactctgctagcaacaccgtggttctagccaccaaatgggccctcaatctgaaaaanatacatttaaaatttaactaaaagatgtcacttaggttcacatgcattcaagcttaactctggacaaaaaaataacatatttgaatttttttaatatataccaagttactaatgtatatatactctgtttttttaatatgaataccgtagcaagttatacctacatattgtcttaaaatacaccaataatatacctagatattttaattaatatataactagaggtatattattattattattattattattaccaaatactccaatatttctatgataaaagcaaatgcactctgacaattaaaaagtacctttcttataaaaatgaatttctatg

SEQ ID NO: 214452 - DNA, 450 bp, Glycine max
  unsure (1)..(450): unsure at all n locations
tcagatgcaagctcacaggagaattataatctttttattttcaacaaacactggaaaatgaaaacctataaatactagatgctttgaagaaatgagtaacgaacctacacgctatcattcaaattctttatgtagaaaactctttgtatattcttataaagtttgaaaagctctcaaaacatcttgaatactctaagacaaaaaactaaatgcttagatttcacatttgtttgtaagatgattaagatttaatcagttagcaaatcaaacaacatatcttcttatttgtatagaaccaacagtggcttggtaggacaaagaatattcggttgttaaagcttggcgataaactttgttgtgagagcntacagtaacagtgacaaatacttgtaactcttgtgaaattagtgaaacttgattgctaaccacaaactgaacttagtctgaatg

SEQ ID NO: 214453 - DNA, 433 bp, Glycine max
  unsure (1)..(433): unsure at all n locations
agcttcgtaccagccagccacactgtattcttctaaattntccacttccgcgaaacggcgtgtcngtttggaatcagagagttttggtttttgctttcgtaggttctgattgcggttacagaatgaacaagtgtttgacagctacaataaaaaaaggttcataaacgacaattctcacaccttgttagattcacctgtttgattccatcaattcaatgactctgcattttactttntaattttagttttaaaattntaagatttcatgtaccttacaattcgctgaaatattaggtgtttttattgcatttcctttctagagatttctttccccataatttctaatcttaatttcaatttttggtctgcgattggagcacgaatctattttcctttattcttttaattntgattttaactcttggttgtgtat

SEQ ID NO: 214454 - DNA, 447 bp, Glycine max
  unsure (1)..(447): unsure at all n locations
caagcnngcaacatctataatagagtcttcttatcatcttataccaacacagcagaataattatgaccttctatgcaatacatacaatccatgttagagaaatcatctcaatctgagatgggcaagatctttacaacaacaacaacagcttgtccctcctttccagaatgttgctggtccaagcaagccatatgtttctccttcaatacaacatcagtcacaacaaagacaacaagctactgaggctccccctcaacctttcttaaaagagttagtgaggcatatgaccatccataatatgcaatgttatcaagagacaaaagcctccattcagagtctgactaatcaaatgagtgtaatggctacttatgtgaacccaactaaataccaagattctgacaatatgcttcacaactatgcggattcgaaaatataatgcctcacctg

SEQ ID NO: 214455 - DNA, 394 bp, Glycine max
  unsure (1)..(394): unsure at all n locations
tatacttgacacatgaagaatagaatttattttctacttaaccaacaaccgcggaataattctgagtctcattagctttttttttttnccgtttacatatgacataacaaatgtgagatgggaatagtctttaatactaacacaaccaattgtccctcctctcagaatggagcggaccaaacaaggcttatgttctttcaatctttcaccataacttcgaggaataaaaaccatcctacgaggctaccgcatgaccatttctatatgagatattgtagcctatgagcttggacagatttataatcttgaactaacatgaggcctgtgcgcaatctgcctggtcctctagggaaagagcaagtcagtnaacgcttcgaaaacccaaaatctaaca

SEQ ID NO: 214456 - DNA, 463 bp, Glycine max
agcttcagatcaaggtaaatcataatcttgtatccaaaacccatcaatttagtggattttcaaggtttgacaagtgaaaatgagaattggttaattttggggtaatctctcatctcaatcaagtctataacattgatttagaattgctcaaactagttttaaggtgaaaaccccaaccattcaaaatttgacctctcaacacccaatttagcctagaaaaggctcttttctttcacattagtcactcatcttccttatttgctctgcccaagcttacctacaagtcctaattgacattctaaactagaatcaactcactttagactccaatttacactaaccccaaatttagcttttcaaaccctcaaaatctcacacttttccactcacatcactaccattctcaaatttaaccctaggttaactctccccatcatttctaccagttttctaccaacaattt

SEQ ID NO: 214457 - DNA, 330 bp, Glycine max
ggaaaatctattgagccacaataattccgtccccacattaatgaccaggaccaaagctagattaaaaatggagatccaacatacttaaatagggtctaatcctcaaagaaagtaacccgaaaatcacagtatatgtcacataacataaactaaaacgctcaaaaactttccaaagaacaaccccatctttcttaggaaagaaagggatcaaggtcgggctccttctgaaattgcatgaagattctcaaacaaattccggacaaaattgagaaggcatcaccaaccacaactcaattctggtaaaagaaaactgctgaaaatggttacaat

SEQ ID NO: 214458 - DNA, 424 bp, Glycine max
tatatccatatggacttacctagaaataagtgctttgattctccttttgagccttgtttacctctccttggttagaagctcactactagccttatatgataaaccatgatattcaccatatccataaagaattttggagctatggatatgttcagggaattagtgtggggggttcttgttccattggataacttgttttgttggatatagtttatgatgtattttgggccctacttgatgtacacttgatattggataaatgtttgacatgctgaatgaaatgtatgttctcaaaggctatatagctataataaattataaaatatctaaacaaatcgaaaatagtaaaataaaagcaataaattttagtgaataagatcttaaatgacacaagaatgatgaaactcttggttctactcttatg

SEQ ID NO: 214459 - DNA, 243 bp, Glycine max
tgtgaacgcgcatggagggcgcgcacagctaccgctccagagagtgtttaccacttaagcctaccaacctttgatttcgagaagcttaggaaaaacaccttctgttcttcttgttttctccctagccatttctgacgacccaaacactgtctccatcacccacaattacccaccgcagagcgcctttgttctccattgaacccccacactaagaggaaccccttgaccgaagcggaatgtttc

SEQ ID NO: 214460 - DNA, 383 bp, Glycine max
  unsure (1)..(383): unsure at all n locations
agcttatcttcnaaccaaaaaagacagacatttttattttgtgaggatgaaaaacatactgaatatgttgcaaggataaattccaaacattttgattctataagaacaaaaaatatattttagcctcgtctttattgttaaaaaaaaagagaaatgctactaacatactctttaacacacttccttcatacacactttctcttatgtgttaaaatgtatttagttgaagaacaagttccacaaaaccttgaacctaccaagagtgaaggctgggattggtatgaatgggatcatttgccacaccctttgggtgggcctcttgagaaaatggtcaaaggagctttcgacccattcccaatttgattctggaaattggcaatgat

SEQ ID NO: 214461 - DNA, 401 bp, Glycine max
  unsure (1)..(401): unsure at all n locations
tatcagcttgaggctttgttatgttacatgaacgacttagataatttttttatgangaagcaacaaatctgttatttaaatggagagnttcttccggcatgaaaatagctagtagatactacaaagatttttaaaccttggtgtgagttagactaatattaatacactatagtatttgatgatacaccgcaagtgaaatgtgcatccatatattgatctattaatgcactcacaatgtctttacatgaatagctgaagactttctatatgtttgtgcttctaaatacgcctagcactgttattacgaaagatattttgatactctttcatcacttttagactgggatcattcttttttcaatgaatgagaggagacacctgacacggaaggactatgataa

SEQ ID NO: 214462 - DNA, 125 bp, Glycine max
ggatcttttttgggcggagagcatctagacaataatgtaccatagctcaatgggaaacagtggtaaaattagtgaatgcctccacgtgcagggcatgtcacttcaatactatgagggtgaaagca

SEQ ID NO: 214463 - DNA, 392 bp, Glycine max
agcttgtgaccctgcataagtaagggtgaaatatgtttttaacaggataaaaaatatatttagtaacttaaaaagaaattatttttgtatatgtaatgcttcttttatcctcaacccaaaaccatgttcataaaatcaaacaactaatcatgattcagggaaataaaaacggatcaagatgcatagacaagttataacatatttgcaccacaaggccacaaggctacactgccttgcagacacatcccttagaccataattttttcagagattaggagacttgcccttgttacagtacacagaattcaacaaaggttaaagaaaatcacataataataaattagtcccatgcttggtggcttatcaatccacgagcaaaacacattttttat

SEQ ID NO: 214464 - DNA, 395 bp, Glycine max
acatgtgccatttaactatgttgacacatatcagctatgagtggaaaggtacatacagacagtgcgtaagatgataacagcttatgcaacactaataagcctttacctgttgatttgttcttcaaaacattggagggtccacagttacaaactcctaatgtatgtgtttaccatctacaagtttaagagtactcatgtccatcttgtgtaacaaataatccacttcctagataactttcaatgcagattatgctaatccaactagttaagttcgagtcttatgtcgaaataagtcaatcattgattcctaatgatcctatatctcttttgacactcactatgacataaataagtgaaccattggtcggttgctaatgtattctatattgatttac

SEQ ID NO: 214465 - DNA, 357 bp, Glycine max
gagtatatagacaacattgtaaaaacaagtcattgggggttcaggccactatttgtagaagttattttcaactttatttttggcaaatcagttatcaaggccataatatgtttggattaatacgtgggagtatctcagtgatgacatcttgcacaggcaaagaacaattcttcagactcctcctaaatttatccaaatactcgagttaaattgttttgataataatgtttactattgtgaaaatctgattttgtagaacttaagttcttataaaatatctactgttctagaatctaaattttaagttgccaaatgtattaggcatgtaaatgtctttctgggcatgtccattttcaa

SEQ ID NO: 214466 - DNA, 410 bp, Glycine max
  unsure (1)..(410): unsure at all n locations
atacaatcatgcaacaacatcacaatagcataaaatcagtgaacgctagaacaaaatcactaaatagctntatagggaacgaaccacttacctagaagacaattacccaacaaccggaaccaccaccaacaaaagatgtaacggcagaagaacaccggaacaacaacaaccacgaccgaaacaagaacacgaacagacaaccgtaacacgagcatagacagaagaagaacacgaacggacaaccataacaacatcgtatgaaatgtaagaaacaaatgtactgtacggacaactaactntaggagtttatagtaatagagttaacggcgatttcaacttttcgccatcggtgctgggtgcccaacgcaaaatgctaaatgcaccaagtaacacctaaagctcaatgcatg

SEQ ID NO: 214467 - DNA, 298 bp, Glycine max
catgcaatactgaactacaattgggaaattggctgttgaaagagccccccgaattttacgctccagccaaaaaggctacttcatcggtgttaaaagcaatgtatgtgcacctgggctttagagaattattataagacgctacgggccatctgtttatgaatgtataaggcaccgatcttaatatatctgagcctggcctccgcgcatccaaattcatcagcaaaaatgcttctgtggcatttgagggagaaacaatgacgagttgccatgaggtacgagaacatgtgacccctatatc

SEQ ID NO: 214468 - DNA, 417 bp, Glycine max
ggacctaaaaactcagctttgcttcggtagcatgataggttacagggttttatctagtgaaaagggtggacctctgttcacagtctctgagtgcgagacatatcttctttcataactattttgtaaggccacacgacctttgagcagaatgactcttaacatagctgtaacctatataccatgccccagtcatgtgcgggatcgtcttttactgatcatatacattgctggtgccgataacaattttgtgaacgaacacaagccttatgggaggatggacctacctctaagtgaataccctcgaagactgggctgttacgcacatgcatcgccatattatcaataacgacgtgtaattatcaagacttatttacttttttacggaatcaacaaactccttattttacacaataactt

SEQ ID NO: 214469 - DNA, 387 bp, Glycine max
agcttttcttgtgggttgatgggttctatctcgtagaatggcatgatcactggctgacatgttctcaattagctcagttgcttcttctagggtcttcagatttatctttccccctgcagaagcatctagcaattgctaggtttgtggtctcaacccatctataaacatattcaattaaattggctcggaaaacccatgggtgggagttcttctcaataaacctctgaacctctccaatgcttcactcagagattcatcagggaactgatgaaatgaagagattgcagctttcccttccgcagtcttggactctgggaagtatttctataggaagttttcaacaacttcatcctaggtttttagactgtgacccttaaatgagtgaac

SEQ ID NO: 214470 - DNA, 483 bp, Glycine max
  unsure (1)..(483): unsure at all n locations
cttcattccttttcactcatgtgtccaagtctttgatgcatttgtgttgaatattgacagcctcagtaactgctaccatatcctcatctgtaatcatgtaaagagatcctcgcttctttccatgagccacaacgagattcccttttgttaccttccaagctccatctccaaaagtggtgtgatgcccctcatcatccaactgccctatagaaattaaatntctctttaaggcaggaatatgtctgacattgtgcaatgtctatagggatccactggaggtattgatgtcgatatcacatcttccgacaatgtcaagagatatttcatctgcaagggtaaactctcccaaatcttccagaaatatatgtagactataaatcttatagggaatagtgtggatgacgcaccgagttataattatgatcaacagacttcccagctacaataatgcctatcaattcatagtggtgcatttgagatcat

SEQ ID NO: 214471 - DNA, 370 bp, Glycine max
cgcggctgcagctaacatgccgagcatgaccattttttgcaccttagatatccctaacaaaccatatacagcattggtaatcaggttttataagctaaaaagccaaatagggggggttggaagagcttatctgagcttataaaaatagcttaagactcacataagctctttttatctatcttcaataagtttccttcctagtgtagtttattaaaattttagcttattccagtaagtttcatgatcaaatttatggtataagctctcgggggataaaagtttattaaataagagcttaagttgtttatccaaattcacataaaaaaaacttttaccagatcaagacccaaatccatacgatcttttttat

SEQ ID NO: 214472 - DNA, 469 bp, Glycine max
  unsure (1)..(469): unsure at all n locations
tatcgaacaccttctataacggtgaagagatagagaggtcacggcttgcgaaataaagatatcctaaaccatatcgcaccggcgaaaacgtacaactggcagatagcctccttctaatatgccattatgtctcaacctcacaacaaattgacagctcgctaaagctaaaacactgctgcgtccaattcaaatatcaaccttctaaatgctgnggtaatagtgtctatgctcggagcctttaatttacgaatgtgtatgtaaacgaaggatgaatcaattttcctggtaacacttttttagtaccagcatttaaattaatgcctaaaagactaatggtacccaattctgtaagagcgagagactagctccaaaccttcttatcgaaagttcttagcataaaacatcattattttataattcatcaactttattaaattgtaaataagtgaaaaaagtaccagcatatatt

SEQ ID NO: 214473 - DNA, 393 bp, Glycine max
agctttacaggggacccaagcgccatattattgttccgaaatcgatataatattcaaacagagaacagaaaaaaagcacacaacttaattaagattttttaaacattttttgttatacaaaattttaaatacacctttaagttttaaagaggaacaaaaaaactttaagtgtaattcagtaggatggaagattatattgcacacaggatcaaaattattgaaaatacatcaaaattctaccaaaaaaatcaaatattttagttaaaaaaatattttttagtatttagatatatatgttactaagtgcttacacaattttaaaagggttagaatgttacttataaaatattggttcatttaaaaaaaaaatcagatgaagatgttcaaaagtaa

SEQ ID NO: 214474 - DNA, 402 bp, Glycine max
  unsure (1)..(402): unsure at all n locations
cgacactatannnaaactcaagctncccgcatagaaaattataagagagtgaagcttgttttgatatagctgtggatcactcacatacatgttgggaatggaagtgatggtcaagcgagtgttaacgaaacagttggaactgcagaatcggtcatccaaaaatctgctgagttttcgaaggacatgagtgaagaagaattgatggaaatgtgtgacctcaaccatttgatatatgaattagggtccacgtttcaaatattggacaggccgtcaaccattgcctgtcgatgcagacttgctgtcaactgtggttccaagatattaaaccccattcagacttcttccttatcgtataaggcctctgttaaccaacaaggaaatgactaactttcgtgagcttgc

SEQ ID NO: 214475 - DNA, 315 bp, Glycine max
tggaatgactaaaacaagattctgtgctgaatgatagctatagctgctattgcacaggaattgctttctttcccgaaaggaagaggcttgataagcgagctctttttacattcaggcgacacatgtgatgctgcgctccgtaattttcgtagacttgcgccttctcggaattatcataattgacgcgacccactcaccaatgaacaaggttaagatcgccccaatattgggaacaacccttgtcggcatgaacggcaagcaccactgtttcaaaaagtgcacagagttacttgttttttataggtaatgtttaaa

SEQ ID NO: 214476 - DNA, 384 bp, Glycine max
aagcttccaaggaagttttgtcaagaaatcttctcaaggaagctacctaatctataaatagaagcatgtgtaacacttattgtaactctgatgaatgaaagtcttgtgagacatacttcaaagttccacttctctccctcttttattccttcaatttcgtgctcccccctctctctttctctccctctttcttttcctccattgaagcatcctctccaagcttcttatccaaagctcatcttggtggcgaagctccttcttccatggcttattccctagtggatggcgcctcctctcacctcttctcctttgtcttccgctgcatctccatggtggaaaatcaccattgaaggacctcatttaagctcaaagatccagcctcca

SEQ ID NO: 214477 - DNA, 388 bp, Glycine max
  unsure (1)..(388): unsure at all n locations
tctggtgggacatctngacttgctntccaatctgacattcaccacagattctgccttcttctattttcagattgagaatgcctctaacagcacctttgtcaatgatattcttcatgcctcttaagtgcagatgtccaaatctttgatgccatattttgacttcatcttctttggaggatggacatgtggaggagtaactggtttcttgaggtgtccataggtagcagttgtcctttgatctgctgcccttcattagaacttcattcttctcatttgtcaccaagcattctgactttgtgaaggttacattgaattcttcatcacacaactgactgatgctgatcaagtttgcaatcagtcccttcaccagcagtactttgttcagact

SEQ ID NO: 214478 - DNA, 322 bp, Glycine max
atacttaaagaaattgatttgcccagtctttacctttactaatatttgagtgaaatagcttgccttttgcaaagtctattattattaataattaatttcatctacttttaggaatcatctaactgaatgcattatggattcatgtaaactacctcacctaaggaaatatgattattgttgggatcaaccatctaatctttgagctttatgctttcccaaatttaaaagaacattttatgctttcttaataacatctctctttaatagaaattctttgataattattctctttgtgaattagtatcacgaaagtgaatcttat

SEQ ID NO: 214479 - DNA, 459 bp, Glycine max
  unsure (1)..(459): unsure at all n locations
ntgcttctacaatcatccnncttttgatgatgacgactctgaaatcaagaaacacacacacacacacatatttttcctagtcgatcactcacataaattctccccctttgtttgtgaatttatgcttctcataagattaagttgattactcatgtgagttcttgatttaatccctatttctctccccctttggcatcaacaaaaagccaaagtttgtatcaaatttgaagtattcaaatataactaaacatccatacaacattcatggaagaactatcaaccaaatcatgaagcaagaaccataaataaatcaaatatataaaaaccacattatcaaataacataattaatatttgttcaaacataccactgatcatatattatcaaaataattaattttaaaattcataaccataaacaacccagagccagtcacctcaccatcatgttcagtcatac

SEQ ID NO: 214480 - DNA, 366 bp, Glycine max
tgattcaaatacttatgataagtcacgtgactgataacactacgaaggtaaacactataattagacattatgtaatcacaaaaaagagacacaacataactcaatactacgagacgtcaaagatctctttctctaaactctctctaacttctctctctgggtctctccttttctctcaacctacttcacattgcacaagccaaatcacactctgtgccttacatcataacaatgacattgtttgtgcgaaacgttgattctctagtatgaaaggatcaatagtttgtggatctttgttatgatgagcatgggaaacagaaaagctttagtagcagtaacacactcttcacctgtgacaaaaaccac

SEQ ID NO: 214481 - DNA, 449 bp, Glycine max
tctcaacttggatctcatccaattctcttggctcctgcttgtagtgctttaacatacgcaagcacttattctttcacctcaaggcctcttttttcaagactacttatccaacttggaattcttgcgtacttctgccagagacctcttcttagccttatcagaggctacaacttcttttcttctgatgacggagagggcaggtttatagtgaatgtgatgagttaaatagatggtgactgacgtggaacggctaaagagggtgaaggctaaagtgtatgggttttaagaatcgcattatcatattttaagcttttagagagaaattggtaaaggtttggaggtagaaacgtgatgctaacgtaaggatgcttatcttatggttgggccttgtgctaggtagaatatatatccactatatctaagccttctttttggtggtataggtctaa

SEQ ID NO: 214482 - DNA, 388 bp, Glycine max
  unsure (1)..(388): unsure at all n locations
cctgagctgcagctnttatccaggcacattcttggtggtgaatctccttcttccaaggcttattccttagtggttggcgcctagtctcaccttttctcctttatcttccgctgcatctccatggtgaaaaaatcaccattgaaggacctcattgaagctcaaagatccagcctacataaaagccccacaagcaagcttccatcaggttgggtccactctattttataaatactagaatatgtttttgcttcttttgggccttgaatttcggccattctagtaatataaggttttacccttgtctttcaaggcatcttgagtattctttgtaaaagggatctcctttctattttcatgaactattggaatggggttgagcttaactatt

SEQ ID NO: 214483 - DNA, 427 bp, Glycine max
  unsure (1)..(427): unsure at all n locations
gtgaatatacatactcaacttatnccnacgcgccagatagttctgcaaccaattaattgctaatgcacctcgccgaaaatttttgattgaagccaggacaacaaaaactagtcttgtttccaagcaaggtacttcaatgggaacataaaagcgatgcttcaaccattgtcatttgtctttgttgggaaactggaaaggcaactgcagatcatggtgattgtttcagaaacggtgaagtaaagtctgaagaagataaggatgcacgttttgccatggaggaactgtgattacatgctctctaagtgactctctccgcctagcattagggagaatgacaagcaacccctatcctttcttgtgcaagttgatgtcatcgtgccaaaaatgatgtcctgtggtgatgccgcgtctatggagagagggacta

SEQ ID NO: 214484 - DNA, 383 bp, Glycine max
aaaattagaatgagtaagagaacttgttataagcctaggaaaaattccaggagttgctcaagagttgcccacatcacgatttaaccagtagaggatagtgcatatattctatggaggagtgtcctttcacaataggactagccttgatgctgcatgtcaaggcaatttgatgttgaagccaccagttgatgtttagaatcattgaagacatatgttccaatccccacaaaaattctcgggataaaagaatcatgaagagggaagtcaactaggtggaaaatgaagctgctacttttagccttgggtaatagattcaggcattgataaagcatattgagaaaaatattccccaaaagatgaaagacccagggagttttacactc

SEQ ID NO: 214485 - DNA, 465 bp, Glycine max
  unsure (1)..(465): unsure at all n locations
ntgagagttgcctctgntcagaggacaagaggggtctgtattattaaggactntgacactcaagtatacaagttaggaggataagagagagaatatgaatacactagtatgcaagcatgtgtacatgtgtgttcaagatgtgttgatggttcgatgaaacttgatatttataggagatgagtggagttgctagtccttgtttgtagggattgttataacctttgcagataatttccggcttatagataaaagctggtagcttatagataatgttagagataatacgttgcttaaagataaaagctagtagataattgtaccttatagataatgtgtagcttgtagataattgaatatctgtcaagagataaaaagattcaaatattaagatggtagatatatattgttagttatagagcccatcgactaaaggtcggacattcgtgcttctatgccggagctgac

SEQ ID NO: 214486 - DNA, 394 bp, Glycine max
agcttataagccaatgagttctacttagtcaaaacagttcctgcaagaagcgactaatgaacagagggttgcaattcgaaaccaagcttctgggcatcccgtggtgtttcctgacaatttccataaagaggagcgcgacagtgtgagtagtatgatgagttggaagcattcccaaatggatgcctttcaaaacacagtccacaaccactataatggcggtgtgcctgtaatacaccggcaggcccacgatgaagtcaatggagagatcttcccatggctagaagggaacaagtaaagagcaaagcaacctagctgcttttctggttacatatttcatatgtcgataatcaacacaagccgctatgaagcttcaacatcctttatgatcccaggc

SEQ ID NO: 214487 - DNA, 407 bp, Glycine max
  unsure (1)..(407): unsure at all n locations
actcagcttataagcgcgggtctgggagacataggtcaagcattcttgatatgcgaggatgatattccaagtactttggatttggtacgaccatgccctcctgatttccagctgggaaattggcgagtggaggaacgccccggcatttacgcaacgagcataatgtaaacctttacggttttaaaagctctatagttgggcctacgcttagagtttttcttttgtaaggcttagtgtcttttgtttttgaatatataatacaaggatctttcttcatctgttcctggtctctacccattctcattcatttgcatgtttacttctttttctgaaacggcagatccgatgacgagtcccccgaaggtactaatacctgngacccgcctatctacttcgagcgagaaatg

SEQ ID NO: 214488 - DNA, 284 bp, Glycine max
aatcgccatgcccacgataatcatgagagaaagaagtccaccctaacgtgtaatttcaaatgcccgcactttgagacgcgcgtcaacactccgacaatgcgctcctttggcgattgggggcagaaatgggcaccacaggttgaagctttgttgggcaacattggaggaagaagaataaggcgaaattcatcttgagggagagggagagagagctgtctgagatatctgggctgagtggggagagagaatacagctttttggatttaaataaagggtttgctctt

SEQ ID NO: 214489 - DNA, 336 bp, Glycine max
gaagcacaaatgtgggggtagatatagaataagcatgctacccccttttatctaatccctaatcactaaaaagaacttgttgctatataaccttacccatagaatcaatcaaggaaattagaatcacaaatcaagcagcaatacctttcacttttgttgaatggaaaccgcctctggtccacaggagacaggttttaaattattttaatatctaacccctcccctgtaagataatacattttacataaattcaaagttgcatagcaatacttcatataaacactgaatttaagaaaacctaagacaagccacaattcataaagcatcaaatctaat

SEQ ID NO: 214490 - DNA, 385 bp, Glycine max
agcttctcgacatattatgtgcctgaatcggacatccgtgtgaaaagttatgaccatatgaatttctcaggagcttccgttgttcaattttgagcgtcttgatatgtgatttgcctgaaaaggtcatccgtgtgaaaagttataccagttgaatttctcaagagcttccgttgttcaatttcgagcttctcgacatactatgtgcccgaataggatatccgtgtgaaaagttatgaccatttgaatttcgcgagagtttccgatgcttaatttcgagcgtatcgatatattataagcctgaatcggacatctcggtgaaaagttatgaccatttgaatttctaaagaactttcgttgttcaatattgagcttctcgacatattat

SEQ ID NO: 214491 - DNA, 414 bp, Glycine max
  unsure (1)..(414): unsure at all n locations
ggccgccacggagttntccgactatgctcttgtgtggtggaacaagctacaaaaggagagagcaagaaatgaagagccaatggttgatacatggacggagatgaaaaagatcatgaagaagcggtatgtgccggctagttactcaagggacttgaaattcaagctccaaaaactaacccaaggcaacaagggggttgaggagtatttcaaggaaatggatgtgctcatgattcaagcaaatattgaagaagatgaggaggtaactatggctcgatctcttaatggtttgactaatgatatccgtgatattgttgagctgcacgagttcgttgaaatggatgatttgcttcacaaagcaatgcaagtggagcaacatataaaaaggaatggagtggtaagaagagatttaccaac

SEQ ID NO: 214492 - DNA, 379 bp, Glycine max
gtgtgggactttcaatggtgaatgatgtgatgaaaaaagcaacgtgagggagagggagagagagcttctgataatgtggggctgagtgaggagagagaaaaactttttggttttaagtaaaaagggtttttctctttttctattatcttattcaagctctgccacatgtccctatttgagtggagcaagaagggcccactttctcttttgattgtgactcatactcagccacaaaaagtgagaaaaacctgacctttgaaatgctaaaatcctgcctcggtttgcgtgtcgtttctctggttccagttcctcgcgtttctctgtgtccgtcgggaccagttttctaaagcaagcaatatatatatcaaaacgctcagaa

SEQ ID NO: 214493 - DNA, 419 bp, Glycine max
  unsure (1)..(419): unsure at all n locations
cctggtgggacatcttgactcgcttgtcaatctgacattctccacatattctggcttcttctattttcagatagggaatgcctctaacagcacctttgtctatgattttcttcacgcctcttaagtgcagatgtccaaatctttgatgccatattctgacttcatcttctttggaggatagacatgtggaggagttactggtttcttgaagtgttcataggtaacagttagcctttgatctgctgcccttcattagaacttcactcttctcatttgtcaccaagcattctgaccttgngaagcttacattgaaatccttcatcacacaactgactgatgctgatcaagttgtcatcagtcccttcaccagcagtactttgtccagactaggaaattcatcatgtgctatctttccattc

SEQ ID NO: 214494 - DNA, 396 bp, Glycine max
agcttattaaatataaaaaattaatttattttttataaaaaatacttcaagataaatctttattccaacctaacaaaataacttacaaaaaatgtgtgatactacataaattttgaaaatcacctaacaaaataacttacaaaaaatatgtgatcttccaaaaccatctaacaaaataacttacaaaaaaaattgatatcccagaaattatcaaacccacgaaagcaaaaacgaaagcaactgcaacagccaaaacaactgaaaaaaaatggtgaatgagggctgtatttaaagaccctaaaacgccaacaccatttgcgcttcctccctgctcctgggctgccaaagctgttgtgcttgctgcaaacctaaaacgccattttgactggcgcccct

SEQ ID NO: 214495 - DNA, 357 bp, Glycine max
gtcggcggcatctccaaagttgtgtggcatggttgaatgttacggtgacgtggatacaccctcttcaacgcggcttatggtggctatactgagtgggcatggaggacagtaagggttcttgtatgttaaagcaaccatgggcggcaggtctaaccaattgttatgatcataggggacggaaatatctacactttttgtgttcgaggaccaatgcctcctttgaaagcaaagtatcgaaaattcttctctggcttaatcattctttcacattgctttatacacatttgtacatgtacaactgaatgataattgttacaactgaatggtgactatattaacagaataataactgcctta

SEQ ID NO: 214496 - DNA, 389 bp, Glycine max
agctttcataggtgaaatcagtgcagccatttcccttagagtcctctcacaaggtggagggtgtgccatgttctcaaaatgtgcaaaatcagaatgctcagaatcagaatgctcaaaattataatgctcaagatcaggatgttcaaaatcaccaataacagaatgcacagattcaccagttatggaatgctcagaatgatcaaaaggtataaaatgatgcctaactaatctatgaaatgtcctatctatctcaggatcaaagggttgtaagtcagatggattgcctctagtcatacactacattcagcatgcacacaactagttgccttgtcatgtaaataaaggtgtaggtttgaactatagctaccctcaaataatattcaaatgac

SEQ ID NO: 214497 - DNA, 467 bp, Glycine max
  unsure (1)..(467): unsure at all n locations
ggacctataaaactcaagcttaacctcatcgtctctcacagtctntagatntgtgagccaatccaatccttgtgttcggactctcagccacttatgatagccgccgatgatcccattactgcttgccctaagctctctgtcctttcttcacgccgcatcccatgccttgagaactccttggagtaccctcgcgttgtggtcaccgaaaccccgtgcgatagaatcctgattcttgcttccttctagcgagggaacaaattaacagacgcccctccatgctagccaagagttggtcccaatctcctttcctttttaacgcacgaacggtgaccttgtagcggatagacgggcctaccttcttggagaaaagggtgtgaaaccagccacacatagagagccagtgcacaacaaacaaatcttggaccgctctattcacatccccggtcaacgtgtatacatgggcaaat

SEQ ID NO: 214498 - DNA, 381 bp, Glycine max
agcttattccgaggacagttcgttatcatgcacagcctgcaagagttgactcacaataggccaatcatatctatggagcattttcttgagcaagtagcctggcctgaagctcaacttccattggtgagacccagcgaggttgctccgcctgagcccacacttgtgcaggtcaattcagagccagctgacccacaatctccattagtgaatccaccttcttcacctatgcttgaagcagttctgccatctcctcctctaattgtaatttctgacgcatcatcagatgaagcagttgcccctcctgattcaccagttgcagaaatagctgacccccctgtttccctaattggaggaattgcttatctttctgattcatcatct

SEQ ID NO: 214499 - DNA, 424 bp, Glycine max
  unsure (1)..(424): unsure at all n locations
tgcacgagtgccacatgaagccattaggctcagtttattttcattctctttggcaagagaagccaagaagtggcttcattcattcaaaggtaacactttgaatacgtgggaggaagttgttgagaaatctctgaagaaatactttcctgagtcaaagactacagaagggaaagtcgttatttcgtcatttcactagttccctgatgagtccttgagtgaagcattggaaaggtttcggggtttgttaagaaagactcccacacatggattctctgagccaattcaattaaatatgtttatagattggttgagaccgcaaaccaagcagttgttagatgcttcaacaagagggaagatanagtcgaaaacccctgagaggcaactgaattgattggaatatgtctgcaagtgatcacgccattct

SEQ ID NO: 214500 - DNA, 346 bp, Glycine max
actgcagctgcagctttaaaatgccgtgagggagacacattttttttgaagcgtcagctcacgattaacacactataagtgggacatggaactgatgccaaataatttccgcatgaataaatgatattcggttagccgccccttttgtcgccacggtgcgtatacgaaagaggtctcctttacttaaccttgcaagaggattcctaacaccgacaagagcaacaatctgtctagaattcgcaagtcttaaacacctgtaacaataacacgtctttatcaactccatgggctgttaccacaaaacaaagggttgtacacctactactgccaaaaaacaggatggatc

SEQ ID NO: 214501 - DNA, 404 bp, Glycine max
  unsure (1)..(404): unsure at all n locations
tcaatggagaatgaagaagaagaaagctacgtgagagatgtagtataaaggcttcttgatttctgctttggctgagtgaggagagaaaaaagctttctgtgtttaaaataaaaagggttgtcccttatttttcattattttattcaagctctgccacatgtccctattcgattggagcaaaagggcacactntttctctntgactgtgacccatactcagtcacaaaagtgagaaaaatctgacctttgaaacgctaaaatcctgcctcgtgttgcgtgtgcgttctctgattccagtttctcgcgtatctctgcgtccgccgcggccacgtttctacagcaagcaatatatatatcaaaacgctcagaataaaaccccgatcgtggtcacaagttggtttctt

SEQ ID NO: 214502 - DNA, 316 bp, Glycine max
aacaaccttgtggaggaatctttaggagggcccaagtgggcctgggagttcttcgcaccctcatctatactaaatacacccccttcgattatttggggagattcttcttccgtaatggtaccaaaccttacgaatttcagaacgatactaattttgtgtttcgccagggtaccaacccttacgaaatatggacttactcttttttagctttcgaagaaattacggaaacttacggattgcgcaaaaacacctcttttcgatttccgccacattacaaaatttcacggagcgcgcaagcctgatttcttttgaatct

SEQ ID NO: 214503 - DNA, 206 bp, Glycine max
ttgcagtgattgaacgagccgctagcaaaacctatcaaaaatgactgattaagctataggcatgaagctcaagtccacatcatagggcttatggtgagtgtgactactcccaaaacgctttccatgaatgatatattacggggggaaatatacttgttcacgatgaacataagtggctgctgcaagcgcataatactgaatacata

SEQ ID NO: 214504 - DNA, 388 bp, Glycine max
  unsure (1)..(388): unsure at all n locations
ncagcttgagatgaggaagtgttgaagggagaatcttcctgcttttatgtgagaccacagagtggtacctggagatatgttgcgggggtcacgagaccttggggacgtcaggtggggtgctattgcccaaaaccaaactataccaatcccgacccaacccgaccatagtcggtcatggagaacctgtgatgtacctaagcaggcgagctcctgacagtcaacagataaaaggaacaaagaccacaaagcaaggaggcttgtggtggctggccacctgtgaactttgattgatatgagggttatggcctctggtaatcgattaccaagggtgggtaatcgattacaaggcttaaaaatgaagattggaggctaagatgggctcttgtaa

SEQ ID NO: 214505 - DNA, 351 bp, Glycine max
  unsure (1)..(351): unsure at all n locations
ctcatgatgatgaatcaagttgactcagtagtnttgatgatgactataagcccaagagaatgatttcaagattgagtcatcaagctctagatcaagattaatttcaagtttcatgagacgaaatcaagaagattcaagattcaagagaagtgtgatctctagaatcaagagaagatgaattcaagattcaagagaagaaattcgagaagacttcaccaaggaagtattttaaagattgttcaaaaaacacacatagcatagttttgttttccaaaagagttgttctcaaaattttctgttaccagagtttttactctatggttatcaattaccaattacctgtatgtgata

SEQ ID NO: 214506 - DNA, 383 bp, Glycine max
atgagatactgtcctaggaatgctgttattgcagccacaagagtaaggaagagagctgctaaacaggttgaaacatgcataaaaattacttgaataagtttatgttgcctttgaaaaccattcagaaataatagaagggtacaatgtgaattaagtttaattctaccataaggaacaggaaaacgattcaacaggtaatattgtatgacagataaagatgatgaatacatcattccaaaagtggctgtggcacttgctacctgcacattcgtgaaagatatgaatataactatatttccttctgtttatttattatataatgataaaaattagaactcacctgtggagcaattcccacttctagaaataaaggacccataaca

SEQ ID NO: 214507 - DNA, 445 bp, Glycine max
  unsure (1)..(445): unsure at all n locations
aagatagaattgagaaataaacctgtttcacaaacagaanaaacatagtctggaacatataatcagtaactggaaatttggaatgtatatgattcgggtcagttgatataggatccatgtccatatgtggaactggaaatcaataactttcatgtnagcaattgggtgttatttctatttattactacatatatgttttcccttcaggtatctttgtagctttggccttgcggtttgatgtttctagaggaaaacagccccagtatttcaagagtgcatctttaggatacactgttggcttggtccttacaatcattgtgatgaactgtgtccaagctgctcaggtgaatggatctgtanttaaatcttattaaattattctctcttgatatatgttactggaagagattttaactgtatatcacattactactaatattatctg

SEQ ID NO: 214508 - DNA, 396 bp, Glycine max
agcttagccgaattcagattgaattgaagttagcttatctcaaccttggccagcttagcggacaaaatcaaccttagatgcaagggttgggcgctaagctcttaagacttacgacttagtgcatgaacaaagatgcgcttagtgcgaggattccgcttaacaaaaagactatttttcagaaaaatgttttctatattatttttcagtcctttatccaagaaattgaaacccttatgttaaacattcaaagataggttgatatactcctatgtacagatcagacaacaagttccaaatgattaaatgcatgaaaaacaaagataacaaaaattaaaaactgtgttgcctccaaggaagtgattctttaacatcattagcttgacgcttttacctcac

SEQ ID NO: 214509 - DNA, 450 bp, Glycine max
  unsure (1)..(450): unsure at all n locations
atactcagcttaggaatgaagactagaatctatgagtcataaaagctctttctaaatcattgtcttgaattgtttaanagtgagaacacaaggtggctatttatagagaaaatagttataaccgcctataatcgattaaattgtcaatgcaatcgattatctcgacgaagtaatcgattagattttcatttcaatcaattaaggcgtttttcgcanaacctggaaagtttttaagaacaatgtaatcaattagattcttgatttaatcgattaaagtgttctcgatctcttttgggaacactttcaagaataacataattgattactatatcctcataatcgattaaagcatagaccttaaatgtgttcaatcatcaataccaattcatcttgataccatatttttgaccataaacaatttgtatatcaccatctgttacttaagcatga

SEQ ID NO: 214510 - DNA, 245 bp, Glycine max
gccgctgctgcagctgatgggagatgaggagattgttgtgcttaggccgagttttgcttcggatgacacgcacttaaggtgagccttggtaatgaacccaaattctaattccaaggaagaaatgagattcacagtctgacccttattgagacctttcgagatatgtttaaagccactgtacagttttgtttcaagaggaattttaactctgtaaggtgccaatgattgtctctggtatcggaacc

SEQ ID NO: 214511 - DNA, 390 bp, Glycine max
  unsure (1)..(390): unsure at all n locations
agctttgataccaattgagaagaacatcttctaaatcacattacaagttagttttgtaattggccttattataaacactagaccagaatcccatgctttcaatgtaggacccaagtctcatacctagcaattggatcctacaagagttgcttgattcattattgccgctattgtcactgtagaagcactttctcaccagtcatgccattacagtgtttctaaaggtagccatataatgcttcattttgctattgatacttgtttttattatattgactcatgatgtttacatttaaatgggtgttttgtccctaatttagcattattgttatgataataactatacttcccttggttgtgtctntatttccttccgtttttgcaaaagga

SEQ ID NO: 214512 - DNA, 407 bp, Glycine max
ttaaatatgtgtcttaatgcaaacaagcggcatatttgtacattggtggaattgcagagttaaccatagactagtaagggaattattgcacagccaacacccacatgggcaatacggatgcccatcatggtgaaattttagaatccaactacaaggtatgaaacttcagctgatatttggaaatatggaaatttggcatgatgtgtacaagtcctaggtgctctttactcaaactaaaacaaatagcttttgcagtgtggttctcccaattatcaatcatggatagcggcatgtagtatccgactttgaaacactatcgcgggaagcaagattgctagtattttaaatgtgtaaagaactaagaaagaagtttcaagagtacttgattacaaaaaagcaatcatgct

SEQ ID NO: 214513 - DNA, 346 bp, Glycine max
ctgttagaagaaaaattttggtaacatattacaagaatccgagattaaaaaaaacagaggaagatcattttgaggtacttgtggccaacgccggcaaaaaaatccatgcccatgtttgccaaaaagtattcctaactgaagagaccgaaaaaacctagccaacattgttcaaaaattgcctacaaatccttatattataaactaggattaatcttgaaccaataggtatcgattaaaggatccattgaattttaaaaattaatggatgtgtcattaaccatccatgaaatgaaatggatgaatttgaatccatccataagatttatctacatataagggatggata

SEQ ID NO: 214514 - DNA, 368 bp, Glycine max
catgatacatgtcatgggttggtttggttcaaggataaaagggatgccccacattatttccatgacacaaatgcaaaaatgatgatttggaaactttacgcaaaactggtcatgcatgcacctatgcggacactcaagtgtcaaatttttatggtcatgtgatgctagggctcaggattcgtttcctctattttaatcaacccaatgtttccaaaatatgttcttttatcaatttgtgcattcatccgagtccatttcgggcgtccggggaaatttcacagcattcacccttcaggtgtagacacattttccaaaaattggttatgatcaatgaactttttcaaagaaaagttggaaatcgtctcttt

SEQ ID NO: 214515 - DNA, 360 bp, Glycine max
  unsure (1)..(360): unsure at all n locations
gatgatgccgctgagtatgtagctacctcatgcactcctctaatgactatagcatcattactggcgctaaactgctgggaggtggaagccatcttctcaattaaatttctggctccagtangagtcatgtctacaagggctccaccactggcagcatctatcatacttctctccatattactaagtccttcataaaaacacttggagaaaccgctgctctgaaatctgatggtgacggcaactggcacataactctgtaaatctctcccagtattcatacaggctctctccactgagatgtctaatacctgagatatccttcctgatggctatggtcctggaagcacggaaatgttttct

SEQ ID NO: 214516 - DNA, 351 bp, Glycine max
tccagaaacaacagccttttggaggaatcttctggaaggcccaagtgggcctggttgctatttgcacccccatttttactaaatacaccccttgccttttattggggattcttttttcgtaaagttacggaaacttacaaatattcgaacgatacttggtttctttccgtaatgttacaaaaccttgcggattacataatcatcccctttttgacttacggaatgttacggaacctcactaattgtgcaacgatgctttcatttgatttccggtgtgtcacggaaccttacggatttgtgcatcaatattttcttttgttttccggcatgtcccggaatttcacaaattgc

SEQ ID NO: 214517 - DNA, 438 bp, Glycine max
tcagctgcttggggctttatggaggctggatctctgatcttcaatgaggtcctttaatggtgatgttccaccatggagatgcagcggaagacacaggagaagaggtgagaggaggcgccctccactaaggaataagccatggaagaaagagcttctccaccaagatgagccttggataagaagcttggagaggatggcttcattggaggaaaagaaagagggagagaaagagagaggggggaacactaaattgaatgaagataaagggagagaaggtgaactttgagttgtatctcacaagactctcattcatcaaagttacaacaagtgttacagatgcttctatttatagactaggtagcttccttgagaagctttcttaatagaacttccttgagaagcttctttggagaaatttccttgagaagctatagctta

SEQ ID NO: 214518 - DNA, 390 bp, Glycine max
  unsure (1)..(390): unsure at all n locations
agcttgaagaaaaagctcttaaagttccaataacacatgaaggctttggcggatccccacaaaagagatgtaaatnttgagccaggcgagtgggtcatggttaagctccgtccccaatccccattgtcaaatttcggcaactgaatcttcttatttgaaattggccaagcatttttatggcccatttaagattctatcttgcattggcaagatggcttacaagttacaaattgcggagggctcacgcatccatccagttttccattgctccatactcaaaccttttcaccaaccttcttcgagcacagacagtccaatagctctaccttcacaggacaatgataataaccccatcatttcaccacttgcattccttatcactcgctggga

SEQ ID NO: 214519 - DNA, 418 bp, Glycine max
  unsure (1)..(418): unsure at all n locations
gcttgttctcgaatttttcgaagttctgtaacatccttataacaatatacttgtccttcatttaattgtctatgggcttggcaaccacgatcaacaaagtactttcgacacctactatatgttgatttcaccaaggctgttatcggtatgttgcgacaatccttcaataccttatttacacattnggacaggttgagtgtcatgtgaccatatctacgtccttcttcatcataagtcatagtccatatttcctttgaaatgcgatcaatccatgttgctatggctagactcaattgacgaaagttttctaaattctgatcaaatatatgcgtgcaaggagtgtagcctgcataataatagttagcgataacaatctttagtatatatgaaacttatattaactctctattataaatta

SEQ ID NO: 214520 - DNA, 379 bp, Glycine max
  unsure (1)..(379): unsure at all n locations
agctntanagagttttaaagctcttaaatataagatgcatgataggaccggctaaaaacaagttaggaaccttcactttaaaatatagntacttttgttttctttcttttttgaaaagccaaaaaatgttttttttttaattaaaaggagtaaaataagatttttttttagttattacaaatcttgcaaaatcaacttaaaaataacagctttagaatgtttatataggcaaacgtacgttagattgagggattaaaatctactatctccaattttctacctgttatcattttttttttgattgactagtttcttttttatatttctcatgtgctggcctctttttctagtttctactttctactttctagtgattttt

SEQ ID NO: 214521 - DNA, 389 bp, Glycine max
gtcttcttccttcatctatttcacaagacagaaaaataagaaattaagtgggtcaacttaaagacaagacatccaaaagaaaattcatacttctctccagtgaaaatattgctgcgatggaggtccatgaatgagtcaaaaagcttcaaggccttcagagctagaacaccttgatcagaccttgatggatcatatattatgcaaacacagcgtctaatattcttcttgaaaacattgccaagtttgcaacatatggtcatttaccagattagatacttttgtaaatattcttttcagcccaaaaaacagaatagtgcacaaagtactgcatccaataaacttattttttgtttgaatatcaaaatcatcatcgccatttttagtagcag

SEQ ID NO: 214522 - DNA, 408 bp, Glycine max
ttaagtcaccgcggctgcagctttatcctggcttcctatggtggtgatgttgttatgactcatcttctccttgaagggcatctccaatcacctttcctccttttccattccactaccattgatcttcagaagcgaatgagttcattgatgaaggagatccaaggcctacaagctctacatggagctacaatacctacaagacaaaatcaatttgagagaggtggtccccaatttaagttgggtctaatggggttaatcttcagagataaatcttttggaatccacatgtattttactcttagaatgtcaaactctctaacatagtaatcttaaaatgtttttcctataccaaggagatggttcataatgtgagtgaattttgcttgaagttctgaaatgcgttcccca

SEQ ID NO: 214523 - DNA, 170 bp, Glycine max
aaagtatgaagactgactcttccacgttttctcatattaagcttattggattatggggcaccaatgatatgtggtactaggtggcgattgggcgatggtacaaattaattattttaatgttacaagtcagggataagtacaccattttcagttgcgaacatttaaattga

SEQ ID NO: 214524 - DNA, 392 bp, Glycine max
  unsure (1)..(392): unsure at all n locations
agcttctagccaaagggacttaccttanattaattccttcgatagcccttttgaaccttgtttccctttccttgttttgaagctcactacaagccttaagtgaaaaaccatgatatcaccatatccttaaggaattttggagctttggaatggttttgggaataagtgtggggggtttttgtttcattggacaacttgttttcttggctatgcttcatgatgtattttgggccatacttgatgtacattgtatattggttaaatgttcgacatgctgaatgaaatgttgcttctcaaaggctatagagtcaaaaaaaaaaaatttgaaaaaaaaataaagaaagcaatagagtgagtgaataagatctataatggcccaagaatgatgaaac

SEQ ID NO: 214525 - DNA, 357 bp, Glycine max
gatctcactgggttcacctagggatttgaataaggtggtgtgttattttaatccagaatattagctgcataggtctgctacgttgtttacgtagttgagtgtgataagaccgtgattgaagctgaacttgagttgcataaatagcctctgtgtaatttacttcataatgcaattcatctcattttagtatatgctttttcctggctttctctctttctccccaacatagattaggtacttattacaatcattagatcttaaaaaaatatatgataaaaatgatgagtaactttaaaatcctccatctattactctgtgttggctaaaaggaagagagaatgaagttagaagttacaa

SEQ ID NO: 214526 - DNA, 390 bp, Glycine max
agctttgcttctacaggaaatgcaactataatataacctagggaataatgggatgaagaagaaaggaaaatggtacaatataaattaaaggtaaaaaacataattacatctacattaggcatggatgaatattttagagtatcaaactacaagaatgccaaagaaatgtgggataccttacaagtaacccatgaaggaacaactgatataaaaagatctagaataaataccctaacccgtgaatatgaattgtttagaatgaataaaaatgaaactatacaatatatgaaaaagagattcacacatatagtaatgaagatgttattaggaaagttatgcgatgtttaagcagggaatgtgatggaagcttgcttgtggggcttctatgga

SEQ ID NO: 214527 - DNA, 403 bp, Glycine max
atatgggatgtcactctgcatatgttcgggaatggaagcttgaatggagaagacacctttttgacaatgaggtgcaagcggcagccagtttcttggatgatatctcccatggtcatattgatcgttggacatcagactgctgggtttggaaaccataacctaatggccagttttctacaaggagcgcatactatatgctactataaggaacagcagatcagactgtgggtgaggctttagaggacctatgacagctcataatccctttaaaaccaacaacatttgcttggcgattgatcaaagatagaatcccaactaaagggaatttgtggagaagacaactggagaaaggctttgcccagccctacaactatcggtcttggaatttatcaacaacattttt

SEQ ID NO: 214528 - DNA, 394 bp, Glycine max
agcttattggattatggggcacccatcatatgtggtactaggtggcgaacgggcgatggcaccaatcaactatcccatttccacaagccaggcataagcacaccatccccagttgtgcacctttaaatttagctcatgtgcacatacgtagccttctcctcgttcctctcagcccgggtccccatcaaccccaccaagctttcacaatatccaaacaattcaattccatttgtcatgaaactaccttaaacaaagaaaaacagagtggaggcagaaatctttgcacaagattcattcaaattccatagagtttttcctaccctcatacctcagcaaaatcctcttcgttccgattcgttaaccattggatcgccttgaaaatttaactgggggt

SEQ ID NO: 214529 - DNA, 432 bp, Glycine max
  unsure (1)..(432): unsure at all n locations
actaagcttgagactaacttggccctatccagattaagatcagaagtatgggatgtcggngccaagttagaataagatagaacactccaggtttgggccagagtggtaagatctttcctcatgagcttccacggtagaccctcaatattaagtacaaatcccctcccaaggatacacagccgggctgcaagctcttgaggatcaggcctcagtctatcatacctggagtaagagggcaagctctccccttgctccacgaccgctgggtctccaaaaaggtgttgagggaatcaacatcaaatattatcaagtgccctcgaaccctaacttgctttggttctttgtcctcagggacatataagtttgcatagaattctttgacaattgccacatcaatgcttccctcagtcaagttggtcaactgtttatgcc

SEQ ID NO: 214530 - DNA, 159 bp, Glycine max
gcttaagtgtaggaaaggccactaatgttttttcttttattacatctcaaacaatacgcatcttatagaatatttaatgtttaaagaaaatttattgagtttgggaaaccaattgcttgcctgtgctacaccatgctaggaaaaaaaaaagaaaatgct

SEQ ID NO: 214531 - DNA, 467 bp, Glycine max
  unsure (1)..(467): unsure at all n locations
tctagtggcaactgaccacanaacatgtgcttgcacatgctgaggcatctcctatatccactgatacaatttctcttcactcttgagtattaaaatttagtaagtatcctgccatgtattacatgcctaacagaattagtacggtttattcggtgcagcaaatgctatatcttgcgtggggaaaatgctcatttttctggtcgactagtattaatccctagtaatagcagcattggcttccaattccaatgactttaatgcatcaataacatgggattcaatattatttttgtgggaacatatataattaaaaatttcatttatgtcacgaatgtcatgtagtaaaatacaactgaggtacttggaggggaaaacactgatttacaaaaaataatctacacaactgaagccatacattaaaccatctacacactcttaacaattactgaattactgagcacgctaac

SEQ ID NO: 214532 - DNA, 394 bp, Glycine max
atcttgtctcagcgtttatgcgagacggagaccttcatgctacctatcatcgccgagggcgaataagagttaggtttagccacggcccacgagcatagaatcgcggacgagtatgctcaagtatactcggaaaaagaggctagaggaagggtgatcgacgctttacaccaagaggcacccatgtggatggatcggtttgctcttaccttaaacgggagtcaagaacttccccgcttgttagccaaggccaaggcgatggtagacacctactccgcccccgaagagattcatgggcttctcggctattgtcagcatatgatagacttaatggcccacataattagaaatcgttaggaaacttgtatggtctctcagaccttgactagatacgact

SEQ ID NO: 214533 - DNA, 414 bp, Glycine max
tagctggtgcctctcacgtttggaatatgaatgtggcatatatattcaaatacccttatgagctctgctgatggcttcttcccgttccaagctttaattggagtcttgtcttttacagacttagctggacatctgttgagtatgtaaacaacagtgtatactgcttcagcccagaatgtgttaggtagttcctattccttgagcatcaatctatccatttccataactgtgcgagtctttctctcggacactccattttgttgaggagaatatgcgactgtaagttgttgctcaatgccttcattctcacaatatctttcaaactcgcgaaaggtgtactctttgcagcgatcacttcttagtactttatccatttgcactttgattttagcagggtcttgaacttttgaatac

SEQ ID NO: 214534 - DNA, 387 bp, Glycine max
agcttgaaggcatgtatcccaccatcttctcatattataacactggtaacgtgtctactatcattggcatcatctccctctccatcattgggggcgctacttgagctgctaaatccctccacctttgggcgtattctttgaaagatatgtgctccctcttacacatgttctgtgattgtattctatctaaagccatatcagagttgtactgatactgcctaatgaatgcaaccattaggtccttccaagaatggactcaggaaggttccagattagaataccaggtgacggctgccccaataagactttcctggaaaaaatgcatcaatacattttcatcttccgcatatgctcccatttacctacagcacatctttaggtgattct

SEQ ID NO: 214535 - DNA, 441 bp, Glycine max
  unsure (1)..(441): unsure at all n locations
tgaacatgttcatgttgaaaacgtcatatcacaagataatgatatgaaacaaaacaaagtgctatgtcgctgtcagnttattggacgaaagaaactcgagtaaatggattaaatcttagctcttctaagttagtgagtttcattgtattcaaacttattgtgtaaacactctttgagtgattaaaatacatntttgtatcaaacatatattgtttataagagtcatgagtggcttaatgacaaagaatacttgggtcttaatctcatggggggattaagagtagtgtcaagagtggcttatagatactcattatagtcagaagtgacatatagaatacgtggttataatcaaagaattgattagtggaactattaatgtattaattattgtaggatttatgttgaccaagtgtaactgaatcccaattgtcgtactgagct

SEQ ID NO: 214536 - DNA, 389 bp, Glycine max
tacttccatcaatctatctctctaaccatcaatgccgatatatgtagggatatcctactcaaggcgtcagccactacattggctttgccggggtggtaactaagctcaaaatcataatctttaaaaaactctaaccatctcttttgacgcatgttcagctctttctgactaaacaagtacttaaggctcttatgatcactaaacacctcaaacttggagccaaacaggtaatgcctccacatcttaagggcaaaaactacagcagctaactccaagtctggagtgggataattcctctcatgagtctttagttgcctagaagcataagctattactcggccatattgcatcaacactcctcctatacccatctttgatgcaacacaata

SEQ ID NO: 214537 - DNA, 361 bp, Glycine max
  unsure (1)..(361): unsure at all n locations
ntgaatgctctattcaatggagttgacaagaatatctttatactgatcaacacatgtacagtggccaaggatgcttgggagatcctaaatatcactcatgaaggaacctctcaagtgaagatgttcagattgcaactattggccacaaaatttgaaaatctgaagatgaaggaggaagaatgcattcatgacttccacttgaacattcttggaaatgccaatgcttgcactgccttgggagagaagatgacagatgaaaagctggtgagaaagatcctcagatcctttcctaagagatttgacatgaaagtcactgctatatatgatgccctagacatttgctacatgagagtggatgaac

SEQ ID NO: 214538 - DNA, 252 bp, Glycine max
cccaacacaacctcaaatgaatgcaatatcctatcttcgctatctctattgacacgccctggagggggttattgccattcacaaggtcaatgggggctctatctcaagggggcatactgaaatgtgatcgggatcaaaaaggacaccattgttttttaaagagcatacagtgggtccctcaacaacaaattcatttactcgaacatcctctcatgggcaagctgttgcactttacactattcttatgggtgc

SEQ ID NO: 214539 - DNA, 365 bp, Glycine max
ctatggactgaaaatggactcctaaaattggcagaagtccattgatacgcgcaacccttgagctaagcaaaattctctataggcgctaacctagctgtgcttgcactaagcgccttaacccctgatcattgcttgagcaggttggtgactggtttcggcacctgcaccgtataacacatgtcccttaaaacggtaagaacgcgtgtattgaacacttggggaacttgtgttatttggaaagctattgaatcaaaacggggcctggtgtgtaaaggtaagtgagaataagagcaggtgtataaactatctgtgtaaaaagaaagaacttacccctagaattgatgttataaacacgtggagaacac

SEQ ID NO: 214540 - DNA, 421 bp, Glycine max
gccttggatcttctgcatcaatagagcccttcgcttactgaagttcaatggcagtggaatggtgaatgaagtaagatgattggagatgccacttcaaggagaagatgagtcaagaagaagctcaccaccataggaagccatggataagagctcgaagggtggataagataactccagggagagggagagaacgggcatgaaattttgtgtctcaaatgaggtctgaactttgaagtgtaattctcaaatgatcaaagttgataagatgcacacacatggcctctatttatagcctaagtgtcacacacaattggagggaaatttgaatttctattctaatttcacttgaatttgaaaatgaattctggagccaaattctggagccaaaattcactaatatgattagtgaatttagcttgat

SEQ ID NO: 214541 - DNA, 384 bp, Glycine max
ttgagctatgggctggaaatttaactttcaaaattttcaaaagtccattcttttagcgccacccttgggcttagcgaaattctttatatgcgctaaacgaactgggcttggcctaaaccccttaacccctgaacattggctggaaggggtgttccttggttcccgcaagggcccccgaatagccaagtaggattaaaccggtagaaacgagtatcgaacacttcgggaacctggggtatttggtaagccattttaacacaataggggttgggggggaaagggtagtgggaattataacaagtgttttaactatcttggtaaaaaaaaaaaaaaataccccagaaaaatgaggtggtaaaacagtggaaaacaccttgggctttc

SEQ ID NO: 214542 - DNA, 376 bp, Glycine max
  unsure (1)..(376): unsure at all n locations
tgcatntggaattgcgaaagcnccactccatcattaggattagtctctgacatctcaaacaaacaaatcaaacgtaacaagacaatgatagttgctgtttgaatacctcacccactcaagtgtatcacacaattatggcttatctctaatgaaacactcttgcctattaccacgctaattccccttgagttcttaggcaattcaagagattattggctctacaaagaacaattcaccaatatgtgtaatgtaaggctagacaatgaaaaggttaaccaagaaaaaggctaacaatgtttatatgcacaaatgaaggaaataaaattcacaatttatgaatacacgtgacatttcttcatgcaaccagatgtatgta

SEQ ID NO: 214543 - DNA, 390 bp, Glycine max
  unsure (1)..(390): unsure at all n locations
agctntgatgtgagccagaactacttcactgtcttcttccccactggtcttggaagagctacaggcttgagattaatcaatgcatcgagcaatgaattttcaggttttcttcccgaggatattggaaatgcaacattgctcgagagccttgattttcaagggagctactttatgagtccaatccccatgagtttcaagaatttgcagaagctcaagtttctaggcctttcaggcaataacttcacagggaggattccagggtatcttggggaacttatttctctggagacattgattataggatacaatttgtttgaaggtgggattcctgcagagtttggcaacctcaccagtcttcaataccttgacttggctgtaggcagtctcggt

SEQ ID NO: 214544 - DNA, 392 bp, Glycine max
agcttgacatgctgcatgacaagaagttattctctcatcttcacatgaagataaagctattacatcttgcttctttgaacaccatgaaattggtgcaccacaaaatctgaacacatatcccataatgctctccctattcaccttatctccacaccaatcaaaatctgagtatccaaacagctcaactctgcattggttctttttttaggaaataaaactccataatctgaagttcccttcaagtatctcaaaattctcttggttgcaaatagatgtgattgcttaggatccttcataaatctactgaaaagacctacaccacaagaaatatttggtatgctattgcacgcatacctcaaggagccaactaattgttggaacaaagtgttgtc

SEQ ID NO: 214545 - DNA, 373 bp, Glycine max
ttgtaagtcccaagtcttgcctcagtaggcgtgtgggtgaataaactcctctattaacacttcttagacagagaataaataggttacatgcatcaaactatctcgtcagctcaaattaacgtttgaatcttatctctccgagaagtttgaaacaaaaacttagatataacgcaagtatataagttgatcttggcttatggaggctcacaacattgtttctccgtaataccttgtcgttataagtgctatagagaaatttatccaaacaatgttactagctttcttcttgatgcatgcaacatatagtgttatcacatgaatgacagagccaaggacctttttgaacacttcatctcgaacaccgtcaagaatt

SEQ ID NO: 214546 - DNA, 393 bp, Glycine max
gcttctatcacaagcgatattatcaatatcatttaactgctgtctcagctgctgaactttcttgaatttgacatccccaaactctctactccactgctttaagctggattttaagttcctcaacttttttttaagcacaaatccccccaactagcctgctgatctctggtccatgattccttcaccaatgtttgatattctttatttttgagccaccaatccagcaccctaaagggcttaggaccccaatccaccatatctgttttcaataatattgggcagtggtctgaaaagtcccttggaattacatgttgagaggagtccggccaatgggacagccactgttctgagaccagacatctatccaatctgctcttcacagatccattgggg

SEQ ID NO: 214547 - DNA, 435 bp, Glycine max
  unsure (1)..(435): unsure at all n locations
taaactntgngcttcgccaatgaggcttggatgagcgcgtatatctatggaattgcctgcggtacccaacaatttcccaaaatgccacaaataccctctatggtatttttggttatacttagtgtaactcgcttccgttaagggtggtttggaaacgtattatggtctctcggtggtagtaccgtgcgttgtgtgaggaagtatactcgtggatttttgtgtcggttttcattgtcggagaagaaaaggtacgtgaaatacatactgattgctgatccgtataagtcatacagattgtcaatccgtatggacatatggattgttgatccgcatgatcagtatagtcatcatactgattgtcgatccggatagccatttggattggcaatccgtatgagtctacgaaattattcattatttatatattataatgtg

SEQ ID NO: 214548 - DNA, 409 bp, Glycine max
ttaagtgacctgcaggctgcaagcttgtattaggactttttctctctcaaaggattattatctcaagcagaacaaatatttttcttagaacaaattatcaactagaacttcatatgtgaatgatgccaatccacatggaaacaaattatcaaacaataactcttttggccaggaaacaacttgaagaggttaatccatgtcaatcatattagatgcaaattataatgtaaattgttcaatgaaagtatatatataactgctttttgtattggtatatcagaagttctattctctcacaaatatcaaaaggaattgcaattttttatatataaactttggagaatttgttgacatgtatacacacctttgtcttgattaaaattggagcaaagttgatcagtttgactat

SEQ ID NO: 214549 - DNA, 457 bp, Glycine max
  unsure (1)..(457): unsure at all n locations
ttggtgaataatttgagtcanatacacggacatatatattatttatacaaaaggataatttactatattaactagtaaacaataaaaacaagaccaaattaattatttacccgtgaaagttatgaaataaacgtttattcaaaattttattatagaagatagtacttaacattaactccaaaaggtattctggatccacatacagtatatccttaaatgttgtcaacaaataagtttgtgaaagatcatgaaatgtcaccatgttcatcatttgcttgtccactattacaagcttaatgacatgacacattaaatgctgagttacatcgtcttttattattattattattattattactattattatgagngctgagtacatcgttaaatgttaagaaatatatgattttatgtaataactttatttaccattacattaataagaaagccaaagtat

SEQ ID NO: 214550 - DNA, 393 bp, Glycine max
agcttgcttgtggggcttctatggaggctgtatctttgagcttcaatgaggtcctttaatggtgattttccaccatggagatgtagcgaaagacaaaggagaagaggtgaaaggaggcaccatccactagggaataagtcatggaagaaggagcttcatcaccaagatgagccttggataaaaagcttggagaggatgcttcaatggaggaaaagaaagagggagaaaaagagagagaggggagcacaaaattgaaggaagaaaaagggagagaagttgaactttgagttgtgtctcacaagactctcattcatcaaagttacaacaagtgttacacatgcttctatttaaagactaggtagcttccttgagaagctttcttgagaaaacttc

SEQ ID NO: 214551 - DNA, 414 bp, Glycine max
  unsure (1)..(414): unsure at all n locations
tgtacttggcttaaacatgaattatacatgagttatgacttgtgcgattccatctgggcaaaagtggatgaaggcaagatggatttcgaatatctgcactctatgcagatatttgttgtcaaatatgtgcagcagatatttggactgtgcagaatatgcttgtgtatggctggttgtggaaagggtagtacatattgagttctggacatttgctagcagatcccaacggtcaaaatgtagacttatgtactagagactttcagtaaaattttctagtcgatccaacggtgaacgaattggaacgaatganatgttactggggtctttaagtaatgaaagctgtgatattgaattgtgttttgggcagagttatctacctctgccctgttttcttgcttgtgtagctcatgatgc

SEQ ID NO: 214552 - DNA, 389 bp, Glycine max
agcttgctaaaaaagctaaaattcatccctgcaccttctatcttagagaaaattggctccgaagtaggccactagatcatgaaaaacaccttgagtcccacattgggaaaataaccttagtcttttcctttccctatatatagagaagaccatcaagcctttggagcaccacaaaatagagtggtcttaggattaagtgcggagcccctcatagttaatattttcatcttcccaagagttttcaaacttggggcatataggtgatgtggggttgtgttttaaatcacacctatgtgccttaataagagttagggccatcaagttcgttcgggttaggcggagtttgtctctatactttctaggagattgtttcccctatcctttctaag

SEQ ID NO: 214553 - DNA, 380 bp, Glycine max
  unsure (1)..(380): unsure at all n locations
cgaagtgagaaagtgtggaagagtcagccttnctaccttttattgtcgactacagagtggcacctggagatatgtcgcggtggtcacgagacctatgggacgtcaggtggggtgctattctccaaaaccaagcttgaccaatcccgacccaacccaggcataatcagtcagtgagaacctgtgacatacctaaacaggcgagctcctggcagtcaaccaatattagaacatagaccacatagcacggaggcttgtgtggtggctggccagctatggatcttgagtgatatctggaatatggcctctggtaatcgattaccaagggtgtgtaatcgattacaaggcttaaaaatgaagacatgaagttaagatggcctctg

SEQ ID NO: 214554 - DNA, 314 bp, Glycine max
ttaccacaagcagtatttcttcacaatatatgtctcgacaagcgctccatcctttattaatagcggtgtctctgccatgagcactctaaagcgcctatatcatattgtgacttgatgacacgacattagctctacagtttttctgacaaaaaaaagtctatcctctcataaagaaaattgtgttattctcttacaaaaatctcgccccaacttcttgtgattcaatagggaatttttgcatgctcaaatggttcaatctatctcttccaagagagattacttctcttcttcatttccattctgaaaagggatta

SEQ ID NO: 214555 - DNA, 391 bp, Glycine max
agcttgatgcctctttgtataaccctttttacttttgggatctttccaatatcttctagcatcaagtcaagacaatgtgcagcacatggagtccatggtctcgtgacttgtaaaattttacctaaaaagaccaaaatcaataaacttgtatgaataatgtaacaattaaaagttataactataaaataaaaaacttcattaagcatgattgaattctctctcgccaacacataattacttccattgtccgtcaccacttgaatgacattcttttctccaatctcctcaacaaagttatccaaaagctcaaagatcttctgatcagtcttcatgtattcagaagcatccacactcctcacaaattgtgttcccaatgaacaatttaccaaaa

SEQ ID NO: 214556 - DNA, 377 bp, Glycine max
  unsure (1)..(377): unsure at all n locations
gacactatanaactactcaacttgncactctatgacaaatggattgtgttcccattctcttaatgcgccactnacctcaccatgttggccatcgacatcgacattgggttcctcttcgatatcttccaatgcaagagttactataccatgtctacatggagaaatgggttactatattagatctttttgtacgatagtctcctcactatattgaccaacacacctgggttgcaaccctaaatctttgtcactatactgatactttattattcagagattgcgtgcttgtgcaaaaaactaagcaatgccttggtagatccctcttgaaaagaaattctgctcaggacaatttgccttacactatattgtaagacaaa

SEQ ID NO: 214557 - DNA, 380 bp, Glycine max
agcttgagttcatatgctcgagagaaaaagatttaatattcaataaatgattgataatgtagtgtaataataaaagaaaaaaaatattgatccgatgtttgaaatttttggttgtcaaaatataatcccttttaattatatatgaattagacgaagaaaaaaagggatcttatttaatttttgaacacttatgtgaaattgttttaacttaattataagtgatcttaattgtgttaaatagttaaaaggataacttcatcacttatagtcatcttagttagtttgagcaaatttgcttctagtgagagatacatgtaatctatctacaaataaaataaatgaatactacttattggaaattttttttcttggatatattg

SEQ ID NO: 214558 - DNA, 422 bp, Glycine max
tgcacatcgtagccatggcgaataggctgcgccgtcatctctaatctcaactcatccaaaccgacgaaaccgatcgcttgtcgagacgccattgcagagaagcattcgattgattgtatttcagtacactgcgcaaatctacgatagagagttgcgattaaatagagagataaaatgaggatcgaaagttattgtgaagagaaatgatgaaattacgggaaattattattgcatgagttaaaggaatgaaagagcaatgaaattacgctgtttacgatcgcttcgctgatatataagggctgtcttgtcttctttttcttatgcgcacataatcggagactcgtgaagaatgcgtaatgccacggattatataaaatgcgctccacatggaatatgagtatttattcgagtaataagatact

SEQ ID NO: 214559 - DNA, 383 bp, Glycine max
  unsure (1)..(383): unsure at all n locations
agcttgcttatacccatgtgcttcctctatcttttagtnccgtcaatacattttaattccttgttcttcatcttattctccatgtatatcctccattatctggtggattgcggttgttaaaagtagattcaaaaaataaactaattaaatcttaaatctacactcgttattgcatttcaccggccgaaattttatagatctactcttgagacatattttcgcgttgattttaggatctatcatttgtcagtcataatcttcttgtgctgaccctttagatctatgttttatttcaaaatattgattagaaaaaaaaacacaaaacaggtggggggaaaacacttaactcacgttgccttagaggcatgtttactcatacataa

SEQ ID NO: 214560 - DNA, 310 bp, Glycine max
  unsure (1)..(310): unsure at all n locations
attttacaattgaaatatatgagccaaagaattgagagaaagagatgaactaaacattatacagaggtgtaaagagaactggagaagtcatgtgacatgagtatatgccatatgcattccgcatctagtcttatacgaatgaacggaaaaagttagtggtgagagaacataatacaatgaaagagatgggaaaatgataataaaaacctgctnggatatttattttagaaatattatgataagtgggcttatggacttactggtagcttgggcttaccatggcctcaatcattatgtgttaacaatgata

SEQ ID NO: 214561 - DNA, 390 bp, Glycine max
agcttgtaggattatggggtacctatcacatgtggtactaggtggcggtcgggcgatggtgcacaacaagttttccacatccacaatgcgcgcataaacccaccatcccctgttgcccacctccaactgagctcacgtactcccacgtagcccatatcctcatttctctcaacaccgggtccccatcaatcctcccaagcttccccaacatcaaattaatacaacattcaaacagcacatgctatcacagcaaagcaaaacagcgcaaaggcagaaaactctgcccaaaacaccaaccaaatcacagcttttctcacttaaagaccccagtaacaattccttcgttccggttcattaaccgttggatcgactcgaaaattttactggaag

SEQ ID NO: 214562 - DNA, 451 bp, Glycine max
tgtgaatggatatagatctaagatataattgtgataatgttatttattgcatggaaaccttcttgtgaagagaatctatatctgttgagtaaaaaaaaacagagatcttttagttgctgaaagtgtagcaagtggctgacaaaggttgtaacaaggggaatagttggtctagctgagcctaagtgtgaagtctagtggttttgttggtcaacagtggctggttgtgtttgtgaaacctcctcttgaagagtaaggactgtacgtaactcaaggttagggtgaaccagtataaaaatcattgtgcatcatcttcttcctctttctctcaactagatttaatctgtacaatgttcactgcttttgtttatcactaaggcagaatacttctttgacaaaactcttacaacttaacgctatgttgtatccaattcttctacataacatttttaaa

SEQ ID NO: 214563 - DNA, 392 bp, Glycine max
agcttgctctaaatttacattgatgtttgtatttatgggaggaggttgtatgtcatttttgttttaagagtagtgtcccactggtaaaactaactttccaaatgtttgccttcgtaggaaatggccccgaggaagcttgcctcaaagaggtccaggaaggacaaggcagccgaaggaactagttccgctccggagtatgatagtcaccgctttaggagtgctgtacaccagcagcgcttcgaggccatcaagggatggtcgtttctccgggagcaacgcgtccagctcagggacgacgagtatactgatttccaggaggaaatagggcgccggcggtgggcatcactggttactcccatggccaagtttgatccaaaaatagtccttgagtt

SEQ ID NO: 214564 - DNA, 392 bp, Glycine max
gtgcctgttatagatgcgcctgaatctgacattcgagtgacaagtgttgaccatatggatttctcgagagcttgctatgtgggattttgagcgactcgatatattatacgcccgaatcgaacctcagtgtaaaaagttatgaccatttgaatttctttagagcatacgttgttcattttcgagcgtctctatatgtgatgaaccttaatcggacctccgtgtgaaaagttatgaccatatgaatttctcgagagcttccgatgttcaattttgagcgtctcgacatattatgcgcccgaatcggacatccatgggaaaagctatgacaatatgaagttctcgagagctatccgttgtcaatttcgagcgctcgactatatgcgcccgaatcg

SEQ ID NO: 214565 - DNA, 395 bp, Glycine max
agcttatgctgcaaacatctacaacagacctccttatcctcagtagcaaaatcagccacaatagaacaattatgacctctccagcaacaggtacaatcccgggtggaggaatcatcccaaccttagatggtcgaatccttcacaacagcagcagcagcaacagccttattttcaaaatgctgctggcccaagcagaccatacgttcctccaccaatccagcaacaacaacagcaacagccccaaaaacaacaaacagttgagactcctccgcaaccttcccttgaagaacttgtgaggcaaatgactatgcaaaacatgcagtttcaacaagagaccaaagcctctattcagagctaaactaatcaaatgggacaattggctacacagttaaatc

SEQ ID NO: 214566 - DNA, 421 bp, Glycine max
  unsure (1)..(421): unsure at all n locations
tataaatactaagctttctagcttttcataggtggattaagatctccgtttggtgctctataatgtgggaatgtgctccaatatgtggggcaatttaggtttgttttctcgcttgattgaggtggattgcgggtgtgtatgggatggccctaggcctataatgcattttgaagcaatgggacatgccacattgtccccgttctcttgctattgatacctaaacgcacgcccaccaagtgttcggtgaaatgccttaatggcattagcgcgtgacttttgtaaggaaacaacccatgaggcattttggtttgcacatatattctattttttgagacatgcattcattcccgaaaaatgctagagtaattgccccacatatattctatgcctatgaaccaaagtntttatgctaaacaacaca

SEQ ID NO: 214567 - DNA, 396 bp, Glycine max
agcttaagctaaacgtgcctgcaaacgtaagtacatagcaaatgaaagtgttaagtgacaatgagaaactgatggacgatctgggggcaaatgtcacgccggctatctattacatgagtaaggaaaatacgctacaacaggccgtggggttgcccgatcagaaaacgcttaatatcattatggggaataaataaaaggtaattcatggatggttgaactatatccctgcttttcaaccatcctaaaaaagcatgaattgctcgctctgccctaagtggctgtgctattttagaaaaacttaatcctgagttaagcaaaaaaacataatcaataaaaatatatacgcaaaaaacattgattaagtgaatatatcatggaagaaaaatataaccggag

SEQ ID NO: 214568 - DNA, 382 bp, Glycine max
ttgttagagctatcatcacatgacatttattggcacagaataagttgcttgtaagcaacttgagattttaacagaaacacttggtaagttgcaaactaaactgtctattggtaagcctacacattcttctgttttgtaggttacaggttgtaccatctgtggtgaggctcatgaaacaggccaatgtattcccattgaagaaaacactcaaaaagttcattatatgggaaatcaatagagataaggatatattcaaggaggattctcaagcttccagcagggtccttataaccaacaaggacagtggagatcacaccctggcaatcaatggactagggtggaccttctaacaggccaatccaacaagggcctaacatctttc

SEQ ID NO: 214569 - DNA, 456 bp, Glycine max
  unsure (1)..(456): unsure at all n locations
ctacttcttcactacatcaagaattaccgggttgagtcttctctgtggctgtcttactggcttagccccatcttctaaatttatccgatgcatacatgtggatgggctaatatcaagaatgtctgccagggtccagcctatagccttcttatgcttcttgagaactgataacagcttctcctcttgctcatcagcaagggaggcagatataattactggaaaacttttgctctcatctaagtaagcatattttaaatttgatggcagaggcttcaattctggtgtgggcggctggataatggtagaaatagatggtttctcagcctgcacctcatanagaaagttagaggtatgtgtacttccctatacatcggtatttatatctgactctagaaaatcaatctcaagaggttaaacatcaccagacatgtcatcaatatcaaattatattcactc

SEQ ID NO: 214570 - DNA, 409 bp, Glycine max
  unsure (1)..(409): unsure at all n locations
gggtgggttcagtttaattaagcgctggaggcatccccatggactgagcgaaaaggctcgggtcatctaaagactacgcatcttttaaggcacaaagaaaggatcagaacaaccaaaccccaatcctacgttctttaaaaaaaaccgcgatgagaaaattacatgcagtgacttccttaattgccctagttcttaagcgtagtatcgcttgacaacatcgaagttcacgggtgaaggtagttccttgtcatccatgttggcaagcacaagggcccctccgaagaaagccttttatacgacgaaaggcccttcgtagttcggggcccactttcccctattgtctntcatggcttgggagactttcttcagtaccaggtcccattcgctgaacctgcgcgatcgtatgttc

SEQ ID NO: 214571 - DNA, 353 bp, Glycine max
ttgaagagataaaaatctcagactctacgagtgatgagtccgatgaatctaaatcatctactgaggaatctgataatgatgatgatatagatgaagaggaacaaatcatatctgccgctcagaacgttactactcacactgcctgtgatatctctgaaaatgatctgttgaatgaattgaaggagcttgaactagaggcacaggatgataaccctaaaattaatgctcaggagaaagaaggagccaagaccaaagacatcactgaagaagagatcaatgatcaggttgttgataccaaagacaaattggatacacatctttatcctccgggaaggatcatgcatattatccct

SEQ ID NO: 214572 - DNA, 319 bp, Glycine max
taaccatggcttacaactacattcctatcatgccacttaaggacaacacttacatgtggttctataggtattcttatggcgttgctttcaaatcagaactcgaattttattttggtgatctgtgttacaagtttttttcattacatgtcaatattatctatctagttaatacttcatgtcacattgtaaaccctttcataaacatttttgagactatatataagttttggccttaaataattaaatcaatatattgacaacccattaaccactcttatcagggaggcccatgatacttaggatcataactctcatagat

SEQ ID NO: 214573 - DNA, 381 bp, Glycine max
agcctctacaaaaaataatggaccttcatctattttataatttccaagtattttatgatatttctcattgtcaaaattttatacaaaaattaaaaggataaagtaataaaattatattaattttttttgtttcttataatttttacattcatttaaaaacaaattatcttaggagaaaaatacctatttttttatggggacattttctttaccaatcatgaaaataaaaaaaaattttttgttgaggcaattgccccgaatcactgtacgtgcatctgccactgcttccatcttcataaccaattatatattgacttggaaaatttcaaataagataaccacacatgtctattgtttataataaattgacagcaaatgtta

SEQ ID NO: 214574 - DNA, 322 bp, Glycine max
gagagggaaaaaaacggctatcactcaagaaaatccggattgcgacggagcgttcctcgctaatctctgcaaagtcctcacacgtttgcaacagaacaaattctcgctattttttaaaagctaattataggcggaaatattcccactgtaacctgtcatcatcctcactaatcccttgcaaattcactcgctaatagaatcacctcatgtagtcacataacaaattcagcagatatggttcaggtcacgtcccccgagaaaaaagacattcgatctaatgaaatgaggttcatcggaattgaactattttaaattaaattta

SEQ ID NO: 214575 - DNA, 372 bp, Glycine max
agcttgcataagagagttggcttagtatttgtctccaggaactcatggagcttcaccaagtagattgtctaaaaagttttcttaagatctttggaagcaaacaccatgttattctgtcctctccctccctctgctgggttcatgttggcatggatcttctggtgcttatcctttagggtattacctcacacgattaattggctttgtataataataactgataattactgtgaaccgcattttgttctaactccatattagcttgagttctatttgagtatgctgtggtcgtcttcaggaaagtgaataatatgtttcggacacccagcaagccgaacactggttcgctttgacttctgctcaacgcatatg

SEQ ID NO: 214576 - DNA, 376 bp, Glycine max
  unsure (1)..(376): unsure at all n locations
tggccagctatgaatttttgtggnatctggaaattggcctctggcaactgcggccgcattttatctttcaaggcctccatatcggccttcatttgttcttgcacctcttctatttcacccatgactctagttttggaacgggttctataggggtgccttaaagcgtgtttagttatggtgtttactgctaaaaaaacaaaaatgcagtgagcactgcgacaaagaactaaacatgaatgcatgctaaagataagttgtcgaagtattggactcgtgccgaatttttgagtaaagacataggattgaaccaaacttatttttattaaggaacaaaaatattcatcttgtcaaaattaaaacaaaactacaaatgcct

SEQ ID NO: 214577 - DNA, 440 bp, Glycine max
  unsure (1)..(440): unsure at all n locations
ctntgtgatagacattctcatagtcttcattgcatgtttattaatntagtntatactagcatcatgaatntgtttataaaatgccatacacataatttccacacaagagacagctcagtttaaatagttattgtcacaaggaaatattttacggtggtgcttttgaatgccccatactaagttattgtgaactatgtatgcctaatgacttcaggaacgaagtgggtctaagctataaatctatggtcactactcactaataaagtcccatagcctgctggctctatcataatgcacagctagatggtctaaccattattttgagagaataataataagaatttttgaagtatattagctgtacaccctttcaagtatgtatatatgtaaatatattattagcttgaaatcatgcgctgactgataatagtactgatatt

SEQ ID NO: 214578 - DNA, 384 bp, Glycine max
  unsure (1)..(384): unsure at all n locations
agctngaagatggctgatattccaccatactattattcttggaggaaatacggacagaaacccattaaaggatccccccatccaaggtacataacaacttaacattataattatatcataagcaccttcacatctagtacctataattttatctttgtatatgttaacttgctcgttgaccattcaatttcaaatttcaaaatggacccatattttttattttgttttactaaattgaatcatctaatttgtttccttttttctctttcccgtatgggctaaatttagaaagatcctggcatgcttttttcttttcttttcttttttctgacctttcccttgagtgttttctatttttatgtgatgttttggagttaattttga

SEQ ID NO: 214579 - DNA, 457 bp, Glycine max
tatcaatgccaagaacaccatgtgaaaatgtcgtttcactgtgtactccttgcgttacactgaccttgccctcccttatgacggaaaggtccataattaattcatttgcttaataagcaatacatatacataccacatatatatatacacataggattcttctatcctatgcagctgcttacatagagtatgactagtaagaattaaacaatcgctagacatatctaatgtactacctccatctttactgaataatttacattttaatataattaatgatttgttctaaacacgttcattatactctttactcacggaagactacattgttgatttttcagacactgtcccaaaagatcataagattttcttttaataataaaaatgttaattaaaatgatgttattatttaaatacatagtaaatcatcataataaaaataccctacaatcgatat

SEQ ID NO: 214580 - DNA, 386 bp, Glycine max
  unsure (1)..(386): unsure at all n locations
agctngtaggattatggggtacctatcacatgtggcactaggtggcggncgggcgatggtgcacaacatgttttccacatccacaatgcgcgcataaacccaccatcccctgttgcccacctccaactgagctcacgtactcccacgtagcccatatcctcatttctctcaacaccgggtccccatcaatcctcccaagcttccccaacatcaaattaatacaacattcaaacagcacatgctatcacagcaaagcaaaacagcgcaaaggcagaaaactctgcccaaaacaccaaccaaatcacagcttttctcacttaaagaccccagtaacaattccttcgttccggttcattaaccgttggatcgactcgaaaattttactg

SEQ ID NO: 214581 - DNA, 361 bp, Glycine max
ctcagcttgtaatggatatagatctaagatataagtgtgataatgttatctattggatggaaaccttcttgtgaagagaatctatatctgtagagtaaaaaacaacagagatcttttatttgttgaaagtgtagcaagtggctgacaaaggttgtaacaaggggaatagttggtctagctgagcctatgtgtgaagtctattggtttgttggtccaacaatggctggttgtgtttgtgaaacctcctctcgaagagtaaggactggacgtaactcaaggttagggtgaaccacgataaaaatcattgtgcatcatcttcttcctctttttttaactaattataatttgtacaatggtcact

SEQ ID NO: 214582 - DNA, 399 bp, Glycine max
  unsure (1)..(399): unsure at all n locations
taagcttgatacacactgcggtgaacatgcatgcgtgcctttttctactttcgtcgacttgttgcccaaattcctttgatctctaagttcatgagccaatacacgtccatttccatatttcatgtacaataactgctgggggcctcatgatgcgttcctacaactcttcttttggccgtgatttnttcattagacgacttcaatgaagtttatgtcactaatcaacctgcgtataacaaagatggagtaacctacttattcattgactagtccgcagcacaatagagaaatgttcaagcagagttttatgaatacgaaatcataaagtctatctaatccaaagacaatagtacaaccacaagttgctgaatacaatcattaaaaaatggccaacaattg

SEQ ID NO: 214583 - DNA, 384 bp, Glycine max
agcttggattgattcggtctaacgagggatcgaggtttagtaatttcggctacaacatagaacacaagagcatgattgattagagaaatatatttatatgcatcagcttgtttgtgagaaagacccaacatttctacctactgttgtcacttttacttactttgcattttatagatttagcataaaagtttagtttaaattctgtttgaaattatcaatcatacatgttctcccaacaatgcttcatttctgaacttaattcaggctaacgttagttccttatgttcgatactcggattcatccattttaatttttaaatacttgacgatccagtgcgcttttcagcaaaccaaatttcccttgaatatatttgaacgaagaaa

SEQ ID NO: 214584 - DNA, 459 bp, Glycine max
aagtgagaaagcatggaagagtcagtcttcctactcttgtttgttgaccatagagtggtacctagagatatgtcgcgggggtcaggagaccttgtggacgtcaagtggggtgctattgcccaaaaccaagcttgaccaatcccgacccaatccgggcatagtcagtcagtgagaacctgtgacgtacctaaataggcgagctcctggcagtcaaccaataaaagaacaaaatccacaaagcaaagaggcttgtgtggcggctggccagctatgaatcttgagtggtatatggaatatggcctctggtaatcgattaccaagggtgtgtaatcgattacaaggcttaaaaatggaggcaggatattaatatggccttcggtaatcaattaccaagggggtgtaatcgattacaaggcttaaaaatggagacaggatgtaaaaatgatctctggtaatcca

SEQ ID NO: 214585 - DNA, 383 bp, Glycine max
agcttcgcttgtgattaaaaatgtgtttattaagttaaaaaacaagggtgaacacaagttaagtcaaattaaatttaaaaaaaacttgattttttaaaaaaatgatcaaatagtttgatcatgtttatttaatttgtaattattaacctaacccaatcctatacatttgatagtttttctataaattattaatgtgggttgcttgattatttgaaatggtgccttttatttgagttattaaagccattgttattttcaacattgaatttctattattattcttctctctccatcttctctctccaagcgtacatggcagatactacgaatttgaaatggtgccttttatttgagtcattaaagccattgttattttctatgac

SEQ ID NO: 214586 - DNA, 444 bp, Glycine max
  unsure (1)..(444): unsure at all n locations
nganaaggaacacttagaaaaccaaatgcatattgtggaccacgagggactacacgtggtgtccccacatttcttttctttnttctttttgaaaaataaaaacataaaaaagaggaggaaagaagagaatgcacatttcactttctaaaaaattaggacttcttctctttcactctctcctcgttgggccaccaccaggtgaacaactgatgaaccacaagcagaaccaccagcaaggtttgctttcactctctctctctctctgtctctttgaatttccttttttttatacaataagggcccaccatngataaagaagtcgctcactgataaagaagttgtagccgccgctgtcttcttcagtcaccgttgcaatcctctttcagcaaaaccccttcttcccattcacactctcacccatattctcacacacacaaaattaaa

SEQ ID NO: 214587 - DNA, 367 bp, Glycine max
tgaaactttctacttttattgttgaccacagagtggtacctggagatatgtcgcgagggtcaggagaccttggggacgtcaggtggggtgctattgcccaaaaccaagcttgaccaatcccgacccaacccgggcatagtcggtcagtgagaacctgtgatgtacctaagcaggcgagctcctggcagtcaacagataaaaggaacaaagaccacaaagcaaggaggcttgtggtagctggccaactgtgaattttgtgtgatatatgggttgtggcttctggtaatcgattaccaagggggtgtaatcgattacaaggcttaaaaatgaagacaggaggctaagatggtctctggtaatcgattac

SEQ ID NO: 214588 - DNA, 456 bp, Glycine max
gaagaagttttggcttttacatgcccaactactttgagtggcatttgtattggttgttatctggattgatgcatcttagtacatttgatatctgctttgcatcatcatagtttgtgagaagaaaattttctatagaggcaaaaactctctcttttaatcgattacatcctcgttgtaatcgattacaataagttgtctgaagcttgtagagttaagtctcgtatcaatttaattgattaccaatatctggtattcgattacattgttgtttgagacaaagactatattagtcaagagtctctacttcaatcgattaccaagtggattaatcgattacttctttctcggtcagttgttcagaggtgaacaataacactataattgattacttatgttatctaatcgactacattggtcttgagttgtttctagatgttggtgaacactttatcgata

SEQ ID NO: 214589 - DNA, 248 bp, Glycine max
gcactactggagagacgagctttttttttcttgaaactctgttaaaataaatagcccttaacgtgtaagaacaaggctttcgaattaagaggaaatttcttttacaccctctatttgaaaaattagcttgtacatcactacttgggaattgttcctaacttgtaaactagacgtggaaaaaagccttaaaccctgattgtgaaacttgggcatgactcatacactaccatctacggtaatcctcttta

SEQ ID NO: 214590 - DNA, 304 bp, Glycine max
tgatgattactttgatgatgacaaatagctctgctgccaagatccttcatgatcaccaagactatgacattcatgaatgagttcaagattgagtcaataacactccaatgatcaagaggaaattgatctcataatcacatcagagtcttctcacacattcacgacctacagattctataatcatgagaagactccctgaagatatgtattatacactctttcataacattgagtgggaccagaagctctccaatatcattaccaactagctttactctctggcaatcgattaccagatcattgc

SEQ ID NO: 214591 - DNA, 390 bp, Glycine max
agcttgtacttttgggattcggctggtctccatattcagtattcgattgagagacatgtatcctatgatgggaagttgcactagaaaataccatcacattttctaaactaggatatttctgattttccttcacgtggaattctcaagttgactattaattaattttgtcatcagtgtggtaatctactttgtcattttctcatcatttgaaagtctcgcaatgcaagctatatttgaaagtctcaaggatgtagcagcctctaattgcatctcattgtcctcagtatgcaatttatcgccttttcacctaaaatgaattaaaaattatctcggacatgaaacaacgcctccagcaaagttcctatcaatattttttagctctatctatgt

SEQ ID NO: 214592 - DNA, 354 bp, Glycine max
gatatctgttggttctcaccaatagaggaacatgttgctatgtggcttttttgtctcgactacctctgaccttgatacttgccataatcatgcttcaacttcaagtagttatgatatacatacagctataagttggaggcttgcttctttgatgaaaaataacataactattgtaagtcccttggatctaaagtgctattgagattctttctgaatttgaatatagttcgccatgtgttgcttaattctggtaagatctttacttgtttttacttcaaatctatatctaattgggaagattgtaacgaaccattaatatatatcatgtgagtagaatggcaggattaacaaatg

SEQ ID NO: 214593 - DNA, 388 bp, Glycine max
agcttgagggtgcgcaacccaccatcttttatagtagagtatcgataatgtgtctaccatcacgattatcgtctccctttccatcattgggggtaccacctgggccgccagatccctccaccttttgtgcgtgttctttgaaagatccgtccccctttttgcacatgttctgtagttgcatcctatccagaaccatatcaaaattgtactgatactgcctaacaaaggcaaccattaggtccttccaagaatggactcgggaaggttccaagttagtgtaccaggtaacagctaccccagtaagactttcatggaaggaatgtatcagcaattcctcatcttttgcgtattcccccatcttctgacaatacatctttagatggttctt

SEQ ID NO: 214594 - DNA, 429 bp, Glycine max
aattcaactgaaacatgctcaacaatcctcattgtttgtttctgtcatatagaatttgagtttacaatataattggtccttccaacaatactccactgtccaaatataaactataatatgatcaactgaaggcaacaggaacatggaaaaccatagatttataagcaagtttgattcagcaaaagccagaagcaatagaaagcatattagacaacaaaaggtacaggttaatccttagaatagtgtccatgcaagtgtcaatccagcttcatcccatactgaagatcattataaccaaccaaagacgccaccacatagtgtccatgcaactgtcaatcaggcttcagacgatgctgaagatcattgtagctatcaaagataccattttatatctttatatcaactatattagttattacgttgaacata

SEQ ID NO: 214595 - DNA, 273 bp, Glycine max
ttttgttcacttaaaaggctggactgatctagggttcaatgcacaaaaaattgaacttgataggcaaaaaagtgcacttaagtatttgtaaactgtgattttcgctgaatttaaaaaaacatcccttgtcgcgtcaattggcacgccagtgataatgttatgatagaaggctgccagttttattggaaacgtgccgaaaaagttgaggaagtataatcctcgtaactgtgaaaattggaagccaacacagcaattaagtgtctcttatgtctt

SEQ ID NO: 214596 - DNA, 439 bp, Glycine max
  unsure (1)..(439): unsure at all n locations
cggtgatgatgangaagtgtataaagtattccattcntcaattaattcctcattctcccttacatgtaattttgtgcaagccaccaacaagatcatgactattgtggctaagtctcacccaagtgtggtgaaggatgaccctccaagaaagaaagtcattctcaaagaccttggacaaagtatgagaaagggaaaggactatgaagtggatgattatactgaaggatcaatgcagaaagggaaaatcattttgctcgagggtggttgatctttttccctatttaatctgtcaggctagcgacgttaaacaagtgatttttcggaggcgacccatgactcgagggttattgtctttttccttgattacattgtagtttcatattaagttggcctttcttttcattttacgttgtgttaagtttcagaatttattttcata

SEQ ID NO: 214597 - DNA, 391 bp, Glycine max
caagcttatggtttggcgcgaaaatcgtgttctttgaaagaggcgattgatgttgttagttacctctaggagcaattgattcacgggatctctcggccttaatagataaatattaggaggcaggcaccatggtgagttgagtttactttataagagagagatattaaagaaaaaggtgagaggatcttcgttaagatgctttcacgtctggtctgtgatgacgtattataagtcgtgctccaacaaaattaaaacacacatgagtagcatatactggatttggttaagtttaaatctactcataaatgtttacatttctaattgctaattccttcccgcatcagatatggtaacatctcatgcagatgcacttcttcacagaaaaataaca

SEQ ID NO: 214598 - DNA, 445 bp, Glycine max
ctgcttctgtttgcacacatatgctgatgatatcagctgtctttctttgtgtagcaacatacggctgcgtgacaagataatatcaatataaagaagcaaagtttgtgatgtataaggttaagaataacattttaaaatgtgggccattatgtaactataatacctccaaaacatgaaatgcttctatctgtatgctcttgcttgactcctgcagaaaaatatcaacaatgacccatcaaatgcttgtatcaacataactctaacttctgagatttctgttcaacattaaaatgtatgctcatcagaaactcaacattgaacatatcagtgttcagcaattccgtatgtataaacggctggggaacaataacacggcgcttaagtattttagcaaagctcatacattttccaacacataaacaacaactcgatagttcacattatc

SEQ ID NO: 214599 - DNA, 388 bp, Glycine max
agctttggcacacagctaatcattaccttctttatggaatcatggtaaacacagttctatcacacaataaaaaaagtgtcatataacctgcttaccgtctctcttgattttggtcgaagaccatgccattttggaattgcatgtgcactctctacataagctgcatttgttccagtaccaacaatcactccagcaacaacatcctgattgctgaatcttgctctagctactgttccgactgtgtcattaacctaaatcacatcaccaagttttgtctctggttcaagacattaagtaaccaggaaatttaaaagaaaaaaaattgaaactacaaaactcattgatctaaattttccgccatatagaaactgaaaattattctcaaagc

SEQ ID NO: 214600 - DNA, 447 bp, Glycine max
  unsure (1)..(447): unsure at all n locations
nggtgataagtttagcagcagacatgggcaataaggtgtttgcggaactattgtcccgcaagaagactttccgttttctgagaaaggcatttgtcctgatctgattatgaatcctcatggtttcccaaggtaatataactcatttatgtgtcatttgtcctcatgatatataggtggggaacctacctttccagggaaccctctntagttaaataactgaaacaatttatttgtgatgattttgtattcttctctgttccctcaatgacatgaatctaacccaagttcaaaggctactccatagctgaatagctttactacatggtcaacatttttcgcctttcctactgggaaaaaatngcattttgtggaagacttggaaaattggaaagtgaatattatttataatgtcaatggtacaaaagttgcaggcanataaaatgtgta

SEQ ID NO: 214601 - DNA, 387 bp, Glycine max
agctttacatatagaagataataaatattttctaaacataatatttttagatactaatttgtaaaaaagtatattttactttgataagtggaaacagttatttttttgcaataattgaatataagttaatattaaacattcgcattgaatttgactctaagcataatatttttttgaagaaaataaataaatgacaatcaaacatattttgtaaaatttcttaagaatatttattgaaatgtttactctgagaaaagtaatttagtttggaatatttttttgcatcaaacataaaacccaacttacaactaaactaaagaaattcaatgttataataaatattcaattacttgattttaagtttgtatttctatatcagttgcatac

SEQ ID NO: 214602 - DNA, 422 bp, Glycine max
  unsure (1)..(422): unsure at all n locations
ataacatgatagtctatattaaaagtgagaatactagaagttntagttctaattcaattatgaacaatttatgctcataaaaaaaacacacatagacactttaaggtaattcctaataatttttgtttacatcttaaattctaaagaaataatatatggttacatataatattattaatttttatgataaattattttgaaagaaaattataaaattcttaattaaaacatgtgcttgcgtatttattattataantataatgtattattagatataaaattatcgacttttatcataattattttaaataattttaatttgatatagcattgtattatttctctaacctattcaatagtaaaatattctctatatttttaatatattagaaaacatatatcntataattattaaaaatatt

SEQ ID NO: 214603 - DNA, 384 bp, Glycine max
agcttcctagaggtttctaattatatgggccattaaatctatcatatgctgacaatagccgagaagttcgtggatctcctcgggggcggagtaggtgtccaccattgctttggccttggctagcaatcggggaagttcttgactcccgttcaaggtaagagcaaatcggtccatccacattgttgcatcttgatgtaacgagtcgatcacccttcctctagcctctttttccgcatacacttgggcatactagtccgccactctatgctcgtgggccgtggccagatttagttcttcttgatacttgctgatgatagctaacatgttggtctctgtctcgcataaccgctgagacatgtttctttaggaccttgagcaaacctt

SEQ ID NO: 214604 - DNA, 392 bp, Glycine max
ctgaaccatacaaagacaacccttcctttgtgttcagattgctctacaacaagagaccctaggtctcttaatcccttttcagaaataagatgaagagaagaagaaatctctctcgaaagagatagattgaacaatggagcactcaaataattccttattgtattgcaagtgtatctgccaaggaatattttagaggataagacaattttggtttgagaggataagacctttttgtgctaaaaaactcttagcaaatttgtgttccaagtcacatataaatagacccttgatggccattcaaagaccactttgacagatgtgactctcggaaattatatttttgtaaatctcctcttggaatcgattacaatatttgtgtaatccgactatat

SEQ ID NO: 214605 - DNA, 388 bp, Glycine max
agcttgacttaaacactacattctttgtcctactattccattgggggctctaaacaaatcaataagatttgttggaagattatgcactgactaaatatgtgatcgtcttatagacaaatatatcacttaacacttttagtcttttctttcaaggtatacaaggtgtttttgagagcttattaactatacaagaattttaaaaaaactttataagaaagaatgaaagaataaggtcacacagatgattcgcgtattgtttcttcaaagcttcttttatatatagccttcatctccaagtacctgttggtgcatttaatgcttgcattaaatgcacatctgttcgcaaccggcaagtgtaccggatcgcacaagtagtataaaactgtaa

SEQ ID NO: 214606 - DNA, 391 bp, Glycine max
  unsure (1)..(391): unsure at all n locations
tcaactcctctgtcagaaccatgctatgtgctcgcgactggtccctttcttcccttcgcaactngagttcactattgctaccccatagagctccacgaaatttgttccggccgtactcttccttgcgagccctcttggtctcttgttcaagggctcttgcggtaattgcattctcttcccgtaacctggcacactccttccgaacgtgtgtagcagccaacttgaacctctccttggcgagttttgcctttcctaactcgctctcgagagcttggacttcttcgtcctcttccggtgcttcaaaattctcttcgctgacgacttttaacttggcgagccaatctaaacctcgtatgcgaactttcagccatacgtggtacccaccaatgat

SEQ ID NO: 214607 - DNA, 392 bp, Glycine max
  unsure (1)..(392): unsure at all n locations
agcttgnaattntcaccatacacagtttctttgcctccatcacacatagaacaaacactaatgtcatctgccccctttcctcctccaccagaaccctcattaacataaaaaaccatgctgttttccctgttttctacaatgttctgttcctctacaggatgatcaagctcaaaatcatctctgtcatgatctgagtgatgatgtccttcatcaatctctgcctcaactccacattcagtgatcgaattctgtttctgggaataatccaaaaccctcaaagaaggcttgtctctaacaaagttgacaccacagcaagaacacttcaaaggctccaccccagtctcaagcacctggttattatcatcagcatcatgtatcatacccttttgctg

SEQ ID NO: 214608 - DNA, 364 bp, Glycine max
  unsure (1)..(364): unsure at all n locations
gtgcgcagcccaccatcttttatagtagagtaccgattatgtgtctaccatcacgattatcgtctccctttccattataggggggaccacctatgccgccagatccctccaccttttgggcgtgtactttgaaagatccgtccccctttntgcacatgttctgtagttgcatcctatccggaaccatatcaaaattgtactgatactacctaacaaaggctaccattaggtccttccaagaatggactcgggaaggttccaagttagtgtaccangtaacagctaccccagtaagactttcttggaaggaatgtataagcaattacttatcttttgcgtattccccatcttctgacaatacatc

SEQ ID NO: 214609 - DNA, 372 bp, Glycine max
ctcaatcattttcaaatatgcatgtgaattaggacgcatcaacaagaatcaagcccaggctattgtgcaagcaatcaatggggcaaaacacaccaaatgattatgatgatggatggctcaaattctcacaaaggtaaactcatcactttcaaattgagctttcaaaactataatgacatgtagagaagaatcaaggatttcaagtcacaaaatgtcaagaacttttattttcaaaacaattacccatttcttgaacatattctataattcaaaaaaaaacatgcaaattcgtacgtgcacacaaaattgacccacaatattaaactgaaaatccgacgaaactaacaacattaacaaattaacacaactaac

SEQ ID NO: 214610 - DNA, 432 bp, Glycine max
  unsure (1)..(432): unsure at all n locations
ctcagctaaagtatgcccgagtcattcatccctatgagatagtgttgaagtattggcgatcagaattgccattccttggattacggngttgaaccaagctcatgcttttacaaaaaggttcatcaagtcaagttgaaatatggaagtaaccgccttgcaaaattggggcaaaagatgaatcgagtcacatcactgcttcgtttactgccaaacatatttaggattggttatgtccttgttacttccagtttcaccttgacaaagatgtcatggaccatgttgaacatctaaattgattcaaccccatatcctgcgtaaaaattcgcaatacttcaactgtacatcattcgcatacatccatgcttttcattgggtgcattgctcatgcattctttcttgaagaaaanaatagataaaagaacttatcattgt

SEQ ID NO: 214611 - DNA, 384 bp, Glycine max
cattcaacttcgagcgtcacgttatattatatgactcaattagacatccgagtaaaaagttattgtcgtttgaatttgctcaaagcttcaacattcaatttaaagcgtctcgatatatgacgggactcaatcagacatccgagtaaaaagatattgtcgtcttaaattgctcagagcttctacattcaatttcgagcgtctcgatatatgacgggactcaatcaggcattcgtgtaaaaagttattgtcgtttgaattcgctgagagcttctacattcaatttcgagcgtctcgatatgttacgggactcaatcagacatccgagtaaaaagttattgtcgtttgaattggctcaaagcttcaacattcaatttcgagcgtctc

SEQ ID NO: 214612 - DNA, 438 bp, Glycine max
aaacgacaataagattttactcggatgtctgattgagttccgtaatatatcgagacgctcggaattgaatgttgaaggtctgagcaaattcaaacgacaataactttttactcggatgtctaatttagtcgtataatataacgagacgctcgaatttgaatgttgaagctctgagcaaattcaaacgacaataacattttactcggatgtctgattgagtcccgtaatatatcgagacactcgtaattgaatattgaagctctgagccaattcaaacgacaataactctttactcggatgtctgatatagtcccgtcatatatcgagacactcgtaattgaatattgaagctctgagccaattcaaacgacaataactttttactcggatgtctgatttagtcccgcaatatagcgagacgctcgacaatgaatgttg

SEQ ID NO: 214613 - DNA, 376 bp, Glycine max
agcttcgtgtggttttatgccatgttgatgttgtcaagcacttattcaacttctatatcatctgttttagtttgttttccaatgatctatctacaaatttataatttaactatacatgttcggctatctacacaaagggacatttctctgttgttttcttattgattgcaggaagatgtaataaagcctcttcttgaagttacaaaaacagctatgcttcatgactgtacactcctttgtggatggaggtgcaattgactttactttttactgcttgtgaattatgtgtactgaagatatgattttaactctcaggagcatgagagtgcttccattatctattacactcttgtgaatttcttatcaaactctgatt

SEQ ID NO: 214614 - DNA, 405 bp, Glycine max
  unsure (1)..(405): unsure at all n locations
ccctaatgaatgtacatgtacacttcttcatgcatatcagccatgtaaatagcattgttcacatccaatttcttgagataccatcgattgatggcagctaaagctagtaaaagtctcactatggcaagtttagccattggagagaaagtgtccaaatagtcatgtccttctacttgagtgtatcccttggccaccaatctagctntatacctctctattgaaccatcagatttatgcttgactttatacacccatctacaaccaactgttgatttgtgctgaggaagatcagttagaacccaagttttattgagttctagtgctttgatctctacattcatggcctcaatccaantaggatcctgagatgcttcattgtattgatgtgggtcaacactttgtgcg

SEQ ID NO: 214615 - DNA, 353 bp, Glycine max
ctaaaagaatctactacgggtagatttaatctattataagtacatagcctattttttctattctaattacttttttaacatatattgtgataacatataaatttataaaaaaaaatattcttggatgccttaattgctttaatttatggcatacaaataaagaaatttcttcaattacttaaatataattataaattttggtttttcgatgaaatgtgaatattctcacaaactttggcccaaatcatttatcgggttaatttatgatccatgtcatacttaaagttttttacctcttaatatattacgtaggattaaattcaaattcttttatttcccaaatatatgagagt

SEQ ID NO: 214616 - DNA, 489 bp, Glycine max
atgatgatatcttactcaatattgtgaaacatgaaactgatggaaacaccgcgatatttttataataattaataaaaaaaaagtgttgtgattgtcgattaaaacaggagaatattttcacatcagataattaaaaattatagcaagcatgtaaatccatgccttgtgaaaaaccatcattttgcggcgcaatctttctttctcaccatggccttctatagcaagcatcaaggatgttgaaggaggaaaagcgaactgtgaggttaacccaaaagaataaagtgacttgttaatgaaatgcttcacaacatccttgactgtggagagatcgaattcttcagcattagagatctcatttttaacattagcaatcagcttcctgggacgatactgtccagtcatcgtaagccacctgtattggttataattaagctgtatcagtacattgatgagttgaacttaacatgatgttaatattattgtaaaata

SEQ ID NO: 214617 - DNA, 385 bp, Glycine max
  unsure (1)..(385): unsure at all n locations
agcttggaataagttgaactgtattntttaagtcatggttttgcattttacaatgttgataagcaaaaggtgaagtaatttttgtaaagagatatgctcctgcctacttggtttttgtgcttgtcttcatatataaggttcgtattattattcagtttatctattggttactggttttaccatattgtgttttgtgtaggttaagaaactgcagcgggagaaaagactagagactattgttgattgcaaccttaataaaaattacaacatagaagatgttgaagtaattgtacaaattgcattactctgcacacaagcatcacccgaggatcgtccagcaatgtcagagggtgtaagaatgttagagggagaagggctatctgaa

SEQ ID NO: 214618 - DNA, 328 bp, Glycine max
gttaagactcggcttataaatgccagcgatgctcctacagttatgccattctagtaccacaccatcacatgcatatggctcacatagaaggtgaattattacccgttgagactaacatctttgatcataaaccatataccgttccgatgctcatgcccaggaatgggtagaacactgcctgatctcttttgagacatgataagcttacatttcacgttgccatatctacatggcgaacgcgccatgtcatggtccatatcatactgagccgggaagatgaatagatatgatctggaacataggctgctcatattcttggctctcataa

SEQ ID NO: 214619 - DNA, 384 bp, Glycine max
gcttgcccgagcaggaattaaaattgggtttttaaggggataaaatggagactgcaatcaatattgggtattatattctgataatgccttttttactatggatattattccatgctatctgacataaatattccgttgcagttttgcttgtagtttgcttagacaaggaatgaagcagattataattcatttggatagtccagaaattcaagcactagagaaggatggagacaagatggctattgcaaaggtaaagtaaacttgagaccttagtcttgttttcatctatcatgatttagcttgcatttctagtaaaatgttttagcaagcatgctaatagtttgtttttcttcaatattgcaatattccagtgacatcctctta

SEQ ID NO: 214620 - DNA, 408 bp, Glycine max
  unsure (1)..(408): unsure at all n locations
gtgatgaatgatgtcttcatagattatctaagatattggttgttggatctttntaatgacatccttgtgtactgcaaaggatggcgagagcacttgttgctgcttcaacaggttctggaagttttgatgcacaacatgctgtttgtgagacgtgagaaatgcacttttggccaataacaaggtgaatacttgggtcatatcatctcttgtgcggggagtggcggtcaatcctgccaaagtgaaaagtgttcttgagtggcctataccatataatgtgaagggggtcagaggcttcctatgcctcacgggctattatatgaagtttatatgggattatggtaagattgtacgaccactgactgctctaactaaaaaaaacggatttaaatggagtgccttgggctcaca

SEQ ID NO: 214621 - DNA, 391 bp, Glycine max
  unsure (1)..(391): unsure at all n locations
agctntgatgtttgtgttgaatgcattaaaggtaaacagaccaaaagcaagaaattaggtgcatatagagctacaaacatcttggaattgatacatacagaccatttgtgggtcatttcatacaccttcaaggaatgatcaacaatattttatatcatttatagatgattactccatataagcatacttgtttcttatacatgaaaagtcaaaatctttggatgtgttcaaaacatttaaagttgaagttgaaaattaactcaataaaagaatcaagagtgtcagatctgaccatggtggtgaatactatggcagatatgacgatttaggtgaacaacgtgcgaaaaggcattggaaaagcaagatcaagtttgcaaatacaagtttgtaa

SEQ ID NO: 214622 - DNA, 468 bp, Glycine max
  unsure (1)..(468): unsure at all n locations
ctgaatnttgtctggaattatacgagacctattagtaatgtctnttttctcaattagtcgtcatagatgttttggcaatgattattcacaaattacaatttcttcttatctttcttctcttatcagatcatataaaatatgggatccacgtcatcagcatatcattacaagaagacaaaaaccattcccatgaaggtggggttacgccacgtgttgcgtgtgacattggccatgctaatgtggggtgacggtaactcaacgcatagaaacggaccattccccctcttcaagcttcgacgtnccagaatttcttttgtattattcaatggctctgatcttcccaatgatgccatgcccctttgctttgttcgcacgccactgggccactgctgtgcctcaacatagacatgtgtcccccaagttttcccattacttttaagttaaatattttttagtataccctaaaat

SEQ ID NO: 214623 - DNA, 385 bp, Glycine max
agcttctcccccaatatgctataaataggggttgaagcgaagtgaaaaagggttcagccctttaggcacttatctctctttcgaatttgcttagaaaaattgtttccgtgaagaaaatccaagccgaggcgcttccgtaacgtttccgtgagtgatttcgcgaaggtttttgaccgttcttcgacgttcttcattcgatcttcatcgttctttggtcttcaacgggtaagtacctcgaaccaagcttctcgattcattctatgtacctgtggtggtccacattgtgtttcgcgtattttccttctcggtttcatttactttccgcacccattttgacttgcttaagccattttatttaagtcatttctcgcttaacctaaaaata

SEQ ID NO: 214624 - DNA, 388 bp, Glycine max
  unsure (1)..(388): unsure at all n locations
agcttaattgtattatatatccttctattttttttagtnccaattataccgatcaactcttagtaaatgtatggatttactctcccaaatcttatttgttctaattgaattttcttaatattattaattgtgcaattttagtccctcaaatttttataatgctattattaaaactatttttttagacaaaatcacacaattgtgataattgaagactaaaaccttaccattacgatagctggggaattcaattagcaaattgaaatacatgaggactacaattgcataacttaaaggagcttaattaacacaattgaaacataagagactaaaatcacacatttataataactattaaataaaaaaaatacaattaaatcaaaattta

SEQ ID NO: 214625 - DNA, 341 bp, Glycine max
  unsure (1)..(341): unsure at all n locations
gangggtaaagtctcacgattgacacgtgctcatgcttttatagatagcccgggctatacgagacatcttgccaaacaaagtctggttagccataactcacctgtgctgtttcttccatgctatatgtagcaaagtcattgatcctgtgaagattgatgagtcggaaaatgaagctgcaattatactgtgccagtcggagatgaattttccccttgctttcattgacatcatgattcacttgattgtgcatcaggtcagagaaatcaaatgttgtggtcctgtttatctacggtggatgtacctcggtgagcgatacatgaagatcttaaaagggtataat

SEQ ID NO: 214626 - DNA, 434 bp, Glycine max
  unsure (1)..(434): unsure at all n locations
tcggattcttcttctgtcgacaacgcctgtcttcttctttcctcttccctccgcgtccaagactcctctgcaccactcccaccccataccctctccaatacgaactcatcatcaaccgtccttcttaccccgactctccccgcccaccacctgctcgacctattgactcccctgaacccgaactcaacaaggcccagaggaagtactacaacaaacgcagaaagaggatgtacggctccgacgaagatgaatcccgacgccccgacgagaccttcgtggagttgaagcccgaggtggtggactttcccactctgcacaagagggaggaagagctttacttctatgacgcctttacttatccctgngagaaggacaagcattacaagatggtttaccagctggagaagaagtactttcctgatcaatgcctcgac

SEQ ID NO: 214627 - DNA, 375 bp, Glycine max
  unsure (1)..(375): unsure at all n locations
atggaatacctactggttggtgatgaataaaagctctttcggaatcgaagaattcgaaaagtagagatcctaggggtgcaaactcgtaaattccgtgggtatggcttttgaaaggggggaaaagaagtttttgaatgcaaaaatgtcccccctttcgtcacttttatattttggtgcaggggttgctcgcccaggcgagctaacctgcactttnttttttttgaggggaacattaaccatgtcccctcctttttcacgggttagcgtttatctaacttgaacctacttaagtcagaattaggcgtcgattacttattttaaaacaaacatatagtaaaagaaaactgtgaatacaaaggatactgggttgccttg

SEQ ID NO: 214628 - DNA, 249 bp, Glycine max
ctctcaccaagggagaacaagttgcagatacgctagaaatgacaaacttctgaaccagggctgatgcttcagagacacatatagctcataacacacaacagagagagtgatatgcaaacatgcgttacccgacaaaggcctttcaattgccaaacacgaaagaatgaataataatctaaaggaagaataagactagaatactcaatgtgacaaataaaaactaaatggaagtataagatcgtcctatat

SEQ ID NO: 214629 - DNA, 456 bp, Glycine max
  unsure (1)..(456): unsure at all n locations
tgtatgtgtatgaagttcttgatgagtgccntgtactttgcaacacacgattacttcaagtcagagttcaagatcaagaaaacacgatcaacagaaaaatcagacttaatttatttttgttaaaagaatctcttattggttgaaaaggtttggcctcaaaaacatgatttcaaattattacaaaaagttttaaaatattcttatcattgctaaaataagtatttttccactggtaatcaattaccaaacattgtaatcgattaccaaagacatattaccacaaatgcttttcaaaaaaaagtttgaaatttgaaatttaaatgatgtaatcgattatcactttcttgtaatcgattactagtaacgaaacttcagaaatcaaattacatagtctaacccctcaattgtaattgtgcatcgatacccacattgtatcgattactgagacagatacta

SEQ ID NO: 214630 - DNA, 451 bp, Glycine max
ccgcttcaacttgatgcccctgtcaatgtgtagaagaattggaatattgaagatagaccctacgaagatgacgctccaactcgtagattgatcaatcataagaccacacggggtagtagaagatgtccttgtcaaagtctgcaactttacttttctggtggattttgtcgtcatggacatagaagaagatacgaagattcctcttatcctaggtagacccttcatgctgactgccaactatgtggtaaatatagtgaatggaaatatggaaatgagcgttgacgaccaaaaggtaaccttcaaactttttgaagcaatcaaatacttagaggaagataagaggtgcttcaaggtggaggaggtcgataaagaagacgttggtgctctttcaactacagaaacttcactggagaaagctttaatcaatgttgtagattgtctaaccagtgaa

SEQ ID NO: 214631 - DNA, 427 bp, Glycine max
  unsure (1)..(427): unsure at all n locations
gtgagttcattntctatggttcagataggttgttcatgttcttgaaccatgagttgtgttgagtttaggttcctttgagttttgtcttgctattttttgttgctgaaccctaaaccataaaattcttacaaaataaagtagaagaaaacctaaaaaatctagattgacttgttcacgtattgtagttttgtcatagaagtcatgtctagtcatgaaacttgtcacataagatttcttatgttgtgctgaattttattttcttgtttctttgtctaactcatttgttcatgagtgtatgaaatttttttagcctattatttgatttgagtcaaatctttcatgttaattagtccttacaatgttcatgcaaaattcttagagagtctttgattgtgaaccttttcttgaacttttagggttccttatg

SEQ ID NO: 214632 - DNA, 431 bp, Glycine max
  unsure (1)..(431): unsure at all n locations
tataagaacanaatngcctaaatcatttccaaatatgcatgtgaattaggaagcatgaacaagaattaagccaaggctattgtgcaagcaatcaatggggcaaaacacaccaaaagattatgatgatggatggctcaaattctcacaaaggtaagcttatcactttcaaattgagctttcaaaactatcatgacatgtagaggaaaaacaaggatttcaaatcacacaatgtcaagagacttttattttcagaacaattaccaaagcttgatttgtgagttgattttagccttggtttcactttgattattagtcaattaattcaaggaaactttcaaagaaaaacgtctgaatgattnttcttgattattttattatttctttcaagatattctgattattttattattaatttgcgtttttttggtaaa

SEQ ID NO: 214633 - DNA, 469 bp, Glycine max
  unsure (1)..(469): unsure at all n locations
tgtgcaaatcanatcactcctacatctgatctctagcatgcattttctttctttacccactcctcacgtgtggttatttagggaaaacactataactaaacgcgccgcaagggatccctatcgcaccagatccaaatctagaacgatgggtgatcaagaggagacacaggaacagatgaaagccgacatgtcggctctgaaagaacaaatggcctccatgatggaggccatgttaggtatgaagcagctcatagagaagaacgcggccaccgccgccgctgtcagttcggctgccgaagcagacccgactcccttggcaactacgcaccatcctccctcaaacatagtaggacggggaagggacgcactgggacacgatggcagccctcacctgtgatacaaccgagcggcttacccttatggattgccgcccaactattcaccacccgtcttgcaagaagatgcgggc

SEQ ID NO: 214634 - DNA, 403 bp, Glycine max
  unsure (1)..(403): unsure at all n locations
ngngtgtgttntctagagagcaactaagtgaaatcgctattgtgttggagaaaagtgaacaacggttgttatgggtagtgcgaaaccccgttagcgaccaaaagcataaccttgctttgggaacacaagaggaccctgatttggaatctttgctaccaaagggtttcttggacaggacaaaaggaaaggggttggtggtgaaaaactgggtcccacaagcagcggtgttgaatcatgactcggtgggtgggttcgtgagtcactgcgggtggaactcggtgcttgaagcggtgtgtgctggggtgccattgattgcgtggccgctttacgcggagcataggttcaacagggtggttctggtggaggaaatgaatgttgcactgtggatgcgtgagtctgcagt

SEQ ID NO: 214635 - DNA, 341 bp, Glycine max
cgaacttcgtaaacaactcagggctaactaatttgagggagagaggggacataaacgacaaagggttccgtggtttgatgacctactaacataagataagactaacagtgacttgttactatacagtgaaaaaagataatatgtaaacaactccatcatactgcatgccatccttaggacacagactaccacaattggcaattgcaactcattgaccctatatctaagaggataagtgggtctccaaacgccatagcttacctgtagacactcataggcactaaatactaagtgagcatgttcatgagagcctcatatgcgagtaggatggatgagaatca

SEQ ID NO: 214636 - DNA, 215 bp, Glycine max
  unsure (1)..(215): unsure at all n locations
actctatcggacattcgagtcaaagactgattgtggtttgtattcgctatgagctactgccttcaactgtgagcctctcgatatattacaggactcaactgagtatcacaagtaaaaagatactgtcgttagaattcgctcacagcttctatgttcattnttgagcggctcgatgtcttactagactcaatgggacatccgagtgacgagcaata

SEQ ID NO: 214637 - DNA, 428 bp, Glycine max
  unsure (1)..(428): unsure at all n locations
ggagcatacgaacttgataaagtactgggtgttggtctttacgnnncttgagctgaaagttntactgaattttctaaacatctagaaaacaattataaaaaaagaaccaagcgatttggattaaaggaaaaaataagaaaaatcgcacaagttggcagaaaaatcagtgtccaggaaaaaaaaaagtgaaaggaaagtgtgcttgttgttttggctcaaaatttgttctataattggtgcctatttgataccaatcctagttatgaaatttaaattgaaaattattgtgaaaacaagtgtcaaaactagaggtttcttgagtctttgttttttagagtctttctactctactctagagccattctaggtttctctttgagtcctagcttgcttttttgggtttttcattgctttaattggtgaataat

SEQ ID NO: 214638 - DNA, 423 bp, Glycine max
cctcaacgagtgcttgaacaagaacaccctcaagcctttgttcatcctcgttgatccaatcttcaatgctggcacaactctttaatctctatcggcgacaacctcgccttggttctctcgtcggacgacgagaccaatagcaacacccattggtttcttagcctcttcttttttatcgatcccccctttctaagtcattcttgtcttgaacaaagacaagatggaaaaaaagagaaacaagaaagtcgttaaataaaccgcacaagagaagaagaaaggacatatttggaaaaataattcttaactaaggtataaaattaacagttggagatatatttaacaaatgttcaaacctagaccgacttcacttgagcatgagcacgacgatgaggccgaatgcgtcccgattttgacgggaaaaac

SEQ ID NO: 214639 - DNA, 469 bp, Glycine max
  unsure (1)..(469): unsure at all n locations
ngaagcaagtgtctntggtaaatgtgtaagtgatgaacttttattggagaaacttaggttcttttcacctaaggaattgcattgtattcttctccttccaactcacctttagaatccacattcttatttaggtaagtctgtatgttaatcatttgatcatgttccccctcctttacattatggtgcttattttctcatctgtaggtatatattgtggcatggttgtcaaatggagggaattgcaaaatgatgagtgctaacttgctgtccactgtgctccagctaatcctcatgattggcgtgttaatttgaaaacacaatcacagataattggaatcagtattataagatcacaataaagattttggacattaaaaatatttatcatatgttaattgatgttaatatatttggagattaagacagccaattatgtctctctgttaattaattagttcacacgaattat

SEQ ID NO: 214640 - DNA, 466 bp, Glycine max
  unsure (1)..(466): unsure at all n locations
cgtcgttctcctaattntcacttaaagaatgtgatccatgtctctcttcatattcaggtacatagtcttcatcatcatcgttggccttctttntatcctttttcttagcttttcgaattttatccttgaaaatgatggccaatttggacaaccctaaaacttttatttttttcttgattctctgtaattatttgcattctaagttccttgtacttggaagcttcaacctttgacattattttctccttcttcactatgagggaaggtaacttctttgtgtgggtgcttttggtttggtttagacgcactangtgcaaggttataggtgagttntttttataattattttttaaacaacttgttgagagaattgatgatttactaagagagtgggtgagagaggttaattaataatggcgaagttataactttcttctttatctaatcgatccaaataatattccac

SEQ ID NO: 214641 - DNA, 468 bp, Glycine max
  unsure (1)..(468): unsure at all n locations
ancgcttctagttgaagcttaaccttgttaaggtcatattatgcatgtatgcactagtttatgtccaaatatgaacgttgatgatctagcattacactatcaaattcatgtgtaaagtgcataatgaacccttgatgacattttcttgtaaatgtcttaaagccagggcacaagtagcacaaacctaattttatattgatgactctagtgcattatattaaaagttaatctttccatgtcaattattaggtagacactttcggaaattttttaattcatttagaaaatcctaatatgaatgaatttaatcaacaatattatgtttgtacttgtgcaggaagacatgcatgaaaatgtgttaactccaaagctagtcacttggatgaaacagatcaatgaacgggtggtacagattagcctgaccaatttcatatattggaatgctcatacctttgctctaactgaatc

SEQ ID NO: 214642 - DNA, 416 bp, Glycine max
  unsure (1)..(416): unsure at all n locations
gcgganttggtcttcgatggcgaaatgatcgatgtgtttctaaaaagaggcaaatctgatcatcatgctttgataaatggaaaaaaaaaaacaggggcaagtgaagagggtgagaatgagggagaaacccatgatgtgactatcattcctatacaacctagtttcccaccaacccaacaatgtcattactcagccaataacaaaccttctccttacccaccacccagttatccacaaagtcatccctaaatcaaccacaaagcctgtctaccgcacttccaatgatgaacaccacctttagcacaaaccaaaagaccaaccaagaaatgcattttgcagtgaaaaagcctgtagaattcaccccaattccggtgtcctatgctgacttgctcccatatctacttgataattcaatg

SEQ ID NO: 214643 - DNA, 448 bp, Glycine max
  unsure (1)..(448): unsure at all n locations
tcccttgaaggtaggtcactttcacttacgatgttcagttcacaccaaagatcgtagtctactagctgtcatttatctttagtagctgtcaagttcttgtgaagtcaccttgttctaaaagttagaataaaacattgtgatattaccagagactgaggggagtaaatttagaccatacaagcagcaattgatggttaggattaaaattaaaagttatttaatgatcacgtaatcacttaaaatcatatgactttatgttttagtcttaagcttttcttgatttgattcaatggccatgattcactcctctcactctcataataaaaaccctctttctatatatatatatatatatataaagagagagagagagaggaagcgtaccangtgagaaatgagagtgagatgaacgaatctcaactacatgtccaactttgacatggctatt

SEQ ID NO: 214644 - DNA, 458 bp, Glycine max
  unsure (1)..(458): unsure at all n locations
tgaataagtgggggcacctaaatgatgagagcactgtgttcttgggaagccacttagcaagtgcaacagtacagtccaaaccatatgaacctgagtacctgacccatcatgagcactatgcaaacactgnggacatgggtgggtcccactacgagaagagaagattaaaatggtgaaccccacctcctcatctcatcatcactcacagtcactgaatgcttcctgcataaggccgactaattgctgttgtgcaacgtctgcaccgtgcatgctagtggcactggcagtgtcttaaattacatggaatttaatttttgaagccttccatggaattggaatttattctcatgccatgtttatatctttctcaatcattgcacccactcttgtctgccgactcgcactttattctgacgttctactataagcgttattctttgttcgatcttaacaagcaa

SEQ ID NO: 214645 - DNA, 462 bp, Glycine max
  unsure (1)..(462): unsure at all n locations
tagtaagcgtcgtacttgtgttacttaaggatgtgcttattttgcaacctaagtgggagattgagaatcttgtaggtgtagtactcatagaaacctgtaatcgtagtttctgggagatgtctggtatatagttttttaagagtatagagtagttaggaaagttacgagaagtagttaggatgcctagtgtaaaaccttaagggaatgtaaggtcgttagtagggcgttgctctgttgaacatagaggggtttaagagtgagtgttcttgtcaaaggtagatggcctaaaggattggtgatgatagttgtatgattaatgaggtggatattagtgagttactgccaataggggaccaaatattcttgtacaactttttttaccaaaacagaaaaaaaaacattatatacaccaacatacatatcccccattattntcataaacatacaattntactattcata

SEQ ID NO: 214646 - DNA, 444 bp, Glycine max
  unsure (1)..(444): unsure at all n locations
tcatgatgatgaatcaagttgattcaagtagttctgtttatgacaaagatgatgacagaaaacccacagaatgatttgaagattgagtcaacaagttcaagtttcatgagaagaaatcaagaagattcaagaatcaagagaagtttgatttcaagattcaagagaagatgaattcaagtttcaagagaagaaatcaagaagacttcacaagggaagtattgaaaagatttttcaaaaaacaaacatagcacagttttgtttttcaaaagagtttttctcaaaattttctaagttaccagagtttttactctctggtaatcgattaccagnttcctgtaatcgattaccagtggcaaagtttgatttccaaagcttttaactgaatttgcaacgttccaattgattntaaaatggtgtaatcgattacaatatattggtaatcga

SEQ ID NO: 214647 - DNA, 441 bp, Glycine max
  unsure (1)..(441): unsure at all n locations
ntatatagacttcagagctgtgatccgttaagagatcccaactagctgttgtctaatagcttgagcgttttacataaggcgcattactctgcacagagagaatagggaccacaaatatcttcagggaagtataccttgctagtgtcgccttgtgcttagagctgactttcagcgtacaattcgaatacaacgttaacaacataggtcaaaaggaataaagaatgtcaagacaagacaatttaagactttcctcttgtgcactattgcacaaattgcttactaaaccatatatggacgttactttatgatgattactttcagtacttgaggattgagtaactcttgctaaacttgtagcttaagcatgaaaggttaacaaataaaatttatactttgttaacatcaaaaccttatggactntactatttggcatagtccaat

SEQ ID NO: 214648 - DNA, 453 bp, Glycine max
tcctagatagcaaccatcaaccatctgttatatccaagtcttctttatcattttcactattattagtttattacataaattctatttttggaaattaagtatccctccaagaaagccctaatgtctatgttcagagggatttttttggaatcaacacttagcgccgctatttggtttgctatggccgctacactaaatgttccgctacggcagtcccagcagcgggcatggaccactctgcaccgctatagcacgctatttaaaacactgcaagatacaaaatgattgtatgcaaggagatattgatgtagcacttatcaaggaaaagatgataagaaaattggttaagatggcttctacaatacaaaagaggttactgaagacactagtgaggcgggtagatatagcatgaattttaatcctctagatggagaccaaaacgaacatttgaag

SEQ ID NO: 214649 - DNA, 455 bp, Glycine max
  unsure (1)..(455): unsure at all n locations
tgtagaatggctagacatgatacatgtcagggttcggtttgttttaaggataaaagggatgccccacattatttccatgacacaaatgcaaaaatgatgatttggaaactttatgcaaaactggtcatgcatgcacctatgtggacactcaagtgtcaaatttttatggtcatgtgatgctagggctcaggattcatttcctctattttagtcaacccaatgtttccaaaatatgttcttttatccatatgtgcattcatccgagtccattttgggcgtccggngaaattttcacagcattcacccttcaggtgtatacacatctttcaaaaactagttatgattagtgtaattttttcaaagaaaagttggaagtcatctctcttcaaaagcatgttggtttttcagctagacaacttattattctattttttctctctatcttcctgtgttta

SEQ ID NO: 214650 - DNA, 449 bp, Glycine max
tactaagcttgctccgtcaactgtatgggaagaaacagagttcttcatatcttatctcttgcacgagtacagtctacgatgcagtctctatcatcagtggcggcggcagcattatcggtgagcgtcatgcgagaggaagacgcgttgggaccttctgcatctataagggtatggaagcaataaactgcggaaagaagtactagtagtagaagatgattgttggagtggaatgagggacacttgacctagctaaagctgcaagtgtctagaggtgttggtagaatataaaatgcaaccttcatctttctactcttattgtgcttggcaaccattctaagatggttgttggaataacaatcattctacaacaatcatgtagaacgtcttggaataacaatcattctaagacggttctcgtgaaaccgccgtacaacagtaatttccaagat

SEQ ID NO: 214651 - DNA, 474 bp, Glycine max
  unsure (1)..(474): unsure at all n locations
tgctccgtcaactntatgtgaagagacacatccttcatatcttactcttgcaagaatacagtctacgattcagtctctatcatcagtggcggtggcagcattatcggtgagcgtcatgcgagaggaagacgcgttgggaccttctgcatctagaaggttatggaagcaataaactgtggaaagaagtagtagtagtagaagatgattgttggagtggaatgagggacacttgacctagctaaagctgcaagtgtctagtggtgttggtagaatataaaatgcaaccttcatctttctactcttattggctttggcaaccattctaagatggtttttggaataacaatcattctaagacaatcatgtaaaacgtcttggaataacaatcattctaagatggttttcatgaaaccgtcgtagaacagtaattttcaagatgggtttttgaaaactgtctttgttgaccatcttata

SEQ ID NO: 214652 - DNA, 456 bp, Glycine max
  unsure (1)..(456): unsure at all n locations
tgaatccacttacccgcgctaagcgcaagggtggcgctaagttcatcgtcgcgaattcagagcctacttaaagcctgtcttgtgcaaaattagggtacactntgacacacacttttacagacttttagacaaattgtaggcagaagaaagggcatagattctagagcacaccacaatgcctattaggggaaaaaagccctagaagcatcaagaggagcaacttgtgcattgaaacctaggttttgtaagattattattgtttgggtttctttgtaatggctagctaagcaccctagttggggatttctaatgaacatctgatgtaaatacctaatatctaattgattatgttttctgtgttcaatgcttccttcaattcttaatgtttgtatgcttttggtctgatcatccattcgtgtgcatagttaggtgactttagcattgggaaatgtacta

SEQ ID NO: 214653 - DNA, 453 bp, Glycine max
  unsure (1)..(453): unsure at all n locations
actaagctgggttggacatncacccacctacgtccgcaggtcttctgttccncgcgacatatctccaggtaccactctgtggtcaacgaataaaagcaggaagtttcacccttctacacttcctcatctcaagcttgtaggattatggggtacccatcacatgtggtactaggtggcggtcgggcgatggtgcaaaacaagttttccacatccacaaatcgcgcataaacccaccatcccctattgcccacctccaactgagctcacgtactcccacgtagcccatatcctcgtttctctcaacaccgggtccccatcaatcctcccaagctttccccaacatccaggtaaaacaacattcaaacagcacanactatcacagccaagaaaacggggcaaaggcagannactctgcccaanacaccaaccanaatcacagcttttctcacttaa

SEQ ID NO: 214654 - DNA, 436 bp, Glycine max
  unsure (1)..(436): unsure at all n locations
tctggaaggagatcaactngatgttctatgcttcttgattgtggcagtccatgaggaatctccttggaaaagacatctttaaattcctgcaataagggttgaacactaggataaacataaatagtgaattggttagaattatcactctctctcttgtgtatcactccatctctcaagtgtatcactcttcctttttctattcctctgtggtgcctcactattgtctttctcttgttctctcttttcgctctttctgatttgatcatcacacacttctctgagggatagaggtttatgaataattttctggtcatggtgctggaaagaaatcttgttggtgaagccatcatgcactactttggtgtcctcttcaatgttggccctcactagtgccatctccatctccttgtcctcaacaatcaaacttccctgggat

SEQ ID NO: 214655 - DNA, 446 bp, Glycine max
  unsure (1)..(446): unsure at all n locations
tcanagagcanacaatntatagatctccctagatatcctttatcccaataataaccagcaagtggatataaaatactaggatttttttaatctgggtaaaatactaaaatgttccaaatcaagcaattttactcaaggggggaaatgccatgatgatgaactttaacaagtatcagcaaacacttgattgtacatagtgtgccctcaagaaatcagggtggttcaattctttctgattttctcgttcaggtgatttcatgatccacaaggcccacaattagagttatattattatgttaaacaaaagggggagaagaaaatcgtgggtaggtgattatttgaagccattcatgaaaattcccatgttatttgaaactgcaaacttgatcaaatcctttgagcttgaacaattacttgaatgtttaaactaaacttatttaatggtc

SEQ ID NO: 214656 - DNA, 485 bp, Glycine max
  unsure (1)..(485): unsure at all n locations
ggacctatgaaactcagcttattaagaggcttctagaacactcgagatatcttctctgtagatctcaacggtcagatcatagacaagtgtcttgtgaagtcgaagaccaaatttcgagaagatctaacggttaacgaatgctgggcagcattcttaccgaggcaactgcatgtagctttctctagaagcttcattaagaggcttcctccaaaagcttcctcgtggcttctttgagaagctttctcaagaggcttctttgagaagctagatccttatctatccacacccctcttttaactaaattaacctcgttaaaaataattacggatgaaaataacgcaacaaataatcaaacatcagacataattactaatgatatatagatctatgtatcanggaggtacacgaaccgctggccaaaccctgacagatatcatgtctagccattctactagccttgagcaaaaaatatcaacttaccataa

SEQ ID NO: 214657 - DNA, 471 bp, Glycine max
tgagggtaagttaatggcatattgtaggtgctgattagttgatttgagcctggagtataccagcagtgtttagccaacttgtgaagatttactgccaacctgtccaaagataacaggaagtgtcctattgttaggacttcagaataatgtagctaatgcttgtgccttcaggattctctactcttggttcaaaacattttctacttttaatataaacatttttatcattcccgtgaggcacgagttctttctatacatgtaatattttatcttgtaatattagtcatttaaagttcatagagaataatgttgtttagatcactgcacactgataatagagtactaaaatttgcttatgaagcaattagagtgctaaaaatgggttcctatgaatgtgtctttacatacaactatttccctgtacttgatatgagcagatcaaccagtcattcagtatattacaatcaatca

SEQ ID NO: 214658 - DNA, 471 bp, Glycine max
tcatgatgatgaaccaagcaatgttaatgatgccaaatgttctgtgatggattcaagattgattcaagacttcaagattaagcatcaagaatccaatccaagattcaagagaagaaatcaagaagcaacaagtcaagacttcatataggataagtattaaaagaatttttcaaaaaaaccaaatagcacagttttgttttacaaaagaattttctcaaattttctaagttaccagagtgattactctctagtaatcgattaccagtaagcagtaatcgattaccagtgaccaggttggttttcaaaatgttttcaaatgattcgtagcgttccaaaatgattttcaaatagtgtaatgattacactatattagtaatcgattacaagtgaatctgaacgttggaattcaaatccaattgtgaagagtcacaacttttcataaaatacattgtgtaatcgattacaccattt

SEQ ID NO: 214659 - DNA, 399 bp, Glycine max
  unsure (1)..(399): unsure at all n locations
nggaagggagncatacctcacagatatatatatgtatgtttaggtagcaagataccttggatatgcatgtatgtggcaaaaaatacctcacaatatatatatgtatgtttaggtagcacgataccttggatatgcatgtatgtggcaaagaatacctcacaatatatatatgtatgtttaggtagcaagataccttggatatgcatgtatgtggcaaaaaatacctcacaatatatatatgtatgtttaggtagcaagataccttggatatgcatatatatagcaaaaatacctcacaaaaatatacacatgtttaggtagcagaatacctcatgaaaaaaataacaaanaacaaaaagagaacccaaaatatatctttcggatgaaaagccaacatgc

SEQ ID NO: 214660 - DNA, 364 bp, Glycine max
  unsure (1)..(364): unsure at all n locations
gtagttggtgaaatcaagagtagccatttcccttatagtcctctcacggngtggaggttgtgccatgttctcacaatgttcaaaatcaaaatgttcaaaacaataatgctcaaaatcaccaataacaaaatgctcaggattctcaaaaggtactaaatgatgtctaactaatctatgaaatatcctatctatctcaggattaaagggttgtaagtcagatggattgcctctagtcatagactatattcagcatgcacaactagttgtcttctcatgcaagtaatattgtaggtttgaactacaactaccattaaatgatatccaaatgacttgaaattttgtgagcaaccttataaaatgatga

SEQ ID NO: 214661 - DNA, 463 bp, Glycine max
  unsure (1)..(463): unsure at all n locations
tgggcatagcaccccatctgacatccgcaatgtcttctgacccccgcgacatatctccaggtaccactctgtggtcaacaaacaaaagtaggaagactgactcttccacgttttctcacatcaagcttattggattatggggcacccatcatatgtggtactaggtggcgatcgggcgatggcacaaatcaactatcccatttccacaagtcaggcataagcacaccatccccagttgccaacctttaaattgagctcacgtactcctgcgtagctcttatcctcgttcctctcagcactgggtccccatcaacccctccaagctttcacaaaatccaaacaattcaattccatttgtcatgaaactaccttacacaatgaaaaacagagtagaggcagaacctttgcacaagattcattcaaattccacagagtatntcctaacctcataccttccaaaaat

SEQ ID NO: 214662 - DNA, 460 bp, Glycine max
  unsure (1)..(460): unsure at all n locations
tctagtatttatagggccaacttgatcaagtatctattgtctctaaatgaacatatttcctctcttaagtttacgtctgaagaatatggccattgagggattaaatgtgtgtattaaatgaatgtacttcttcatgtcgagaaaccgctttgtcgttggagcgttgaacactacagcaggaaaccacttccttttgcatcaaagcaggtctatgcagcagagcgctccttttaatggcgattgaggaatttcagagcttggattcatttattcttcataggatttgatagatcctaagataatgtctctggaaaatagattgtagacatagagtattagactaagtcttaaatgccatctttaatgtcttattatatcatgattctatcttgctatcatcttanacatcagacacagacttcgcgaaacatgttctgatagcacttaaaacatatgcttt

SEQ ID NO: 214663 - DNA, 471 bp, Glycine max
  unsure (1)..(471): unsure at all n locations
tccatcaagtggtatcagagcacaagagcttcaagtatgttcttcttatacctccattaattntttttgctttaccttctcttccatagttgtttcttcattttttctccatgtatctcctcatatgtcttgtgctaaatgtttttaacttgattctttagagtttccaccgattaaacttgctatagaagctacatttgattttctatggttcaaatttcttgttcttgttcttgaaccatgaattgtgttgagtttaggttcctttgagttttgtcttgttatttttgtggctaaaacttaaaccattaaattcttacaaaaatattaaagtagaagaaaacctcanaaatctagagtgacttgttcacctattgtagttttgtcatagaagtcatgtctagtcatgaaacttgtcacataagatatcttatgttgngctcgaatttttttcttgttctttgtctactc

SEQ ID NO: 214664 - DNA, 428 bp, Glycine max
  unsure (1)..(428): unsure at all n locations
taagtcctaaatgacatttcaggctaggattaactcactntaacctccatttaccacagaatccagatttaaccttccaactctcaaagcctcactctttttccactcataacaccacattctcactttctaaacctaggttaactctacccttcatctctaacagtttccataagcaatttcagcatataaacatcacaagcatcatcacaaaaaccctaaaacagaatgggtatgtctaactcatccaaacatggcaagttcaacatgctttcaacaagagtcttcacaaataactatcacgaagcagaaaactaacaaaactacccatcatatctcccaaaaccccatacccacgaaaatcaaaggagaaagaagtccacccaaacttgaaatttcgaagtcccactcgtagacacgcacttcac

SEQ ID NO: 214665 - DNA, 444 bp, Glycine max
ggcttctacattcaggagacaccatagaacgcatgttcattgttaagtagagaatatccttctagcatcaggcacctattaggaagaccagcgtgttgtctacttgtttttacgcatcatttctcgcatgatttttccctttttaatagttagtttacacatatgttcatataaatacgtctcttttcacactagacacctattcactgaaatagctttatcaggtaacacaagttcccagagagttcgatactcagttcttaccattttatactacttgtgcgatctggtgcgcttgccggaagcggaacaccttacctatattatggagccctaaatacaaggctcaaaaataatgaaaccttaatctaatatgtacaaagataagcaggctcatacttagcccatgggcccgaaatctaccctaaggctcatgagaaccct

SEQ ID NO: 214666 - DNA, 468 bp, Glycine max
  unsure (1)..(468): unsure at all n locations
tgtattaagctatgcaaggaactggatgtcaaagttgtttatctttntaatgcactacagaagagggatgactggatgaatgtttgtttcacgtaagcttctttaccttctgcctttatcattctttttttttcttccaaataccacaaaatttcagaacgttgtcatattgcaatataattgtttaatacccaaatccttcttccctagctctttgccagtatgctgtgcttgtttctttgcaagatggtataggcctgcaatcttccatcttaaaagcatactgactgatgcaatcttctggttaatttagacctgcatcagtcacttgcttgtaagttgtaacatctcttattttcctcttcacctcactggttagtggtttgcatgtccataaaattaaactattttgatctttgaaagttnggtatgacattaaaatggntcttgatactaatagataagtga

SEQ ID NO: 214667 - DNA, 379 bp, Glycine max
  unsure (1)..(379): unsure at all n locations
tgtccttcctgtgaaacgacgcgatcgttaatctctcttgatctggcgatgnatgatactcaaagaactgcgtgatcttgaagatccaccctatggcatcggaaccgttgaaccttggaacattaagcttcatccggtgcggtgatgtgtgcattcctgatcccgagaacggagtcgcatctggttgtaatggttgcggagcgcgccgatttgccttgaggtgtgacattcgttctgaaaggtacttcatctttgctacgaacgaagctgtatatttctcgaataactcttccatttgttccgatgatagaactttcgatctcatgccttgcgccatgctcaaacaaggagtgcgcagaatcaatgaaagcaccaacga

SEQ ID NO: 214668 - DNA, 385 bp, Glycine max
gggttcgaggtacttacccgttgaagatcgaagaacgatgaagaacgaatgaagagcgtcgaagaacggttgaaacctttgcgaaattcttcacggaaaacgttatggaaacgtttcggaagcgcctcggcttagattttcttcacggaaacaatttttccaagcaaattcgaaagagagagaagtgcctaaggggctgaacccttttcttcttcacttcctcccctatttatagcaaaataggggaggtggttgccgcctagctcgcccaggcgagccaggttgcttcctccagaagcaacagccatctggaggaatattctggagggcccaagtgggcctgggtgctatttgcacccccatctttactaagtacacctccctc

SEQ ID NO: 214669 - DNA, 275 bp, Glycine max
acaaaaaataatgtgcaaaaatgagtatcacttggaaacgccccttatagtgacttcttccactataggacaaatggtcatcaccaaacaaatccttccatgggagcttttctcttactagaccttcttgataatttgtttcaaaaactatctacaccactataaaaaagggcttcgacgatggtccaaagtgagatacaacgacgtttttcgcccactttagaatgtaaccttcccataggttacaaattactaccacgtgtctgaaagcaccg

SEQ ID NO: 214670 - DNA, 390 bp, Glycine max
  unsure (1)..(390): unsure at all n locations
ntcactctntgaacaaatacccctcagccaaatagaatccatcttgngcctttttcccacaactctcgtaaatgggagagaaatattcatctaaagcatacaagtccctaatattatcaaatcttaaaatttgagctcctaaggagaaaaacaatgtgtgtctcctagagaaggcatcagctaccacatttgtttttccctttttgtatttgataacatatggaaattgctctaggtactctacccattttgcatgcctcttgtttaacttgctttgccctctaatgtacttaagtgattgatgatcactatgaatgacaaattccttggaaacaaggtaatgttcccatgtttggagggctcttattaaggcataaagttctttatcat

SEQ ID NO: 214671 - DNA, 470 bp, Glycine max
  unsure (1)..(470): unsure at all n locations
ctgtcttaagctntggctacaaccttagtgtccgcctgtgtttacatcaaaaagccaaagaactcggaaatcaacatagatataacaatggagtagcaagatataagtatcagagtattaaatacaataagtcaaactcataatcaagaaataatcaaaccagaattcaaataacataaaatgtcaacaaccacaagatatccaagactgaaaatttttttaaaaaacacaagataaataagcaaagtacttagcataataatgtaaattctaagagactaatagccaaaatacacggcttataaaagataaataatcagaatcttaaaagctaagaagacggaggaggtggtggaagatcgaaactctgacgaatgtatccgacatcctcttcaagctgtgtaagacgaatgttcataccggcaaagcgtgaatctaatgagtcaaagcggtcacgaacatacgaacga

SEQ ID NO: 214672 - DNA, 468 bp, Glycine max
  unsure (1)..(468): unsure at all n locations
cctntgagaaaacttncttgagaagctagagcggagctatatatacccctctcataactaagctcacctgcttgagaagcttccttaagaagactccttaagaagctagagcttagctacacatacctctctaatagctaagctcacctccttgagatgagaagctagagcttagctacacaccccctataatagctaagctcacccccatgacaaataacatgaaaataacaaataaaaaagtgcttattacaaagacaactcaaaatgccccgaaatacaaggctaaaaccctatactactagaatggccaaaatacacggcctagacgaaggagtaacctattctaatatttacaaagataagcgggctcatacttagcccatgggctcgaaatctaccctaaggctcatgagaaccctacggcctntccttggatctctagcccaatctacttggagtcttcta

SEQ ID NO: 214673 - DNA, 463 bp, Glycine max
atagtattttgtctccaattacgacgggcgtggaaccggtgtgttcatttttgcatacaacattctaaggccgactttaataattgtcgcgtgcatgtaaaattccaaccacattgcgacagaatatggactacatcctcagacattacaccacatctcggacaagtatcatcatggattgcatgcctccgacataagaagttcctggtaaggaaagcattatgccctagttgccaaataaagaatttgacattctcaggaagagagctgtgccacgcacaactatactgtagtgtagttccaatagtgtctctactaaccaaccagtcatatctcgactccgctgaatactcactagatatataacagagcgtttgagagtgtgacaagtattcctaaaaatataacgattttgattaaaatattaaaataatttttattataattgtattattacttaagt

SEQ ID NO: 214674 - DNA, 458 bp, Glycine max
  unsure (1)..(458): unsure at all n locations
ctaagctanacttgngcttcgtcatgaggcttgatgaccgttattcctanggaattgcctggggtacccaacaatttcccaaaatgccaaaaataccctttatggtatttttggttatacttagtgtaacttgcttccgttaagggtggtttggaaacgtatttggtctccggtggtgtacgtgcgttggtgaggagtatacggtggattttggtcggttttcattgtcggagaagaagaggtacgtgaaatacatacggattgctgatccgtataggtcatacggattgtcaatccgtatggtcatatggattgttgatccgtatgatcagtatagtcatcatacggattgctgatccgtatagccatttggattggcaatccgtatgagtcatacaaatttatttatttatttaattatattataatgtgaatctaattgtaatttaattattaat

SEQ ID NO: 214675 - DNA, 464 bp, Glycine max
  unsure (1)..(464): unsure at all n locations
tcaagaaaaggccaaactcccttagaaggattgattttatgcttaaatagggggctntgttcgtgcttgcgcgcttagcgcaactctgaactgcttagcgtgcattagtgaatttcggcttagcgcgttcttttcttgctcagcggatggactgaagcggtgtgcttagcgggtggacacttcgctcagcaaacatgtacagctcatccttcttccagattcttcctcgcgctcagccgaggagtgctgcattcagtggatggctcgctaagccataagattggcttagcgaaagggtgaaaatcagcacttcacaaacttgcctaattaacctgaaattgagagaaaatgattattaaacacacaaaatggaagtactaagtatttattacctgtctttaacaaaaagtaattacaacactacaaaataaccataaattggaggagtgngatacaatttacac

SEQ ID NO: 214676 - DNA, 428 bp, Glycine max
  unsure (1)..(428): unsure at all n locations
tataaaactaagcttagcataggcaangacgatggagacagtgattatttgtttaaagcgggcggaattgcggctacgcctcgctctttcttcagccgaagcgctacaagaagctctatgcattatgaagcagcgcttcctgatctggtatcacatgtggactcacacacatgtgataacccttattaattattcctcacaaaaaatgtctctcagatactactactacacacttcatatggcacattagatgattgatataccttgcttaatgatcggtcatgcactagattgaatgaactaaccgaagattaaattgcctctgcatatgtgactacttacacgaagatacattaatcagaggaattgtctgacaaataaggagtcattatctctatttcgtagctgtgtggacatgctatattatt

SEQ ID NO: 214677 - DNA, 367 bp, Glycine max
ttgttctcttatcaagtccatgcaaaacatctgagcccattttggtattcgggaaagtccttcattattctcatccttaagatacacattcttttcaaaaaccctttttttttgtgttttggtctacaaaattctcaaaggttattggtggttgtttctttcaaaagcacgttagttttaagataaaggttggaatcccaaacaaagttataatccaaaactacaccattaaacatcaaagtgcgtgtgaaaataaaatcaaatcacgcgtaagttttattttttaaacaatcatcactacaaaataacatgacaaagctaaaataataaataagataaagacaagttcacaaatttaggagatcat

SEQ ID NO: 214678 - DNA, 428 bp, Glycine max
  unsure (1)..(428): unsure at all n locations
cgcttgatgtttgtgttgaatgcattataggtaaacagactttttcatgaaattaggtgcaaatagagctacagacgtcttggaattgatacatacatacatttgtggaccatttcatacaccttcatggaatggtcaacaatattttatatcattcatagatgattactccagatatgcgtgcctatttcttatacataaaaagtcacaatctctagatgtgttcaaaacatttaaagttgaagttgaaactcaactcaacaaaagaatcaagaatgtcaaatctgaccgtggtggtgaatactatggcagatatgacggcactaaagactgcagcttacattctatataaagtgtcaaccaaggcagctgccaaaacaccttatgagctttgggttgggcaaaagcctagtctgaaacattntcat

SEQ ID NO: 214679 - DNA, 442 bp, Glycine max
  unsure (1)..(442): unsure at all n locations
ngtagaatggctagacatgatacatgtcatggtttggtttggttcaaggataaaagggatgccccacattatttccatgacacaaatgcaaaaatgatgatttggaaactttatgcaaaactggtcatgcatgcacctatgtggacactcaagtgtcaaatttttatggtcatgtgatgctagggctcangattcatttcctctattttagtcaacccaacgtttccaaaatatgttcttttatcaatttgtgcattcatccgagtccattttgggcgtctgggaaaatcttcacagcattcacccttcaggtgtatacacattntttcaaaaactagttatgatcagtgaatntttttcaaagaanaagtggaagtcatctcttttcaaaagccatggtgttatttctttttcttggttgggtgtttttcttttnttttca

SEQ ID NO: 214680 - DNA, 412 bp, Glycine max
gacctataaaactcagctatagcttactaacatcgaaaagagcgttactcatctctttccttgattctcaattcttgcaataatgtgtccaacgagacagctaggcaagcactcattgtagctggaacatacttagcttcacatgttgattaagccactatggattgcttcttacaactccatgatattggtgttgcaccatacatgaatatgtaacctatagtactctttctgtcatctctgtatcctccccaatccgcatcagtatatcccactaattcctctgagttgccgctgtctgtatatggaaatagaattccagtattgatggtccctcttatgaaccttataatcctcttagcagttaggagatgaagaattctgtggcttttgtatatgtattaccagtcca

SEQ ID NO: 214681 - DNA, 460 bp, Glycine max
  unsure (1)..(460): unsure at all n locations
ntgcgtggttntntaggacaggccgatttctatcgccaattcatccggtgctacgccacgatagctgctccgttaaaaaaattgacaacccaagaccctttcgaatggtcagcaactgctcaaactgcttttgatacattaaagagtgttttgacttcggcaccagtattgcttctccctgacttcactatcccatatacagtggagacggacgcctctgggacgagcataggtgcggttctttcccaaaacggccaccccatcgccttcttcaataaacagtttagccccaaactccttcgtgcctccacctacgtcatggaattgatcaccatcaccgcgacagtaaaaaaatggcgacattaccccttgggtcaccaattcactatcatcaccgactatcgaagtctaaaggagttgttaactcaagtggttcaaactcctgaatagcacatgtact

SEQ ID NO: 214682 - DNA, 471 bp, Glycine max
  unsure (1)..(471): unsure at all n locations
tgctctttntgttcattcagctatatcagtgtaacagagtgtttcggattaataaggacgggagcatgcttcttatttagaaccaagcctccatacttgtttcttgtgatggagtttctctcttgaaatgattttatgaggttttaaacagtgtaaaaaattctctactgtaattcatccttatgtattctctcaatctttgttggttatgcaggtcctcgaattacaaatcctatgagtcttcgttgggcagcatgtggagctgtaactgcgagctcaagcacggctttgctggttcgtttgtttagtcctgaatgtgagccccagaatatagctgcttatgacaataaaaactaactggtgttgtcacccactttctttttcctctactgataacatcataatatacttgatgaggtaggttgcaattatctcgcatgtgtaagttgtatggtatggatgacattctct

SEQ ID NO: 214683 - DNA, 471 bp, Glycine max
  unsure (1)..(471): unsure at all n locations
cgaatatgggctcacatgtangcgtgagttgtgagagatatctcgcgatataattctacctgccccagagacctcgaacccgcttctccgtgcgtggttccggcattccaataatggccttcactttctcgggatctatctctatccctttctgacttacgataaatcccagcaacttccccgactttaccccgaaggtacacttggttgggtttagcttcaattggtatttccgcaaccttttgaatagcttacgcagattgacgaggtgttcgtcctcagtctgagatttggcaatcatgtcatctacgtagaccactatttccttatgcatcatgtcatggaacaatgccaccatggcacgctgataggttgccccancattttttagcccgaaggctatcactntatagcagaaacgtccccatagggtgacgaaagtggtcttctcgacatcttcgggtgccatct

SEQ ID NO: 214684 - DNA, 466 bp, Glycine max
  unsure (1)..(466): unsure at all n locations
gctcactgcctgnacaagagtggactccatntttntattgcatgtatgtgtctggtctcggcggcgcctgcagcatcacataaacttaatcaaacctatatccctttggctttaacacctctntctttcatatatatatatatataaatgtgtcctagtaccatatatgcagcaatatttgtctgctgttgagcaaaaaggatagagaaataaattaattatcctactaccctacaaatttatatcacgtgcctctgatactcgcaagattgcgaaaaacactgaatcaccttagaaggggaagattcaaataggtaacgaatgggactttacagcaggataatctctaaccattcataaccttatgtttctgacgtanaagataaaatataacccctggtcccgaaatcattgcttgaattcttattataatggagcatatatatatatatgaagctagataaat

SEQ ID NO: 214685 - DNA, 478 bp, Glycine max
actaagctataaacaaatgcctaatatttaaaatatgcatgttattatgaagcatcaacaagaatcaagccaaggctattgtgcaagcaatcaatggggcaaaacacaccaaatgattatgatgatggatggctcaaattctcacaaaggtaaactcatcactttcaaattgagctttcaaaactatcatgacatgtagaggagaatcaaggatttcaagtcacaaaatgtcaagaacttttattttcaaaacaattacccatttcttgaacatatcctataattcaaagaaaaacatgcaaagtacacaaaattgacccaaaatattaaactaaaaatccaacgaaactaacaacattaacaaattaacacaactaacaaattaacaaaaccaacaaaactagcaaaaccaaagaacactcccccccatacttaaacaacacattgtcctcaatgtagcacaattaaaagaataaaa

SEQ ID NO: 214686 - DNA, 331 bp, Glycine max
cactatagcactctcagcgaggagatgatgcagtgggatcagtgtggtcctgactcttatttacggacatggatcctcagcccccttgccttggtgtgtcgactctcatacaactaggacttccgggctatgtgccagagcgcttccagtggagagctgctgcatgatctctatcatgaattgcatgtaaccagtatatggatcctctcattcctggagaaaagcctatggcatccatgagcgtgccaatatctgagattgttttcagcacctatagttctttggttactctatgatcacacctgatctgataactccccagagagcttgt

SEQ ID NO: 214687 - DNA, 433 bp, Glycine max
taaagtatgcccgagtcattcatccctatgagatgttgttgaagtattggcgaccagaattgccattccttggattatagggttgaaccaagctcatgtttttacaaaaaggttcatcaagtcaagttgaaatatggaagtaaccgtcttgcaaaattggggcaaaagatgaatcgagtcacatcactgcttcgtctactgccaaacatatttaggattattgatgtccttgttacttccagtttcaccttgacaaagatgtcatggaccatgttgaaaatctaaattgattcaaccccatatcctgcgtaaaaattcgcaatacttcaactgtacatcattcgcatacatccatgcttttcattggttgcattgctcattgcattctttccttgatgtgcaaattcaaaactggtagtgcttagctttactt

SEQ ID NO: 214688 - DNA, 457 bp, Glycine max
cttgagccaaaatcctgactcacgcataaaccatgacctattgtgagaatatcgatccttaccctcggaagcaaaaaaagaaaagaaggaaaatttccaatcaaagagaaagcaaaaagaaaagaaaggaaaattcccaatcaaagagtgggagaaagcaaaaagaaaagaaaggaaattcccaatcaaagaatgagagaaagtaaaaagaagaagaaaaaggaaggaaagaaagttcctgatcaaagaagcaaaagaaatatgcagaaaggtcttttgaccagacaatatctgaacaatacagaattgtcaccaaatgaacaaaaggaaggaaaggaaatcatgacctaaagtggtcttctccctttgattaccaacccaaatcctgtgcgtcggtgacttgttcgtctcgcgcacaacaaaaatagtaaaggaatatggcctaaacacactaaat

SEQ ID NO: 214689 - DNA, 408 bp, Glycine max
tcgcacatcgttcgcgtgtatgacatccactctaattgtttgaagtagaggagaccttcaatgctattacgcaacatggcggacaaaaatgggcagttaacttgaatggtcattattgtcaatgcggaaggtattctgcgcttcactatccatgttcacatattattgcagcttgtggttacgtgagcctgaactactaccaatatatagatgttgtttatacaaatgagcacatcttaaaagcttactccccacaatggtagcctcttgggaatgaagcggctattcctcctactaatgacgcatggacacttatccctgacccaactacaattcgtgcgataggtcggccaaaatcaacaaggataaagaatgatatggattgggtcgaaccatctgaccaccgac

SEQ ID NO: 214690 - DNA, 467 bp, Glycine max
  unsure (1)..(467): unsure at all n locations
tgaatntaggtctcatgagtgtgtgtttcttgggtattctacatctcataagggttacaaatgtctttctcctactggaaaactctttatctctaaggatgttgttttcaatgaagtcaaatttccttattcagatctgtttttgtcttcctctaagtctgattcacatcctaataaccccatctctttcattccctctacccgtattgttcctcaacctattgcttctctttccccctctagcatttctgttgctagtcctacttctattaatcctactacaactgattcaaattccatccctagtccttctgtccatgctgagtcctactattgatgctggatccacttctgtgcaagacaattcatcagatttgtctccctctgaagtatctaacagtgcagcattggagattgtcctacagttaattccatcctatgcagaccagatcanagtctggaattca

SEQ ID NO: 214691 - DNA, 403 bp, Glycine max
  unsure (1)..(403): unsure at all n locations
taccatanatctattntatttgcctgtctacactctagcatgaaaattctatttctatttttgagtagagatgaaggaactgatggcctagttaagcaataaaaacagaaagagctaggaatgtttggctaaaaaatttgtttggagaccggtaaagaatggggcactttgttttgatattaagcatcatgttaccatatgtttctgagcgtagagtagcttaattggctcagatacaagaaagcgtggaattccacgtgctgccataactaccatcttgttaatattacaatttatctttcttcccaactgaagaatggcaaaattcttcttttggaatgaggttttttgtatcacttacaactcattntcatgacaaaagatctacagtgtaatgtcatat

SEQ ID NO: 214692 - DNA, 432 bp, Glycine max
  unsure (1)..(432): unsure at all n locations
tcatgcatatttgtatctaagcgatccatcaaactttcctttgtcacacggnactcaaaatttcctgcagcagtaaatgtccccaaccccaaatggtcatatattaaaataactaaatataagagggtctatgttagacaacaaaaacagaattccatgtcatcaggcagatgtcctatgatggctgtcaatcaatcttgaagagttcaagtattaaaggcaaatgttgataattcttgctttgcctagattttttatttttcctctttccttttcctcaattctttttgggtttgttacattatcaatttaagagaatgaaatgcagccgaataaaagtattgcagcaagaactttgtgtttagtacagaataataccaattcaaaattatagtgtatggctctttttggacaagtggcctcataacttaa

SEQ ID NO: 214693 - DNA, 442 bp, Glycine max
ctactttggtggtaggatcaagtaccgtgttggaggggtctttcttgaggttggacctgataatgtttacaatagtgctaggttgattaggagtaagaatgattctgttcctaatgttaatatgacttgggtgtttcctgttgttggagggtacaaatacttggttcggttgcatttctgtgatattgctagcatttcgcttggtttgctttacttcaatgtgtatgtcaatgggaatttggcttatgaagatttggatctctcttacgttttgaattcgctggcttcgccgttttacgcggactttgtggttgatggaggagatgatggggccttgagtgttggtgtaggtccttcgaagaggagcatgccgcatgtcatcgatgggatattgaacgcggttgaggttatgaagttgaacaattcgcgcagtagccttgat

SEQ ID NO: 214694 - DNA, 465 bp, Glycine max
  unsure (1)..(465): unsure at all n locations
ngagaaggaacattaganaaaccaaatgcatattggggaccacgagggactacacgtggtgtccccacatttcttttcttttttctttttgaaaaataaaaacataaaaaagaggaggaaagaagagaatgcacatttcactttttaaaaaattaggacttcttctctttcactctctcctcgttgggccaccaccaggtgaacaactgatgaaccacaagcagaaccaccagcaaggtttgctatcactctctctctctctctttctctttgaatttccttttttttatacaataagggcccaccattgataaagaagtcgctcactgataaagaagttgtagccgccgctgtcttcttcagacaccgttgcaatcctctttcagcaaaaccccttcttcccattcacactctcacccatattctcacacacacaaaatataagacacaacacaacactgacct

SEQ ID NO: 214695 - DNA, 228 bp, Glycine max
  unsure (1)..(228): unsure at all n locations
tgctngagaagcttctatggatgctgaatctttgagctttatttatgtccttcaatggtgattttcaaccatggagttgtagcggaagataaaggagaagaggtgagaggaggcaccatccgctagagaataagcaatggaaggaaaagcttcaccaccaagagagtgccttggataagaagcttagagaggaagcttcaatggaggaagagaatgagagagaggggg

SEQ ID NO: 214696 - DNA, 472 bp, Glycine max
  unsure (1)..(472): unsure at all n locations
taagaaactaagctacaagatcatcctggtaaatgtgagtagcacctgtgttgttactcttccaccatcttcttctcagttttttcctcatccatattgtttgcccatctgctcctggtcataacagccttgcactcctctttcggattcttctcggcgttagctccaaagctgcttgatggtcgatctgctaattgcttagccaactgtcccacttggacttacagattttttatggcagactctatactcttttgatttgacatacagacttgcatgaattgagcaagagtctcttccaggtttgatgtttgatcatagagacttagccctttctgctatggccttgtggatggtccaccctgatctttgttgaaaggatttccagggtgatttctccattgtccatgtntgtgattatactgctggccatgctggaatctatagaatccacctgcattgaaattatatc

SEQ ID NO: 214697 - DNA, 448 bp, Glycine max
  unsure (1)..(448): unsure at all n locations
tcatatttctntntcatcatgaatacccatgtcattctgtaaggatcattaatgatggagaggaaataccttgcccctcctagtgatggagctctcgaaggccccaagcagtcaaaatagacatagtccaacatggcctttattgtgtgctcaacctttgggaacttcatccgatgttgctttctatagacacagtgctcaaaaaattgaagaggttccaccttgtgattttaagtaagccttgcttgctcggatcaaggcttttttcactcatgtggcccagaagcagatgccataaaaagatattaaatgagacattggacacatggcttccagattgtgaaacaacaaagatagaacctgtcatagtggacccctaaaggatgaaaaaatttccatgcccgcttccctacattacgacttacttcccttttcctctgatctgcat

SEQ ID NO: 214698 - DNA, 439 bp, Glycine max
tagagaggaaacttcaattgcggaaaaagagagagagaatgggagcacgaaattgaaggaggaaaagagggagagaagttgaactttgaagtgtgtctcacaagaatctcattcatcaaagttacaacaagtgttacacatgcttctatttatagcctaggtagcttccttgagaaacttacttaagaagctttcttgagaagctagagcttagctacacacacccctctaataactaagctcacctccttgagaagcttcaatgagaaacttctctgagaagctttcttgagaagattcctagagaagctagagcttagctacacacacccctttaatagctaagctcatctcttccttgagatgataagatagagcttatctacacacacaccctataatagttaagctctcccccatgccacaatacataataata

SEQ ID NO: 214699 - DNA, 471 bp, Glycine max
  unsure (1)..(471): unsure at all n locations
gacctattactactctgccttctaagctttctggantccatactgatgtaatctccttttgagcttgtaggcctangatcttcttcatcaatgaattcctttgcttcttggaagatgaatggcggcggaatatactatggaaaagagagaggagacgccacttctaggagaacgatgagtctacaagaagttcaccaccataagaggccatggataagagcttggaggaagaaagagatgaatgaagggagagggagagaagagcacgaaattttgtgctctaaatgagctatgaaatctgaagtttaatattcaaatgatcaaagttccaaaaaatgcacacacatgacctctatttatagcctaagtgtcacacaaaattggagggaaatttgaatttcaattcanattttacttgaatttgaaatcgaattngtggagccaaacattcactaattatgactagtgaat

SEQ ID NO: 214700 - DNA, 462 bp, Glycine max
tcctcgtggcttctttgagaagctttctaacacgcttctttgagaagctagatccttatctatccacacccctctattaactaaattaacttccttaaaaataattacggatgaaaataacgcaacaaataatcaaacatcaaacataattactaataatatatagatatatatatcagggtgttacaactattgcctattgtaagaaggtgttggaaaaggaccacaaatgtccatatgtaccagttctaagatgtctttagctctttcgacacctaattccctcatgtttgtacgttttccctttatgcattcaacacagacttcaaaatcagataaatctaaaggttcaagaatttcatccgacacaagtctttgaattctgtgtttagagatatgacctaagcgtttgtgccatacagtggctgaattatcttttaattttctttttgtaccatgaga

SEQ ID NO: 214701 - DNA, 465 bp, Glycine max
  unsure (1)..(465): unsure at all n locations
taggcaagnggcggagagttaggtgtttgttaatgatgtaatttaggtagngcgaaacccttccccccacccccaatcctttttttttactcgtttattttgaatgcatagcttaaatgtaaacaggtcatcctccccctccccttcattttttttttttttttgtggatttacaattgtacattgacatctggaataataattaagaaaaaagtttcttctcgcactagcgcaatagtacttttttgtctcttgacataattggcatatttagagttaactttgtgctgttttacttgactgtcataatagntgagggaagtgaaagctacccatacttttttacgtggaagtgttcaaaagtttgatagtaaagtcaatttgaagtcatgttggtttggtattcctcaagtatttctgagagtaaaattgtctaaaaaataactctctgagaaacaatgtgct

SEQ ID NO: 214702 - DNA, 369 bp, Glycine max
  unsure (1)..(369): unsure at all n locations
tgtgcattcaatatcttgatgagggtgttccatatgttctcaagactggactaatacatttgctgccaaagtttcatggtgtcgcaacaggcccttttgcgggcgagtgagacgaggctcacggttgcgcttttcaaaggaagaaagatgcgtggagtcgccaccaacatttatttgtggaaaacgttggaaaaaccgaaggaaaccggtcaaaaagaatattccaagttcgggagttgtatttacgtttgaggaaggtattagcacctctcacgtttgtctcanaggacaacaacctattttttagaattgtgtgaaattgtgttaccttaacttttatttctttnttatttttgaggtcgacaaaag

SEQ ID NO: 214703 - DNA, 461 bp, Glycine max
  unsure (1)..(461): unsure at all n locations
ngctcgtcttgctgatatttatcatgcagactnttctgatgatgaccgaggaacaattagggatcaacttgaaacttatgtgcttcaagtgagaagaaatgcttctttttccacttgtgaagatgttcaaagtttggctatgaagatggttcaaactgagaaacatttggtatttccattggtttataaacttattgagctagctttgatattgccggtgtcgacaacatccgttgaaagagctttttcagcaatgaagattatcaagtctaaattgcgcaataagatcaacgatgtgtggttcaatgacttgatggtatgttacaccgagcgggagatattcaagtcacttgatgatattgatattattcgaacatctaccgcanagaagtctcggaaaggacacttgcctcgtaattntatttaacccgctattgtagaatatgttatctctttatttt

SEQ ID NO: 214704 - DNA, 456 bp, Glycine max
  unsure (1)..(456): unsure at all n locations
cgctggattgtgagttgattntagccttagttgcactgggttatttctcatctcatntaaggagaactttcaaagtaaatttccggttgaaacttgcctttntgaggattaaccgaggttacaacataaacaattggttgaattttattttaaaggcgattaagtgagattacaacacaaacgatcagttgaaattcattttaacattgattaagtgagattacgacttacacgatcatgcgaaactcacttaaaatgaagaaaaagaatactgaaaatagacgaaatgaagatgaaaacatacaaagcaagaatgaattcaaagctccaaaatcgaaaactaaccgattgaagatcgacgaacgacgaagaatgaatgaagaacagcgaagaacgacgaagaacgttcacagaattgatcgtggaaacatcacgaaagcgttacggaagcgcctc

SEQ ID NO: 214705 - DNA, 472 bp, Glycine max
  unsure (1)..(472): unsure at all n locations
tngaaccatttgaacttcattatgaagtttcattctcagagtcttgctcttcatcattatgatgcaaactctggtgtagctntattctagaagctctctttgtagtcttggatttgtcttctatgtaaggccttattgtcttgtacttttcaagctcaagtactcagggggaaacattattcatcatgtagatgggcttctaaggctcttactcttgatagtagtactaagataatgataaatcataatttgagtgatattttttgtgagtttccgtgctattttcatgcattttcttggcaaaactcacgtttgaacactagttttaccttgcagaagtataaccgcttaatcaagtgaagaagttggaaaattcacaatttaatgaaagtttgatgctattctcacttgataacagtcatggtgcattgaccacggtcgtggtcaactcatatggacagtgacaaagtta

SEQ ID NO: 214706 - DNA, 489 bp, Glycine max
aatactcaagcttaaagtctgcccgagtcattcatccctatgagatggtgttgaagtattggcgatcagaattgccattccttggattacggcgttgaaccaagctcatgcttttacaaaaaggttcatcaagtcaagttgaaatatggaagtaaccgtcttgcaaaattggggcaaaagatgaatcgagtcacatcactgcttcgtttactgccaaacatatttaggattgtttatgtccttgttacttccagtttcaccttgacaaagatgtcatggaccatgttgaaaatctaaattgattcaaccccatatcctgcgtaaaaattcgcaatacttcaactgtacatcattcgcatacatccatgcttttcattggttgcattgctcattgcattctttcgttgaaaaataaaataaaataaaatgaacttaatcattgttatcacaaagaaaaggacacgctctacggcacccttaccgaactcg

SEQ ID NO: 214707 - DNA, 474 bp, Glycine max
cgaaggcaaactggatgcattggttaacttggtaacccatttggccttgaatcagaaatctgtacctgttgcaagggtttgtgtttgtgctactttgctgaccaccatacagacctttgcccttccatgcagcaacctggagcgattgagcagcctgaagcttatgctgcaaatatttacaatagacctcctcaacctcagcagcaaaatcaaccacagcagaacaattatgacctctccagcaacagatacaaccctggatggaggaatcaccctaacctcagatggtccagccctcagcaacaacaacagcagcctgctccttccttccaaaatgttgctggcccaagcagaccatacattcctccaccaatccaacaacagcaacaaccccagaaacaaccaacagttgaggcccctccagaaccttccctcatagaacttgtgaggcaaatgactatgcagaacatgcag

SEQ ID NO: 214708 - DNA, 425 bp, Glycine max
taacctcaatgggagcgtcatttatgcatcctatagtatgttcatgcagaatattgtaggtttaacatgtatcataagtcagttcaggatgtttccaataactcagttactgtttttaagtaccaaagccatcagaagatgaaaaacctacacaattgttaagatactaaattgtcttcttgatattgcttgcatcatataccaacttaaaccatgtttactaagctagacatccagctttggcctgagttatcttccacttcaaatataaaattaaaaaataagtcgagtatcaaggaccaatgcagatgcttttccttcacctaaagtgatatgatcatatcattcaacaaaatccttaaactaatcatggataaaatctacaaaaccacctgccttcaattccaaacatagtgtttttactg

SEQ ID NO: 214709 - DNA, 468 bp, Glycine max
tagaatcattgaatcatttattaattgagatgtttgtataataaatacttttttaaaagaagagaatgcataggagcttgttaaacttttatccttggacattatatgtagacttttagtgtaacacaaaattcaaataccaacaacaccccgatcttaagataaaactgataacatccttaagtttaggtaatgaaaataatatccttattatctttatctatacaacatcctaaaatttgaaacataacaaaaattcttaagaactagattattcattttcaaactgcagacatttaggtatttcaacattattgtcatttaaacttatatgggatttcattaccccctccccccaaaggagtaaaaattattggatttttcatgttctatgttctttcatttaaggtagcaagtacatttatctaaacacttcacgggttcttttcaattctaaattttagtgat

SEQ ID NO: 214710 - DNA, 471 bp, Glycine max
  unsure (1)..(471): unsure at all n locations
ctttccttcgatggctntgcaagggtttccaagcgttagatataatgataagagattgaatcctcaatttcactgtctacgtgcaaggggcatttctccctcaaaatattatttcctaaatccttacggtgaggatgtcaaaaattgattttcgaactaggtgttcaaacttcacgatgatccaatggttaatgagtctagaatcatagtcttactgggacaagtttgagtgtgtgtgaaaaaagagagctacgtgcgagggacatttatctcaccatagactttatttcacaaataccaattgagggaatgtacaaaaatgaattccgaacctagtgttcaaatttcacaacgatcaaacagttaacgagttcgaaatcgtagttttacaattacatatttgagtgtatgtgagaaaaagatagggtnttgaaacaacgaagaagaaaaaacgaatttaatatgaagaga

SEQ ID NO: 214711 - DNA, 467 bp, Glycine max
  unsure (1)..(467): unsure at all n locations
tgtaggtaaactagatgccttagttaagcctggaactctttctggccatgaataaaaaatctgcacttgtcgccagactctgtggtttatgctcatttgtcgaccaccacacagacctttgcccttctatgcaacaatctgaagcaattgaacagcctgaagcttatgctgcaaacatctacaacagaccttctcaacctcagcagcaaaatcaaccacaatagaacaattatgacctctccagcaacaggtacaatcatgggtggaggaatcatcctaaccttagatggtcgaatccttcacaacagccgcaacaacaaccttattttcaaaatgttgctggcccaagcagaccatacgttcgtccaccaatccagcagcaacaacagcaacagtcgcagaaacagcannacagtgaggctcctccgtaacctatccttgaagaactcgtgaggcanatgactatg

SEQ ID NO: 214712 - DNA, 449 bp, Glycine max
tggaaatcctccttgagtataccctagtggctattgatttcccatataacgaatatcttgagtgttttcttcagtgggaatacattggcctgtttcatgagcctcaccacagatggtacaacctgtgacctgcaaaacagaagaatgcgttggttgacccatagagaacttagttggcagcttaccgagtgtttctgttaaaatctcaagttgcttagaaagcaacttgttctgtgccaataaagcgtcatgtgatgatagctctatcaagcttttcttcgtgggttgatgggttctgtctcgtagaatggcatgatcactggctgacatgttctcaattagctcagttgcttcttccgaggtcttcagtcttatctttccgcctgcagaagcatctaacagttgcttggtttgtggtctcagcccatttataaaccaaatcaagtgga

SEQ ID NO: 214713 - DNA, 345 bp, Glycine max
  unsure (1)..(345): unsure at all n locations
tcccgccgngncaaaggcggcacgcgcgtgtgttaagtttctccgcacgttgtttgcttagaagcgaatcccctctggtaaattgtttgttaaacacgcgctgttcggtaaatctgccctacataagacaatattttcattattatttttatttattcttctcaactaagctaaaaattggcgttttaacactaatctatcagatccccagcgttgggtttagctttaaaattaacgaataaatatgtagatcttgttcacggcaaaaagatcttagcatatcattctatgaatttctcgagctgaattagactctttggtttttccgtaatgcatgtcatcaat

SEQ ID NO: 214714 - DNA, 429 bp, Glycine max
tcaagattaatggcctcaacagacttgttatttccagaatgaaattcaatcagtagacctccaatctttaatggagagggttaccactactggaaaacccgaatgcaaatttttattgaggcaatagacttaaacatttgggaagccatagaaatagggccttatatacccaccacagtagaaagaaccacaatagatggaagcacgacaatagaaaaacctagcgatagatggtctgaagaggatagaagacgagtacaatataatttaaaagccaaaaaaataattacatttgccctaggaatggatgaatatttcagggtttcaaattgtaagagtgctaaggaaatgtgggacactctacaagtaacacatgaaggcacaacacatgttaaaagatctatgataaacacactaactcatgaatat

SEQ ID NO: 214715 - DNA, 387 bp, Glycine max
  unsure (1)..(387): unsure at all n locations
aacaagtactgtctgaacttacctatagcttcaacaattgctaacatctctctaaattaatcagatttcttttgcactctaggcgcangttgcttggaaaaaaatgctattggatggccattctgatgtaatactgctccaataccagcgtcggaagcattattttccacaatgaagggcagctggaaattaggaagagctaacactggagctgaagtcatgactttctgcaattgaacaaatagcgtctctacctctggtgtccacttgaatgcttctattttaagtaaatctgtcaatggtgcacccagctttgcatatactttgataaaccttccatagctaccagtgaggcctaagatacctcttagctgcttgatattgagt

SEQ ID NO: 214716 - DNA, 388 bp, Glycine max
atatggttctacccaatgtacttggatgatctttatattaacgagccattagttaacaaatggttctctacagtttattagaagaaacaaattcatctctatacaagattaaaacacatgtcacagtctaataactatctatatttgtaaaatattactttcaaatatctttaaagactattaacctttaaaagaacatattgatctttaattttactatgaccttactttaaaactatttcttttcaatacaatatgtgtcttacctatctaatgcataaaaagccttactaggggtcattaatataataaatagtgatgaaacatcctaacatataagctagttcatcaatgataaagttgagaagattgacagtacaggcctttt

SEQ ID NO: 214717 - DNA, 452 bp, Glycine max
  unsure (1)..(452): unsure at all n locations
gtcacctgccgcatgcaagcctttcctctcttcccacgtagcttgtcttctttcttcttctccaccattgttgtccattgaagctccaaaattccttctgatttctactccaaattgcaaggagaagccatttttggagtcttggagcacacctctacattgtggggcttcaaatttcaagtatgggtggacttcttctcacatgaaattcgtgggtgttgtgtttttgggagatatgatgggtagttctactacgttattgccttanggtagtcatttgtgaaggaatttgttgaaatcatgctaaacttgacatgtttgatgtgagtaaaattacccatgctgatttacggttttatgatgatgctgtgtgatttatgtatgctgaaattgttgatagaacactggtagagatgatggcgagagttaacttatggttaaatgtgagaatg

SEQ ID NO: 214718 - DNA, 255 bp, Glycine max
  unsure (1)..(255): unsure at all n locations
tacctacttgctggagatgaagaaaagttcaatacggtatcgaagaanncgaaaagtagagattctatgggtgctacgatgcaaaggccgagggcatggcttctgaaaggagggaaagaaagtttaagaatgctctatgttccccctctctcactattatactgtggtgcacgggttgctcccccaagcgagctaacctgcactttttattttttgaggggaacattaaccatgtcccctcctttttcacgaatg

SEQ ID NO: 214719 - DNA, 450 bp, Glycine max
  unsure (1)..(450): unsure at all n locations
agctttanggcggatgagcgagaggccttattgtcttgaaaccaaattaagctggtatccaaccaggcctaaatagttcgattgaacacctgtacgacaagacaggatctgtggattcaagtaaaaggaccatatttcgttcacttcttcttcattgtccggatcgacagcagggaaatagtcagtgaaccaggctgggccaacctctcgactaatgaatggagcatgttggggaagaaacttgtcaaagctcaggaaaatcctcatatactttaggaacagcttttgtgagctttgatttaaagacttgggtgttagtcgaagtgctctctggccttcgatcgagcgattggcaacttcttcagcataatcttgtgggattattaattccatctcttgctcganagtggcattaagccacaactggagaagccacatatgcccagatac

SEQ ID NO: 214720 - DNA, 456 bp, Glycine max
  unsure (1)..(456): unsure at all n locations
ctagaaacatgctacaccaaaataatccaattaaatacatcttttcatcttattgttgtactaatagcctacaaaacaactaataaatagaagtatcatctgaaaggccttattaacatttctaagtcttaataaaaattacatgtagagacaatgtatttacctttaaaagtttcatattctgcttataaaatgtccaaacacaagagtagtagcctagttaataactacatagaatatgtccctcgagcttatgtatttaagttatagttatagttactctatgaataagaaactntaagaatttgctacatggaaaaatgataatttatggctatagttattaccatgcaataaaggagtcatgagagaagaagacaaggcacatatactatgtcacatacaacgaaacctaatacatctagcacgagtgaacaaatgactatgaaacgtaat

SEQ ID NO: 214721 - DNA, 431 bp, Glycine max
agcttggtgttgtgtgctgagagtgtgagtctgtcttgtatgactggtgcgtggaagggttcgagggaacctatatttatattagttgagcgagagtgttggtccttgtttgtaggggttgttgctgccttgtagataatttctgacttatagataatagttgggagcttagagataatgttagagataaacatttgaattataaataaaggtagaagatagttataccttgtagataatgtggcattatagataatttaatacccaccaatagataagatatttaaacacatttgaatattagtgaggttagagataacctgtttgttggggagcctgactattaaagctaggcgtttgcgctcctataacaaggctgatgtggagggtagacacgtgtatttgagtgccacgtatgacgccacacaaat

SEQ ID NO: 214722 - DNA, 380 bp, Glycine max
  unsure (1)..(380): unsure at all n locations
ntagatattntattacagggtattcattaagagtggatgacatattgaatgatttctatagatattctattacttagatttcaatgagacttatctctagaaaattgcttttgatcattaagattttatgaaattgtggattcatggtaggtgcatccacagtctagcatagtaaggattttgcaagacatagtgaagctggatgggctctacactatgcaacataatggtgattgtaagttgtgccatgctaatttagagtaaacttatcccgtgtcacaaccaagctggggcaggtaccccactcccatatatgatgcttgatatcaccactctatatattccaataacttcctaaaggatcatgactgactaatgcc

SEQ ID NO: 214723 - DNA, 420 bp, Glycine max
  unsure (1)..(420): unsure at all n locations
caagctgctaacacatggaagctcctatatatctcccacactntctggggtgggccattcttggatggccttgattttctcaaggtccacttggaccccatttctaccaactacaaaacctaagaaaactatattatctacacaaaaggtacacttctctatatttgcatagagggtgtttttcctaaagactgaaagaacttgtctgagatgtcctaagtgatcatctaagctcctactatacactaaaatatcatcaaaataaacaactacaaatctacctatgaaatcccttaagacatgatgcataagcctcataaaggtgcttggtgcattagtgagcccaaaggcatcactagccattcatacaaaccaaacttggtcttgaaagcagtttccactcatcaccctttttatcct

SEQ ID NO: 214724 - DNA, 446 bp, Glycine max
  unsure (1)..(446): unsure at all n locations
gtctctntcttcattntctctctctctcactattgtgtattatattgttcagcgtctcccttcgactgaacctcaacaccctttatatagagaaagtttacataacaagacaaaaccccttcagttaagaacagtaaaattactattcatttactttgtcacagagctgtcctttacaaatacatttattatagataagctcaatgtctaatctatgcaatagtaaagattactgccttggattttaactgtgtttaggcagaatacatttgtctttaactcttgggtgactttgtgatcgtaacatcttcttcgtcttggatatttccagaacagaaaatgtcagatgaatcttccattgagagatcagtanaagggaaaggaggagtttgttatccatggcatcccgtgacttcataaatcttccttgtctgttttctctttct

SEQ ID NO: 214725 - DNA, 451 bp, Glycine max
  unsure (1)..(451): unsure at all n locations
agcttatgaatataaatccttgtttgttaaatagttntacatataaaaaattagggagatgaaaatatggaaaacgctgtaaaagaaaatttgtaattctatacatttttatttcttatgcttcttctattatagctttttctatctctctttacttttcttatctcaattcacattttggctctctctctctctctctttctgtaactctctttatcactcaagaatcaatatagatatgtaattcccaaaaaaaatatagaatcattatttttcataattttttataagtcatcctctccattttttccaaataattattaattaattaacaattaaagaaatattatttcatgaagttttattnttaattttcatatcatgaatatatattcttattatacaaaatttaagattaatatattttaaactttacattaaataaatatat

SEQ ID NO: 214726 - DNA, 425 bp, Glycine max
  unsure (1)..(425): unsure at all n locations
tannttgacttatctatctcctaaatattttgcaaagattcaatatatgaaatgtatgaagttctaattntagatgtttgctttgatgcatgggcataatgcaatcattctatgtctaacaatgattttattaagatatctctttcttttagttctattagaaattatcctgtgctgagcgattaattcctaaaactgatgcatgcaaaacttttaatttcatgcatcgagtacctaacccccaaaatgatgcaaggatgaatgatgcatgaaattaaaagtaagaaatgataattaataggaaagataacacatgttgcattaataaatatgaagtatacaatacactttttaggtctactaagccttaactaagggtttagtctctcttgaccatangaggccttacactagaaaagggatat

SEQ ID NO: 214727 - DNA, 411 bp, Glycine max
agcttgtaagattatggagcacccatcatatgtggtactaggtggcagtcgggcgatggtgcacaacaagttttccacatccacaaatcgcgcataaacccaccatcccctgttgcccacctccaactgagctcacgtactcccacgtagcccatatcctcgtttctctcaacaccgggtccccatcaatcctcccaagcttccccaacatccaagtaattcaacattcaaagaacacaaactatcacagccaagaaaacagggcaaaggcagaaaactctgcccaaaacaccaaccaaaatcacagcttttctcacttaaagaccccagtaacatttccttcgttccaattctttaaccgttggatcgactcgaaaatattactgaaagtctctagtacataagcctaca

SEQ ID NO: 214728 - DNA, 455 bp, Glycine max
  unsure (1)..(455): unsure at all n locations
tccagagnttgccccaatcccgatgacatatggagactttttgccatcactgattgccaaccaattggcagtggtaacccctggaaggatttatcagtcccccttcccaaagtggtacaaccccaacgcgacctgcgcgtatcatgggggaacactggggcattcgttcaaacaatgcatggccctcaatcacaaggtccaaagcttgattgaggcgggatggttgacattccaagaagatgggccaaatgtgaagacgaatccacttgctaaccacgggggatcggctgtgaatggaattgaggtgggccgtttgcaaacgcctaaacttttaaagaacgtcataacctttaggaggtttatttttgaagccctgcaaaaggcaggcgtggcccctctcggtgggcacaagggggatccttgcttgatgcatctangtgcacaacatgatatgg

SEQ ID NO: 214729 - DNA, 413 bp, Glycine max
agcttcctcggtgccattcctgcgaatgttaacatttggaaagctagttattgagggacattactcttaaagcaaaaatggcatataacctcctcccataaatacaaacatcaatgtaaatttacagcaagcttatgcgcatgtttccttacgaacgttcacttgcggaagatatcctattaaccgaaaaaatgcacccatatacaatcaaggcagctttgttacctatattatttacacgtacttgcaaggtgtatctgttacttacatcacacacatctgcttggctaaattcacatacatgcatactccaagcatttggggtaccaaaaattgcacatgtgcacatcgttggatttctaatacctatacatacacgaacttcatgatgaatcttgactatctacacaata

SEQ ID NO: 214730 - DNA, 455 bp, Glycine max
tcttgtggaccttgaacaagcaatcaactcctctgtcataaccatgctatgtgctcgcgactggtccctttcttcccttcgcaacttgagttcattattgctaccccatagagctccgcgaaatttgttccggccatactcttccttgcgagccctcttggtctcttgttcaagggctcttgcggtaattgcattctcttcccgtaacccggcgcactccttccgaacgtgtgtagcagccaacttgaacttctccttggcgagttttgcctttcctaactcgcttttgagagcttggacttcctcgtcctcttccggtgcttcaaaactctcttcgctgacgacttttaacttggcgagccaatctaaacctcgtatgcgaactttcagccattcgtggtacccaccaatgatgccattacgaatgcctctaagctcttgatctttccttaacg

SEQ ID NO: 214731 - DNA, 421 bp, Glycine max
  unsure (1)..(421): unsure at all n locations
agcttatatattagagaatgtctttttgcttctaaccaaataaagagaaatcttaattgtagcattatctttctaaagaatntggatgttgctctaagatatatatagactcatgatacttaaaacttagaagtttatataaaatgttttaatagaaaatttctttactatcatatgagctatggacttggttaacgttaaaattgtatttgtatattttctgaataattctcctgttactagtttcataaaattaaggactctccatcattttatagctattatagctaccaagtaattgcacacagttcaagagacaagtgcgacaatcaatgtngatatatacacaaaagagctttagtttcctcctacctagtttcaacaagaaaaggcaatggaagctcatccaatttaataacta

SEQ ID NO: 214732 - DNA, 369 bp, Glycine max
  unsure (1)..(369): unsure at all n locations
tgccatngaacattaaagagtgtgtccttacctatctattcttaatngnggatggttaggtttggtaatttcctcattccttttacaaggaaagatgaaaaccatcttttctaaactgggttgttctcaacagcttaatggaaaaagtttttgactagattatcgcttccttttgggacaacgaagaaagaagtgcttcaacttactaggtatatgtagtagtatgtaccacgtggagatggctcatctttgtgcactataaaggctacttttactcccctatggttaatttggcaaaagatctcaaccacaaaatctgaaggattaataaattctaccaaacaacataagcaatgtccaaccaaaatg

SEQ ID NO: 214733 - DNA, 433 bp, Glycine max
  unsure (1)..(433): unsure at all n locations
agcttcttgcgtagccgctcttggtgctcataanatcccaaaaacaaatccctcttattactagctattttaaattctttagttcctgaatgtacaaccttcaaattgttgctcgttcccctctttgttttctgcaaaaaagaaaatcaatatcaaagaaaacatggatgaaatcctaaggatgccatgtacatgtgtatttctgaagatatagtatttatattccatcaagcatacattgactgttgattacatgtaatagactttttataacatggttgccccaaatcacaattaaaaagcacaactaccaatctttcggagtcctttgagtaattagtcttgtctccttctgtggagggggtttggttaataatattatacttttgccttccaaaaaaaacttatgactgantctcttttcattaatcct

SEQ ID NO: 214734 - DNA, 451 bp, Glycine max
  unsure (1)..(451): unsure at all n locations
ntccattattgtactanaaaatgagaataaaataaatgagtaaaaaattagggcttaaatgaagttgaaaagtaattattgaggtcaagaaaattcaaaaccaaaatctaacaagtaacaaccataactaagcaaaatgatcaacacagatgctaaataaataaataaaatcttaagcacttgtttatgcacctgaggaagaatagaacccatcaaattggcaaaaagagcagtaacaactccagttgttattatatacatgtcagctaaaatggagcttgaagcataatattcaagagacatccatctattcttagcctaaacaattaaatagtgtgccacaacaaaccttacactgcccattgcatcccatagctagaanatggtgaggagattggggtatcagagntcaactcataatatggtactaagccaacaataactgctacta

SEQ ID NO: 214735 - DNA, 431 bp, Glycine max
  unsure (1)..(431): unsure at all n locations
agctntacagcagatttagtaatgaccttcttcctataataanataacttaatgccattaacctanggaattaaaaaaaacttaatggctgagtgtaactgaaattgtggcaaccaaaagtcacccccaacagccaacaagtcagccaccatttggtcttccaaaaggctgatgcctangttgccaattgggcccttattacaacttgaactaaacctaactaaagcccttttagttgattaacccaaaacatatttttggtcagccaactttacaaggaatgggccattatttagacaaactaaacactctaaaattgagacaaagtggtgtcatttagtcctccttcattngggccatgatacaactcacaaccttggacttttctccttgaaacttgngcttgtattcaatagtatggacagcactta

SEQ ID NO: 214736 - DNA, 431 bp, Glycine max
cactatcaaactcagcttgatgcacatatggagaggttaatgaaacaacgagatgatgttctctatgataggttggatcaaatggagaatagagatcataatgaagaagaaaggaggagaagagggaatgatggtgttcctagacaaaaccgaattgatggtattaaactcaacattcctccatttaaaggaaagaatgatccggaggcctacttggagtgggagatgaaaatagagcatgttttctcatgccacaactatgaggaggaccagaaggtgaagcttgccgccacggagttttccgactatgctcttgtgtggtggaacaagctacaaaaggagagagcaagaaatgaatagccaatggttgatacatggacggagatgaaaaagatcatgaggaagcggtatgtgccggctagttactcaag

SEQ ID NO: 214737 - DNA, 447 bp, Glycine max
  unsure (1)..(447): unsure at all n locations
agtcacctgccgcatgcaagcttgtaatcgattacacatatactgtattcttttaccagagcagatnntcagaaaatattctcaacagtcacatcttttatgtggttcttgaatggctatcaaaggcctatatatatgtgacttaagacacgaatttgctaagagtttttcagaacaaaaaggtcttatcctcttaaaaagcaaatcgttttatcctcttacaaattccttggccaaattacttgtgattcaataaggaattatttgagtactcaaattgttcaatctatctctttcaagagagatttcttcttctcttcttcttcattctgaanagggattaagagaccgagggtctcttgttgtgaaagaattctaaacacaaaagaagggttgtccttgtgtgtttagaacttgtaaaaaggaattacaagatagtggaactct

SEQ ID NO: 214738 - DNA, 347 bp, Glycine max
  unsure (1)..(347): unsure at all n locations
tttcttctggctccaattcatcagcgggctttccttctgtgtccagcatcttgggatgttcccagcctttgatgacagctntccacgttctgctatccagtgatttgaggaaggccacccttcttgctttccagtaatcatagtcgcttccatcaagaactggtggcctgatcactggtcctccttgtttctccatgttcatcataatttatctccccagatcttactctgagattacgagtgtgtgctctgataccaattgaaattctgataccatgggacagaagtcgtacaggatgtctcgaccttacgcttcacaacatgcagattgtatgtgtccgtatgaa

SEQ ID NO: 214739 - DNA, 460 bp, Glycine max
  unsure (1)..(460): unsure at all n locations
agctngagagaatgcataggcaagatgatttgtttcttgaagacatcatcaatgaacacaaagaggcatagtctaaagcaaagaatgccaaggtgcagcttaggaagaattggttgatgttctcctaacatttcaggatgacaacgatagaaattagcttaactatcaacaacatcgaggctataatcctggtggtgagtataacaacatcttctagatcctttcttttatcaagataatctcactcctttctatatatagaacttagataaatgtttaatatttacaacagaatatatctcacacatgagctcttcaaaattgcgcagtatgtgataatgttcgtattgtattattggatgccttcaaagtgagaggtgactattacaagattagttctaagttataaatcttaatgtgagaatcatttatcacaatctgtacagttgatcattcgatc

SEQ ID NO: 214740 - DNA, 320 bp, Glycine max
ccctcatagaacggtgtttatttcaagacatgatgaggatattttctgtttaatctttacaaaaattatatagcgtatgatcactttgataatataccctctaaactttttaggcgatatatggaaaaaacgagtaaacaccaaacgatgatgacttgcttaattctttaccgatattttcaaatgatatgacgttaaatttcacattgtacaaattaaaaaatgaacagacgctaacttaaaggattctttttaaatgagtgttaaaacaagacatttatatctgaaataatacgtaatgtaatatgggaaaaccattt

SEQ ID NO: 214741 - DNA, 441 bp, Glycine max
  unsure (1)..(441): unsure at all n locations
agcttaagttatggctcactatatggntttctttatcctcagtctatacacaatgcagaggacatgcatcaagaatgtcaatattacattgaaacatgggttaaggaatcacaacgacaaatgtacttatgaccttacctgaatcaataagtgaaaataatgttatgaagtggacttttttttattataagtagctaactatagtttttcatgttcagggcacattggcaacttcttagtttgtgtccagaagacaatattgttagttggttatgttctttgcgtaagaagcctgatgttaacattaaggctacagataacatgtaatttttcaaattataaggcaattaatgtataccaattgtagcgtgtcaacacaataatttttatgttatatacattcacattatcttggaaactagtgcaatgaagacattaact

SEQ ID NO: 214742 - DNA, 428 bp, Glycine max
tgtaatggggccaaggacaaggtagagggaagtatgggataagtttctaaaaccctacatgaatagaggagcgatggggaataagtggaaatgaagcacaagtagtaaacccaaaccctctaatatcaacaaaatcaaccaaggcttcaatccaaatcaagtcctcaaaacaagacctcatttattcagcttcacttcttcttcttcttctttttctttttaacagtacgaatttgcagcagttgaaagtattttgaatttttaatgcaagaactaggcaatatatatataaatcaagcatggccaaaataaaacattaagcatggccaaaaatcatatcttccaatgaaacatacccccccccccccacacttattcccaaaacaatttcaaagctccaaaattccttaagggcaaggtgatatcat

SEQ ID NO: 214743 - DNA, 465 bp, Glycine max
  unsure (1)..(465): unsure at all n locations
agcttgtctcaacatcccaaacttctatttattttctctcaactcttcaattatgattataacatttgcaaaaagtgttcatcatggcacccgctgttagatatgcttggtaagcaccttcaagaccaaggaaaaaaataggggctcaaaactgaaccttggagcagtcctatagctataggaaagagatctctggcccaaagttgaccctgttgaacactaggacttgatgcccctaatattccaacaccaacaaatatttatttttcaactcaattcggttttgaaaaaatatcaatggatctaataaactatttgcttcattctgcaatccaagatatagaaggtggggccaggtatcgctccctcggatgacctagtattcactacaaataaaccccagaatttataccagaagccaactataaaaacctttcaatgatannatgataatcaatacatata

SEQ ID NO: 214744 - DNA, 464 bp, Glycine max
  unsure (1)..(464): unsure at all n locations
tctagttgaagcttaccttngttaaggtcatattatgcatgtatgcactattttatgtccaaatatgaacgttgatgatctagcattacactatcaaattcatgtgtaaagtgcataatgaacccttgatgacattttcttgtaaatgtcttaaagccagggcacaagtagcacaaacctaattttatattgatgactctagtgcattatattaaaagttaatctttccatgtcaattattaggtagacactttcggaaattttttaattcatttagaaaatcctaatatgaatgaatttaatcaacaatattatgtttgtacttgtgcaggaagacatgcatgaaaatgtgttaactccaaagctagtcacttggatgaaacagatcaatgaacgggtggtacagattagcctgaccaatttcatatattggaatgctcataccttngctctaactgaataag

SEQ ID NO: 214745 - DNA, 469 bp, Glycine max
  unsure (1)..(469): unsure at all n locations
acctgcagcatgcaagcttgtaaacttctaactcagtantttgganagngtngagaatcagaaatatgtaatgtatagatttattaagatctgatttataggaaacaaatctgatttagaggaaactaaatatcctttcattatcagtatttattgtaatgaccactatataatagagcatccgttgtgtactctgacatacagtttcagtcaattatccctttatattttctcattntacaagatctaaagaaaaacttgtccctttcatatgaactttgaacacttctaagttgtttgtatgtttaatcacacaaattttgtgatcaaaagacaccttatagcctttctccaataactgagcaacacttaacaaaaatttgattaatctaatgaacacataagatataaganataatttcaaccttgatgactttcattgaactgtcctatgcctttacagcatatg

SEQ ID NO: 214746 - DNA, 435 bp, Glycine max
  unsure (1)..(435): unsure at all n locations
tgatattngttggnggaaggttgaagatggtgttgttttaatggttgttggtgntggggaccaggaccatacctcaagttttgatgatctatccaaccaggattataagtgttgcagtaaggattatattgttattgttgagatctgaatggttgtccaggttgcatggtagaaacattagtagcttgttctgtttcttggagtgtggacatgcatttgttggatgctcangtgtacaatagatgccacacaacctttgttgattggctgccatcacattctgccgttgaccaatggctagctgtctcacaagggatgtcaattctataagtttattcttctactctgattatcaataatcatagaaacaaaaactttacttgtagtagctctggatggtgcaacaacctagaaccaaatttttggtaatttact

SEQ ID NO: 214747 - DNA, 424 bp, Glycine max
  unsure (1)..(424): unsure at all n locations
agcnttgcatactctagcaagagacttgttttattgtttgcgtngcaaaagaaattgttctatctgtgcttattactttttatcttaattaaactgttagcatttttttggttgcagagttctttgatctttcttttcttgagggtgaaactgctaaggagtggctcttctttaacaagcctagaagggcatttgaaagtttaaatagaaaacagagatcacttccggattacagtgggcatggttggcatgaatcaatgaagcangttatgaatgaacatggtggacaaaagaggttctattacatggacccccaacctcttagttatctcgagtggcatttgtatgagtatgagatcaacaaccaggattgttgtgcattatacatactatagataaagctggtggacaaaagacagtccta

SEQ ID NO: 214748 - DNA, 330 bp, Glycine max
cttaaaactacgctgaaagagaaggagaagggaaacccgtgtttattctctaccacagagggacctggagaatgtcgtgggggcaggagaccttgggacgtcaggtggggtgctttgtccaaaaccaacttgacaatcccgacccaacccgggcatagtcagtcagtgagaacctgtgatgtacctaagcaggcgagctcctggcagtcaacatataaaaggaacaagagcacaaagcaatcgcgctagtgtggtgcatgcccaggtgagaacatcgtgagacctatgggaaaaggactctggccatccaataacacgggtgggtaatct

SEQ ID NO: 214749 - DNA, 421 bp, Glycine max
agctttcatcatcaatatcatccatgttctacgagcttctccagaggatgactcagttggaaacatcgcagaccaatcctcagggtccttcgtcttcgttcgttcctgcaccaacaaccaacatgagtacggttcaccgcctaaagctcgaggtccctcggtttgatggctttgacccagcagggtggatattcaagatctcacaattctttgaatatcacgcaacacctgatcatgaacgcctcacaatcgcgtcattctacatggaagggacgacgttagcctggttccagtggatgtatcgcaattggaagttgtcgtcgtggcccgcattccttcatgcgctccacacacgattttcatcttcaacatacgaaaatcccactagtatgttgtgtaagttgactcaacaatcatcagt

SEQ ID NO: 214750 - DNA, 439 bp, Glycine max
  unsure (1)..(439): unsure at all n locations
tcgcagtttgcttcctaacaccaccaaagtaagtttatattaacgagttttaattaatatacactttcagtaattattgaaaaattagcatatgtgattaattaagtgtaaaaatcttttggactgtcagcccataagactgtttaagtgcatgcttgcttcaccttattttaaagaaaaataatagtttgttttatataaacgtgcagtcaattttgtccaaacccgaaatttcaaatattattatgattttttgattaatcatgtcatgtctaactgaaaaagaagataacaaaatttgacaaaacctcgtataagatcacgcctaacatgcacatgtctggtgaaagtatgtatataatangagcatgctcaacggggtatatttttattttggttttctggatttcttgattgagaattttgaattaagagaatg

SEQ ID NO: 214751 - DNA, 378 bp, Glycine max
agcttgaccaatcccgacccaaccttggtatagtcagtcagtgagaacctgtgacgtacctaaacaggcgatctcctggaagtcaaccgataaaagaacaaagaccacaaagcaaggaggcttgtgtggtggctggctagctatggatcttgagtgatatctggagtatggcctctggtaatcgattaccaagggtgtgtaatcgattacaaggcttaaaaatgaagacaggaagttaagatggcctctggtaatcgattaccaaaggtgtgtaattgattaccaggcctaaaatgggatcaggaaattgagagggcttctggtaatcgattaccaatgggtgtaatcgattaccaggcttataaatggagacagtat

SEQ ID NO: 214752 - DNA, 406 bp, Glycine max
tcttagtctcagctgatgaagatgaaattgtgactactttatgcacttcattaatgacaatagcatcatttctggcactaaattgctgggagtttgaagccatcttctcaattaaatttatggcttcagcaggggtcatgtctccaagggctccaccactggtagcatctatcatacttcgctccatgttactgagtccttcataaaaatattggaaaagaagctgctcaaaaatctggtggtgagggcaactggcacatagtttcttaaatctctcccagtatgcatataggctctctccactgagttgcctaatgcctgaaatatcctttctgatggtcgtggtcctggaagcacggaaaatgttttctaagaatactctcttgaggtcatcccagctcgtgat

SEQ ID NO: 214753 - DNA, 438 bp, Glycine max
agcttcagctgtggccatattgttgttccttagttcatcatactcttttcagactttgatggctatggacttgaacttctcttcgactacccgggctctttcaagctttgcctttagggcttgtacctcatcactttcttccgaagctttaacctcatcgtctctcacagtctttagatttgggagccaatccaatccttgtgttcggactctcagccacttatgatagccgccgatgatcccattactgcttcccctaagctctctgtcctttcttcacgccgcatcccatgccttgcgaactcctttgagtaccctcgcgttgtggtcaccgaaaccccgtgcgatgaaaggcgtgatgctttcgtctgatggcactcctctcatggggtagccaagctgtcttatggcgaggacgagattataattaatacaacc

SEQ ID NO: 214754 - DNA, 462 bp, Glycine max
  unsure (1)..(462): unsure at all n locations
ctttacacaaaaattcaactgagacatgctcaacaatccttattgttngntnctgtcatatagaatttgagtttacaatataattggtccttccaacaatactccactgtccaaatataaactataatatgatcaactgaaggcaacaggaacatggaaaaccatagatttataagcaagtttgattcagcaaaagccagaagcaatagaaagcatattagacaacaaaaggtacaggttaatccttagaatagtgtccatgcaagtgtcaatccagcttcatcccatactgaagatcattataaccaaccaaagacgccaccacatagtgtccatgcaactgtcaatcaggcttcagacgatgctgaagatcattgtaagctatcaaagatagccattttatatctctatattcaactcatattagttaattacgttgatacactatccatatatagtttg

SEQ ID NO: 214755 - DNA, 339 bp, Glycine max
taattcacagatgacagtatctgaaccttcatttcatgccttttgaagaccaaatgccttcattgtgaaataaaataactttgttttttctcctaaaattctgccttaagaaaattggacaattatgaatagagtgaaaaaaaaaatattgaacggattggaattttgaactaggactagagacgtccatccaaatgtatggtctactgtacattttagggaaaaagaaacaaatttgatgatgttcatgatcatacgcaagcgtacagaatgctcatgatcatcattttgacatgtcaaggcataattacaccataagaattgaatcctttttgcata

SEQ ID NO: 214756 - DNA, 414 bp, Glycine max
  unsure (1)..(414): unsure at all n locations
tgaagacaagactatacgtggtatcttctatttgtatatcaatatctctaagggctaccgtgtctacaacttgcaaactaagaaactcgtcatcagttgagatgttaaagttgatgagtacgcttcttggaattgggatgaagaaaaagtggagaagaacgttcttatacccgctcaactacctcaagaagaagctgaggaagaagacccaggtgaaccaccttcaccttcaccacaacaacaagatcaagaactatcatcactagagtctactccaagacgagtaagatctttggtgtacatatatgaaacctctaactaggccatacttgaacttggagactttgaagaagcatcaaagcatgaagtatgggtcaaggcgatggatgacgagatccanatgatccataaaac

SEQ ID NO: 214757 - DNA, 441 bp, Glycine max
caagcttggaaggcctaaaccttaggtgatatatttcaccaagggcgcagcttcgcaaaaaccccgacacccttcggcagctaaacctgtccctttcccataccaaaatagccacacaatcccatggaagtacacaccttcgaacaaaaaggaagaagaagccaccgacatcagttcattgtcggccaaggtaaccaatatcacggggctgagcggtgtgacccacagcggtcgcgtgttcgtgccccccgacctaccaattcagcccacgaacgtcaagggtaaggcaaaggtaatggaagaacaagatgataaaacgcccctcactccgaatgaggatattccggtgaaaagtcttctggagaaaagggatggttatggcaagaaagaggtgtcgctagaggaagccagtgagtttctccgcataattcagcagagcga

SEQ ID NO: 214758 - DNA, 467 bp, Glycine max
  unsure (1)..(467): unsure at all n locations
ntagttggtgaaatcaggtgtagccatttcccttagagttctctcactgtgtggaggttgtgccatgttctcacaatgttcaaaatcaaaatgttcaaaacaataatgctcaaaatcaccaataacaaaatgctcaggattctcaaaaggtactaaatgatgtctaactaatctatgaaatatcctatctatctcaggattaaagggttgtaagtcaaatggattgcctctagtcatagactatattcagcatgcacaactagttgtcttctcatgcaagtaatattgtaggtttgaactacaactaccattaaatgatatccaaatgacttgaaattctgtgagcaaccttataaaatgatgagaagatagcacacaaaatttcaaatgaaaattcaatgtctaactatagaagctaaaaatggtaagttaagaccaataagagaataatacttggaaaataaaaa

SEQ ID NO: 214759 - DNA, 421 bp, Glycine max
  unsure (1)..(421): unsure at all n locations
agcttaagtggaactagaaccgaatatattgaatgtaagcntttggatgtattataatttgggttgggcttagctcaaccttacaaaatcggattgtaaggtgaaagtagcccctctacttatatacagtattttggcaatatcacttataacacagggactgcgtggcggtctttggcgatgatgatgggctgttcatccgtgaaataaaaaacagaaacattaacaaaacaaagtgcaaaaaataaggcctggcaaattaaacagtctcagaatggcctgaaactgactaagctttgtgcgcctcagttcaaggcgcatggcactgaaaacggaggccggaaacatggccagacatgccaccaccagccggaacagtggggtgcttaaatagctgttggcatgcaaaggaagacgcgtg

SEQ ID NO: 214760 - DNA, 441 bp, Glycine max
  unsure (1)..(441): unsure at all n locations
nntaccccaagcttggcctaaatagatattctgtgtcctaccattcgattgctggctctaaacaaaccaacactatttgttggaggtttgctcactgattaaagtatgatcatctaacagaccagcatatcactcaacacttttagtcttttctctcaaggtatacaaggtgttttaagagctgagtatctttataagaatttacataaagctttacaagaaagaatgaatgaataatccgcatagattgctcttcttgtttcttcaaagcttcttctatatatagccttcatctccaagtattcgttgtctcacaagggttggattcttcactctaatatttgtctgaagtcttaagctgcgtggagaaattaatgcttgcattaaatgcacatcccttcttcatgcaaagtctatgatgatatgatagtgtgtcttgac

SEQ ID NO: 214761 - DNA, 222 bp, Glycine max
attcgtgcggaatgcattacagataccgctcgggtgacatccattgacgatgtttgttacgaattcgttaccccctagagaatctgacgattttgtgtgcatggcgcataaagataatagagcgcatgaatattataccttcgacgtttgaagatgatcttcatgctgggacaactgtgctcttatattcacccgaaagcgaactgacgaggattcatacgt

SEQ ID NO: 214762 - DNA, 373 bp, Glycine max
  unsure (1)..(373): unsure at all n locations
annnctgaaggacnncaaacacggaaagagggcagacgtattnntcgngaaaacgcnggntccgcgaacgcaaacgtcagtacaagaaggggaggacgaaccacaacanagagaggaaaagcggagaggcccgaacgaaaacatgagacggaaagacaatagcccaagactggacccggcgagtcgtgcgaaacctacacgcgagagaacgacaagacccaattgccacgacccacatcacccctagacgacgagaacaagaacatgaggcggaaaagatcaacgccgactagcaacataactgcagccacttagccaaaaagccaaccttggacgagaaacaaaccctagcaccccaaaagagccaaaaaag

SEQ ID NO: 214763 - DNA, 393 bp, Glycine max
  unsure (1)..(393): unsure at all n locations
agtcttgntgngctacaatgtgtggaggattattttattatgacggctgcatgacagagagggagagcttctgaattttctattttgctgagtgaggagagacaacagcttttggtttttttattaaaaaaagggttttctcttttcctattattttattataaactatgccacatgtctccatttgagtggagcaagaacggcccactttctcttttgattgtgactcatactcagccacaaacagtgggaaaaacctgacctttgaaacgctagaatcctgcctcgggttgcgtgccgtttctctggttctagctcctcgcatttctctgcgtgcgtcgaggccacgtttccaaagtaatcactatatatatcaatatgctcagaataaaa

SEQ ID NO: 214764 - DNA, 441 bp, Glycine max
tgaatccacttacccgcgctaagcgcaagggtggcgctattctcaacgtcgcgaattcagagcctacttaaagcctgtcttgtgcaaaattatggtacactttgacacacacttttacagacttttagacaaattgtacgcagaagaaagggcatagattctatagcacaccacaatgcctattaggggaataaagccctagaagcatcaagaggagcaactcgtgcattgaaacctacgttttgtaagattattattgtttgggtttctttgtaatggctagctaagcaccctagttggggatttctaatgaacatctgatgtaaatacctaatatctaattgattatgctttctgagatcaatgacttcttcaattcttaatgtttgcatgcttctggactgatcattcatccgtgtgcatagttaggtgactttagca

SEQ ID NO: 214765 - DNA, 414 bp, Glycine max
  unsure (1)..(414): unsure at all n locations
agcttcactctctgtaagcatagcagagaagcctttaaaggcatgactganatggtgggttagagcaatcctctcactttcttcactgagaaaatggaaaagaaaaaacaaaaaaaaaacatgttcattccataagttcaattgattttgattgcaacggtgattatggttatagataaaaagtgaataatgtgaagttataataaactacataatgaaccttggaataattaatgacaatagctgtaagtgcgatgattctgctatttggctttctactccaattttgtttggtgatgaatttcccatataaacaacataaggctgcatagaacaaaataagcttttgagaatttggcatataacaaaattgaacataataagctaaagtggaagtgtgtgtatatgtatgaa

SEQ ID NO: 214766 - DNA, 459 bp, Glycine max
  unsure (1)..(459): unsure at all n locations
tcggtcctttataccggctatgagagtaatctttggactggatttatccacaattaaagntcttcgcccctccccaagagtgtattctgcagggataaaacttatcttctctcccacaaactcagcatgtgctgccaactaaggtacactcattgggtccttaaaacccctttggttaggaattacgagtgattcatcggcttttcttttgattccattgagctatatatattagaacttttgcatgttattccatcacggattttgtattctctgagtattgaagaatgctattttgtattagttcccaaatagaaaggtactcttgaaactagcttctctatctgtggcttgacagcctagttattcataactttggagaacagagcagctccacatagttcaaccagattgaactatacatgtataataaataataaccattctgcattggatata

SEQ ID NO: 214767 - DNA, 419 bp, Glycine max
  unsure (1)..(419): unsure at all n locations
agcttgaacatagaagcatggattttgtataaatattntcatctcttcttcttcaaccagtatactcttgaaaaactagaaaatgctctcaaaacaccttaaacactttaagagaaaaagactaagcatcgatttgtatattcatctataaaacgattctagttttagtctctgacaaaaatttaaacaataaaacgcattgatttgtatcttttctgatttgtttagagccagtagagacttggtaagacaaagaatagtggttgttgatcaagcttggagtagagcttgatttgtaaaatcaaaaagtgattgtggcattaatacttgtaatttgtgagaaagtaatggaacctggtgtttaccaagaactggacgtagtctcagtggtagagatgaaccaatataactttgagtct

SEQ ID NO: 214768 - DNA, 413 bp, Glycine max
  unsure (1)..(413): unsure at all n locations
tgctctanatttacattgatgtatgtatttattttatgtggttgtatgccatttttgctttaagagtagcatcccttggtaaaactaactttccaaatgtttgccttcgcaggaaatggccccgaggaagcttgcctcaaagaggtccaggaaggacaagacggccgaaggaactagtttcgctccggagtatgatagtcaccgcattaagagcgctgtacaccagcagcgcttcgaggccatcaagggatggttgtttctccgggagcgacgcgtccagctcatggacgacgagtatactaatttccaggaggaaatagggcgccgacggtggacatcactggttactcccttggccaagttcgatccagaaatagtccttgagtttacagaggagggcgtgcgtgacatga

SEQ ID NO: 214769 - DNA, 453 bp, Glycine max
  unsure (1)..(453): unsure at all n locations
agctntaaataggctctaaattcgcgatgttgcgcttagcaccaccctcgcgcttagcgcgagtaagtggatttgagcttagcgccagttgtgcgctgagcctgtctgaagacaactgctgcacttagcgcattgatctcgcgcttagcgcacgaccttgaaattgatgctctgccagattcttctgtcgcgctaagcgcgctgaagctgcgcttagcgtagtgatgagctaagctcaactgtcacttttagcacttcatgacttagcctttttttcacatgaaatctaatggaaatattctagagactactttaaccataaaacaagatttatttacaaaatcactgcaaaataaccataaattggggaactatacaagttttggaaaatgttttcgatacaaaagttagtcatataagacgactaacanacttcccccannattacaattt

SEQ ID NO: 214770 - DNA, 460 bp, Glycine max
  unsure (1)..(460): unsure at all n locations
ctagggcctagtgagcccaactgctagggttntatgtggtcggttattgttcacgtagaaagagattatagggtttcattttcagtttttcatgttattgttcacgcggatggtactgttcacatagcaactccatttttgttttctgcttcaaattccagtttcgttttctgcttttgattccagtttcgttttcatttctgtcttctaatttcagtttgttttctgcctttgatttccttttcgtttctgttgttaatggaaggttgaatctctagtattgttgtctcttgaggattaagcatagctctctttgaggttctgttataaatattaaattctgatcagtttttccccttcaccaattattttgtatttgttgctgatattaatccatgcatgcttaatgcttgattaattgtctctattgcttaattaacgtcatgcttaatggacatgg

SEQ ID NO: 214771 - DNA, 459 bp, Glycine max
  unsure (1)..(459): unsure at all n locations
agctnttactcaagtcaatgttttctcattataaaaactatntgatccaagctgatgaaattaaggttgggttgattttgggatgttgggttgtacatctttattttttaaaatataaaaatataaaatattttttcaaattacatacatgtatttttaagaatttaaaaaatagtattatacaatcaaaataaaattcaaaaaataagaaacaaaaagtgaaaaaaaaatagttaggtcgagagtttaattaggtccaatataattgtcaacttaattaaatcaagacaagccaattctatcctccaacttaatatataattggacggaattcagtttattgggttaatttgacgcgtgctcataaactctaatgttttaaagttatttggtaaattctcttcaaatagtnnattgtcgtgatgggtttgctatgcctatgcacgtatgaaacttaat

SEQ ID NO: 214772 - DNA, 454 bp, Glycine max
  unsure (1)..(454): unsure at all n locations
tgtgcaacagcctcgtcactatacacatactgatgttgtctaaagccttctgtaacatattcaacttgacttacatcaggatcatattgagttacaatactaggcgaataatggagggaaagtgtgtcatcatctacgagatgaagaccccagcaaacaacatcgggatccagttcatatattgccatgtgcctgcaaaacacatgtaactctaactactctagaaaccaacttgctttacgtgtattatgcccctaaagagtacaatttctgagaatggacaaaaatattaatatgattaaatgatgctctttttatctaactaatgaaacacaattcatcatggaaatattgaaaactaatagtataaatccatcatttatcanattcaccctaacaatatcttattagatcagaagctttacattaacccagatgtgcacttacttcataa

SEQ ID NO: 214773 - DNA, 433 bp, Glycine max
  unsure (1)..(433): unsure at all n locations
agctntctataatcaaagcacattctccatcctgtgactattctggtaggaattagttcattttgataattttttattactatcatccctcctttttttggaacaacttgaacaggactaacccatgagctgtctgaaattggatagataaggcccacctctaataacttgagcacttcttttcttactttttccttcattataggattcaaccttctctaaggctgtcgcacaggcttataattggcttccaaattgattttgtgcatacaatatgatggactgattccttttagatcagaaatgtgccaaccaatagccgctttacgtcgttttagaatctccaccagttgatcttcttcttctttcttcaaagagtagctaattataacaagttttgtctcatcttcttccaaaaatacatattttaaat

SEQ ID NO: 214774 - DNA, 411 bp, Glycine max
  unsure (1)..(411): unsure at all n locations
ntnggttgagagatgtntttgaagatggtcaagatgattacactctgtccaaaatggatcatggtcacttgatgatttcctgtgagtccatagaaatctctggcttttatccatccaactaatatagttgggttcaccagatcttggttgtatgtaatatagtgcatgttgtcattattgtctagcagatatcaagtatgctctagttgatatttccctcttatgacaaaggacctactcacttcaccataaggctacatttaaagtaaactaatataagcaatatttatgtgttatatcatgtcatgtttatttgagaatagtcttgaaattcctaacctgaaccttaatatgaactatgttgaacatttcctctgattttctgtaatcttcatcattgcttaggcattc

SEQ ID NO: 214775 - DNA, 450 bp, Glycine max
  unsure (1)..(450): unsure at all n locations
ccacctgcggcatcaagctncagaataagaagagagattatttcttattaagcgnatttgctgatgagggtgcattgatctaagcattcaaattatcctttacccctactgcattgtttctacctaacggaacatttgtttcttaaggaataaaattttttgataatagaaacagaaaagtaaatgcatttatacaacaatatagacaccaggaacaccttatttgttgaagtgatgaggaaacaagaaatgaagataaaataattaccaagcgttgactccagtaacaccaaagagcataaaaattaacaactgtaatcagaaacctgtacaaaggttattcaaaatgggcgtaatgatacanaacaatacataactcacactcacaaaaacacaaatgaatgattacatgactaaccactacttgatacctattatcaaatttgtgtt

SEQ ID NO: 214776 - DNA, 363 bp, Glycine max
tggcatttgaagctgtctgttggaccatggttttcttattagcctttgactgagcatataccttattaccttagagcactttatacacttgacccatcttaaacttcacctattgattggtgactatctattcatttctgctggtttcgaccattgctgtgtctttctcttatcatataaaacttttaatcatgcatcataggagtaggtgcctaaagcaaagtattgactgctaaatggctgattatgtaaaatgtatgtccattagtgtttttgctaaaacatgcatatgtcgagcatatggatttccaaaccaatgtatgtattgtccatacgcatatgatgttgccatggtaactaaat

SEQ ID NO: 214777 - DNA, 416 bp, Glycine max
  unsure (1)..(416): unsure at all n locations
agcttagactgatttagattgttttggtgtcaaaaaggagctacaaagtctcgatcttgcacatggaaatttcagctttacatttttgggcctagttttgtgtttattgacccaatagtgtttttaattggggagctactattagaacaaacaccttttctattcacattaccaatatgtgctntatttttttttctttcttgaaaatacatttttcacgagaacatgattacgctgacaaaatacataatagaattatgtttccattgtttaaaaaggggtgctaaaaaaatgcacaaaacatacattgacaaaatacataatagaattatgtttctgctgtgcaatgtgaactggatctagatgggatgagtggcacgacacgatggttggttgtggtgcgagtgctacatgac

SEQ ID NO: 214778 - DNA, 435 bp, Glycine max
  unsure (1)..(435): unsure at all n locations
cgggaagacacaccaagtaagggagatattatccgcctatatatatatatatataaagactcgaaggtatctttgtattcagagtgatgcccaagatgctattagttgtatcaatagtactaaatctacctttagtgtttgctatgcaattatcgagatcttgaggcgntcaaatatatgatttaaaattgtcaaacgtgaacttagatgcaaatgaaaaatcatcatatttctagttttagcttaaaatttgaatgaaaaacagtaatattattttatttgtaggttggaaatatgggtgacaaccaaaagatgataccttgagaaggattaagaattgtgttacagcatccatgtaagcacatacattatcgaggcattgactaagttaagctttgcacatggcttgaattctaacgagagatgcaaagcaca

SEQ ID NO: 214779 - DNA, 442 bp, Glycine max
agcttaaagaggaagccttttttatcttgtatagaatcatcacaaatccatatagtacttagcatggagtcttcccaatgacactctccattttgtactgctgctttgccagacttaactatggtttcccctggttctatactaataatggaaacaaaaagattgttccaccctttttctatctgcgcaaataataatgatcatgataatactattattaatatgtaaccaggaaccttttttaatactaagagagttcgagatcgagttggagagaaacctccagagctcggaaatcatacaatttgaaaaccaatctctcctggaatttatctctgttatgcccactcaaatcgcatattttcctctttccttttccatccttcactagatcccagtctcaaataagcttcacactgcacattgatcatatatgcacata

SEQ ID NO: 214780 - DNA, 418 bp, Glycine max
  unsure (1)..(418): unsure at all n locations
gcgtctcaatatattatgagaccgaatctgcttttctcttctctgtttanaagnccaaacgggggtgcaacccatgagtcaaagttgggttctcctgctcctggagtaagaatactagaccagcccatggaatgccctatgcctagaacatcttcatatggccgaaaaaccaattttcctatctggtaacctttcaccatggaatgagtcatatacttggaataattttgtgtaccagaaacatcacgcataatctgtatcaatgaaccattaccgcacgcaagcaagcctttttgactaatatccatagtatttgcatgacctggtaagggttgaagaacctcaaacttccttaagtcccaagcttatatttgtatcttttccgcaatggtcatcaaaggccaattgaatgaatgcc

SEQ ID NO: 214781 - DNA, 417 bp, Glycine max
  unsure (1)..(417): unsure at all n locations
tcacctgccgcatgcaagctttcttgaaggacagctgagacggcatgtttatattatagtgtcgcaacctacccttcggcgggagggcgacgcgtgactctcgggatgcttgtttcacgacaggaatacgcgcggaatncccaccaacgtttatttgaggaaagcgtccgataaaccggaaaagacgagatctactaactttctagtgaaaggttctggagttgtatctacgcacggtgaaggtattaccaccctacacacccatccgaatggacggccgtctttaatcgaatgtgcaaacatgactttgatttttaagttccttctatgatctttgatcccttataccctttatatatatggtctattttgggacgacagggtgtttcctttgtcctaccttttctcatttggatg

SEQ ID NO: 214782 - DNA, 454 bp, Glycine max
tctagtattgataggccaactttgatctagaagctattgtctcttactgaacatatttcctctcttaagcttacgtctgaacaatatggccattgagggattaaatgtgtgtattaaatgaatgtacttcatgatgtctagaaaccgctatgtcgttggagtgttgaacactacagcatgaaaccacttccttttgcatcaaaccatgtctatgcatcagagcgctccttttaatggcgactgaggaatttcagagcttggattcatttattcttcataggatatgatagatcctaagataatgtctctggaaacatagattgtcgacatagagtattagactaagtcatacatgccatctttaaggtctcattatgtcatgaccctatcttgctatcatcttaaacatgacacacacacttcgcgaaacatgttctgatagcacttaaaacat

SEQ ID NO: 214783 - DNA, 412 bp, Glycine max
  unsure (1)..(412): unsure at all n locations
agcttgtaatcgactacacatatacagtgttcgtattccatagcacatantcagaagatattctcaacagtcacatcttttatgtggttcttgaatggctatcaaaggcctatatatatgtgacttacgacacgaatatgctgtgagttcttcaaaacaaaaaggtcttatcctcttaaaaagcatatcgatttatcctcttacacattccttggccaaattacttgtgattcaataacgaattatttgagtactcaaatggttcaatctatctctttcaagagagatttcttctactcttattcttcattctgaaaagggaggaagagaccgacggtctcttgttgtgaaagaattctcaacacaatagaaggcgctgccttgtgtgtttataacttgtaaaaagaattta

SEQ ID NO: 214784 - DNA, 257 bp, Glycine max
  unsure (1)..(257): unsure at all n locations
ntggagttgcctagngccaggacgccgtatgcgacgatttcttcttcatttcgctccaaaccagaaatgagctgtccgtctgtgttcaacctcttgccatgtgaacaccctataatgaccgattaaccggatctactgtccaaagatcttcagagagtcacccaccgtgccttctcggatgcatatctgatgccattaagaatggatggtattgcacagtagcacctcttctatctccatgatcatgaaaagcttat

SEQ ID NO: 214785 - DNA, 426 bp, Glycine max
agcttgagatgaggaagtgtagaagggtgtaactttctgcttttattcgttgaccacagagtggtacctggagatatgtcgtgggggtcaggagaccttggggacgtcaggtggggtgctattgcccaaaaccaagcttgaccaatcccgacccaacccgggcatagtcggtcagtgagaacctgtgatgtacctaaacaggcgagctcctggcagtcaacagataaaaggaacaaagaccacaaagcaagggggcttgtggtggctggccagctgtgaactttgattgatatgtgggttatggcctctggtaatcgattaccaagggtgggtaatcaattaaaaggcttaaaaatgaagacatgaagctaagatggtctctggtaatcgattaccacggggtgtaatcgataccaagcttgaaac

SEQ ID NO: 214786 - DNA, 417 bp, Glycine max
tcaatggctcaatgagcaaggggaaatgatagtcaatcttaaagtaatgataccctttttctataggagactactgtgatgaagttttatgtgatataatccctatggaaacaaggcatattttgttgggtagaccatggcaatttgacaagaaagcaatccccaatggtctcaccaatgaaataaccctcatccatggaagcaaaaagttcaaacttgttcccttgacaccttcacaagtggttggggatcaagtacaaataaaactgaaatggaatgaggaaaagaatagaaaaagaaaagaagaacaacttttaatggttaaggaggagtgtaaggaggtaagtgtcttctccaagaggttagttaagcagtaaagtcattttgtaatacagacaaacattaaagaaactacaa

SEQ ID NO: 214787 - DNA, 441 bp, Glycine max
  unsure (1)..(441): unsure at all n locations
agcttctacttatgtggcagggcaagcttttcttactttcttgtctccaacgcgagctctgaccactgttcttccttcccgcgatgcttcttttcatgtccgcctgagtgggcttatagcctaaaccatacttcccacgatttccttgggtttttatcaggctagttatgccgccattgtctttgcctaaacccatcccgggttcataaccgttccccaacataactcgggccatcattaccgccgcatcggacagacaaggttgcccaaagagggagtccacggaggaaatgctgaccacctcaaaagactggaaagcggnttctaacgattcttctgcggctttcacataaagcatggaggatgggcagcttaccaagatatctttctcgcctgacacgatgaccaagtgcccctccactacgaatttcagcttttggt

SEQ ID NO: 214788 - DNA, 404 bp, Glycine max
  unsure (1)..(404): unsure at all n locations
tgaaagagcccgngtagtcaaatagaagttcaagtccatttccttcaaagtctgaagagagtatgatgaactaatggacgtcaatatggccaccgatgaagccttggaatgagaaaccaagaaggcccgaaaggaagaacacgaccaaaacaagttttgaggggctttatatggcagcaatagtgagctcaagctccgaagaggtgaaaggaatcatcacgagtcaaaggcatgatctggaaggacgagctaaaggcttgccttaggtcgaaaagaaatttgtcccaatatttaaagcgagactgaagggtatatgtgggccatcatcgataagtgcaaagagaagctaaatctatctgcgactcacgagcaaaggctagaggatgagtacgctcagatatcat

SEQ ID NO: 214789 - DNA, 462 bp, Glycine max
  unsure (1)..(462): unsure at all n locations
agcttgtgaaagtgccttatgacagtatattttacttttagtaagctaaaagtttttttttttatcggcaaatatttgtttttaattattagttttttgttagcaggggaaatcgaacccatgacctttccctccctcccttctccttttaccacccacccaaccttataactcctagtaagctaaaagttataaaagggtcataagccattttcacaagctcagcctttcaaaataattttattgaatataagagcttaattatgccccttatatcatgtttgtatgacccacaaaaatgaagtcagtattgaacgtgacaatcactgaaaagtttataactgaatatatttcaagtgctaagtttcaaaggaaagcactggtattatcttaaaaataaatttgaagggggtggtattatcttanatgaggctacataaaatgaagttatttcaattaata

SEQ ID NO: 214790 - DNA, 427 bp, Glycine max
  unsure (1)..(427): unsure at all n locations
tgtttcagtctcaaataaaccaatgtagtaatatttctgtacaaaatcatggaagtaaactcaggtccacgatgaaacattaattgatttagagcaaataaatcatgataatatcaccccacacaaatgaatcacatacgttttctacaagctccaatgctaggtcctttgctgattcaccatcaggataatacaccgacccaattaaattgctgaacttatcgacaccttccaggacaagtcgaacctacataccatttggattagaaaattntcagaaatgcaaaatcatataacttatagaaacacattacttacatctcgattcaatacacgcatctcagtgaaaaatttagcatcatgtgcaaaaggatcagctgcagtttcagcagatgtngaaactgcaagtctttgtgcagatgtaagt

SEQ ID NO: 214791 - DNA, 441 bp, Glycine max
  unsure (1)..(441): unsure at all n locations
agcttatagagatgacattttccctgacttttacaagcttagaaaggactgatctttctagccaactttaataaaatctcaggaacaaaccgtcttcttgggggtgcaatggcatcgtttgcaagagcatcactatcattggaatgcataatggcaactgcaagatcaaataggtcatctttaccacctcggagcggatcctgtgcagcatggttgagaattagaacttcaataggcaaaacaaaaggatagcacatagttgaactctgacaagaaatactgtaaattagaaaatgatgaggaaagcaaagtcatagagcatatttccagttgaaacacttccacaaagatcctncatgaatctctgttaccggccaattttttttcttttctttctagttctacatatatgctacatgggtctctttttcagctatgctt

SEQ ID NO: 214792 - DNA, 438 bp, Glycine max
  unsure (1)..(438): unsure at all n locations
tttanaaaatctattgcgcttgaaaggttggtctatttatataataaattaataatacataatattatgtgtaggcccatttaggcttattggactatttaggctcattgacctagttagacttattggtttgtttataaacccttatacataaacaaattctcagatcagaccagacttttaaacagattagactaaggcttaaaaaaagatttgtaataagtaaataagttaggctcagacttagtaattatgatgtagatcaaactcaagtccgtcaaatcctagcctgacttgacctgttttcacccctctgtatcatacttcagtaaaggtcaaagctctttttgttcataatagttctgaatacaacaggttgtaagagcaatcttttgaatgaagagaagatgtaatttttttaaccttaaaattctctac

SEQ ID NO: 214793 - DNA, 444 bp, Glycine max
agcttagcgccaatagagaaagcccatttatggtcacaaccagcctcgacaacggagcatatagactacaagaactcaatggtaaagcgattccaagaacatggaacgcccccacctaaagttctgctttagctgaccaaaacttcaaacccaatgttgtactctttttcccactcaagtcttttgtcccaaaaatagaaaatcaaagatttggcttgaggggttttaactaggcacatctaggataacgaacgaaacttatacttaatcaaatacattgaataaaaattctacatcccttcttttcacatttctcttatcaagacaagagcatccatagtcgtagctctgaggcacttataacccaaaggtcgcccttggaggatatatcattaactatctctctattttatatttaaggtacgaagaaactatcatgaatct

SEQ ID NO: 214794 - DNA, 399 bp, Glycine max
ctatgcacgagacactatccaatactacagcttgcgcaacgagtatggaacaaaatgaagagtagtgaaatgtgtcttccaataaagtgcatactccaaatggagtttagcagtgatctctagagcctgactaacgaagataggtcatgtaaacactaatgcttaatatatctacaattctcagtaaagcgtcaacattttccttaaaccacatatgagttaaggtgatgaacatactattcagagagatgtctctctagctatgaccaatggatacttgttatattatatatgctctattctgtaccagattaaagatcattaatagctttggtacgctctttatcacctgattagtatatctattacacattatttttcttcttcataatgcttact

SEQ ID NO: 214795 - DNA, 456 bp, Glycine max
agcttatcaagcccagcagcctggacaagtgtatctcaagctacttttgttaagttgttcaaggtggacatgctttcggttctgcaggcgaggtataacatgtcaagtaagggaagtctctggatttgacaactctacccttttatgatcgttggagggtgcattaaagacatatgttacgttctatctcttgctacaagcatgtgcggtgcacacgcagtactcttgcatacgtgtcactcatggagtgcatacgtactatagttgtggtgcatgggtgagtggggctgcatcgtggtgcaaaattttaaggcaccacttcagctcctgccagttaccgaagagtctgtctcctcgtttaatggagggtatgtgtgattgtaaagcaccctcactatgaattcctatctcttgaatcttctatgcttcatgctacgaatcttttctcttaatcct

SEQ ID NO: 214796 - DNA, 400 bp, Glycine max
  unsure (1)..(400): unsure at all n locations
tgtgcgaatgcacgagtattgtattagttttcataaaatataatgtttgatatcatatcctattataaagttaaatgccctatatcaagttctttacttggccgtacataatagaaaaatgaataaagaatataacatttaggggttgaaaaaggcctagatcacttcatataacataattatcttgaaataaaggaccacactctcacacataacccacaaacaatgcacatatttaattaccagtccattaaaaaggtcattacaaccatagtaaacaacgacttattacaaaaaaaattgcattccattacacaagatatccgntatacatgattcaatttaggataatacaacaaatagatcaatcaacttatccaacaacttatccagcaactta

SEQ ID NO: 214797 - DNA, 425 bp, Glycine max
  unsure (1)..(425): unsure at all n locations
agctatataggagacaagtataatctgttctatcaatcctctcataagaactgaactggtccattgtaagacacatgtgaaatgagcaactcgagtcaataacccaatttggtttgactggtccctttgtttctttttcttcttgtactcaagaaattctttcttgaagtgttcttcacttccacaaatgaaacatctcatcttcttgccttctttcgatttggatcttgtatcttcttgcccttgaattctttcttttcaggcctctctttagtgaacaatccccctgcatctagatcaccctctctttttgacttcctcctcanatcttttgtaaacaaagttgctagtacttcttctaatgagagagtatccctgccatacatgagtgtattaaagacgctgtcaaactcttcggaatgatc

SEQ ID NO: 214798 - DNA, 430 bp, Glycine max
  unsure (1)..(430): unsure at all n locations
cgcttgagactgggtttaggatatagagcattttttttatatatttatnnctcagagattactttctttagttttaagaaaaacgcttaaacacgttttttaattattcttaaacgcatcttgtaaatctatggagttgtttttacacaggtcctgtatatcctgctaactatgacaatcctgagatgggatatggaggaaccacatgccctcctgattcttatagcacgcatcacgtatgtatgacactcttacaagttgtatatgcctttttatgaacgcaaatnttctgttaattcaattcaaatgcatcaaaaagacatagaagcaagttatatttggtttaattacatgtgtcaaatattccctaaaatcccagcccaacacactataagtaattatggtatcaaattacatcatgagactctta

SEQ ID NO: 214799 - DNA, 409 bp, Glycine max
  unsure (1)..(409): unsure at all n locations
agctntatcatcaaatctggttttgaactctaataaaccatgcaaatataatttcagccaaaatacctccacgaggaaggacgtgcatcccaataagaatctcattgccatatccgagagcaagaaccctgaggtgaggttaaaaaatatattcagtaaattacaaatttagaatattatgccccattcaagaggaaaaaaagaagaagacataaatgtatcattaagcccatatagatggattagccatgaacaagaaatatgaaaaagtaaatgagaatataaattggagaaggaaaaggattagagttagatactntgaacattaaatgacattntgcatacatcaaaacctagtgatattatacattaggaaaaagctctagcctaatcttatctacattcaatg

SEQ ID NO: 214800 - DNA, 387 bp, Glycine max
  unsure (1)..(387): unsure at all n locations
tgcaagcgttccaccagttactttgttcgttcatttaatatcccatgctaccttcagctcaatatatcctgtgtaattagtgttacgcatgttttattttttacccatctaattgtctagttacattcatagaatttgccaaattttcatgcggtatgtacatttatctgcatgccttatgccttgggatgcacatgctttatgtaatcaagtgattctagatgtgcgagtttgttaactctctgtcctaacaaacacaagtcaattagtaaaatatttctcccttaaaaactaacccctatttgtctttaattaatgttgtcaattatatattatatgcgagacatgctcaaattcttgaanatggacgagttgaaactaagtgtt

SEQ ID NO: 214801 - DNA, 339 bp, Glycine max
  unsure (1)..(339): unsure at all n locations
agcttgtntgtnagaaaagagagggcttttactatgatcctcgncgaagagaaaaacacgagccggattcttggcaggatcacacctatgatacatatgatcgtaaatatataattcggttgatactacactagcacctacactaattctgtgagtatcgatgagcctacaacgatctctgtatttttgatgcaagagatccatacgaactcattggttgacgaatacatatttatgaataacctcttccgaacaaagagacactcagatcattgctggattgactacacttcctattgatgatatagagtaatagtctattatctatttcactcatgc

SEQ ID NO: 214802 - DNA, 333 bp, Glycine max
  unsure (1)..(333): unsure at all n locations
gcacttagatactaagctatggttagcgctgctacgaacattactgcccctttggattgtactatncgcctanagacctgcaatacaccttagatattccagtggtagctcctgacataagtgtttaattattctatacataaacccatcctgaccctggctattgtctcttacacagatccacacaacacaccttgtctctttctcatgatatgctgactgatatcttcctctgggtcggagaataagcattcaaatagcctcccttcatgttgggtctactcagatgatgataatcgaatccactcgtttatatgctgcagaaaatcagcc

SEQ ID NO: 214803 - DNA, 380 bp, Glycine max
  unsure (1)..(380): unsure at all n locations
gacacacaacggtngaaagaatgatgtttgtatttgaagtgtacaacacaacacgaagaattcttttacagtgggtgttcccttctcccactggaaatcttatgttctgttatttaccaaaaagatgtgttcctattataattttcccaattcaaactacctaacctcctcactgaccctgaaaccacaaataacaaaatcactagcctcctactaattatttcatctggaatattccctccaaaccttattcctccttattaagagttggctcatgcctagtgcagtacgatgcatccaaatttatcacatattctccacaaactcacaaataatatacgacatgtgtaaagtcaactgtgattaagataatataacta

SEQ ID NO: 214804 - DNA, 445 bp, Glycine max
  unsure (1)..(445): unsure at all n locations
agcttganatgaggaagtgtagaagggtgtatctttctgcttntattcgcagaccacagagtggtacctggagatatgtcgcgggggtcaggagaccttggggacgtcatgtggggtgctattgcccaaaaccaagcttgaccaatcccgacccaactcgggcatagtcagtcagtgagaacctgtgatgtacctaagcaagcgagctcctggcagtcaacagataaaaggaacaaacaccacaaagcaaggacgcttgtgtggtggctggccagctgtgaatcttgtgtgatatatgggttatggcctctggtaatcgattaccaaggagtttaatcgattaccacgcttaaaaagggaactggaagaatgtagacgcctcttgtaatcgattaccattctgtgtaatcgattacacagaggaatgggtcactggctatcgata

SEQ ID NO: 214805 - DNA, 391 bp, Glycine max
  unsure (1)..(391): unsure at all n locations
tntgtcaaggcacttcttttggcttctgcacagctggatttatttactcttgaacatccccctcaatgatcgcaccacgagcattgcatttgattcgaggaacatctttttggattgtccaagttggtggagcatacaatgacctcttgttacatagatgcgacttcttgagacttatcagcctcgaatggctctagtattactgccttggtagcattatccggaatggaagcctccacttcctgttcattctctcttgagctacatttctcaaggtcaactacgacttgctgaacattggcaacatccattttaactaactgacttgaacaaccttttctttctcttcatgtttcactaatcttccactatcatatatctactctatttt

SEQ ID NO: 214806 - DNA, 414 bp, Glycine max
  unsure (1)..(414): unsure at all n locations
agctntcttataagtcaagtcaatttgtgtgtacttatttacatgggcatgttgcttaaagaactcaaaaagagggaataattcatggaatcctgtttggttgggggggtggaattggatcttgtttccaccataaggaggagtgctcttgatccaataactttgatgacctaatcatacaatgaatttccttttgcagggcatgggggacttcttggacgaaatgttaacaatgatgagtcagaccaaatcaaatgtgagtcatctagttagaggcgtgtttggtgataaagctatgcaattaaaatgttctatatatattttagtttagtggataaagctagacataacatagtgtccgcttttgtcaaatactatgtaagtgtgtagcatatagtttatatactacacact

SEQ ID NO: 214807 - DNA, 414 bp, Glycine max
  unsure (1)..(414): unsure at all n locations
cttctangtgaccaggctatactataactgttacttcttgaggagagtatacagatatatcaaactacgtaggcattgacggaaccaagtcatctatcgagtggtaaaaacgtttctcaaataccctctgatgatacacataaaacatacttgcaattattacatacagtttttgatgcaagatgctccatgagctctactcaagaaactcacattcatctaacaatgagatcagtgagagggtgttgaccgccaaaacacagcacatgaaaaaataatatcctctgcctaacgatgactaccagcctgaggtcatcctgagaattaacaatgactcttaccatttacttcacctgctgcgtgaggaatgtgaataaaataactggcgcagaaatagaccatatctgttggaca

SEQ ID NO: 214808 - DNA, 437 bp, Glycine max
  unsure (1)..(437): unsure at all n locations
tcacctgccgcatgcaagcttgtgagcaattacaagtaaaaatagtatttatataactngtccacatcatgcatttccaaaatctatctggaatataggtagtgatatatgaatacaaccaactaaccaaataaagaaaaaattaacatcaggcactctataaagaaaaccatattnttaggatgattattatttaaagaggtgtaggctatggtggtcacgaaaattccttgtgttttgtggtcaaggaaatacaaatcgggtatcgctagtgggtcggtatttaaactttttaatattttatttaagttaacatataaagacaactttgtcattactttcatgaaaagataagaatgctcattaagaacttcaaatattggtttgcccttctaagtagaaagaaaaactctatgctggctttgtggggttctatt

SEQ ID NO: 214809 - DNA, 441 bp, Glycine max
  unsure (1)..(441): unsure at all n locations
tnttccactaaacaatgaactccaatttcttaggtagttggcttcttccaccttcatttgcctcgagagcattacttcagtgtagagtagaatgaatcctttcattctaccatcatcctatatgagtagaagagaacacaccttatcaacaattaccttgatattggtggccttacagacgtacaaccctgaatggtaggcagcggcttgatttctcacatacatttgagcatgatggttgttaagggagtagcggtcttttgtaaatggcatctaaagattcatcttcttttggaaattctctcttgggcgggaccactatttatgaaaggtcccctttgcgcttctcaaacagaacactggggatactattttgggtgctctttatttctttacatttcttaacggttctcnctgctacttggaacctcagatatggct

SEQ ID NO: 214810 - DNA, 450 bp, Glycine max
  unsure (1)..(450): unsure at all n locations
agcttgaagtattagttgagatattttgttctgttccattaagctcttaatgtctttagaggttacttcctcattgacatcttttgtcttgaatggaattgccatgacaggtttattgttactatctttgatgtttggtagttgatattgtgttgcgggaggtaattccgattggattaactcaccatccttcacttgccaatttgttatgacatttgctgttggatcacctatgatgtcttgtttccaagggtaatctatatcctttctgatggcataagcatgaaaccaatcaaagaanaggacattaattttgactctttcgacaaattcgtagaacttgtcttggatttgttttctgtttgtacccttgtaatgttggaaaaaccatctccttttgtgttcattcttcggagaatacaaatctttcctaagggttttcttatcaat

SEQ ID NO: 214811 - DNA, 429 bp, Glycine max
  unsure (1)..(429): unsure at all n locations
tgtctcagcgtntatgcgagacggagaccaacattctatctatcatcgccaagtaccaagaagagttaggtctagccgcggcccacgagcataggattgcggacgaatatgcccaagtatacgcggaaaaagaggctagaggaagggtgatcgactctttacaccaagaggcaaccatgtggatggatcggtttgctcttactttgaacgggagtcaagaacttccccgattgttagccaaggccaaggcgatggcagacacctactccgcccccgaagagattcatgggcttctcggctattgtcagcatatgatagacttaatggcccacataattagaaattcgtaggaaacttgtatggtctctcagaccttgactagataccacttccttcttgaaataaaatgagttggtcccatgtttctac

SEQ ID NO: 214812 - DNA, 397 bp, Glycine max
  unsure (1)..(397): unsure at all n locations
agcttattaataaagatacatatattgtatccccatcaccaaacatatccatcatctgttaacacacaacacaagtagcacgaaatgttagaaagggggaaaaatctttaaattccaaataaagcacatagtatttaatcttgataattaattaagcctcttgagtttgtgtccccatcatcaagggtaagggaggagattcacttcccctgcttagcaatgtctaacttctcatgatccccccagaacaaaaaaaaagagtgaaacatatatcttcactgtactacacttcagacaaagtagaaatttcatcaaacttagtttcaaattatttcttcatatntattctcatagcattgactataagcactgttactatacctcatgaatgcaacat

SEQ ID NO: 214813 - DNA, 439 bp, Glycine max
cttgtgaacatatcagctatgtttagttctctcatgatgatcttgatcctaggctaaacaaattgcactcagactgtcacagaaaatgatagctttatcctgtggaaacccaagaatgctaataagaccttgtaaccaaataccttcctttgctgcttttgctaaagccatgtactctgcttctgtagtgcacaaggtaactgtgaactaaagtgtagccttccaactaacaagagaatttccacttgtgaatgcatatgctgttgtagatcgtcttacatccaaatgtacaatgtagttagaatttgagtatccaacaaaggcacaagatgtgtcatcttgatagaccagtccaatatcagttatacccttaagatacctgaatatatgtttcacaacatgctaatgttccttgctagggttacccatatacttactc

SEQ ID NO: 214814 - DNA, 342 bp, Glycine max
accacataaaataatcacaaaaaaaaaatgttaaatgggaaaaggtttccataaataattgattattgtcacttatgatgacaaaaaaaaatgctaccctggctttgcttctgaggtccataccaaatccaccaaccctgttcatgaataaataaaaaccattaaataattttcctttgcttttttaagaactggatcaaacccaggagcatgttccaccactaatccattatttttttttcttattatatatgctgttgatggaacaacatcgtcaaggaagcacagttccacaaagatcactcaagataaaatataccctgaatcataaagcctagtata

SEQ ID NO: 214815 - DNA, 320 bp, Glycine max
  unsure (1)..(320): unsure at all n locations
acactnatagaaactcaagcttctgaaacagggcntaacaccgagagaggcngcattcacttcagatatcaacccgactcgccataatatacacaaaggacctgcgaagacaggttcgccaagacggtacggaacacgtactgaacgaatgagagcgagcaaacatcacctctgtgtttctcctgagtagaactacacaccacgacgtcgcgcctactacctacctggccaagctcctgtaacaacactgcatggcaaagcacaagatctctatttgagagacgtggtgacagcatcctacggttaaacagataacccca

SEQ ID NO: 214816 - DNA, 444 bp, Glycine max
  unsure (1)..(444): unsure at all n locations
agctntnggtcgagaggctagtatatacacaataatggccttcatcatatccatatttatgcatttcattctaaaattcagagattgatacaaaaatcatagctctatgctagtcgttctctcaacaattaagttcacactctcaccgggttatggttcaagcttttctctctcaaccaatctgcctactaactaacatttctaatcgtgatcctactttcttgttctttctcatctaacatacatgctcattcaaaactcatgatttcaacacatccttcaccctttcatgcaatcaattcacaacaccaatttcacaacaaaaataataatgtttgcactacatactcagataatcaagtcaaaatgttcaatatgcttcaagacatgcatactactattcacaatcaaaagtatgtaatcataaatataaacccatatcac

SEQ ID NO: 214817 - DNA, 422 bp, Glycine max
tgtgcaaaatcaaatcactcctacatttcatctctagcatgcattttctttctttacccactcctcacgtttggttttttagggaaaaacaccataactaaacgcgccgcaaggtatccctatcgcaccagatccaaatctagaacgatgggtgatcaagaggagacgcaggaacagatgaaagccgacatgtcggctctgaaagaacaaatggcctccatgatggaggccatgttaagtatgaagcagctcatagagaagaacgcggccaccgccgccgctgtcagttcggctgcctaagcagacccgactctcttggcaactacgcaccatcctccctcaaacatagtaggacggggaagggacacactggggcacgatggtagccctcacctgtgatacaaccgagcggcttaccctta

SEQ ID NO: 214818 - DNA, 393 bp, Glycine max
agcttgaatatgatgaaactagctaactttctaagctaagattcacttatttctcgcaagtttccttcatccattaaagttgatagcgctacacatggccgttactgtgaaaagagagatagtgggaactctaaacactttttgtagcatatcttcatagaactacaacttgccagtgtcgtcttgcgctcaaagttgacttttagtgtacaaatcaaatataacgttaacagcataagacaaaaggaattaagaatattaagacaagacaatttaaatcttcccttttgtgcgttgtggcacgagttgcttattgaacctatggacgctactttctgatgatagctttttgtacttaaagatagagtaattgtttcattgctttgtactatg

SEQ ID NO: 214819 - DNA, 457 bp, Glycine max
tagggatgttaatgtaatctgccagctgatatctcattgtcaaacaataagttttattgttgaattgcccgtatttggtaatcaaattgttattcagaaaaagacttcagacttttagactatagtctttatgtagaagcttcttcctttgctctctagacaacatttaggctctcttatcattttcgatcctcatacttaaactacgtatattatttgcttctaccagtgcagaaatcaaatcatactgaaaatttcggctagagttgggcatgatgacttcacgttgagagaaaatgcgtcgctgttattttcatcaacttttattattttgatatttctctaatctctagttaggaaaacccatattcttgtttatctgtgaagtaacattgtcccgattttgataatgaaattgaagaagtcttgtgatggcctactttgacatgtcaagttt

SEQ ID NO: 214820 - DNA, 432 bp, Glycine max
agcttataagaacaaaattgcctcaatcatattcaaatatgcatgtgaattaagaagcatcaacaagaatcaagccaaggctattgtgcaagcaatcaatggggtaaaacacaacaaatgattatgatgatggatggctcaaattctcacgaaggtaaactcatcactttcaaattgagctttcaaaactatcatgacatgtagaggagaatcaaagatttcaagtcacaaaatgtcaagaacttttattttcaaaacaattacccatttcttgaacatatcctataattcaaagaaaaacatgtcaagtctcttccaccactacgttcactaaagaaaggttcgtgaggaatggcttaagtcgatgtctgttgaccttgaagcttttgtttgtgagtcgctttgatctaactgtccataagaaaacattat

SEQ ID NO: 214821 - DNA, 446 bp, Glycine max
  unsure (1)..(446): unsure at all n locations
nnttggagtagaaacatgggaccaactcattttatttctaaaagaaagtcgtatctagtcaaggtctgagagaccatacaagtttcctaacaatttctaattatgttggccattaagtctatcatatgctgacaatagccgagaagcccatgaatctcttcgggggcggagtaggtgtccgccatcgccttggccttggctaacaatcggggaagttcttgactcccgttcaaggtaagagcaaaccgatccatccacatggttgcctcttggtgtaaagagtcgatcacccttcctctagcctcttattccgcgtatacttgggcatactcgtccgcgaccctatgctcgtgggccgtggctaggcctaactcttcttgtactttgcgatgatagctagcatggtggtctccgtctcgcataaacgcttagacaagctccttttg

SEQ ID NO: 214822 - DNA, 392 bp, Glycine max
agcttgagaagagtctccttatacccttcatagaaatcaaagtaatcgtctttccaatcaacccttttctgagtctcaatccgttttcttgttttctctgaaaaaaaattcatttgcatggtttttctttctcactgtcctggtggaaaaaatgatctttttgttctgttttttcatgtggtgtgtgttgaaaagggtttatcggttgtttgttgtgtctgattcgcaagttgaatgcacgatccccaaagatgatggaactctggtttcctatgtgggattcaagatccaacatgataatgcccgtggtcctatgaaaggagggattcgttatcatcctgaggctctcatgctctagtctttttaattagtttttgctctctcatccatac

SEQ ID NO: 214823 - DNA, 424 bp, Glycine max
ttggagatgttcgttgtttgtctgataaaccttggaaatggtgttcaagtgttgaagtcattgctattggtgtgcacttcaaaactcaagtgccagtgtttgagaaaacattgatttcagtcccaataaatgagaattttcagttagattgcgttaatgttgttgccacaatactgagcagataatggttaattgttttggttcaaatgcaagcattgtcttcgtaccatcctaaatatattcttaagttgagtttacccatatctgcttgaggaatgtggagtgtagactaatatctagttttccttgcaaaagggatattgctatgtgctatttacaatatttaaactggccgataatggacagatagtcaaccattcaagcacgattggctacttctttacgataatgatttatgaatgct

SEQ ID NO: 214824 - DNA, 334 bp, Glycine max
gagcctctgacggttctcggcgggaaaaatgctggaaatcaacattcccattcgtatacgtccccacactcgcaatgaggcgcttaagtaatggatataaattctacctataactgactcttgggaagaccgtagattcatgccctatgagtggtccctttaacgctttaccacaaatagaagttcacagcgggcggacttttatagataatatcccctgaagaggacatgttagtgagctgaccctcctccgaactgcacgtagaacccgcttaagaaatactgtaaacagttattcaattctttgacgtggcgagctacacctctgaggaac

SEQ ID NO: 214825 - DNA, 422 bp, Glycine max
tcgagtgcattgtattgagaagccgagtacattagactttatttggaggagaaacacaacatgagtagctcatatccagtaaatagaatatccgagagcctacaattatgatttatcctggagcagaagcttagactccgacatactatgttgcgaagtccaagtgattagtgttgaaacatgtcataggttaacaggttattaataggaacgtattttatagctcaatccaccccgtagaagggctagtccaaaagattgaagaaagagaattagagtacttctttccagcctacattgttttgacagcacgggtatacggagctcatattatatacttgaacccactcaaaaagtagcgtacaataagacatgttcattataactagagtaatactcgactctaaacagcgttatgaatg

SEQ ID NO: 214826 - DNA, 457 bp, Glycine max
  unsure (1)..(457): unsure at all n locations
agcttattatanaaacatgtattaaatattatattttanaaacacacaacaccaaatatctttatgtattttntattggaggaaatcttgttcatgctatcactatgaaatggtgaaatcttttgttaagctagaataattacacaccagttgatttatgtgttgggtggcgcgtgaaacatactattaattctttatttcacatcaaaaagaaaaagacagagtttgctattggtttaaaaggaattaaagtaagtctttttcttatgcttaagaatatctttagtgataaatcctagattaaaatcttatactactggatcttgtgacaattttgaagatcttttgagatatttatcatttttctcctttattgacatatttaatcttgggatcctagataactcttatcaagttctatgcgaaccctatttgtaatatttgataatgtaatata

SEQ ID NO: 214827 - DNA, 453 bp, Glycine max
  unsure (1)..(453): unsure at all n locations
tgnactattgtggcattcagntatttcagtgtaacagagtgtctttgattaataaggaggggagcatgcttcttatttataaccaagcctccatacttgcatcttgtgatggagtttctctcttgaaatgattttatgaggttttaaacagagtaaaaaactctctactgtaatccatccttatgcattctctcaatctttgttggttatgcaagtcctcgaattacaaatcctaggagtcttcgctgggcagcatgtggagctgtaactgcaagctcaggcacggctttgctggttcgtttcgttaggcctgaatgtgagccccagaatatagctgcttatgacaatacacactaactggcggtgtcaccctctgtctttttcccctactgattacaacataatatactcgatgaggtaggtcgcatttttctcgcatgcgcaacgtttata

SEQ ID NO: 214828 - DNA, 374 bp, Glycine max
  unsure (1)..(374): unsure at all n locations
acacgncgataacctccaaagagctgctagtcctgttatttcatgattgtggatagtgaacccaccaacatattagcatgcgcatctatggaacacagctgctgtggcaatctagatttcacaaatggcaaaccttaactggctgtgtgagaactggaccttttgcaagctggacatatttgtgaacaaatttgaactaccttcaaccagatagttatctgataggtcaacggagctgaaagagtcatgtcttgtgaagtgtggaagatctcccttcaatttgcgcccagctagatggacatcgttgagctggttgcttctgatccaatcaagtacagttccaaggctgagattattataagacatgtctatgc

SEQ ID NO: 214829 - DNA, 396 bp, Glycine max
  unsure (1)..(396): unsure at all n locations
ccttacataataactcactnggcgggacgaggagtacaatgttgctcttaatgggcagactacttgcccagatactggataaataaagtaactctcatacctttgacccattggtgtaggaactgtaatttgatgtaccttaagaagagaaagtatactatgattgccatttacttgtattacacttgtctagcgactcatagcttcgctatgctgttcaatatcaagaccgtatttacaacatcggaggaatcctgaatataaggataaccaccttcatgatgtgaagagcgggacttgaatataaattaatgcacgaaaaaaggagtacttatgtttgataacataaaaggccgctgtttcttggtacgcactctgtcaacaatactcttttga

SEQ ID NO: 214830 - DNA, 346 bp, Glycine max
  unsure (1)..(346): unsure at all n locations
tgcaagcttttggacgcggatagagaaagagatttattttatttacncccgctagcatactccaccttgaaacatcgtcgaacgacgctcaaacacctcctatttgaatcaaaactgatttctctacaaaaattgattccccaatactgtatccttttcaaaaaggtcaaacattcttctccatctccagatttaacctaacttatgggtgtgaagggattaaaacttacaatctttactaatatgagaacaacctgtgaaatgaatacaattataggaaccaacacaaatagtatactccacataaaaatgctagaagaaaatatacgaactgatgtatatttgt

SEQ ID NO: 214831 - DNA, 392 bp, Glycine max
cgagacgacgtttccaaaagcatctaaagagtatcttctgcgttgtcccataggattggccttgattgagatgcatgccaccgcagaatgaaccgcaattcatacatgcccttggattgtgggttttgcagctttaaaaccattgtgcaattaatataacaggtaagtttcatagaacgtcaccattttgtacatctgatttgagatgattcgtaatgtttgatctgccaatcaaaagttcctataaaagtgtcgggccagtggctaaagtgttgatatacatcttccaaaatcagtgttcaaagttcaatatcgaaacaagaattgactttgtgtttactgataagaaacttatattgccaagaccatcatgatttactttggttcagatt

SEQ ID NO: 214832 - DNA, 433 bp, Glycine max
  unsure (1)..(433): unsure at all n locations
cacctgcacgcatgcaagctagcaagtatgtggagaggtacctatgctgttgttgactnttatttctcttactttagtttctattggttctttctaatagtttaactttaactttaattagtgatcttacttttgtttttattggttcttttaatttagtccaactttaactttaattagtgatgttcacacggagtttgttctttccgaattttcttttcattgtactatatatacttccacgtaacaactttcacttttcacattgcagttttcgtcctttcacatctaaaatttgaaattctaatactaagcctatggtgatcgacagaaaaagaatagtaaatgtttattaaaatttaaattgttcaaagatcccttagttaaagaaagaacacattacacgcacattttcttttttataaattctaca

SEQ ID NO: 214833 - DNA, 415 bp, Glycine max
  unsure (1)..(415): unsure at all n locations
acttatggccctttgccaaggacctctacaaatgactgtcttctcttaactctggatctcaatggcaaccaattattagaaggttttctgccacaatctttgtccagatgcattaatctgaaggttttaaatcttggaaacaatcaaataaaggatgtgtttccccattggcttcaaactctaccataattgaaagtattggttttgcgagccaacaagttgtacggtcccattgccggtttaaaaatttgacaaacttagaatcattggatatctcctcaaatatgctcactggtgggatacctacagaattaagcaatntgaactttcttgaagtcctaaatctttccaataaccatcttgtgggagaaataccacgaggaaaacagttcaatacttttcccaatgattccta

SEQ ID NO: 214834 - DNA, 476 bp, Glycine max
  unsure (1)..(476): unsure at all n locations
taagtcacctgctgcatgcaagcttacttctttaggtctggtatctattattttgcccttttaattnttaactcttacaattgttttgccctttcaatttcttgccctttctttaatatttttcttttaattctttccatttttatgtttgtgtaaaattatttcataatttatatataagtatttatttattataaattataaattttagttatataaaataaacattcactaaaatactagtaattgataaatgtacaacttagatttatagaacaacatcacatgatatttgctttaagctcatagtaaatttgtgaaaaagttgaccaataataatgaattcatgtgaatggtgtttctatagttgttattaccctattgcatgaattatccgtaatattggttacaaacggtaaataaatgagaaaggaaaatctaccaagaaaacaaaaaagtgaatgataagaataccc

SEQ ID NO: 214835 - DNA, 447 bp, Glycine max
tccatcaagtggtatcagagcacaagagcttcatttatgtgctccttaaacctccattatttttttttttgctttaccttctcttccattgttgtttcttcatttttttctccatgtatatcctcacatgtcttgtgctaaatgtttttaacatgattctttagagtttccaccgattaaacttgctatagaagctagatttgattttctatggctcaaatttcttattcttgttcttgaaccatgaattgtgttgagtttaggttcctttgagttttgtcttgtctatttttgtggctgacacccaaaccataaaattcatacaaaaatattaaagtagaagaaaacctcaaaaatctagagtgacttgttcacctatcgtaattttgtcatagaagtcatgtctagtcatgaaacttgtcacataagaattcctatgttgtgctg

SEQ ID NO: 214836 - DNA, 398 bp, Glycine max
  unsure (1)..(398): unsure at all n locations
agctntctgaataaaaagagtttatcccatgtttttactccaaagattagtgcaaatcaaatcactcccgcattttatctctagcatgcattcatatcatgcaccacataagcatctcttaacggcatcataatgaacatatcattcctgcatttgtccgttgtcatattctagcagcgaattttgcatgagtcattgcatcatcatccatatgcattcaacatacttttgttctacaaactgcataccttttgttttcatgttcgctcatgcaagatccttgcatttccctctacaaaatgaaaacaaaaaaaaaaagtaagcgtgaaaattcacactacattcttagttgcatgtgttaggtaccatgagccaaccatgttgggatcataaaccca

SEQ ID NO: 214837 - DNA, 443 bp, Glycine max
  unsure (1)..(443): unsure at all n locations
ctgaatgctngnttaattacaatgcgtgggatgctaatcaattattttataaaaataagttccatatgcttggatgcctacaaagacatatacacatgaagtttaaaataggattttgtaatcaattttttatttgatgacgtgtttcctataaaattcaataaaatccattagttcatacaaaatttaatataattattatcattaaaatcatagattttttaggggttagaaaccatctaataatgtgtttagttttaacaaaattatctaatgagataaaagataaaaaatatttataaagaattttaagatgtgtaaattatgtggtagaatgtatacgtaatattatagttatatggctactattatctaagaggcttaagaaaaatccgtccaattaatgtcaaatgattgagacanttatccctattaagaacatg

SEQ ID NO: 214838 - DNA, 417 bp, Glycine max
  unsure (1)..(417): unsure at all n locations
agctttcatcatcaatatcatccagtgtctacgagcttctgcagaagatgactcagttggatacatcgcagaccaatcctcacggtccttcgtcttcgttcgttcctgcaccaacaaccaacatgagtacggttcaccgcctaaagctcgaggtccctcggtttgatggctatgacccagcatggcggatattcaagatctcacaattctgtgaatatcacgcaacacctgatcatgaacgcctcacaatcgcgtcattctacatggaaaggacgacgctaacctggcttcagcggatgtatcccaataggaagttgtcgtcgaggtccgcacttcttcatgcgctccacacacgattgttatctctcacatacgaatatcccactagtatgttgngtagttgactaacaatcatca

SEQ ID NO: 214839 - DNA, 377 bp, Glycine max
tcgcaggtagctgcctaacaccaccaaagtaagttcatattaacgagttttaattaatatacactttcagtaattattgaaaaattagcatatgtgattaattaagtgtaaaaatcttttggactggcagcccataagactgtataagtgcatgcttgcttcaccttattttaaagaaaaataatagtttgttttatataaacgcgcagtcaattttgtccaaacccgaaattacaaatattattatgagcctttgatgaatcatgtcatgtctaactgactaagaagataacgaaatttgacaaaacctcgtataagatcacgcctaacatgcacatgtctggtgaaagtatgtatataatacgagcatggctcac

SEQ ID NO: 214840 - DNA, 434 bp, Glycine max
  unsure (1)..(434): unsure at all n locations
agcttcgccggatgatgccgatcgaacatttcccaatcgacatcatccaattgttgttcagggattgactatagaataaacaatggccgggtgtcggttgctatatggcctcgactgatatccttcagccgacattgcgcaatttcttttacaaacgttggtcgataatgtttttttacggtagaggaagttttttgttttgctgttgcttaaaaaatttacaatgtaggttagctaggtatttccgtgcgagctcaaccgaggttgtgtttcggccgacactggcatgttctcatttagtcgaccaagaaaacgttagcccaccctggcacaaaaaaaacatcattcacgaaaatngatcgaaaaaatgatagctgacgtcggcgtggagagatgatgtgaatcttacgaggcagatcgcttgatacaggcta

SEQ ID NO: 214841 - DNA, 410 bp, Glycine max
  unsure (1)..(410): unsure at all n locations
tgccgccacggaattntccgactatgcccttgtgtggtggaacaagctacaaaaggagagagcaagaaatgaagagccaatggttgatacatggacggagatgaaaaagatcatgaggaagcgatatgtgccggctagttactcaagggacttgaaattcaagctccaaaaactaacccaaggcaacaagggggttgatgagtatttcaaggaaatggatgtgctcatgattcaagcaaatattgaagaagatgaggaggtaactatggctcgatttcttaatgggttgactaatgatatccgtgatattgttgagctgcaggagtttgttgaaatggatgatttgcttcacaaagcaatccaagtagagcaacaattaaaaaggaaaggagtggctaagaggagtttta

SEQ ID NO: 214842 - DNA, 372 bp, Glycine max
  unsure (1)..(372): unsure at all n locations
agcttgagaatgatgaatcaaattatcattattttgtaattntttttgtatggtgatgaatcaaactataaatttttaaaggcacatacttcactccttttcatcaattcaggtaaaacaaggatagtttgattaattatacaaaaaaaaatacaatatgatacacagttacatatcatgatttccacgccgttggccaagtattctgcttgtttattcataaaaagtataatatgtaaatgattaaggggtttcttagactaccattatagaaaaccaataggatcttgaaacctatgattctcacaaacaatagataaacagataataatgtatatctttctccataggaagatttctctccaatgtatt

SEQ ID NO: 214843 - DNA, 447 bp, Glycine max
  unsure (1)..(447): unsure at all n locations
tatttctcctaccaaagaggaaagggatgggattacgaagatgaaagatgatgaactggcaaggaagttgtttaaagttcagcaagataaaaaatgtttgatcatcctggatgacatatggagcaatgaggcatgggacattctaagtcctgcttttccatcacaaaatacaaggtgtaagatagtttttacatcccacaataaagacatttcattgcatgtagatcctgaaggcttgctccacgaaccaagttgattaaatccagaggacagttgggcattgtttaagaaaaaagcttttccaagacaagataatcctcggaactaaaaatgtcttcagtgagccaacttatttaactagacatttccatatacattgattcatattttcattctccattgcccaagtctctcatctatctttcatatntatcaggtatgtgatca

SEQ ID NO: 214844 - DNA, 382 bp, Glycine max
  unsure (1)..(382): unsure at all n locations
agcttagttatgagaggggtgtgtgtatttaanctctagcttctcaaagaaggtttctcaaagaagcttctcaaggaagctttttcaagaaagcttctcaaggaagctacctattctataaatagaagcatgtgtaacacttgttgtaactttgatgaatgagagtcttgtgagacacacctcanagttcaaattctctccctttttcttccttcaatttcgtgctcccccctctctctatctctccctctttcttttcctccattgaagcatcctctccaagcttcttatccaaagctcatcttggtggtgaagctcattcttccatggcttattccctagtggatgacgcctcctctcacctcttctnctttggctttca

SEQ ID NO: 214845 - DNA, 434 bp, Glycine max
tcaacatcagaccacttccaggtgctggaactactttcatggacttgatggggcctatgcaagttgaaagccttggagggaagaggtatgcctatgttgttgtggatgatttctccagatttacctgggtcaattttatcagagagaaatcagacacctttgaagtattcaaggagttgagtctaagacttcaaagagaaaaagactgtgtcatcaagagaatcaggagtgaccatggcagagagtttgaaaacagcaagtttagtgaattctgcacatctgaaggcatcactcatgagttctctgcagccattacaccacaacataatggcatagttgataggaaaaacaggactttgcaagaggctgctagggtcatgcttcatgccaaagaacttccctataatctctgagcttgagccatgaacacagca

SEQ ID NO: 214846 - DNA, 360 bp, Glycine max
  unsure (1)..(360): unsure at all n locations
agctagaacatgatgagttgatttganttacttgnctcttaacaccacttgacaccaatcataaacaaagggagttttgtttgcaccataaacactattaaaaaatactgtgaactggactgctaataatacagtagaaaaatctgctatactgcagatttgttaaattcttgaaaaaaaaacaatactcaaatttacccccaccacattaacaataactgatacaagatgtagaatttcataaattacagaanataaaaaatgttgacaagaatgaaatttaaaataatattgcaataaacaaaacttgtccagaagcttgtgtgcaacactcctcatctgctgtgaatccaccacaag

SEQ ID NO: 214847 - DNA, 372 bp, Glycine max
  unsure (1)..(372): unsure at all n locations
ntaaacaaagggcttttattgatgataatagattatattatgtatttacatactccaaacacacgagatattaataccaaattacgcaaattattggtgctgataatatggtaaactttgtaatgcaccccgtatcaacaaacaagttaacataaaatcacaatgtccaattactttttgttgtaatgatggggcaccacacttttcttgaacatttacttccagtcaagcatgttcaacagccacaagacttcttccttataatttgctacatcacagaaatccatttggatcccaaatacatccatgagatcttcatttctatcttccatgaatatgcaagagattcatgcacggatgcctaaaaaaatg

SEQ ID NO: 214848 - DNA, 453 bp, Glycine max
  unsure (1)..(453): unsure at all n locations
agcnttgggtgtgtattagagagctctattactctatgtgtcttttctccttggcttgactctctttttatagttgttgaagtgaacttggatctgcgtactcgcgcttagcatgctctgctcgcttagcgcgggtgcctgtattcacacttagttcatgctgcttgcttagcgagggtgtatgtattcgcgcttagcgtgcttctccctcgcttaacaccaatgcttgtttttgcactgagcgcgtcctgtgcgctgagcgtgtattgggctaagcctttttcaactttttgctattttcttcagcttttaggctcttaatctctcttttttatatctacaagtcatgaataggaaaaacatcagctcttaacaattaagagtgaataacttctaaataattattctttaaagatattttcactctatcttcattatacaaaatagttcata

SEQ ID NO: 214849 - DNA, 449 bp, Glycine max
  unsure (1)..(449): unsure at all n locations
ntnnggattattttaaatttataactaacatgtgttcgattaattacttacattcataaaagatcgtgagaacaaaataatgattatatgataaaaaaaataacgaacttaagaatttagctggttcaatacttcttgtttatctctatggaaccgtctcaaaaatatttatcatcacaaatgattataagactgtaacgtaccctaaattgtgtatcactcaacaaacctcaaacctcaaacctcgggtatctccctcaataattacaaaaaatgataatactttcacacaaaaatatttttcttccgacaaagtaagtgagtttgtttcataaactctcttctcacacactctatctttatgtgtatcttctccactaattcatttttctatttataataaagattgtcatcaacttcttatacattgaacacaaataaactttaat

SEQ ID NO: 214850 - DNA, 436 bp, Glycine max
  unsure (1)..(436): unsure at all n locations
gcaagctngtagaattatggagtacccatcacatgttgtactangnggcggtcgggcgatggtgcacaacaagctttccacatccacaatgcgcgcataaacccaccatcccctgttgcccacctccaactgagctcacgtactcccacgtagcccatctcctcgtttctctcaacaccgggtccccatcaatcctctcaagcttccacaacatccaagcaaaacaacgttcaaacagcacaagctatcacagccaagcaaaacagagcaaaggcagaaaactctgctcaacacatcaaccaaaatcacagcttttctcacgtaaagaccacagtaacaattccttcgatccaattcgttaaccgttggatcgactccaaaattntactggaagtctatagtgtataaagcctgcatttgaaccgtgngatatact

SEQ ID NO: 214851 - DNA, 458 bp, Glycine max
  unsure (1)..(458): unsure at all n locations
tgcatgtcgcgttaaaccctaaaacatctttgttgtgttatatctcaaattgggctaagcgtgcaggcacaggctaagcgagtcatgcattcccggtaagcctgtggtgctcgctaagcggattttgcaggaaatttcctcctgcaaaactctctaagccctatgtggcatgctaagcccaataatatctctgaagttgcaatttcatttttgggcttagcgcacaagtttgggcttagtgcgcaaaaaaaaaaatcaaaatttcttgtacttctattttggtatgtctcctacgcagcaagcttagtgcgcacttacacgctaagccttagtgttcctcaatgtttgtatttttgtgttgggctaagcgccagttgcacgctaagcctaataagcttactgttcttttttggtgtcaattgggctacactttggttaacttntatagttaacacatt

SEQ ID NO: 214852 - DNA, 461 bp, Glycine max
  unsure (1)..(461): unsure at all n locations
agctntgcttccacacttattgtatgcatgtttgtggtttgatcacccattagtgtgtgctgttaggaactttagcattgacaaatgtactgtttccttagaacttgataaagcagggctagacaactgtagtgctagacatagtgtgcagggttctagtttttattatgttgtgcttataatgctgtttaaattacgcctaagttcaacaagagacatctgcgaatgaagcttagtttaaattagtccaaactcacaagacatcggtgttggtatttttgtcctcagcatagaacacatgaataatttcaaatagagaaaaaccctaattgcatcaagtatctcggtggaaggacccaacactcttacttatttgttttcacactcaattgttcacgtttactgtttcttttgatacaatagaatatacctttgtttcaattcatgatacttaattcttt

SEQ ID NO: 214853 - DNA, 378 bp, Glycine max
gacttctaatatgtataccacatcacaattgtgtgttgagattggatttagagcgcactgggaatgaaaattgtgacaaacataagtcttcccacaattgaaaaagaagtttaacaattattaagttaaataaataccagttatgagattctttgaaagttgctcattttctttggcaaaacatggtctatatattcttcttacacgcaacactaattttttctttaatcgcatgttcgctaatgctgaattgcttgttggctctttgtccattttgttggaatatatacaaagcaacaactgatcaaagacgggcatagccaagacaaagaaattgtagtgacaataaataaattacatgtaagaggtaaaaggtcc

SEQ ID NO: 214854 - DNA, 451 bp, Glycine max
  unsure (1)..(451): unsure at all n locations
tgcaagcttttcttactatagcataggctggctatatntttccttttccatttcattntcattataacaacattcaccgactcaacaattgcttttacattattttttttcagattcttattgacggatgaatcaatttgtgttataaattcgtttccaacttgctaagtgcgtttgtgcttggaaaaatattctcttgttataatttttctgtcaaatcttttaacccaattgtttttataactttttcagaattgtcaagacaaagttgttttgacataagataaaaaaaattgtgaatttaaactatatgcaatgtacttaacaaatttatttctaaagatttgtacattatttttctttattatacatacaatggagtttcgttctccttttaattattgacaccgagatcatttgtgtggtggcgaagccattttatgtgatgttg

SEQ ID NO: 214855 - DNA, 362 bp, Glycine max
tgtaattgattacactaatactgtgatcgattaccagagcagattttcagaaaatattctcaacagtcacatctttttatgtggttcttgaatggctatcaaaggcctatatatatgtgacttgagacacgaatttgctaagagtttttcagaacaaaaaggtcttatcctcttataaagcaaaatcgttttatcctcttacaaattccttggccaaattacttgtgattcaataaggaattcattgagtgctcaaattgttcaatctatctctttcaagaaagatttcttcttttcttcttcttcattctgaaaagggattaagagaccgaaggtctcttgttgtgaaagaattctaaaca

SEQ ID NO: 214856 - DNA, 413 bp, Glycine max
  unsure (1)..(413): unsure at all n locations
agcntttaaatgtcaatagagaggacaaattttttgtgtttatagagtattacatcacagcatgactacaatgcagtggttatcatatcagtgtcacctacacattcgaacgagaaatctgcccttccatcagtaatgcacttaataacctggaaattttcaacacataaatggttgttatgacttccaaactttgtgtgcatacttatagttttggtgtgcatacttatagtttttgtgccgaagtaaaattatattcaaccaaaatcaaattcacaataaataaatttgtatggatcaaacatatgtaatattngatctagcgggatactcttgatagccatcaattacagttacatacaattttctccacaaaataaagtatgaaaagttaaatcagatgtgttggaatg

SEQ ID NO: 214857 - DNA, 350 bp, Glycine max
tgaaaccacatggaaggtcagttgcttaactttgaaattgatcccttcgtggttgaatctctcttgatatgcgatgacgcatattcatttattactgggtattacatccatttccatccaattatgagtgcatattagaattggctgcctttggagcaaatttgcttccaacaatgacaaatgtgattgtagaacactggtaggaggaggttggggttcccgtgtgtgctatgtcctaccataaatctgtaggataaaaaaatcccaccgattaaaaaaaaattattcacagggatcactcatgaaagtggtcacccttaaacgtcgtctttttacaaagcgacctttaa

SEQ ID NO: 214858 - DNA, 458 bp, Glycine max
agctttagagtatagatacacatgctcgttatttagaaatataatgtgtatcctaatcaaattctttaaataaaacattcttattttattgcttgaaaaaaattattgattctaacatgattggaatcataaaataaaaattatatatacatatatatatatatatttaattattaagagagccaaattgacagcaatgagtaatgatcgcacattttaaactaagattagaagagcagtatctgcaaaaacataaagcagaacatcgtatagaaacgaagcagaattaaaaaccaatattttcttacatgaattttcttagaatttggattgaacttaactattcaatctcaaaagctaactaaagaagtgaggatgaattataagagtctctgataatctttgcagcacacagaagcatggtgacataagaatatcacatgcatgcgtgcatcttt

SEQ ID NO: 214859 - DNA, 414 bp, Glycine max
tggtgaaacaagtctgaggcttttctgcttatatgcttattccatcttctcaattatggtgataggtcttatatatatatacactcatactatggatgtgttatttcttgagtacagaaaagttaggagagtttgatcctgggaaattcattcaaggcttcacagttcaaatagcgcttaatgtacatgatattctaattcacgttctggtgaaatatgaattctatcttgccaattggatcaatcttcgctcacatttattatatgattgtgtaaagagttttataatttgatcaagcctatggatagcatgctatggaggatcatacataccaccataatgtcactaaagcagcattctttacgtaattttttttttaaaaaaaatcttttatatgcttgtgatgggtggtc

SEQ ID NO: 214860 - DNA, 340 bp, Glycine max
cgagagagaagaatgaagttctgataccactagggagacaagcggcctcttatatctgtaagaatggggggtcgaactaacaaatcgaagattatttccttattcaagattatactctcttattgagataacaatataccctcaatatgaatgactcaaaacataattcaaagtaaacttctttaacacattggatttttgacgatatataaagaaagttcaatggaagagagaatgcgaactcaatttttatactggatcaggcacgtcctgtgcctacattcaagacacaagcaacttccttgagagtttcactatcttgttgaactgcgcttttaca

SEQ ID NO: 214861 - DNA, 391 bp, Glycine max
ggaccttaaaactcaagcttgccaaaccctaaagaaacaagcacgttttaaatcaaccaccgaacatagatcgagagaccctgagatatcaactggccgactatatgtgctgatggtgactgccttacgtcatcaaggaacgactaacattctcattttggattattaatcatattctggatatagatctaagaccacttaaaaatactattctaataatatactttatttaaagaacttaaacaataatttttatagatgccaccataaatcattgtctagtatctatttactaattatggtctttagaaaacacttaattaagtatgtactttctagatatactgtgtatcacgtaccattgaagatattagtaaaaacattttgattg

SEQ ID NO: 214862 - DNA, 446 bp, Glycine max
  unsure (1)..(446): unsure at all n locations
agcatgcagctcataagaagaaggatatttattatgnnatgnaccacgagttacaaaattataagtcaactaacaaatcgaaaagggaagaaaaataaaaaaggactacccaatcaacatgagattcaaaggtagccgagcatgttgctctatccacagctagtgcccatcgttttaacctgccatcacggctcccagtgaagagataatcagacccatcagatgcagcagatgtaagtagagccagacaatttatgcctgcacaatgctgcagaaaagagccaacttacaaatgattccagactgtgcaactaagaaaactatcaataatgaattcaaccaaaataaaaaatactgatgaacaaataaaaatctatgacataacaccatgcatagcaaaatgataagtacctggaattaaagagccagtactatatgaactatta

SEQ ID NO: 214863 - DNA, 263 bp, Glycine max
tgttgtggtggaggggcgagggattgtggatgtgtgttttgatacacatgcagttgtaccacctgaactcatatactgcacagtacacttgtacagatcggcttatgagcagatgctacacatgcctatttattgcccagtgatgtatctgagctcttattcataggcctctaatgggcatatgaactatcttttattttgagttgagtgatctggctacatattttacctggcttggtcccatacatctattgcttgagctg

SEQ ID NO: 214864 - DNA, 444 bp, Glycine max
agcttccatcaagaggtatcagagcacattatcttctagtaggagctccttaaacctccattaatttcttttgctttaccttctcttccatagatgattctttatttttctctatgtatctcctcacatgtcttgtgctaaattttgttaacatgattctttagagtttccaccgattaaacttgttatagaagctagatttgattttttatggttcaaatttcttgttcttgttcttgaaccatgaattatgttgagtttaagctcctttgagttttgtcttgttattttttgcggctgaaacctaaaccatattaatcttacaaaaatattaaagtagaagaaaacctctaaaatctagagtgactcgttcacctattgtagttttgtcatagaagtcatgtctagtcatgaactttgcacataagatttcttatgttgtgc

SEQ ID NO: 214865 - DNA, 427 bp, Glycine max
tgcacaaggcattggcaatctaactcatgaaggaggacttttgataaggataggtgaatagcaagctccgctgcctacctgagagccaaagcctcgacaatatgaacctcataacaagcaggaagaagacgtgaagcagcaaccaggacctcgccagagtggtctcaaaagataacatccaaaccaattccctcatcacaatttgcttttatgaccccttgggtcgagcacttccagattgagctcttctccacacttaaatttgggttcttgctcaaatccattaggaaggattgggctctatctagagtaacatacaaaggatactcgggttggtggaaaacccattaatttcgctaaaatcatatgctgaatttgagtccttcatgatctttggattttgagaggcgatcccaagataaccgga

SEQ ID NO: 214866 - DNA, 221 bp, Glycine max
gcttggtttctatttgcacccccctgtttactaaatacacccccctgtctttttggtgattcttttttcataacggtacagaactttacgaatttcggaatgatactctggttttttccgtaatggcacggagccctacagattacgtaatcattccttttttggcttccgaaaaattatggaacctcacaaattgtgcaacaatgcttccctttgacttc

SEQ ID NO: 214867 - DNA, 399 bp, Glycine max
tctttgagaaaacttccttgagaagctagagcttagcttacacacccctctcataactaagctcacctccttgagaagcttctttaagaagattcctaaagaagctagagcttagctacacatacctctctaatagctaagctcacctccttgagatgagaagctagagcttagctacacacccctataatagctaagctcacccccatgacaaaaaaaaacatgaaaatacaaaaaaaaaagtctttactacaaagactactcaaaatgccccgaaatacaaggctaaaaccctatactattagaatggccaaaatacaaggcccaaacgaagaaaaaaacctattcttatatttacaaagataagcgggtcatgcttagcccatgggcctcgaatct

SEQ ID NO: 214868 - DNA, 300 bp, Glycine max
acaacattaacgggatatgcatatcaatatcaacgtttaaacttcccacataaaagacagacgaaaattacagcttatccttaatttgattgcaagtaatacatcttgccatcttggtgtcatgacatgggcgaaaaatgatcatataaatacacaccaaattggctttcttacgataacatatgaatcaactcatcatttgtttattagttcttcacaatttttcttcaccaaataactgcagcgccctcttaatactgtctgtcatacatctctcgacatataagtgcagaacatatg

SEQ ID NO: 214869 - DNA, 418 bp, Glycine max
tgtatctaaacatggtctagaaatactgttgtttaatatttgaatacttattcctacattaatatatatgtgaggggtacagggtgttacaactgggaagaaacaattcggccgaggagggttcaagagatcacgacttgccaagaaaactaacttcaattcagtattgtgctcgaatcgatcaatggcctttgttcagctacgccaacatgttgcggctagaatctcacaggctgagcaaatgaatccaatgctgcttattcaaattctcgcttcacacggatgatttgatccatgggcatgactattttaacacgctctatcttatagtttggcattggaggtgacaatattgcgtttcttggcgagtgattgtttgacgagattgaaacaagtcatctgtgcacactggctcaat

SEQ ID NO: 214870 - DNA, 429 bp, Glycine max
ctcaagctttacgatgagctggaactgctcgagtttcaggacaagttcgtgatcaaatctcatcaatcccccaaccatggcttctggattaaccgtcttgatggcagcatcaatgtatttgatgatgatggtaatcttcttttctgaatcgaaccttcaaaatttcttgattggttgcatagaaaatgcaggaaatgttctgtgaagtttgttacttattgttgttgttgttgtgttgatcagagaaaataagttgaaaagttcatttattttctaagttgaaaaacaaaaaaaattgggggtcttggaattttaagaatagatcgtttaattgtggatatgaagtatatttggtgtctctgtggatgttgcttttggcaagatcgtgtgtagtattatatacttgatatgtccatctacacatttatg

SEQ ID NO: 214871 - DNA, 443 bp, Glycine max
  unsure (1)..(443): unsure at all n locations
agctnngagaattagtggaatatgactatgtttgtttatctnttcatgttgatgatatattccttaatgttttcaatggaatattccttgatgatatattcatttgtgatgggctacaaatcctaatgttattgttgctgttaagaaatttgggttgaaagcaaccattcaggggtagttagatactgagcaaccattaagaaatttgtggcttcttaatctgtatccacatgaaacacggatgtgctaaggttattggtagagcaacagcccctataagacctgccaaacttggtaagaatggctagtggtaaaaactttaattacatggcagatataatgtgcagattgtaatctggtactcctgtctgcttaaaacaaagcaaattctatcacttatcatattcaatacctagaaaacctagtacttctgtctgtgtaaa

SEQ ID NO: 214872 - DNA, 437 bp, Glycine max
tcagttccttaatgtacaaaatattcacaaaatagcagttattgtaatgtcagaatgatcatttgtggcgtatcagaattcggtcaatttgtcgtaatcggttaactgaaatttggcagaggtcttttgagtacacagtatttcttctcatttcatgttttcttggtgccgggtgatttatgattcatagttcatccagttaattgattttgttttattttttattactcaaaaagggcttttagtagattgtatgaatctgttctgttttggctactaaatcattaattagagagagttcgataagttggtatcttagatttgatgatttcagtctcttggacgtgttggatcaactatgttaactttgtacacttattaatttcttatacattattttgcattctcttgtgatgttaatggcatcaatactactc

SEQ ID NO: 214873 - DNA, 421 bp, Glycine max
  unsure (1)..(421): unsure at all n locations
tcacctgccgcatgcaagcttgtcaaanaggaaagcaagttaaattcttgtttcnagcaaatacattgtttctacttcaaaactccttgaactacttgacattgatttatttggtccctctagaactatgagtttaggtggaaattactatggcttggtaagtgttgatgattactcaaggtttacttggaccttgtttttgaaaaccaaaaataaagcttttgatgcttttcgcaaacttgccaaggtgattcaaaatgaaaaaggtccaaacatttttcaattataagtgatcatggaggtgaatttcaaaatgagtcttttgaaaacttttgtgaagaaaatggaattcaccataattttcaaccccaagaacacctcaatagaatggcattatggagaggaaaaatatatcccttga

SEQ ID NO: 214874 - DNA, 435 bp, Glycine max
  unsure (1)..(435): unsure at all n locations
tgaaccatcttgaacttcattatgaagtttcattctcatagtcttgctcttcatcattatgatgcaaactctggtgtagctttattctagaagctctctttgtagtcttggatttgtcttctatgtaaggccttattgtcttgtacttttcaagctcaagtactcagggggaaacattattcatcatgtagatgggcttctaaggctcttactcttgatagtagtactaagataatgataaatcataatttgagtgatattttttgtgagcttccgtgctatattcatgcattttcttggcaaaactcacgtttgaacactagntttaccttgcagaagtataaccgcttaatcaagtgaagaagttggaaaattcacaatttaatgaaagtttgatgctattctcactcgataacagtcatggtgcattgacca

SEQ ID NO: 214875 - DNA, 459 bp, Glycine max
  unsure (1)..(459): unsure at all n locations
agcttggagataaacttagttgtgtaagattcataagtggtcatgaagaatacttttaactttgttaaagttagtggaactagtgggatgccaagaactggacatggtcttagtggtagagacgaaccaatataaaactctttgtgtcttatatttctatgtctcttgctttaactgatcaaggatttgaattttattttgttttgaaaaagtgattttataaatatgttgatatcatttgaccatacctatttgctaaattgttatgctttcaatgttagactaaaatatttaacttgtgatgttacaaactacaaaacgaaacacaggtcattaacaaatgcaaaaaaacaaaaatcaaaatatacctccagccattgtcatgaanaaattgtcttgttttggttcttccaagctctcactctgtctctatagatggtgcatcagaacaaattgaaa

SEQ ID NO: 214876 - DNA, 425 bp, Glycine max
tatataaagaataaacaaacaccaccatacagcaagagtatggtatttgcatggatgacaacattaatcttcatcatctcaaatagaacaagatttatcctttcttcttactaaatatgttgttgaggttgaggattgattttataatcataagtctgcaagaactatttgatttgataatcttaattctaattcattttagaaccgcaacaaaaaccaaacatcaaagtgtaaatttagaaatccatcaagacaaaagaactagattaataaataagtcgttgaggactgattttataagactgcaagaacgatatgatttgataatcttaattcaatttcattctagaaccgccaaaaaccatacatcaaagtgtgaatttagaaactaattcattcaactaaagtcacacctcttcttcata

SEQ ID NO: 214877 - DNA, 439 bp, Glycine max
  unsure (1)..(439): unsure at all n locations
agctntaagcaacataaacactagtcttgatttctatgttgaaatcgttggtgctggtagcttgaacatatgaacttgtaaaaatgactgggaattggtcaatccgaatttgagttgaaatttttactgaaatttctagacatctggaaaaaaaattagaaaaaaagaaacaagtgatttggataaaagtgaaaaatacgaaaaatcacacaagttggcaggaaagttagtgtctatgaagaaaaaagtgaaaaggaagtgtgcttgttgctttgactcgaattttgttctataattggtgcctattttataccaatcttagttttgaaatttcaattgaaaattagtgtcaaaacaagtgccaaaactaaaggtttcttgagtcttttttttgttttttactctactctagagccattctagtttctcttttgaatct

SEQ ID NO: 214878 - DNA, 432 bp, Glycine max
  unsure (1)..(432): unsure at all n locations
nttgtcactccacccatatctcaccttgacattaactatactttacattgctaacaacaacatcaaagacttcttgcaccctggatacaaaggcttcttcgaatcactntgcaatgtatcatacataggggcatgtgtttcctgaaaagattcttttccaagatcacaaatcatttcctctaagcgatctcccatttgtacatcaaccggttcagattaggagtccctctacatgtctgtcaattcaccatgccatatccatgtcgtataattattcttagtcccatcacacaatagatgttctcgtatgtcgtcaaatagttgccgtctcctattcaaatagtntatacaacgatagagatgttttccatcctcatccaatcgacatctttcagaggcgaattcaagaactatttcatgcctcctcatcac

SEQ ID NO: 214879 - DNA, 417 bp, Glycine max
agcttgaggaagctccttttactgtttatgaagaggaactgtatgagactgcacctgttgataaaattgaggtgcagaagttggcaatgatgtgccagcaggttgaggatgatggaatttacaagatataccaaatttgcactgccccgttttcaaatagtaagagcactctttctcaccctgtttaaacaaaaggcatggtttaaccaattgcattattttctgtacgtaacatggatgagcagaagagcaaaacgaagagtcataccagccgtaacgggtatccataaatatttagtggagcttggcttacatatccacctccatcttttggatggtcggaattacaagatgcacccaaattacaggttcccgtctttaaataatactgctcatcagaaagaacaagaattagta

SEQ ID NO: 214880 - DNA, 370 bp, Glycine max
taacctcaatgtgagcgtcatttatgctttctatagtatgttcatgcagaatattgtaggtttaacatgtatcataagtcagttcaggatgtttccaataactcagttactgtttttaagtaccaaagccatcagaagatgaataacctacacaattgttaagatactaaattgtcttcttgatattgcttgcatcatataccaacttaaaccatgtttactaagctagacattcagctttggcctgagttatcttccacttcaaatataaaattaaaaaataaagtgagtatctaggaccaatgcagatgcttgttctttacctaaagtgatatgaacatatcatttcacaaaatccttaaactaatca

SEQ ID NO: 214881 - DNA, 453 bp, Glycine max
  unsure (1)..(453): unsure at all n locations
agctntagtcaaacagaataatccatatatgtcaaagaattgggtgttgaaaaatcacaacaagactttctatgattggtttaaagatacaatctttgcagatgagaatgctttagaaacattaagaaagctagcagatgggcctaaaagaaatgttataacctggcaaggatacgacataaataagtattcattttacacaaaagcacaagatgaaaaaagtacaatgcagaacagcggggtcatcctaagggctgaatctcaacacttcacaagtgtgaatgacgccaatccatgtgtagcttccatcccttactttgggttcattaatgaaatttgggagcttaactatgtgaaatctactgtttgtgttttcaaatgtaaatgggttgatagcaacaccagtgtgcgcaccgatgatataagaattacgttggtagacctaaacaaact

SEQ ID NO: 214882 - DNA, 446 bp, Glycine max
tgcctgtccgatgcagcagtaatgatggcccgagttatgttggggaatggttacgaacccggaatgggtttatgcaaagacaacggcggcataactagcctgataaatgccaaaggaaatcgtgggaagtatgggttaagctataagcccactcatgcagatgtaaagagaagcatcgcgggaaggaagagcggtagtcaaagctcgcggttgagcaagaaggtgaaggaagctcgccctgccacataagtagaagctttataagcgcgggtctgggggactaaggtcaagtggtcgcaatatacgaagatgatgttccgagtacattggatttggtacgaccatgccctcctgatttccagttgggaaattggcgagtggaggaacgccccgacatttacgcaacgagcataatgtatacctttactggtttaaaaactctatag

SEQ ID NO: 214883 - DNA, 459 bp, Glycine max
  unsure (1)..(459): unsure at all n locations
agcttcaataaggtctatacatcatgtgttcatggtcaaattcaatagcacaccatcacgaaaatgtataatacacttggctatggatatttaggagtgcaataaagctttacacaaagaacatagtataggttaaataaatatagctgaagatttaaatcacatagaaaacacctttaatttctagtaaacatagctaattctcccaactgctgctcgctctgcaattctattgcaatactctacatggaaaaatgaggtatattatttgtgatataaaatgacaaatcaaactaatgaagagaaacgaagaatattagatacccgagttaacaactttcacaaattaaacaatatctccttgtagacatattacatgagcataccttngctacatctagttttccaagctgtatagctagatcaaatatgtagtcagggtcaatagctacttcaaga

SEQ ID NO: 214884 - DNA, 433 bp, Glycine max
ggcctcaggtcgaaaagaaatttgtcccaacagttaagctagactgaagggaatatgtgggccatcatcgatgagtgcaaagagaagctaaatctagcggcgactcacgagcaaaggctagaggatgagtacgccaagatatcaacagaaaggaaagcaagggaaagggtaattgattcgttgcaccaagaggcaacaatgaggatggaccgatttgctcttactttgaacaggagtcaagaacttccccgattgctagccaaggccaaagcaatggcggacacctactccgcccccaaggagatccacggacttctcagctattgtcaacatatgatagacttaatggaccatatgattagaaaccgctaggaagtttgtattggccctcagatcttgactagttataactatttgaataaaataagtgtat

SEQ ID NO: 214885 - DNA, 456 bp, Glycine max
  unsure (1)..(456): unsure at all n locations
agcttggaaaggatagtatgaaatatgtgttcaagattgaaagaatgaattaattgaaaatgcaaaacaaagccttgcttttatagactcttcatgtctggtcaagaagaccatttagaagagttataacttttcgaaaaacttaaaaccaatttgaaaaagtcaaaacctttttgaagagttacatcttttgatttattcagaaacagtcactggtaatcgattaccaaatctgtgtaatcgattacacaaggcttttatgtgaaaggatgtgactcttcacatttgaatttgaatttcaacgttcaaagacactggtaatcgattaccaaaacattgtaatcgattacaactttttgaaattaatcggaacgttgtaaaatcaatttgaaaactttntcaaaacaattctgctactgggtatcgataccagagagtaaaactcttggtaacatg

SEQ ID NO: 214886 - DNA, 400 bp, Glycine max
tctacttatgtggcagggcgggctgccttcactttcttgtcttctacgcgagctctgaccaccgctctttctttccgcgatgctcctctttatatccgcctgagtgggtttatagcctaaaccatacttcccacgatttcctttggcatttatcaagctagttatgccgccgctgtctttgcctatacccatttcgggttcgtaaccatatcccaacataactcgggccatcattattgctgcatcgggcaggcaaggctgcccagagaaggagtccacagaggaaatgctgaccacctcaaaagactggaaagcgcgttctaacgattcttctgcggcttccacataaggcatataggatgggcagcctcaccagatgtcttcctcgcctgacacaatg

SEQ ID NO: 214887 - DNA, 380 bp, Glycine max
  unsure (1)..(380): unsure at all n locations
agctntgccatcggacaaactggttatactaatacaaaggtttttcttttaatttctgttcccattttatcccaagtaattctttttgtcatttactaaaaaaatgtaaggaaaattaatactgtaaataagaaacacatgccatataaaaacacatgtcataaacaacgttntaaattgcggtctctggtcagcagccacaataaaaattctgcgacccaattttacctacgacaacttcaagtcttctattacttaccatataattttaaaaaataaataataaaacaagcataaaaagcgtgtaaacgccactacactgaaattcagcataaaaagccgctacactaaccttagaaaattgaaggagaaaaaaaagt

SEQ ID NO: 214888 - DNA, 419 bp, Glycine max
tatccatatatgagaattgaaaaatcaatcttcaattctccattccttctccacaagcttgcccacacgcacacaacatcttgaaacgggtgaatgattgctagcttggtcagggttgctattgaattttgtgttgggtttaatggtttgacattggaggtgaagaggaggttgtattgattagtgtcggttttgctgtggaatgagtctttgtttttgaccgaattggcgagatcagattgaaggatgcatataatgaagccaaccatggtgaactcaaactggttaaagggaacatgacgattccgtgcaattaagaggggagtgtatagaagaaatgaaaagtgcaaatagcaatagccatataataacaatcagctatttcacctgatccaatcatgcttaaatttatatttatt

SEQ ID NO: 214889 - DNA, 392 bp, Glycine max
agctagcatgagatacatgtcttctctttctcaagcaaattcttaattcttcttgacatcatcaaaatcttcatgatttacattctccccctttttgatgatgacaaccacctgtatgttatgagcaacaacaaagaaaaaatatttatttgcatatagtttactcccccttggttttgcaatgattgcttatatgagatagttgaagatttcatatttttcatatgttaacaaattgtctcataaacaatagataatttttcttactattttatctccccctttgtcaacatcaaaaacaaatcatgaatagagaggagaaagatgttaccacttgttgcaatgtatgataatcaagtgataccaaaatgcattaaaacaatcatttcata

SEQ ID NO: 214890 - DNA, 374 bp, Glycine max
tgttgtacctagctgaaccgctgagagttaccttgtgttaataatgctacagtcattgtcttaattcccaagtgtgataattcaatatttgtaaagaaattcaagccgatctcattatgtgatgtgatttataaaatattgtctaaggctcttgccaatggaaggaaaaaagttctcccaggaattattaatgaggagtaataagcttttgttgttggtataggtctattatggataacgttttaatggctttcgagatcatccattacctgagatgcaagagaagtggtaatcggtgagctagataatgttatgtgtggagaatgtgcagtactcagtcaagttaaaccataaattgattgagcctattattc

SEQ ID NO: 214891 - DNA, 349 bp, Glycine max
atgacaccaatggataaatctcataagcagctcttgcgcttgtatcaatgggaaagggaatcaaataatgaagcatccctcaaactataagaagagagtgtattggtggataacgtgaacaacttcatacccacaaatgaaaaaggacttggagtcattcttcttaataagacggatacaaatccgggatcaatcatatgttcctcaacagataacaaagcgcatcatgaatcatctacaactgtggactgattggcgcgtgcattgcacaattaatggtcgatcctctgatatggatgagtctcggcttgataacacacccacaaaaaactggtctttcgggcatgct

SEQ ID NO: 214892 - DNA, 438 bp, Glycine max
  unsure (1)..(438): unsure at all n locations
agctttcctacaagtcctaatggacattttaaactatgatcaactcactntagactccaatttacaataaacccaaatttagtttctctaaccctcaaaatctcacacttttctacctacaacattgtcatcctcacatttaacccctaagttaactttccccctcatccataccagttttctatcaacaatttcagcacacaaacatcacaaagcatcatcataaaaccctaaaacagaatgggtaaatttggctcacatcaaacatgtcaagtttagcatgctttcaacaaattccttcacaaataactaccataaggcataaacctagtagaactacccatcatatctcccataaacccaatacccacgaaattcatgtgagaagaagtctacccaaacctgaaattcgaagtcccacacgtagggtgcgttcac

SEQ ID NO: 214893 - DNA, 460 bp, Glycine max
  unsure (1)..(460): unsure at all n locations
tgccttgtccttctcttcacgtcaattcttatctttcaagaagctcgtcctctacctttcaccttctcaagaagtaatcaaagccatgcattntcagggagtgccacaaaaatggttaaggagcttttgctaaagaagcaattgcttggtacggaaaattatgagcctaatcgactcagtccaggtggtccagaccctcttcatcactaatgaatgtgcaattaatgcatgaaaacttgagaatcatagattcatgcaacacgaaaaggaaagattgttattgtcactgcatttaccttcccacgtacgcattccttttagaattaggagtccataaatcattntattgcataaaatgatntatttgaccatttttagttgattcttaagaagaatcacacagagggtaggtggaatgatcctagaatattctctgtcgtctgtagctaaaatttcagtt

SEQ ID NO: 214894 - DNA, 304 bp, Glycine max
cgaagatgcgttcagacttcattattgttcgttaaatgcctccagactccattattgttcgtaacaccctaacagagctcaccatgagaactttgttctaattcacactacgggactccattataaataattctaatacttaccaacttcttatgctcgaatgccctttattgctgaaataataaaagaatgctctttgtgtaaaaaaacatgaatgctatttcgtcggccattatttgcattcataaagggaagaccgcgagtctattgccacttacattattttattcttgcttatggacca

SEQ ID NO: 214895 - DNA, 406 bp, Glycine max
actagcttaaattaattcaattctaaagttgtacaaattttttacttctggtaatcgattacataccttgtgtaatcgattacaggcttataaattcaaattcaaaattttcaaattgtctataaatcaatttacccacagaatcgattccaaagacgaaatatcatatttttgaagagataattgttcttataaaactgttgtaaaatatttcctttagccaaactggtgcaacatcaattaaggaattctttctaagatcctaactaagtacattgttcttcttgcgtctctgaattcttaactcgaatcgcactcattcttggcatcataaaaaattcatatcatatgcttctacaatattttttttaaatgaactttacccttcatccgttttccacgacat

SEQ ID NO: 214896 - DNA, 435 bp, Glycine max
  unsure (1)..(435): unsure at all n locations
gcttgagccaattaaacaacaataacgttttactctgatgtcnganngaggcccgcaacatatcgagacgctcgaaattgaatgttgaagctctgagccaattcatacgacaataacttttttctccgatttctgattgagtcccgtaatatatcgagatgctcgaaattatatgttgaacttctgagctaattcaaacgacaataactcttttctcggatgtctgattgagtcccgtaacatatcgagacgctcgaaattgaatgttgaatctctgagcaaattcaaacgacaataaatttttactcggatgtctggatgagccccataacatatcgagacgctcgaaattgaatgttgaacctctatgccaattcaaacgacaataaccttttactcggatgtctgattgagtcccgtaacatatcgagacgc

SEQ ID NO: 214897 - DNA, 468 bp, Glycine max
  unsure (1)..(468): unsure at all n locations
ntaacattcaacttcgagcgtctcgatatattacatgactctatcaaacatccgagaanaaagttattgtcgtttgaatttgctcagaggttcaacattcaatttcgagcgtctcgttatattacaggactcaatcagccatccgagtaaaaagttattgtcgtttgaattggctgagagcttcaacattcaatttcgagcgtctcgatatgttacgggactcaaacagacatccgagtaaaaagttattgtcgtttgaattggctcagagcatcaacattcaatttcgagcgtctcgatatatgacgggactcaatcagacatccgagaaaaaagttattgtcgtttgaattggctcagagcatcaacatttaatttcgagcgtctcgatatatgacaggactcaatcagacatccgactaaaaagttatttgtcgttcgaattagcttagagcttcaacatttaat

SEQ ID NO: 214898 - DNA, 369 bp, Glycine max
cacctattattatatataaagtttttttctcataaaaataaaaaataatgacaagaattacaataatttgtgcactttattcaataactgagtagaacctccttaacataattaaagatatttgattgcattacttttaattggaagtttaaagatgtagaaatctatattaagaaaagtattattgtgtgccaaaaatctgtgaatcacatgattaggaattacctaacgaaagattatacagaaatcatacatgatgaaagctatatagaggatccaactaactggatttagcaccctcaattaacctctctcatgcatataacaagatggagagttggagatcatgacgtgtttcaaatgcggata

SEQ ID NO: 214899 - DNA, 445 bp, Glycine max
  unsure (1)..(445): unsure at all n locations
gacactatgaatactaagctgtatgatgctgtccctttgtaacttgaaagcattttatcatcttatcgcataaagcatattcataaacttgactacgagaattgttgaagcaagtttagttaagctaaagaatttatgtgaaggtattattatacgcacaatagaagctattataatcgcctcctaaacatataatttgttgttatatgagtccatgaagcccgcgcatgaattaccagtgaactttgcaccgcataacagtcttaangtctctgtttcactatatatctacatggcctatatcaagctcgtatatctagttaattataagaagtcagaagcttaactgtgggggaaccatccatcatgatgtttagcaacaatattcttgaatcacttgttcacggtatcttgtactttatcttattacccgcgcatgtttgtt

SEQ ID NO: 214900 - DNA, 396 bp, Glycine max
  unsure (1)..(396): unsure at all n locations
agcttcaattgggacgggtgtacatcctcctctcttttantttatgaagacaaatattgtcaaataaatacaatcttatatacaatatggggtatatattgaaatggggttatcaatcacatgtacattcttgactattgtttaagacaaacgtcagaaaaaaaattacatagttgaatcaacatccttaccaatgtgattagaatgataaaatacctaacaaatgaaatccacgacatcacatgataattagaaaaatactataaccatcaagaatagaattattaaagattatatctacataaattaatattatgctcacagaaaaaatgcgcaaacaacaacattcttggtgattcggaaaaataataatttctgcctaaatcgaaaccaatc

SEQ ID NO: 214901 - DNA, 408 bp, Glycine max
  unsure (1)..(408): unsure at all n locations
cacttgaaactaagctatgaatgaatagtcaactatttgcttattatttttaatataattatatccaacttattatttattatttaaaaacatttaatggaattaataattanacacatcacttataaatcgttaaaatttacattaattatatttttgtattaattaaatatatataatgaggaaaaatcccttagaaaaacataattatagaaatgaaccactcctctcacattaaaatctacacacatgtatgggcggacatatattgttttatagcgtatgaaatggtttagaccctttagatctatcattgtatcaatgatatcattttggttcaaactctcatattttatctagtatagataatttatttaataaaattaacatgtaatgttttaaaacttt

SEQ ID NO: 214902 - DNA, 78 bp, Glycine max
aaaaaacacgcggaccgaaaagaaggaaccgaacgaagaggacaagagaaaaagaaacagaaaaaggaacaaaaaaaa

SEQ ID NO: 214903 - DNA, 138 bp, Glycine max
tggggcttcaaacataaaaatccctcccactgtgaaatgtcccctatgtgtgatcacaagtttatgactaacctggccaactgaattaaaatagtgtggaaaacttcgaaatggcaaatagtacacttataatatcaa

SEQ ID NO: 214904 - DNA, 424 bp, Glycine max
ttttattatcgggtcttcattccttattattattcgataattttttgggtgcttctgaaacaaaaacccttatttgtcaaggaatgtgtggtttgggaagcaatatttggtagcattttaagcgtttaaagtcactgaaatgtgtcgtttaagaattagaatattagagaggatagggtgtttttcttattgttatgttacatttatgtgatgggtctcagtgttaaaaagtaagagaagtatgtaacaagttcatgtacaatcatataagctcaaggaggtaaatatgctagctggaaaccgcgacctcattactatcatggaagtggctgggaatttgatccgaagccgatgtgtctggatggccttgagagcacatcacatttttgtgggtcttcctgttctgccgtctatactctataca

SEQ ID NO: 214905 - DNA, 172 bp, Glycine max
aggttgattatttgccaaaaaaacgttaattgagacatgtggatattaggagattatctcatcctttttcttaattccgactttggttatgccctctttatgtaaacctctaaataggatgtcgatctctttaacttgcgatgtagtatatctcatatgcttattgatggat

SEQ ID NO: 214906 - DNA, 410 bp, Glycine max
  unsure (1)..(410): unsure at all n locations
gtaaaggtgaaattacagctttatttttgtcccaaaggggactaggagatatgccgccggggtcaagagaccctggggacgacaagtggggtgccattttccagaaccaagcatgaccaatcccgacccaaccagggcatagtcggtcagtgagaacctgtgatgtaacctaaacaggccgagcttcctggcagtctaacatgataaaagtgaacataagacncacaaaagcaagtggaggctatgtgggcgggctggcccagcatgtgaaactcttaatcgatatggtgggttaatggcctccggtaatcgaataccaagggtgggtaatcgattacaaggcttaataatgaagacaggaggctaagatggtctctggtaatcgaataccacgcggtgtaatcgattac

SEQ ID NO: 214907 - DNA, 383 bp, Glycine max
tcatcatccagcggtcagctcaagacgttaaagaagtgctcctaagaggcaccctattatctctaatcctggtctttaaaaaattagctttaattttctggctgctccctcgaaaaaaattggaattcccctagttcatttgcaaccataggagtttaaaaaaatatataaacctgacaaggaataataataaaaataaaggttagctcacctgggcaagcatgtctgatgcaaaatttaaataggggaggggtgaagccatttctccaccccatttcatgccccaacacaaaaaacactaaaggtctatggaaacgccccaatccactagccccaagccctattacggcaatttttctcacaatctgcatttatgacactcc

SEQ ID NO: 214908 - DNA, 377 bp, Glycine max
tatatccttactatttttatatacttttaccctctgctcttcaaattgttcatatgtaactattttttaattacttttttctttgtattaatttttgggttatttatttcataatattataatatttactttaacaacactatttaattagtttttaattagatatgtttttgtctacaaaacaagaatagaattcacataaaacagttatacaatatgtttattattttatatttaccaactatttcaataattttacaaaacgcttttaatttaataagcaagcttataaacttttagcttttagctggtagcttataaactttaaagcatcttattagtcagttttggcgaagacataaccataacctttttac

SEQ ID NO: 214909 - DNA, 377 bp, Glycine max
  unsure (1)..(377): unsure at all n locations
actatacactactcaacgcttatntaatatatggccagaccaaatgactaaagagaattatcttttattttaataatgtacgagcaattggcattgaataacaaaatgatcaattgaccaattcgctgaaacaataccaactataacattatttccatgattcgcgtagaaaaggatacgataatactgttcttaaggaagccctccagaaattgaaactaggactgtattcttacttgaataaaactattaacatggtccaattggtggacatgatagaatacaaaaagatatgatatgagagctaaataagagtacgaaacgcgagggtgataagatggtcttgtcatatcttattagctcactaaacaatgaac

SEQ ID NO: 214910 - DNA, 468 bp, Glycine max
  unsure (1)..(468): unsure at all n locations
ctacgcttgaagtgtcaaatctaccctacaagtggtttttattgtatattactcccaancgaaccaatggattccattctcttgattgatgttgctctccaccaattattttctttacttcctcttgaagcgtagaagagagaagaaaaacacccatgcgatatgatgatatagactgtgctagtgactttaaaaaaatttctttacctgctttatagatgaactatcttgaggaacccaaagatagctcttctacttctccctatgaccgatggtagccccagatatttttctatttcaatggttgttgtcactcttaaaaaggatgagatgaatagcctattgttttatatgtattgtagctgaatagaatttttgatctctataaattaaataatctgccanatttatctcatacatgtcatgagtttgttaaggagagatgtttcttttcatttgtactcaaaa

SEQ ID NO: 214911 - DNA, 407 bp, Glycine max
tttgatatctcaaaagggggaacaactagacattctcttatagaattatgcaataatatggcttttgtatctatgattgaacctaaaaatataaaaaaagccatactatatgataactggatcattgctatgcaaaaagaactgaaccacattgatacaaacaatgtgtggaaattagtagaaaaacctgaataatatcctgtcataggaacacaatgggtttttagaaataaattaaatgaacatgcgataattattagaaataaacccaggttagtaccacaagggtttaatcaagaagaacgaatagactatgaagaaacatatgctcctgttgcaagataagaagccattaaaatgcttttggcatatgcatccataatggattttaactttatcaatggatg

SEQ ID NO: 214912 - DNA, 388 bp, Glycine max
  unsure (1)..(388): unsure at all n locations
gcaactgagatctgacaatgccaaagaactattttttgattactttctaagngaacaagggacactacatcagttcagttgcccttatatgcttgagcaaaattcagtggtggaaagaaagcatcaacatttgttgaatgttgctaggtcactattgtttcaatcaaaggctccaatttgtttttggggagaatgtataaacactgtagtttttctaattaataaagtgcatactcctgctcttaaaggttgttcaccatatgagattttctacataaaaacaaccaccatatgaataccttagagtctntggctgcctgtgttatgctgttgtaccatttcatcagggaaacaaattctcacctagagcatttcctactgtctttct

SEQ ID NO: 214913 - DNA, 434 bp, Glycine max
  unsure (1)..(434): unsure at all n locations
tgcaaaagctnggttacctccttcttcactacatcatgatttatcttgttgagncttcttggggctctcttactggtttagccccatcttctaaatctattcgatgcatacatgtggatgggctaataccaggaatgtctgccagggtccagcctatagccttcttatgcttcttgagaactgataacaacttctcctcttgctcatcaacaagggaggcagatataattactggaaaacttttgctatcatccaagtaagcatattttaaatttgatggcagaggcttcaattctggtgtggatggctggatagtggtagaaagagatggtttctcatcctgtacctcataaagaaagacagaggtatgtgtactttctgaaacatggctatttctatctgactctataaatacaatctcaagaggttaaaca

SEQ ID NO: 214914 - DNA, 329 bp, Glycine max
gctcccacacaaaaaccaactagggtgacgaattcacctgctattttacatgaagtctggacacatatataatgagtgttcaagtacgccacatggtcgtgtaagaaaggcaaatctcttgctatttgttgttcagatgagaatttagcgtctcgtacctaacgatacttggagggtagattctggtgctactactcacataagtataaccatgcacggttggctgtggagccgattgccaagtaatgatgatagattcatatttgttgaagatggaataaaggttgcaccgtaagcctatgaactttatattgtagttaagactggat

SEQ ID NO: 214915 - DNA, 423 bp, Glycine max
  unsure (1)..(423): unsure at all n locations
ggacttaagcaccgcagctgcagcttggcattatgatagggcattgttttatatttggctannaaaactacataaacacggattgatcggttatgggaattatcaaaagctaagtttttgggaacattgtgtatatggaaaacaaaatagagatattttccatattgcaactcacacaacttagggtatcctagattatgtgcactctgatgtttgggggccaatcagggtacctttcttaggaggagcaaaatatttcataactttcattgaagattggtctacgaaagtctggacttatcttttgaaacataaaaatcaagcttttaagtgtttcaaacaatggaaattgcttgttgagaatcaaactgcgtggcatgtgaagctgctcagaactgataatggccttgaattcttaagtga

SEQ ID NO: 214916 - DNA, 473 bp, Glycine max
tctaatccttgggatttattcatcaggtcgagtcctttgtcttctcgaagatcaatggcaatggaatggagaaagaagggaggtgattggagatgccacttcaaggagaagatgagtcatgaacaagctcaccaccatcagaagccatggataaaagcttaaaggtaagagaagatgagtggatggagagggggatgtagaagcatagcttcatggtgaatcataggtgattcaaaggtattttgatgataacaataatgataacaaaagatgatgactaaggtgatgacaaaaagctcaaagatcaatcaaagagcaactcaagtgaatcaagaacaattcaagagttcaagatatattcaagaagaattctagactcaagaagaatgttaagattccagaatcaagattcaatggtctagatctcaaggaatcagatccagattcaagactcatgattcacgaatcaagag

SEQ ID NO: 214917 - DNA, 393 bp, Glycine max
agcttgaaggcgtgtaactcatcattctccataatagaacactaggaatatgcctaatatcatcgctattatctcttctcctccgcatagagggaaacacttgggctgccaaatccctccactttgggcgtatctatgaaagatagtgccccctttttcacatgatttgagttcatcctatcccaaccattatactgaccctgcctaacgaaggcaaccataggtccttcaagaatggactcgggaagggtccaagtagtgaccaggaacagctacccagtaagactttcttggaagaaaggataacaatcctcagttttgcgatgccccatcttcacaaatattttaatggtcctgggcaagatcccttgacttgcaaagccacacttaact

SEQ ID NO: 214918 - DNA, 465 bp, Glycine max
  unsure (1)..(465): unsure at all n locations
cgcctgtaggattatggggtatccatcacatgttgtactatgtggcggtcgggcgatggtgcataataattctccacatccacaaatcacgtataaacccaccatcccctggtgcccacctccaactgagctcacgtactctcacgtagcccttatcctcgttcttctcaacgccgggtccccatcaatccttccaagcttccacaacatccaagtaattccacatccaatcatcatgaactaacaaaaccaagcaaaacagggcaaaggcagaaaactctgcccaaaacacaactcaaaatcacagcttttcacatacaaataccccagtaacatttccttcgttccaattctgtaaccgttggatcgactcgaaaattntactggaagtctctattacataagtctacattttgactgttgggatctgcaagaaaatgtccagaaccccatatgtactaccct

SEQ ID NO: 214919 - DNA, 336 bp, Glycine max
ggacgcactacaagaataaagccacggcttttgcgcaagcagtcaatggggctaaacacaccaaatgattatgacgatggatgagggctcaaatttccacaaaggtaaactcatcactttcaaacttgagctatcaaaactatcatgacacgtgaagaaaaacaaggattcaagtccaaaatgccaaaacattattttgaaacaattacccattctatgaacatatcctataatgaaaaaaaaacctgcacaggcttcatgcacacaaattgacccataaattaaacttaaatgtgacgaaacaaccacataacaaattacacaccaacaaaacta

SEQ ID NO: 214920 - DNA, 343 bp, Glycine max
  unsure (1)..(343): unsure at all n locations
ctgttagcgcatgcgagacagaaccacatttgtcttatcgncagaccaagaaagtgggtctagcccggccacagtataaacgcgagagttgcccagatatgcgaaaagagctagagaagggatcgactctttcaccaaaggcacctgtggatggatcggttgctctaccttgacgggagtaaaacttcccgatgttaccaagccaagcgaggcaacacctactcgcccgaaagattatggcttctggtatgcacatatgaaactatggcccatataaaatatatgaactgttggctctaacctgataatacattcttttgaataaagagtgtcctgtttactc

SEQ ID NO: 214921 - DNA, 337 bp, Glycine max
  unsure (1)..(337): unsure at all n locations
taaaagaataaccttagatacttttacctaaacgtaaagaaaatcacgggaaatgaatatattnattcaaggatatatgccattagaagaatcaaagcagaatcctactatagaaagatctgtatcttgtcctttggtaagaaaaatccatctaatttaccaaagttcaatccttaattaagcacaattggagatccgtagttgagactggtctgcatttcccaaacggcataaatatccttgttgtatccagtaaaacagatcgatcaggaccacaccgttttgaactaatcgcccatttaaataaagaaaggcaaaaggggcttttgtagccatt

SEQ ID NO: 214922 - DNA, 278 bp, Glycine max
gacaatttattgggttaactgtaccggaggatatcttaattgcgtctttgattggaatcactgactctgtaattgcgtcagttcgaaagtttcaaaagaaggcacatgaagcgtggaatatatattctctttgtcttaatggttcaaggaggagaacttcccatctttgttattggagggggatgatgcatgaataatatattgtcatttgcatgatggagatgtatgcggacgataacgaacgtggttattgattgaacgataataatatattgcat

SEQ ID NO: 214923 - DNA, 395 bp, Glycine max
tcatgggggatccgccgctactacaacaaatatgtgtcagttggtggtcgtggttgatagagattgaaaactgctccattgccacgaatgagagagatcgacaaccgcttcatcatcacgaacgagggtttttcaattctgaactctttcgctcaatgtcgtcacacaccacatctatcctagccaccccatcaaaagcctactatgaacgagggagactgcaactgcttcatgaccacaatctacggagaagggtttttgactttgattattataaaatcaacatataaattattggtggtttaaaaccatcagtatgtgaatactattataagtgacacatgcccgtcactacgttaacgtcgtcatcccatttatacacaatgacttaattg

SEQ ID NO: 214924 - DNA, 297 bp, Glycine max
atgaattcactgggagatggaaaaacccacttggaagcaaccaccaccacctcgtttaatacctggaaaggatcataaaactgagggaagaagttttcattaatccttttagccaaagatcattgccctgtaaggttgcatcttcaaaaacacccaattaccgactacatattctatgtcccggcggcgattgttggcattcgctcgcatgatatcttgagacttcaacatattttcttagacgagccaataattcattctgagcaattggtacgttaattgactccttcaaggcgg

SEQ ID NO: 214925 - DNA, 448 bp, Glycine max
cacggaggaaatgcttaccaccttcttttactgtgaaacggtttctaatgactcctctgcggcctccacatacggcataaaggatgggcagctcaccaagaagtctttctcgcctgatacgatgaccagatgcccttccactatgaatatcaacttttggtggagtgtatagggaacaactcccactgagtggatccacggacgccccaacagacagctgtaggggggattaatgtccattatatggaaggtaacttggcatgtgtgagggcctatctgtactgtgagatctatctctcccctaacctctcggcgggtgccgtcgaaggcacgaaccaccattgaactctgctctaagtgtgaggcattgaatggtaatttcttcaaagtgctcttaggcatcacgtttatactggaaccattatcgatgaacactttggctatgata

SEQ ID NO: 214926 - DNA, 464 bp, Glycine max
  unsure (1)..(464): unsure at all n locations
tgagtataattcattctgtgttgtgagcctacatcttacttttgtgattattgatgtttctatcacaatcaagtgattgttgacatctccatgtgtgtgtacaatgtgattatgttttcatttctacgattcatttggaatatatcgtgttgattatgaataagtgaccaatcttttttttatttaaaatttttgtctcctagtcaatcgactattaatcttttgatgtgctgattatcttccaatcatgccttgttaaactgcttgataacctatcatgtttttacttctgttatgaatagagagagactctgcccttgccaatcacgttaacgtgtttcgagaggaaatacttgagtaggcattatccttgttactttgtaatgaaagtcaaacttagtaactcattgtcttgtgttcttgacgatatcctanttaccacctagcgcgagataagatcttat

SEQ ID NO: 214927 - DNA, 384 bp, Glycine max
aaactaaatatctattatcatctaaatttgatatgaaagacatgggtgaagcaagggttaatttccgagttaaaattaacaggaagggagatagtatattactatcctatgagcattattgtgagaaacttctcaagaagtataaatattatgactttaagtcagtgagtaccccttatgatgctaactctcaattaaagaaaaacatatgaaaactaattgctgaaactcaatatgcccaaatcattaggagcttattgcatttgatgaacttttctagatctgatattgcatacgcaacaggcagattgagtaaatatacccataatccatatcagaaccattgggatgcacttgctatactcatgagatatctgggaggta

SEQ ID NO: 214928 - DNA, 442 bp, Glycine max
  unsure (1)..(442): unsure at all n locations
taaacatgccacggctgacatgatacatgtagggcttgttttttttttgtataaaaggatgccncacattatttccatgacacaaatgcgaaaatgatgatctggaaatcttatgcaaaaatggtcatgcatgcacctatgccgacactcaagtgtcaaatttttatggtcatgtgatgctagggctcatgaatcattttctctattttagtcaacccaatgtttccaaaatatgattcttttattaatttgtgcattcctccaagtcattttgggcgttcagcgaaaaatgtacagcattcaccctttatgtgtagacacgcttttgttttattttctaaaacggatatgatctatgaatgaatctttttcaaacaaaagttggaaattctctcttttatacgcatgttggttttcagcttgacaattattcttattctcc

SEQ ID NO: 214929 - DNA, 332 bp, Glycine max
aaacaccaaacaccaaaaacacacaatcgcagcggaaaaagacacccagaaggatacatccacacccgcaaactaagaacccaaaatagcgaggaaggtaagcaaaaacacgacccagaaacaaaacttcaatcccgaagagaagataccaaggatcggcaccaaaatgcagactatggcataaagccaaagcggccagccgcaaaacggaaataaacaaaaaaggcaagccagccctaagaaacatcatcgaggatctcagaacaaacccccgagaaaaaaaaaaaacacagcgactccctacaaaaacgcgggaggcgaccacaggaaac

SEQ ID NO: 214930 - DNA, 68 bp, Glycine max
  unsure (1)..(68): unsure at all n locations
gtaccaatatactcccactcnaaagagnnatgtgcgcgtgccctcaggaccaanagcgacgcggcagc

SEQ ID NO: 214931 - DNA, 384 bp, Glycine max
  unsure (1)..(384): unsure at all n locations
acttattacttgctttttaacttacctcttcatatcttttatgttaaagttgttgacaatgtgcatggacaataaacaggaaataacttctgcctgctcgtacaaagatgctgcttctaaggattctgcagacgaatttgtgatgtccccagcacaaactgctagacatgaatttttagcatgctaaaaattgtcctaccccaccccagcaactgcaagatttaagttctattggaacagtaaatacagggccgaaaactgtaaataagactgataaactngtgcaccctatggagataactgtggaatatatcttctcaactagtgtggaaaagggaaaacacgttgcactgtgtaaagtaatattacgtataaccaattatg

SEQ ID NO: 214932 - DNA, 455 bp, Glycine max
  unsure (1)..(455): unsure at all n locations
tgttgtatgagtngatgatgactcatgcgctttggcacatctttaatgttcaacaacctttgcataactcctaacaccatctgaaattaatcttgcaataaaaattacaatcagtaaccaatttttcagtgacaattttggaagaaaaaaaatcaacaaaatccaatttgcattacctagcaaaagtagtctccacctagtacatagtatgtcgatgtactgtgatgggctgtaaatgtacaagaccacgtgatggttgtccctcctctggtggaatgacataagggtggaaaaccttgtaaaaccaaggtagatagtcagatatgcaaacccaaggacccgcaagtggcacaacattgccagaggaataatatactgttaccagttcacccatgcctgatcacaaagctgatacatatgacggtgaggtggctggcgtggaatcctctgtacat

SEQ ID NO: 214933 - DNA, 478 bp, Glycine max
  unsure (1)..(478): unsure at all n locations
tactcagcttgatattacaatnttgtttgttatgcccaatgtctttgtataagcaattcaagagagcttacgacttattttgattcatanatccagccacaaatcagcaccacaactcaatttcttcataggcatcatacaacaaacctagaaaacaaaacaaagtccaacaacaagactacttctaggaatggatttacaatatgttatgaactaaatagcatgcatgaattagattcacaattcanaagataggcttagaatgacaagaatacatgaacanatgtatctagaattcaatcaacaaaatcaaaattcaacatatactttgaacataatgtgacaattattatgactaaacatgactctaagacaacatggaataagtgatgtacacttagattattgtgttcttgttataatcaatattgtcgaagacaaattagaatctaagggtcaacacaagaagaatatgact

SEQ ID NO: 214934 - DNA, 289 bp, Glycine max
ccaaaaaggggaaaaaccgacgcacaccaaccaagaacaacaggggaggcaggccgaaaacaagacacaggaaagcacggcacaaacaaaaaggggaaatcgacacgcaacaggcagcgaaggcagaggaagaaccacaaacgcgcaacaaacgaagcaaaggcgcccaccagaaaaaaagacaagacaaacaaggagataacaaggaccacccccaaaagaccacgagaaaaataggaagggaacccccacggagcaagcaaaggcaggcccaacgaaaaaaacaaaa

SEQ ID NO: 214935 - DNA, 393 bp, Glycine max
gttgtggcgttgtgttcggagtttcttacttttgcacggatacaacttgcatggcttttgagtgggtcatggcgaatatagtgaagtacacgcacgtgcaaaagaaggttgtggaggaaattaaagaagtgctgggtgatagaaaagataaggaagtgaaagacgaagatctgaacaagttgccgtatctaaaagatgtgattctggaaggtttaagacgttatgacgtgacggaggacgtgatttttggtgccacatgcagtgacggaggacgtggttctgaatgattatttggtgcctaaaaatgtgactgtgaacattatggtggcagagatggggtgggattctatggtttgggacgatccaatggaattcaagccagagaggtttctt

SEQ ID NO: 214936 - DNA, 429 bp, Glycine max
  unsure (1)..(429): unsure at all n locations
caagcttgcataatgagaatctgtccttcatatatgctttgttattnggcatttgaagtttgggagctcttataagatgggtctgctaaagctggaggtggggctgaagtaaaagatgcaaggatgccagctattggtgcaaaggaagaggggacatcagctactctgagcttggtcttcctgtaaaagcaaagcttcatggtgaatcaaaggtgattcaaaggtgttttgatgataacaaaagatgatgacaaaaagctcaaagatcaatcaaagaataactcaagttaatcaagaacaattcatgagttaaagatagaatcaagtcaagagttcaggatagaatcaagaagaattctagactcaagaagaaagtttagagtctagaatcaagattcaaggttcaagatctcaagaaatccaagaatc

SEQ ID NO: 214937 - DNA, 355 bp, Glycine max
  unsure (1)..(355): unsure at all n locations
ntgaagggaagagagagaccaatcacgagcacatagcatggtcttgaaagaagagtaggctgcttgctcaaggtcctaaagaaacttgtctcaacgtttatgcgagacagagaccaacatgttagccatcgtctgcaagtaccaagaagaactaaatctagccacgacccacgagcataaagtggtggacgagtatgcccaagtgtacgccgaataggaagctaaaggaagggtgatcgactcattacatcaagaggcaacaatgtggatggaccgatttgctcttaccttgaacgggagtcaagaacttcctcgattggtagcctatgccaaagcgatggcgtatacctacttc

SEQ ID NO: 214938 - DNA, 335 bp, Glycine max
aacacacaattaactaataatccaagtgatcaatcccaatataaaagcgaaagcgatagaaagatacatattactgaataacaccgaagaactgtattaaacttgagtacatgggtacaactacatcaaaatctatagtctaaggggtttagccaaccatgttcataaaaaataaaaaagccatacatattggctttagaaataaaaagaatgaaaaccctcccaaactcggaccttgatgttctcgctgcaattctcctcacaaaagatattgctgttcggaaaatgaataatgaaatttgaatccccaaaacagactcccacttcttattata

SEQ ID NO: 214939 - DNA, 407 bp, Glycine max
  unsure (1)..(407): unsure at all n locations
tatcttcatcagcacaattgtggaaggaacattaccggctctgcggcacaaaactactaatgagcaccgcccatcatccacagaccgatggacaaacagaggtgctcaatcgagcgttggagcaatacttacgtaccttcgntcatcagaaaccaaaacaatagagacagtttctcaggctcgctgaatggtgctacaacaccataagtcactcatcaactaacctctctccctatgaggtcacatatggcaagccatcatcggcaatgacagactatcttcctggatcatctccagtggaagcagtggatattctcctttcctcacaccaacattagtatgagacccttcgccggaaactcgaacatactcacgcgaagatgaaacacactacaaatactccatcg

SEQ ID NO: 214940 - DNA, 394 bp, Glycine max
gtttttaggcttaaataggtggctttgatcgggctcatgcgcataacgcaattctgagccgcttagcgcgcattatagaattttggattagcgcgactttactcactaatcggatggactaaagcggtgcgcttaccaggatggtcctttgctcatcgaacaaggacaggtcatccttcatcagatatttcctcgcgctttaccgaggaatgttgtgcttagcggatggctcgctaactagcagattggcttagcgagagggtgaaaattagcacttcaaaacttgcctaattaacttgaaattgagagaaaaatgattattaaccacccacatggcagcactcagtgtttttacctatcttcacagaaaggattactaactacaaataccata

SEQ ID NO: 214941 - DNA, 432 bp, Glycine max
agcttgaaggaaaacttgatgccttggtcaatttgttaactcagcttgccatgaatcagaaatctacacctgttgtaagagtctgtggtctatgttcttttgcagatcaccatacaaatctttgtccttctttgcagaaacaatctggagtcaatgagcaacctaaagcttatgctgcaaacatttataatagacctcctcagttgcaaaacccacaacagtagaataattatgacctttcgagcaatagatacaatccaggttggaggaatcatccaaatctgagatggacaagtcctccacaacaacagcagcatgtccctcatttctagaatgttgttggtccaagcaagccatatgttcctcctccaatacggcaacaacagtcacaacaaagacaataagcaactgaggctccttcttaaccttcct

SEQ ID NO: 214942 - DNA, 419 bp, Glycine max
  unsure (1)..(419): unsure at all n locations
tagtaaagcttggcttgactcggctcattttcaccttcttgtttttaaacattgatgcatcttttgaaaaagcccttgtgctattacaacttttgagtctaaaataactcttagccgacaatgagatggatctttgtggctttgtcagttgttaatgtcaatatttgtaagtaatgtatataccaatttttnttatcatgaacaagtacacttcctccctctgttatagtatcacattctgtttgtcttgtgattaaccatattaagggatttgttcgtgggtgcactggaccattgattgtgaaactagcattattctaaatattctgtctacaaaaaatgcgatataaagacattacaaaacgattaaagcgaacaaattgtgatagtccatacggacaaacccttgcttaggtaac

SEQ ID NO: 214943 - DNA, 388 bp, Glycine max
tgctcggacgacatatgcaatgttaatcttttgacgacactatcgaatgaggcccaatgcgtattaaagaactcgtcaaactggtacctcaaacccaaactcgggcaatgtttgtatctcaacagggacctcatcagccatgagcatagacgcataattgatgtcctacacaggaaaacagatctattttcttggcatccatttgacatgccgggtatccaccccaaaattttatgccacaggctggcaatttgtccccagcccataccagtgttccctaagaataagaggatcgagaggaacgacgttatccactcgaaggggaagtagacaagctcctcatagccaactttaataaagaagtccagtactctacctggctcaccaa

SEQ ID NO: 214944 - DNA, 449 bp, Glycine max
  unsure (1)..(449): unsure at all n locations
tgcaatgctgtacaaaagcaaaaggagtttatatataatatttatacaatagcttctaagaaagagagagttactttggtggtgtgggataactatatatggggtaaatctggaaatggaaaaaatttataagttaaataaaatgaattataaggtgtcaagttttaaggtttcanaacatcagtcggctaaatttttttggtggatccgacatttctctttctactttgattcgtgtaatttttctaaatctttatccctaaaaaatttgaaatcattatttttagtgcctataaaattaatgagatttagttttagtctttataaaatattttgtctaattatcagtctctaaaatgtgaatcacaattttttagtccctagcatttatttcaagataagtcattacattctaagatttttttattataagtatcacacttaataaa

SEQ ID NO: 214945 - DNA, 244 bp, Glycine max
gtgaaaacactctggaccaccaacgacatcatccccacactgcccgcaagagaaaaccctgatgaaagggccaaccagccaactaagaaaggcaaatctcaaggaaacagcacgcaacgacccgacccccaatcacacacaacaacgagccgacagcgcttcatcaaaacaacccccccctaccaggaagcatagaaaacccgctctattaacccccgtgcggcgaatcctgaaaaacacccgg

SEQ ID NO: 214946 - DNA, 283 bp, Glycine max
cattgttacgcatcgaaggcacactgagcagcacgttcctcacctttgggcgaaatcttagaaagaaccgcgcccataattgcacatcgactgtagcggcatcctatccaaaccaatatacccgaccctgcccaacgaaagcaacgataacgctcctccaacaaaggactcgggaaggtcccaagtgagtgtaccacggcacaactaccccaacaagactttcttgggaggaaggtatcaacaattcctcacctttcgcgaggcccccatcttccaacaaaac

SEQ ID NO: 214947 - DNA, 382 bp, Glycine max
  unsure (1)..(382): unsure at all n locations
atttctgatcacagagngaacctggagatatgtcgcgggggccacgaaacctcggtgaacgcacgaggggtgctattgcccaaaaccaagcttgaccaatcccgacccaaccacggcatagtcagccagtgagaacccgtgatgtacctaaacaggcgagctcctggtagtcaaacgataaaagaacaaacaccacaaagcagggaggcttggggcgggctggcagctatcaaactcggcgataactgtgaacggcccctggaatcgataccaaggggggaatcaatccacgcctaaaaggaaggaggagctaaaaggctctggaattataccaagagctaatcatacaagctgaaacgaacaggaagcagaggctcggaac

SEQ ID NO: 214948 - DNA, 205 bp, Glycine max
  unsure (1)..(205): unsure at all n locations
aaataaataaaaaaaaaaaaaaaagagagatgactgagcacaannaaanaaggaaaaaagaaggaaagaaattttataaaaaaagaagggaaagaaaaaaaaaaaagaaaaaagaaaaaagaaaaaaaaaagaaaaaaaaaaaaaaaaaaagagaaaaaaagagaagaaaaagaaaaaaaaaaaaaggaaaaaggaaaaaaagag

SEQ ID NO: 214949 - DNA, 342 bp, Glycine max
tatagacacttgtgaatattttccaacatgaatgtgtgtatcatcttccatttcatctcatagtcacatcattattcttatcactattttttgcactctaatctatacaatccattttgcgaatttgaagatgatgattggacgctgtgagtgacccgaggaacatctacagaacagaagagaacagaagtgtttcatgcctcctacgtacatattgcatttcattttcacgggactcggtctattctatagaacaattatatttcaacaacatttattttaagcaaaatatcaacatcgctaaattattcatataactctctcattactgaataaataatc

SEQ ID NO: 214950 - DNA, 447 bp, Glycine max
ctgcggcatgcaagctttgaccatgacatgtgtgcatttgggccgttctatctcgtacatacagatgctgccctcattccttcctctgcttcagcccatcaaatcaaaagattcgcctaaactcagagcatcttagctatgttccagatcaccccagcaccagcccaaccttaagccactttacccccaccacctaccttagatacccctccccaaatagctttagtcatctcatgctaccccaacatttttactaaaccaacccaattacctttacctcgcaacattcaacatcatattcatgttctcccaaacaccgaccctattaacgtgaaaccttatcgatatcctcatttccagaaaatggaaattgagaagcagatcacatcgatgcttgtcgtcggccttatccagcctagtcacagtccatttttctcttcaattctc

SEQ ID NO: 214951 - DNA, 326 bp, Glycine max
atataacattcagaacagaaaatggataaactgatattattgattctgaaaaagttagttttaatgcagttacaaaggaggtatttataaacctctagaccttgaagtggattgcacctcacaacaccatatggcacggttaaaaaccaaatctttagatattatttaccaatgcacttgctaagaaaaaaatttgtgagcaatataaaatcataaacttgtaacttattgaatgtttcagacgtacttcattattttctgattgataggcacttctttgaactcgtttctcaagttctattagctcatttcgcagaagctcgaag

SEQ ID NO: 214952 - DNA, 320 bp, Glycine max
  unsure (1)..(320): unsure at all n locations
aagaaaaaaaggagagggatatttaatgaaaaagnaaaggaaggaggaaggaaagaaagaaaaaaagtggaggggggggaaagaaagaaaggatgagtagaaatgaaaaaaataaagagagaagtgaaagaagggaaaaaaggaaggaagaaaaaatggaattagagaagaaaaatgagagaggaagaaaattgaatggtaaaaaaaatgaaagagaaaggaaagggaaaaagaaaagaaagaaagagggagatatgaaaaaaaggaagggaaaaaaggaaggaaaggaaaaaagaaaaaaaagagaaaagaggaagaaa

SEQ ID NO: 214953 - DNA, 437 bp, Glycine max
gacacatgaaactcagcttatggagtatagttcagcctatgagcgcttatttttttatttttgtacaacaagtgttcaataggtgttctattctggttttgtatcttagcagttagctgttatctctaactcactcattggtagttagagctgagctgctcttgttcattgtccatatataccctatgtaaaaactacttgtataggttgaaatcaattttctcaataatacaatttctctcttcgaattctctcttaactatattaaagctaattttcattttcataatgagtaagaaaaattatgaagtagcagtgcttaccatattctttatttgggcattggcgtctgatatttgacttatattactatggataggttcactttctaattaggttttgctttaacttcagatacatctatctcactttacaag

SEQ ID NO: 214954 - DNA, 121 bp, Glycine max
  unsure (1)..(121): unsure at all n locations
ccgcggcacgcagcgnacacaaacggagaanatcatttattactcacacaaaggggggaaaccgcgcaaagagaaaaaaagacccgagacgccaacaagacacacacgagccaaaaaaaag

SEQ ID NO: 214955 - DNA, 242 bp, Glycine max
ctattccacccccgaattatatccggatgatgcctataaggaaatgttcggccggggtcatccgggcatcgctctttatgaggcctcgaactgccaactatcctagccggcccacgtcggctagcatattttcccaccaatatctgtgagaagcatgttgtttcttgccaaagggggctaaagttttcgtggcctgacaaatgagaacatgccagggctgccgaacacaatcccgacgaaaa

SEQ ID NO: 214956 - DNA, 351 bp, Glycine max
actaccttgagcacaaggagaggtatgaacaacaattatcctcatgaagtggatcaagggaataagatctatgaaaagaaggagagaaaggaatgatggtcctaacaaaccaatgatgattaactacattctccttaaggaagaagatccgagctactgagtgggagataaataagctgtttctatgcccactatagagactatggaactgccgccggagtttcgactatgctttgtgtgggaacagctcaaggagaagcaaatgaaaccatggtgatctgacgagagaaaaatatagaacggatggcgctattctacgactgaattactcaaactaccaggacaaggggt

SEQ ID NO: 214957 - DNA, 321 bp, Glycine max
ccgagctgcactccacacacgaggggggaatcattgaatgatgcctggcctactcacctcctatgtgcgactcctatatgttacacattaggatcgattccctagacaacttagccgcatctatcccaaactaattcccataaccattctaggaacctaaagtcagaaaggtcacacaaaacctctacatttgatgactgtaagacaataaatgaagattgctccatcaataaggcaaaaattcatcactccgaccacgagtgacaaaacagaaaaaatccccccccaaaaatcttggaaagttatgataacagattttga

SEQ ID NO: 214958 - DNA, 231 bp, Glycine max
cgagagcacgccaacgagaggggtgtcacatgaacaagagcgttagaccagaccgacaccccggcaaacgcggggggaaacaccgggcacagccaaaaacaaatcaacaaacaggcacccaaggaccctccagaaatgggcaacaaaaaggatggcaagacactaccaaaacccaaaaaggaccctgaataagtaaaaaagccacaataaaaaagcgtaaaacaaggaaga

SEQ ID NO: 214959 - DNA, 331 bp, Glycine max
gatgcagctgagtttgtagctatcttatgttctcctctaatgactatagcatcaattgctggcgctataactcgctgtggagttggtaagcacactcttctcaaattaaatttttggcttcagcaggagtcatgtctccaaaggctccaccactggcagcatctatcatacttctctccatattactaagtccttcataaaaatattggagaagcatctgctccgaaatctgatggtgagggcaactggcatatagtatatttaatctcccccagtattcatacaggctctctccactgagttgtctaatacctgagaaatccttcctgat

SEQ ID NO: 214960 - DNA, 132 bp, Glycine max
acaacagaaaacaccacagaagggtatacccaaacccggggaacaaacagggaacgccggaacaccaaaagaagacgacgcagaggaaccgacacaaaaggaggacaccacacaaaaggggacacgggaggc

SEQ ID NO: 214961 - DNA, 307 bp, Glycine max
gaccaaaaaccagctcttcgcaagagaagcagagcggtgcgccaatttttacttattgcgcaagcaagagacagacttgcacatggttaatatgtaataacgcctctacccgagctacttaattcggagagtccgatccgcaagaacaagaatataaccacgacgctactgcatcaatgatatcaaccgttataaacggtatatgcaaaagaagatatgttcttccgaacggcaatttcgagctaacccttcgaatgaactgaacatttcaatatctcaaggtcaaaacttgaacctaagcacgaac

SEQ ID NO: 214962 - DNA, 416 bp, Glycine max
  unsure (1)..(416): unsure at all n locations
cgcaagcttctttcgaccatatatcatcaatttttgttcatatatatgnacaaattttcctcccccagcaatccatctcctctgaacttgacttgatcttggccattaatccatctgtgagagatttgttccaaccctactgaactacattttcgagatcatcctccaaaagccaagaattttcaaaaggaaaatgtctatgaaagttcccctgatgattaccttcaagtttgagaagaaaatgggaatggtcagatttggaagacacaccattgatcaatttgagtatggagaaaggtcaatccagttaagagttgtaagcgcatgattaagttttttctctatcgcatcgngtgtgccaagcctttgagcccagttgtatttgtagacttccattgaaaggtcatggagatttg

SEQ ID NO: 214963 - DNA, 425 bp, Glycine max
  unsure (1)..(425): unsure at all n locations
cgaaggcanactggatgcattggttaactgggtattcttttttttcttgaatcaaaaatctgtacctgtcgcaagggtttgtggattgtgctcctctgctgaccaccatacagacctttgtccttccatgcagcaacctggagcaattaagcagcctgaagctcatgctgcaaatatttacaatagacctcctcaacctcagcagcaaaatcaaccacagcagaacaattatgaccttttcagcaacagatacaaccctggatggaggaatcaccctaacctcagatggttcagccctcagcaacaacaacagcagcctgctccttccttccaaaatgctgctggcccaagcagaccatacatatctccaccaatccaacaacagttacaacctcagaaacagccaacagttgaggcccctccac

SEQ ID NO: 214964 - DNA, 348 bp, Glycine max
taaaaatagctggcgagacagacacacaaaaatatatttttgtgaaaaagctccccgaattataaggttagctttcattctttcgccatgctcacaataaaaggaaatgcacattttgccacactcttacaaagtattgactatcatgcaatattcatgagaatattgagaataacacagaacctgacacttagtgacttccaagaaatgttttcagaaatctcacaaacacccttgcattatcccaatccttactcaatgggataccaccctgcatcaatgcaaaatatgtgtctcgctcttccaaactattaaatgccctaatgaaatttaaagaaattacaagca

SEQ ID NO: 214965 - DNA, 446 bp, Glycine max
  unsure (1)..(446): unsure at all n locations
acctctaatcgactgcagcatgcagcttcaaagaaggaattgtcttctttaatgcggagcttgaaaagcccggtagtcgaagagaattcaagccatagccatcaaagtctgaaaagaatatgaagaactaaggggcgtcaatatggccaccgcagaggccttggaacgagaaaccaagaaggcccgaaaggaagaacacgaccaaagcaaagntttgaggggctttatagggcatcaatagtgagctcaagctcccaagaggtgaaaggaatcatcacgggtcaaaggcatgatcttgaaggacgagctaaaggcttaccttaggtcgaaaagaaatccgtcccaccagttaaccgaaactgaagggaatatgtgggccgtcatcgatgagtgcaaagagaaccttaatctagcggcgactcacgagcaaaggctagaggatgagt

SEQ ID NO: 214966 - DNA, 442 bp, Glycine max
  unsure (1)..(442): unsure at all n locations
ntntcattaatctctggccagctacaacatgtgtattattttgttcaactataaaggtgagggttgcttggttaggatcattgacttcaaaatgtgcgataaattggacataaatgagtaatgtggttaagaaggttagatgtaacctctttttcgatcacgtctaaattctctaccataatggttacatactgcattcagatcaacaaaattaggtttctttgcgaaatggtcctagaaaataaaggttgtttatttaccactagcatttggtttcttttctttctatttttaggaactacaacttcaggagtagcaactggttgattgttatttggtgcagtggtttcagcctcacccgctacattatgcaattgttgaccagactactccatcactgaatactgataattcttaatcaataattccatttattcatgat

SEQ ID NO: 214967 - DNA, 367 bp, Glycine max
  unsure (1)..(367): unsure at all n locations
ggggaccccaaattgaaggaacaaaaacggagacaagttgacctntgaggagtgtctcacaagacgtctactcatcaaagtacaacaagtgtacacatgctctatttatagactacgtagctaccttgaaaagctttcttacagaaaacttctcttgagaaagctacgatccttagcctacccacaccccatctaaaaactaagctcaccacctcgagaagctagagcttacctacacacacccatctaaaaactaagctcacctccttgacaaaatacatgaaaatacaaaacaaagtccctactacaaagactacccaaaaagccctcaaatacaaggctaaaaccctatactacaagaatggcc

SEQ ID NO: 214968 - DNA, 356 bp, Glycine max
  unsure (1)..(356): unsure at all n locations
ctcaacccttctccncatnttgctataaatatggtgataagcgaagattataatggttttctcacttangcacttctctctctctctcaataactgaggaaaattaatttcgtgaaaaataatcaagccgaggcgcttacgtaacgtttccgtgagtaattacgcgaagatttttgacccgtcttcaagattcatcggtcgttctttgtttcttcagtcttcaacgggtaagtacctcagaccaagcttttcaattcattctatgtacccgtggtggtccacattttggttcatgtatttacatactcgatttcaattactttttatacgccactttgacgcgcttaagccactta

SEQ ID NO: 214969 - DNA, 292 bp, Glycine max
ttcagccttcgcatatatgccccgatcgacttcgtgtgaaggtataccattaaatctcggagatccgtgttaatttcagcgttcatatattatagcctgaatcgacctcctgtgaaagttataccatttgaaatttcgagagcttcggtgttcaattcgagcgtctctaatgttatgcgcttgatcgacattcggtgaaaagtatgaccattgaattctgagagctccgtgttaattttagcgttcgaatattatcgctcgaatgacatccggtgaaagtatgacattgaat

SEQ ID NO: 214970 - DNA, 262 bp, Glycine max
agctgaggaaaaagggagaacagggggaccttgttgtgacaaaacggaccaggagaagacagggggcatgaaacacgcgaagcaagggggagcaaagaccaaaccaaccgacaacccaactacctgcccagaagcgagcggaaccgagcgaccaaacacggagcccagggctgacaccccaaaaagaacaaagaccaacagacaagaggccggcggcggtggcaacagaaccgagggaagggaaaggcacggaaagaaacaa

SEQ ID NO: 214971 - DNA, 368 bp, Glycine max
  unsure (1)..(368): unsure at all n locations
acctgcggcatgcaagccttaatntatatcacaccatatatattttttctatctttaaaaaatatgtagatttaaccttttttctataataattcatcatgctttttacagttaaaacggtggaaatccacctattctttaatgtttaaagtctaattcacgaatgtagaagaattaaaacacatttctccttattcttttaaggtttaacaacactcatcatctattccaacctgctttcaattctgactttgtcttttaacctcccccattaaagctttctggtctacgccttaggccataaggcacacacctgaaactgcccaatgagcacaaaatcactttcttcatacaagagaagtacttgt

SEQ ID NO: 214972 - DNA, 426 bp, Glycine max
  unsure (1)..(426): unsure at all n locations
agcttggttcgaggtacttacctcttgatgtattgtaaaacgatgaagaacgaatgaagaacgtccaataacggttgaaatctttgcgaaattcctcacggaaaacgttacggaaacgtttcggaagcgcctcggcttatattttcttcacggaaacaatttttccaagcaaattcgaaagagagaaaagtgcctcagggctgaaccccttccttcttgcattcctcccctatttatagcaaaataggggaggtggttgccgcccagctcgcccaggcgagctcagctcgcccaggcgagcagggttgcttcctccagaagcaaccgccttctggaggaatattccaaagggcccaagtgggcctgggtgctatntgcacccccattttactaattacacccccctctgctgtttattggtgattc

SEQ ID NO: 214973 - DNA, 302 bp, Glycine max
atatcaccttcttaattgtacacatggggcactgcgccccccaatgcgcacgtaagatgagattatttttcgtgctctcgtgtccgtaaaatgcattcatatcatgcatcgcataagcatctcttcataacatcataatggacatatcctgcatttgtccgttatcatattccagcctcacattttgcatgagtatggcatcatcatgcatatgcgttcaacaacacttttgatctgaaaaatgctaccatttgtttaatgtttgtcatcctgcgtttcctctacaaacaaaacaaaagggg

SEQ ID NO: 214974 - DNA, 249 bp, Glycine max
agccttgttcacccctgtccaaattttcaactccctcaataggatatctattcacaatcactctaccacaaataattgcttcaacacactgcctccatatatcttgaacaaccatataacaacctgtctagcataacaggctgtttaatttattttctaacatcactttcactaaatatatgtttactaacagccacaaaaattccaaatttttagatttttcaatgatacactatgtcatgatcattg

SEQ ID NO: 214975 - DNA, 310 bp, Glycine max
aaaacaggggatacaaaccataatatattcataaagacaactgaaatgcccacaaggcttgatgaaccatttctatataccgacgacgaaaaacagcagaaagggcgcaaaaacagaaaccacacggttgatgtgaaaatacaaaaaaaaagcgttacacttgaggtaaaaacgccgcgacgacaaaaaaattgggacaggaaagatctaccggtacagcggcaagcacacggtaataacccgcagacccatacgactatcaaaagcaaaatcataaaaaacaaaaaaacacagcgtatccagaaacgac

SEQ ID NO: 214976 - DNA, 444 bp, Glycine max
tatagaacaaatgcccctcaatacaaaaggcatgtttatttgacgcacaacagaacaagccacgctatgtgcagcaatcaaggggcaaacaaccaatgattataaagaggaaggctcaaattcccactaacggtaatatcatcacctctcaaactgagctttcaaaactatcatgacatgtagaaaagaaacaaggatttcaagacacaaaatgcaaaaacttttattttcaagacaaatacccatttcctgacatatcctataatcaagaaaacatgcacagacgtacgtgcacatgaaatagacccaaaatattatactgaaaatccgacgaaactaacaacattaacaaatgaacacaactaacatattaacataaccaacaaaactagcaaaaccaaagaacacgtccccctcatactaaacaaaacaattgcctaatga

SEQ ID NO: 214977 - DNA, 289 bp, Glycine max
gatttttataaaaaaaagcaccagcaacaggataaataacgaagaaacagaggatggagcagaaagaaagcctacagggggatgccgcctctacaaaagcaaaaagagctaacttaggagtaaaacacgagggggaatgggagaatccaaactaagaagactaaaccaagaagaaaaagcgacactaagtggaacaaccaattgacatgaacagaacaaaacgcaaaaacttaaaaacagcacaatagactaaccaaaaaccacagacagcaacaaaaaatgggcaaaa

SEQ ID NO: 214978 - DNA, 407 bp, Glycine max
agcttataatagatatcattatttttaattttataagccgaagaacctacaagctttcaacttcaccaattgccataagatagagatattcctctttatttgttgaatcactcgaagtgctggaagcattttcttcccatgcaatgtaagccttcttcttattattatgaacattcaccgtgttttctcctccttgttttttctttaaaaagatggagccattagattttatgtggcccaatttgcaacactcaaaacaagtaaaattaaaggacgttgactcattaaaggtactctttgattcaaaagacattttattttttttgggggaacacaagaatatttatttaaaataaaataaaaatatatttatgttgtcatcttatatatgtgttcaaatcaaaata

SEQ ID NO: 214979 - DNA, 452 bp, Glycine max
  unsure (1)..(452): unsure at all n locations
ggaccttatatactcagctattgngccttaanatatctgaactgtgatgattccgtatctagagagtaaaggaggctacaactattggagttagaagaaatgagattgactgcatatgaatcttcaaggctgtataaagagagggttaaaacttaccatgataaaaatcttctatagaagaattttcaaccaggacaacaggtgctactattcaattcaaggctgaaattgttccctgcgaagctcaaatctaaatggtctagaccatctaccatcaacaaagtcaagccatatggagcagtagagctttgtgatcctcaacccaaggatccagacagaacataggtagtgaatggacaaaggttaaagctataccatggtggcactattgaaagattaaccactgttctatccttccaaagataacatagaactatgcgtcaagctaatga

SEQ ID NO: 214980 - DNA, 356 bp, Glycine max
  unsure (1)..(356): unsure at all n locations
actaagcttaacgngagaatgctaacatccagtttttttttttatgtaacatcgaggacatatgaaagaaaaaataaatttttcgaggcttgacacctaataaattcatcagaagtatgacatactcttaagaacattcatgaattgcattattgagaaattgcttgtgtgaaataaccatacttagcttccttggagtattatataatccaatccactcgttccatgcatgtacatatcatatccctccaaaatttctatcgtaaaacaacctcacaaggtggaanaaatctgaaaatgatattatatgactcaagccaaaattatagatgtatcgagtgtttagagatataaac

SEQ ID NO: 214981 - DNA, 438 bp, Glycine max
cctgcggctgcagcttgattccttatatagaaatctttctttcttattatggagccaaacccagtccccctcattaaaaactagctccttttttcctctattgcccttaattgaatacacctttgtttggttctctatataggtcttaaccctctcatgcaacttctttacaaactttgacctaaattccccttctttatgtataaaataactgtcaagcgggaggggaatgaagtcttaaggtgttaagggattgaacgcatatacaacctcaaaaggggattgcttggtggttctatgaacctccctattgttggcaaattctacatgaggaagatactcatcccaagacttatggttgccttttacaagaccccttaaaagggtggataaagaactactcactacctctgttagcccatcagtttgtggatgaca

SEQ ID NO: 214982 - DNA, 383 bp, Glycine max
tcattaagagacttctagcaaactccagagatcttcttcttttttccaacggtcagaacatggacaagtgtcttgtgaagttgctgcccaaacttctacaagatccaacggttaaccaatgctggacagcgttgttaccgaggcagcttcatgtaccattctctataaacttcattaagacgcttccaccagaagctttcatctggcttctttgaaaagctttctcaagacgcttccttgaaagctagatccttatctattcacacccctctattaactaaattaactttctttaaaatattacggataaaataaccatcaaatattccaacttcaacatatttctaatatttatagattatttatttatggtgttacacttt

SEQ ID NO: 214983 - DNA, 400 bp, Glycine max
  unsure (1)..(400): unsure at all n locations
agcttgactcttacatagacttcttcttattctccttccttggcgacctcagcttcaccatttacagcctaatggaccgcttcgccatcaacatcgtgattgtcctctcccagtctggtttctgcatcaactacctcttcttcatttccaccacccttgctttcctcgccaacaacgataccatgccatttcttttctaggtttcgctcccaaggttctttttctatgggcttgcttcgcttttcaattagggttaattttcgttcgcaccttgactcatttggctcccttgtgtatctttgatgacgttgtccatctcgccaccaagagtatcatgatgggcgatgatgttnttgttttttaagaaaaaagcccgatttgaaagtatctgggggtttgt

SEQ ID NO: 214984 - DNA, 431 bp, Glycine max
  unsure (1)..(431): unsure at all n locations
ctcagcttgctgcgtatctacctatgagaggttcaatttatttatatgactgcgtttctggtttttctggaaattgcaatgaactcactcagcgacccttcaacgctcagtgaattcatctatactcattgcatacatgcatntctgatagaacttgttgagcgcacctgtcgcgctaagcgattggatctgtagaggatgaataatcatcctctggataagtacttgtggctaagcgaggctgattcgccagcccaataacttataaatttttttgtcatgaagtcgtgcgctgactagatccttgcgccagcgaagtttttataacaggactgggctaacgaccattcgctagctccataattataaattgtgaaatttactggtatacgctagcgggctacgagactagccacatatctgcaagttag

SEQ ID NO: 214985 - DNA, 320 bp, Glycine max
accagggctaatataagattcatctgagttacccaatgacgctggttaaatattgcaactgaaaaatatgtttaccatctgttccccatgatattaaacaagtaattatgacctaaaaaagtctaaaggttgttattatgatcaaaagaaagtttgtgtcaaaaggataaatcgcaatcaataggaggacgagaatcatctgttatgggccattataaatctatcatgggtttaaagacaaaaaggaagtgccattatactcaagatccagaaatgtatgtgagagacatactgccaaaaaaagttgtatttaagtacat

SEQ ID NO: 214986 - DNA, 405 bp, Glycine max
  unsure (1)..(405): unsure at all n locations
agctntacaaaaacttaaattattatttgactactgagccacttctggatctaaacaagtcaggagatttgttaatatttgtttgcccatagactagtcttattgtgttaaagatggatttagaaatgaagcactaagtcttttatttctcatggtttacaaggtgttttgagagctttagaacttaataaaattacaaagagtaagcttgaagaaaaaagggaaaaagagatttcaaattttagcttgtgttcctcgtaacttcaactctttaagacttctcatatttgtagccatcttcaaaaagcatttgttatctctacatagtctttattttatgtttgagcttgagtctaaagaaggttttgtgagtgcattaaatgcccgccaactcaagctaatata

SEQ ID NO: 214987 - DNA, 435 bp, Glycine max
  unsure (1)..(435): unsure at all n locations
agcttgttgggtctcaggggtccacacaaatatggtcctttnttaaaagatgagtcaacggagcggctatctgagcataatttttgacgaaacggcggtagaacccggttaggcccaaaaaaccgcgtagggccttatttgttgtcggaggcggccagtggagcatatcttgtatcttaaaaaaatcgggctcgacacctcgacgtgaaacaaaatggcccaagtattcaatccttcgttgaccaaagatacacttggaagctttcaaacggaaatcagcttgttgcatagtacgcaggacgcaatccaaatggttgaggtgggattggaggtcactgctatatactaaaatgtcatcgaagaagaccaaaacaaacttgcgaatgaaaggccggaagagggagttcatattatccttgaaagtcgacggcgcgt

SEQ ID NO: 214988 - DNA, 474 bp, Glycine max
  unsure (1)..(474): unsure at all n locations
atatgatgtgtntggatttcaggtgggaactctattttccattaattgtagggattagttatgatttgaattgtaattgatcaaaattcttatatattttctctttttttatttgggattttattntgatattttgtcctcgataatcatggagagatgatagaaagaatcatgtatttatttactgtctcataccaataaaaaatcatcacattccattttcttaacatggtattagagccaactccaattatctctcttctttacgaattggagattaacttttgaatacaaaaatggagaataggttaaatagatcatattctgctccacatttgtgagttntagtttattatgtttcacggctgtttcgctctaatatgttaagttntaaaatctttattcatggcttctatatntcanaatgtatcatcttaatcttntttttcatttctttgttagcaacgttaagag

SEQ ID NO: 214989 - DNA, 448 bp, Glycine max
agcttgtaatcgattacacacatactataatctattaccagaggagattttcagaaaatattctcagcaatcacatcttttcatttggttcttgaatggccatcaaagacctatatatatgtgacttgagacacaaatttgctaagagttttcagaacaaaatggtcttatcctcttaaaaagcaaaatcgttttatcctcttagaaattcctcggccgcacacttgtgattcaataaggaattatttgagtgctcaaattgttcaatctatctctttcaagagagattcattcttcttctctttctaattcactaagggattaacagaccgagggtctcttgttgtaaaagaattctaaacatacaggaaggattgtccttgtgtgtttagaactttgacaaggaattacaagatacaggaactctcaagcgggttgcttggggact

SEQ ID NO: 214990 - DNA, 451 bp, Glycine max
  unsure (1)..(451): unsure at all n locations
ctgcagctttcatgcagcttcatgaacttctaacattatcaacactacacaaatcattcacattagccccaaaataatgtttacatgtaatcaatatccaactaaactttaacagagagaaatttaccatttgcataatcattagttagtcatcctagcaacatccttaaattagttttactaggaacctcaaattaacttttgcataattaataattagtcttactaaaaaaaaccttaaattagtctcactaacaaacttaaattagcatttgttgaaacattaattagtcttacaagcaacaaccttattaaacattntccacccaattgtgattntcaaagcaccaacttgaaacaaatcactccaaggagagaaagatgagagtgagaggaaccttacctggagttgacaaaatcaaaagtgcacaatcattaccgccaccacaaa

SEQ ID NO: 214991 - DNA, 180 bp, Glycine max
gagggggcggcctctctcctcttgtgttgtcgccgaatcgcagcatgatccatggtggaacatcgccctggtaggacctcatagcccctttttgacccatcctgcattgaaccttcaaaacaagcttcaataaggaaacctcgttgttggcccacttattgcataagagggggggatact

SEQ ID NO: 214992 - DNA, 344 bp, Glycine max
tccccgatgcatctcagttctcgagatagactgtcatgtgtaatattgccaggatcatatgctacaaaaaacatatgaataaataaccaaaagtaaaaaccatgctttcaaaatagtgataagtttcaatatagtatcaaaggatcaaacaattgtaaataaaaaacatctatgcatactgactccaagagagacatgacaggtgaggtgaatgagaaaaattaatttataagtaattacactgcatacatagcagtaatgggtaaagttaccgaagaatgactgtatatgttgtagtctttatatatcgtatagataaagaaactacaactcactcggctatg

SEQ ID NO: 214993 - DNA, 226 bp, Glycine max
cccagatgactcactgaaaaatggtaataatcggcatgtattatatatttaaaaaaaaactttatttttgatgataattttttcccatttaagaagaattacacaatcacaccaatcgatctatagaaccgtgaatttgagggatcagaaattaataataattcacatttttatagtgtatatccgctgtgattttaaaactgattaatctatcaaaataaacctt

SEQ ID NO: 214994 - DNA, 177 bp, Glycine max
  unsure (1)..(177): unsure at all n locations
tgcgcgcataaacccaccatccnctggtgcccacactcaactgagctcacgtactcccacgtagcccatatacgtcgtttctctcaacaccgggtccacatcaatcctcccaagcttccacaacatccaagcaaaacaacattcacacagcacaagctatcacagccaagcaaaaca

SEQ ID NO: 214995 - DNA, 424 bp, Glycine max
  unsure (1)..(424): unsure at all n locations
agctntaaatgtattgtgagagataatctcactccttgtgtgttagccttgagggtgtttgggatgaattttgtccttgtaagtgagtctttcaagatcaatggtgatgatgccgaaagagaggcttaggccttcaccttattattttcaattttatggctatatatgctctggcataatataacaaccacatggatatttattccttagtctatgtttcaatataaaattagtttcccttatatttgatttcacatgatttttatggcctttggggtgtcaagagttatttaatgtcggattatgtgatctactaacttgtttttgtaaagcttatgacaataccatgtgtaatgctctcttaccatgaaagaagctcttgagaagttgaacattcttttattcaattttcgacgaacatatt

SEQ ID NO: 214996 - DNA, 361 bp, Glycine max
  unsure (1)..(361): unsure at all n locations
agcttcggaagagagtgatgaggtacatgctttaaaggcagagcttgaaagagcctgngtagtcgaagagaagttcaagtccatagccatcaaagtctgaaaagagtatgatgaactaagggatgtcaatatggccaccgatgaagccttggaatgagaaaccataaaggcccgaaaggaagaacacgaccaaagcaaagttttgaggggcttatagggcagcaatagtgagctcaagctctgaagaggtgaaaggaatcatcacgggtcaaaggcatgatcttgaaggacgagctaaaggtttgccttatgtcgaaaagaaatttgtcccaaccgtaancgagactgaagggaatatgtg

SEQ ID NO: 214997 - DNA, 435 bp, Glycine max
  unsure (1)..(435): unsure at all n locations
agctataagtatcatatctttattatgtgaatcanctaacatggaatgagtccatgtatgttctatacaaatctgtattttctaaattatttatttaataacctaatactttacttcaacaaacttttacttggttgaatccttaataagaatgctaagatattgtcccaataaacacccgatgactacttaatattggcgataacaggcaagctaattataataatttaatagtcataaattctagtacgatgtctcagcaaaaaaataaaaatattaactccaccaatatggttaaatgtggatctttatgtgcattgatttctattaagatattccataaaaatcaaagttagaatacccaatgatttttaaacttttagactttcgatatgaaaacatgtagatttttgttcttttaaattaacgcataat

SEQ ID NO: 214998 - DNA, 441 bp, Glycine max
  unsure (1)..(441): unsure at all n locations
ggaccttaaatactcagcttcgctctagtttattgtgtagaattctcataaactataatgaaagggtaaatntaagttnttatttntattntttttcctatttgtatttagtaatggcacactcaagttacgtttaaagttcaaaatttccaaattcttcanatcataccatgactcaagaagaagaagaaggtacctatagttttattttctttcaaattttaaattatttttctatttccttttattgggtatgaatttcttctatatatattcttaaattttcatatcataatggtggttttcttataaacttttttcggtgaaaaatgcanaaggacgtacaaatacaagaaaaagtggaaggggagtaacttatggtttaagtgatgcanataaaanaagaagagtactacanacannaatgtgtgtttcattcta

SEQ ID NO: 214999 - DNA, 380 bp, Glycine max
gatagaaactagagaatgatgaatttagacaaagagatgacaagtcatcactaaaagttgcaactttaggaaagtgcaagtcatccaaaatgtacagtccccctgcatatggcttgtcccaatcagcctcttgaattgtagatcctataaacaagaagtcaaataaaataaaatcgagtaatgagagtcacacaattgactagtagaaacaagactcaaagtgagattaggaatgtagtaaacatttgaaatggacaattggaatgtaaagatagaaccaatgcctactaatggcataaaagcgccatcaagagtcatgatagacacaaggatgaaagaagttaagacaccaaatatttataatgagatgacatatgata

SEQ ID NO: 215000 - DNA, 476 bp, Glycine max
  unsure (1)..(476): unsure at all n locations
ggaccttaagtcacctgcggcatgcaagcttatgtgctngagagtattatcatttgtgacttccaaagttcggatgttttgcctcattcagtaggtgaattaatccatttgtgttatttagatctctctcgttcaagtatagaaacgttgctagagtcattatgtaatttgtacaatctgcaaactttgaagttgttcaagtgtagaaagttgactaagtttcctagtggcacggaatatcttgttaacttgtgtcaccttgatatttatgatactcttataaaagagatgctcaaaggaatgagcaaattaaatcatttataaaatttgggtttctttattgtggataaacatgaagagaatgagatcaaagaactaggagtactttcaaatcttcatggtcagttttgattatcaactcggagaacgttccccaaagcgatgaagcattggaggcaagtataatgtgataaaac

SEQ ID NO: 215001 - DNA, 393 bp, Glycine max
  unsure (1)..(393): unsure at all n locations
ctatcaacagacctccaatctttaatggagagggttaccactactggaaaacccgaatgcaaatttttatcgaggcaatagatctaaatatctgggaagccatagaaatagggccttatatacccaccacagtagaaagagtttcaatagatggtagttcatcaagtgaaagcataaccatagaaaaacctatagatagatggtctgaagaggatagaaaacgagtacaatacaacctanaagccaagaacataataacatctgccctaggaatggatgaatatttcagagtttcaaattgcaagagtgctaaggaaatgtgggacactcttcgattaacacatgaaggaactacnagatgttaaagatctangatanatgcactaactcatg

SEQ ID NO: 215002 - DNA, 441 bp, Glycine max
  unsure (1)..(441): unsure at all n locations
cttaagtcacctgcacgcatcaagctngaaatattatagcataactcgcctgtccattaggctctagatgtctntagaggtgacttcctcgctgacatcttttgtcttgaacggaatcgccatgacaaagttattgttactctctttgatattcggcagttgatcttgtgttccaagaggcaatccctattggattaactccccatccttaactagcccatttgttatacatttgagtgtctatcacccatgaagtcttgatcccaacggtaacgatatcctttttgatggcataaacatgaaaccaatcaaagaaaaggatattaattttgtctcgttcgacaaatgcccaaaacttgtcttggatctgttctctgtttgtacccacgccatgccggaaaaaccatcttctttgaggtcattctccgcacaaaaaaatat

SEQ ID NO: 215003 - DNA, 393 bp, Glycine max
  unsure (1)..(393): unsure at all n locations
acagagccacatattattgcttatttaagctgacttgatgaaccaaaaaaactaatgctcaataaaaaaccgtctttagggttcagccggttgtcttcctcgaacaaaaaacgagtgaatggatcgacctactcgccgtggggtcatttnagcgggatactcggaaagatatcataagttttttttatatataatgacacactttcgtgtgataaatttcaatacttcactgaaaattcaaagtgagtcttacatactcaatgagcatttacaaatgtatagataaactattgtctactaaaggttcatatgtgcaatcagaattcatcttatactctttggagagatgaagtcattactcaaaatttgaatcatgatttgaacttagacata

SEQ ID NO: 215004 - DNA, 454 bp, Glycine max
  unsure (1)..(454): unsure at all n locations
agcttataacataaatgattatgcagagcttgtttggcttatcaaaatggcttataaacattccataaccttttctaacttatttcaataacctcgaagtttgtgatggaagctcccatgtgataagctcacttttataaatgtttaaggtatttatccataaacatcttctaatttctaaagtataagctactagtaaattgctgtaacttctaaggcaagttcatcaaacatattctggatgaaggagaaccaatgtcataatgtaggacaaaactgtatgttatgaaatagtatgaatagaaatcatgcaatttgcttcaggtcccagaactctaaagtttatcaacatattcctcttattttctcacanaacacaatttagttgctgtggatatcaagtgcatgtataanggaaaaattaggtatttccaaaatctataataatattttg

SEQ ID NO: 215005 - DNA, 255 bp, Glycine max
caaaacactacggaacgatcggtgtaatacacgattgcagtcaagggactcacagatacatggggtagagctaactaattttgctgacaagtagcacacacattggcttggagaaggaatcataaggcgaccctcatatgacctgtaggataaaactcctaaccccgggagggcgagaggtcacttagtgaatcttgatgaagacactctttaatgattcctgaacacccctattgagcaggatgagggggagaa

SEQ ID NO: 215006 - DNA, 444 bp, Glycine max
  unsure (1)..(444): unsure at all n locations
agcttcctcggggccatttcctgcgaaggctaacatttggaaagntagttttaccagtgggacactactcttaaaacaaaaatgacatacaacctcctcccataaatacaaacatcaatgtaaatttagagcaagcttatgcgcatatttccctacgaacgttcacttgcacaagacatcctattaactaagaaaaatgcacccatatacaatcaaggtagcttcattacctagattatttacatgtacttccaaggtgtatttgttatttacatcacacacgcctccttggctaaatttacatacatgcatactcaaagcatttcggggtaccaaaaatagcacatgcgctcatcttggtatttctaatacctatacatatgcaaacttcatgatgaatcttaactacctacccataaggggctatatttatgcttttttttt

SEQ ID NO: 215007 - DNA, 416 bp, Glycine max
  unsure (1)..(416): unsure at all n locations
agcttantagcagttacagaagtcaatatttccgccaataactatgatcatttctaccttacctatattccatcatggccttggtttgtgngtttaaattgccaccagagtcctaaatacacaatatctttcattgcaagcttagcaacagccccaaaacccaatttttgtcgaaaccaagtgtcatgatttctatattaccaattttgctagctgttgatgttgcatcatagttttgctatgtcatctacctttggtctcatctctttaccttacaattcaggcaattctatcattaccctttttcaatatatagaattggcaacatgcaaacatatctaatccaagaaattccaccactaatagtcagcctataatccataaccaatgaagtcccccatctccaatttattcca

SEQ ID NO: 215008 - DNA, 389 bp, Glycine max
  unsure (1)..(389): unsure at all n locations
agcttccacaacatccaagtaatgccacattcaatcatcatgaactaacaaaaccaagcaaaataggcaaaggcagaaaactctgcccacaacacaaaccaatatcacagcttttcacatacaaataccctagtaacattctcttcgttccaattcgttaaccgttggatcgactcgaaaattttactggaagtctctagtacataagtctacattntgaccgttgggatctgctaaaaaacgtccagaacccaatcggtgctactctttccacaaccagtaatttcattacattttctgcacaaagtcaaattctgctgcacctagttgacagcaaaattctgcataagtgcagattntcgaaatcacacttctcctcatccaatttt

SEQ ID NO: 215009 - DNA, 411 bp, Glycine max
agcttgttataactatcatcacatgacgctttattggcacaaaataagttgctttctaagcaacttgaaattttaacagaaacacttggtaagtttccaactaaactgtctattggtcaaccaacacattcttctgttttgcaggttataggttgtaccacctgtggtgaggctcatgaaacagaccaatgtattcccattgaagaaaacactcaagaaattcattatatgggaaatcaacagcgacaagggtatgctcaaggatgattttcagtcttccaacagggtccttataataaaaaaggataatggaggtcacaccctggcaatcagttcaacaaagaccagggtggaccttctaacaggccaattgttcgcagcccgcaagtgtactggatcacaaaagtagta

SEQ ID NO: 215010 - DNA, 346 bp, Glycine max
tttggaaagttagatttaccagtgggacactactcttaagacaaaaatgacatacaacctcctcccataaatacaaacataaatgttgatttaaagcaagcatatgcgcatattgccatacgagcgttcacttggacaaaacatcctattaacgtagaagaatgcacccatatacaggcatgggagcctctttacctagattatttacgtgtacttccaaggtggatttgttatttacatcacacacgcctgcttggctaacattacatacatgcatactcaaagcatattgggggaccaataattgcacatgcgctcatcttggattttctaattccattcattt

SEQ ID NO: 215011 - DNA, 438 bp, Glycine max
  unsure (1)..(438): unsure at all n locations
agctttacatggagctacgttaagactgaataggttttatagccttctagtancaacccttgactcgttcatgggggatccgcagctacgacaacaaatttgtgtcagttggtgtcgtggatgagagagattgaaaactgcaccattgccacgaatgagagagatcgacaaccgctacatcatcacgaacgaggttttttcaatcctgaactttttcgctcaattgtcgtgaacacaccacataaaatcctagccaccaccatcaaaagcctactatgaacgagggagactgcgactgctccatgaccacaatctacggagaagggttttgaactttgattattataaaatcaaattaaaaattattggtgttttaaaccatcagtctgtgaaaactagtaaaagtgacacatgcccctcactacgttaacgtcatca

SEQ ID NO: 215012 - DNA, 446 bp, Glycine max
  unsure (1)..(446): unsure at all n locations
agctntggagtttccaagtgccaattcgtcctcttctttagtccagtcttcttctggcttcaattcatcagtgggctttccttctgtgtccagcatcttgggatgttcccagcctttgatgacagctttccaggttctgctatccagtgatttgaggaaggccaccattcttgctttccagtattcatagttgcttccatcaagaattggtggtctgttcactggtcctccttctttctccatgttcatcagaatttatctccccagatctcactctgtgatttcgagtgttggctctgataccaattgaaattctgataccaggggacagatgtcgtacaggatgtcacgacatcacgcttcataacatgcagattgtatgtgtccgtatgaacagattaaacaagtaaatacacaagagaattgtaaccccgttcggtgcacct

SEQ ID NO: 215013 - DNA, 421 bp, Glycine max
  unsure (1)..(421): unsure at all n locations
agctttccgtanagcttacggtaaaatctatgacctatccatggtagaagtctccacagaggccattgcctccctcgcccagtattatgatcggccgttgaggtgctttacctttggcgacttccagctgtcacccatggtggaagaatttgaagagatcctatgatgtcctctagggggaaggagaccatacctcttctcagggttctatccctcgttagctaggatttctaagatagtccaaatctcggcgcaggaattaaaccacagaaagcaagttaggaatggggtggttggaatacggagaaaatatttggaggcaaaagccataatcttggcaggcaaaggcgaatgggccccgttcatagacattctcgcactattgatctttggaggagtcctctttccgaatgtggatggg

SEQ ID NO: 215014 - DNA, 441 bp, Glycine max
  unsure (1)..(441): unsure at all n locations
gtcacctgaggcatgcaagcttcataagcgcaggtctgggagacgaatgtcatttggtctctatatacaaagatgatgtttctagtacattggatttggtacgaccatgccctcctgatattcagttgggaaataggcgagtggaggaacgccccggcgtttacgcaacgagcataatgtaaacctttacgattttaaaagctctatagttgggcttaggctttaaagtttttcttttgttaaggctttgtgtcttctatttttgaatttataatacaaggatctttcttcatctgttcctacgtctttacccattctcatccatttgcatgtttacttctttatttntgaaacggcagatccgatgacgagtcccccgaaggtacttatacctgggatcctgctatcaacttctagcaagatatgaatcaaacggaagat

SEQ ID NO: 215015 - DNA, 442 bp, Glycine max
agacttcacaacatcaaagcaaaacatcatttatacagcacaagctatcacagcccagcacaacagggctaaggcagaaaactttgctcaacacaccaaccaaaatcacagcttttctcacttaaagaccccagtaacaattccttcgatccaatacgataaccgatggatcgactccaaaattttactggaagtctatagaacataagcatacattgtgaccgttgggatctactatcaaacatccagaactcattttacattactctttccacaaccaacaaatgcatggatttttctgcacttgcgcaaaattctgctgcacaattttacagcaaaatctgcacaaagagcatatttcgaaaaccacacttcccctcatccaatcttgcccaaaacacatcctacaagacccaaatcatgtatcatacatgtctaaacc

SEQ ID NO: 215016 - DNA, 443 bp, Glycine max
  unsure (1)..(443): unsure at all n locations
agctngngcatgtccttatgattagcctcatttctttgaatcctctttggcaaggtttaattcgtgcctttgtgcgtgattctgattcgtctagttttgttttattttatttcttgatagttgtgtctttttaattcgctggcagtgcaagtcaatttgagtattttgtgttaaatttctgcaccttatgttctaattgtccacatttgttcttgagaggcttttggcaaaccctcttgttggatccataaaaaattgagtttgagtttgggtgctttcataaatattaccaagtcgagtatttattatcaaaaaaggagatgagaagtgaaaaattgaaagaagttatatctaaaaaaactgccttataaaaaaatccttctatactagcatcaaatttttgttttgcatacaccttaactccattttttctctcttgaata

SEQ ID NO: 215017 - DNA, 430 bp, Glycine max
  unsure (1)..(430): unsure at all n locations
ttaatcnactgctgcatcaanctggcgcagagcgagaaacatcattgttctcaatttctcaaaccggcaacctctaggcgtttaattttgacttgatagaaccttttcttaagcaagggtgcttgatatcgatcccatgtttttttctagaatgaaaagctctatttgaatcaatacatctaaaccctatcatggaggaaatatgatgaatgcatgaagggatgcttgcgctatgcttgacacaaacccatcttacagacatgagagcctacaagatcatcttttcttactcaccaacattcaggcatcatgaatcattttcagtcatcacaacaacgccccatgtatgccattacaaaagtgacgtggaccttcccactttccgtgacacagtgaccagataaatgcattgctgcttgaaacctaatac

SEQ ID NO: 215018 - DNA, 325 bp, Glycine max
agcttgaaagagacgtatgggagaaagcttatctaggtgttgctgaggcttacaaagttgttgacaaagctactaatgccaaaactaaaaagtaagctaaagaaaaccaacaagctttaggtgatgctaccaaaattactaaggtctttattgatctcactatctttggtgctttgctaaagaatgaaggacaaccagaatgcattattgctaaggctgaggaggtcgttcaattggtacaaccttttcccgtgcccaagcagcttgaacccttaagtgacacacttgcaactacaaagatgcatttaatgtaggatttctttta

SEQ ID NO: 215019 - DNA, 405 bp, Glycine max
agcttcctccccatcgagtctagagcccacgaattgattgtctagcgctgttcgtctatcctccaccatcaagtcttatccggagccccatgaattgattttcattcatgcatcctccatcatcgagtctggagccccacgaattgattgcctagcgctgttcgtctatcctccaccctcaaatcttaaccagagtctcatgaattgattgcctagcgctgttcaagcattccccacaatcgagtctagagccccatgaattgattgcctagcactgttcgtctatcctccaccctcaagtcttatccggagccccattaattgattggcattcatgcatcctccaccatcgagtatagggccccacgaatttattgcctagcgttgttcgtctatccttcaccc

SEQ ID NO: 215020 - DNA, 434 bp, Glycine max
  unsure (1)..(434): unsure at all n locations
agcttttcctacaagaagaaacaaaatttatctatactttgatggtacaattgggataaaaatattctggattagctgaaattcaatcaggcaaatgtgattgagcacatgtgactgacctgagcacaaacatttaaaagatatatatgattaagatatgactcagccaacattctctcatgccctagctactcattcattgatccttactactcaactttgtgaaccanaaccaccaattggaacaatttttcattttcacatcataacatgaacaaggtatgttaatgcaccctaccttgtgcttaaagcattattagtagtaaatttgcaacacaatacctaattgaacattcatgaaaggaaataatcaaactatgaaatataatgcttatatactttacttgcgaacccttaatgaccatgaattcatg

SEQ ID NO: 215021 - DNA, 452 bp, Glycine max
  unsure (1)..(452): unsure at all n locations
agctnttatacaaagaaaagagctgtacttctcgtatcggcaacacacactataggaagatgaatccaataccaaaccacccccaagtcacttttagtatcataagttaaatttttctatgtaacccactatgggttgtctcaaagggagaataaaatggaacaaaaaaggaaatggagaaaagagagacttaccaccacactaggggagctatacaagaatcctaagatgaaagtagatatactttagtgttgacgacttcaaacttttcaaccttgagaaccaaattaaaagagtatctttgagagagagaaaatgcgagagtaaaggtaggaaagggattctaatcttttttataggtttaaagtttccatatcactctaaggcccatcttagtcacactcatatctcctttaaggtccatcacaaaaaataagccaaaatgatacata

SEQ ID NO: 215022 - DNA, 402 bp, Glycine max
acctgagctgcagctggtgggtgacaacactccatgaattgctcaggctcgtgatcaaagcagaaaacctcaaggccctattggacttctctgagtccactgggtgtctaggaggcactatccttgcaatctgatacatatcatctaagatcagataggcaacatgcatactcacctaagttaggatgacgtggaccacctgacacttcggcagggggaggtctgaattatggacgctggggaggatgttgttgagcaacaacatcatccaaatctgcgtgagggtggtcatgttggtgcgtatgatctgcacccgtctccccgctaaactctgggcaaagtcctgccccggaacgcacaagcactggcagatagcctcctcattgaaacttgaggcttagc

SEQ ID NO: 215023 - DNA, 437 bp, Glycine max
  unsure (1)..(437): unsure at all n locations
agcttgagattggcattgggcatctattntgactctcctatgctgnccctacatgcgtaaaacagtcccatcatcctaattttgcaaaaatcatatccatgtatcattggggcatttcaccgagcacttggtgggcgcacgtttggacacaaattgcaagagaatgggggcaatgtggcatgccccattgcttcagaatacaacataggcctaaggccttctcattcaaatccttaactcaagaaatccagcataataacaaaccaaaactgccccacaaatataagcacgttctcacaatttagagcaccaaaagatgaagaaaatacaccaatgggaagcaaaaagactcaaggattgaatacttacttgttggagtgaattaaagcgtgaaaagggaagcaaaaactcaacaatggaagcttgggggctgctat

SEQ ID NO: 215024 - DNA, 451 bp, Glycine max
agcttatctgaggcaaaaatgaagctcttttacttagctttttaggactactcatatactccaatttagaattatatagggtcttatgggccttgcaataggtagatatgttaagtaactacaaaatctgaaaataaataataattattaattaagctcaattaattgcctaaaataaaaactaaactaaggtgaaaaaataagaataaaagaaaggtaaaaaagttaagaaaaatacaaaaatactaaactattcaatcaggggaataacaaattcataatacaagtacttgaaaccatgcgaagcaccttcaaattgagttgaattagttttgtaaaatatgtattataagtttcatcggtggaaatcaaattttgagacctgatgatttatatagcattaaccattgtattggttaaagttatattatcactgatatttttattataa

SEQ ID NO: 215025 - DNA, 291 bp, Glycine max
caggaattctatcatttcggattgagactatctctatggcgaccgacgaccggcggctgaagatgtgtaccacacccactaaaaatgggaacccaaaagatataatgtgtacctgattaccacacgggatttccacaaaaataatgccaagagtcccacctattcaaattttttaagcaagaccatcaaaggtgacatggtaacacgaactcaacgggagctgtcattggccaagaagtgcatcccctctaagagattaagagctattctgaactaaatatgttatcctct

SEQ ID NO: 215026 - DNA, 289 bp, Glycine max
  unsure (1)..(289): unsure at all n locations
aagcaccgttgagacaatttccttgagaagcaagacgttacctgcacacacccatctaaaaactaaccccacctcccggagaagctcccgtgagaagctacgagcttagcctcgcccacccagataaaaactaagctcccctcctcgccaaaggcatggaactccaaaaaaaagccctgactataaagactactcaaaatgcctcgcaatacaagggccnaaccctataccactgtaatgaccaatagacaaggcccagacgaaggagaaacccattctgaaagttaca

SEQ ID NO: 215027 - DNA, 449 bp, Glycine max
  unsure (1)..(449): unsure at all n locations
gatccttaagtcacctgcggcactgcagcttagagtgaacatcttgaatatntaacatctcaacaatcagntgacttacccctttatgagtccagaagtatattaaggtaccatctcctagtctccatgaagaattatcagagactaaatcaatctagggacaaatgcaacactatattaatgatctgacataaaaagaagaaggcttacttgaatgaaagtgtctagcaaaaagtaattgccccaagaaatcttattatatatgatgtntgaacacaactttagcatggatgccttgttaatggtcctcaaagaaagtaagcccaaactacctctatccaagggcaagcacaacttattttaggctacaatgactagcttcttatgataaatatcaccactcccaataaaggtacaaatccaatattcatatattttatgaaggacat

SEQ ID NO: 215028 - DNA, 445 bp, Glycine max
agcttgcttctacaagcattgtacctgaacacgcaaatgattcacttcatcagacacatgaaggttgtccaaatgaaagtattgaaaatgaaagtagcactaatacttggattatataaaatgaattacacatcaagtaataaaatttagtattattattattagtttttatgcagaaacaagtcataatttactagatgatgaggatgaactattagatggcattggtgattctgttcaccgcattagcacatgcattagtgtctattaacgaagttttagtttaagcataattttaccaatgtgaaactaataaacttttatttgttaggatatgttgatctaggagaccctactaaaacatgtccaaattgccaagttgttatgtggtatcaagaatccaccaatactgctacaacaactattgtgtgatcaacaattacgt

SEQ ID NO: 215029 - DNA, 450 bp, Glycine max
  unsure (1)..(450): unsure at all n locations
ttaagtcacctgcggcatgcaagcttctagagaaagctacatgaagctgcctcggtaaaaatgctacccagcttttgttaatcgttggatcttctcgacatttggtttgcaactttacaagatacttgtccattatctgaccattgggatctttgagaagatgtctggagtgtgctaaaagctcccgttcccgagagcatctcttatttaagcatttcagcctttgcttttgtgtagcttaggaaaaacgtcatttcttcttctttctttcttccaaagccatttataaagttccaagcactttctccatcacccacagccaccattagccaccacaaaccatcattgttctccattgaaaacccacaccgagaggaacccttcaaccgaagcggaatcttccaacttgacttgcggtttcggtagagaatgaanaccctaatctgacct

SEQ ID NO: 215030 - DNA, 438 bp, Glycine max
cctgcagcatgcagcttgccagcatttgttggacagttctttatttgtgtagcttacaaactctcactactcgtgtggtctcacattcaccctattatttcattgatcaattctgaaaccatttcacaatttgtcgaaagattcaagttacttggtggcgttaccgacaacagaagttgccacctaacttatcatcacacttcttgctattctcaatacaagttaggatcgctctactgatgaaccatggttgatggtactggttcaataagcagactgggctaatttggaagttatttatcaccttaaggacaaggtatttttagatggcataacggatgattggaaatgaaccatggcctaacaggatactactgtggacattaataaaaggcccaaaggaagatcactcctccgaagcatctagaagattatgtt

SEQ ID NO: 215031 - DNA, 471 bp, Glycine max
  unsure (1)..(471): unsure at all n locations
ttaagtcacctgaggcatgcaagcttacctttctctgctacaacatcctctaccctaccagccaagttatttttctcttcctgcaagtccttgcaacgtttgaacaattcatccaacctagtgtgcaacaacttggccaacacactaccaactttaaaagatagttggtggttcgacctcacagccttaacaaaagcaatagtggcaccaactaccttaggacgctccactctccagacagtgcaagcagtcaccctccacttggaaacttcaacctctaaaaatgccactttgttcaacatctcttaatgtcgttgcccattttcttcaaggatgtctagactccattgaaggaagaatcttggagaatccgtggcatgctagaacctanctaacttgataagatttttatccaaggtttatacaaagccagtgggggtcttctatttgggtttgtaccccatgcctaac

SEQ ID NO: 215032 - DNA, 443 bp, Glycine max
  unsure (1)..(443): unsure at all n locations
agcttcttaaatagcatctgggttggtgtaacatcctctcatagataaatgggctcacatgcacatcaaggctaatacactacctaatcaaggttttcaatagtgtggcaatatgcaattattaaattatttttaatgaaacagaagtcctgaataatatgtttaaatgcaacaacaaaaaaaagttgcgacacctagcttgagactttagatgataatttaagattctgaagcaattgcaagagcgacaagggacatcatttttgcaaactgcnaattataaatcagaaacaagaatgacaaatcccaacgaagccacaaatgatgttgtcatctaatccttaaaactgtatgttacacatcaatacacatgagagaaagaaaaagaataatattaaatttctatgttaaggaaccatcatttatgactgtggcagcctaat

SEQ ID NO: 215033 - DNA, 457 bp, Glycine max
atccttaagtcacctgaggcatgcaagcttaaagtatgcccgagtcattcatccctatgatatgttgttgaagtattggcgatcagaattgccattccttggattatagggttgaaccaagctcatgcttttacaaaaaggttcatcaagtcaagttgaaatatggaagtaaccatcctgcaaaattggggcaaaagatgaattgagtcacatcactgcttcgtctactgccaaacatatataggattgttgatgtccttgttacttccagtttcaccttgacaaagatgtcatggaccatgttgaaaatataaattgattcaaccccatatcttgcgtaaaaattcgcaatactttgactggacatcattcgcatgcatccatgcttttcattggttgcattgctcattgcattctttccttgaaaaataaaataaaataaaataaaatgaactta

SEQ ID NO: 215034 - DNA, 380 bp, Glycine max
actaagctccttaactgcgaaggatcttaatatttgaagagtttccttgtggaaccttcgcccgtcgaagacactgacaaaaacttatcttctccttcttggacaaagtaaggctggcctgggggcaagtaaattttcttcccatcagacctgggatgcaactatgctcttatacccatatcatctagatcttgacgggtattaaaaccttccttcttcttgccttgaatgttaatgagcgtcccaatcacactgccacaaacatttttttccacatgcataacattaatacaatgtttaacgtctagatcacgctcatacggatgatttacgaaattggacctcctttttcatacgcaactctgacctttatccttctt

SEQ ID NO: 215035 - DNA, 407 bp, Glycine max
taagtgaaaaaaaaccattatttattttcttagaatatatgcgctccaagtaatgatattaaactacaaatctctatcttgacaaattgtatcaaatggttctcttatatatattctaatcgaaattatattggtggaccatgattatgaaaaaatcatgtgtcggatgggatagctgtacaatactaccattaatgtttaagcgtaaaaagtgtatcacatattgttatgacaatgcacaatcaaaagctattattttacatccttggccgcgctgtgttccatcaatatttgatcatgataatgggacacatgcaatgctacaatatgaccctgaaggggttctaaataaaattttacttcctgggccggattggtgcctatcattatctgaccatgaggatgtg

SEQ ID NO: 215036 - DNA, 433 bp, Glycine max
  unsure (1)..(433): unsure at all n locations
agctntaacctcatcgcccctcacagtctttagtattgtgagccaatccacaccttgtgttcggactctcagccacttatgatagccgccgacgatcccattactgtttccgctaagctctctgtccttgtttttcgccgcaacccatgccttgcgaactccttggagtaccctaccgttgtggtcactaaaaccccgcccgatgaaaggcgagacgctttcgtttaatggcgctgctctcatggggtggccaagccgtcttatggcgaggacgggattataattaatacatcccctcgtggccaccaagagaacaattggacatccttctcatgaagatagaatgctgattctttctttcttctagcgaggaaaccaattaacagacgcccctccatgctaaccaagagttgggcccagatcgccttttctt

SEQ ID NO: 215037 - DNA, 410 bp, Glycine max
agcttgtctcagcgtttatgcgagacggagaccaatatgctagctatcatcgccaagtaccaagaagagttaggtctagccgcggcccacgagcataggattgcggacgaatatgcccaagtatacgcggaaaaagaggctagaggaagggtgatcgactctttacacccagaggcaaccatgtggatggatcgggttgctcttaccttgaacgggagtcaagaacttccccgattgttagccaaggccaaggcgatggcagacacctactccgcccccgaagagattcatgggcttttcggctatggtcagcatatgatagacttaatggcccacataattagaaatacgtaggaaacttgtatggtctctcagaccttgactagatacgactttctttttgaaataaa

SEQ ID NO: 215038 - DNA, 464 bp, Glycine max
  unsure (1)..(464): unsure at all n locations
cttctcgacccngatccttaagtcacctgcggcattgcaagcttcatcaagtggtaatcagatcacattatcttcaagtaggtgctccttaaacctccattaattntttttctttaccttctcttccattggtgtttcttcatttttctccatgtatctcctcacatgtcttgttctaaacgttgttaacatgattctttagagtttccaccgattaaacttgctatagaagctagatttgattttctatggttcaaatttcttgttcttgttcttgaaccatgaattgtgttagtttaggttcctttgagttttgtcttgttattttttgtggctgaaacctaaaccataaaattcttacaaaaatattaaagtagaagaaaaccttataaatctagagtgactcgttcacctattgtagttttgtcatataagtcatgtctagtcatgacacttgtcacata

SEQ ID NO: 215039 - DNA, 391 bp, Glycine max
  unsure (1)..(391): unsure at all n locations
tctcacagtctttatatatgggagccaatccagtccttgtgtttggactctcagccacttatgatagccgccgatgatcccattactgcttcccctaagctctctgtcctttcttcacaccgcatcccatgccttgcgaactccttggagtaccctcgtgttgtggtcactgaaacctcgtgcgatgaaaggcgtgatgctttcgtctgatggcactcctctcatgggacatccttcgcatgaaagaagaatcctgattcttccttccttctagcgagggaaccatttaacagacgcccctccatgctagccaagagttggtgcacaacaaacaatatttgcgccgctcttttcacatccctggncgaacgtgtcatacatggccaaaatg

SEQ ID NO: 215040 - DNA, 435 bp, Glycine max
  unsure (1)..(435): unsure at all n locations
agcttncaacggacccattcatgggctaagttattataaaggcactntctgacattgaaccaaattgcttacattgaaaagcttcatacgacccatactagaggtacccatctttggccatatggnccaatattacaaaacaagagaaagggatttataagtttatttttcagaactgaagaaattagagttaaacgactatttaataactgagatatgtggatgacaattactctaacacaatttttgaatatattctcttctattgttgaaatttattaaaaattataaaaatttgtaaatattattgcatcttaattaatattttttataaatatataatctttaatatgctctaactaactaataaaaaagaatgtatntaaaataaaactaccatgttagaacaaacttatattactatcaagtttcata

SEQ ID NO: 215041 - DNA, 336 bp, Glycine max
agggacctgaggcatgcacgcttgtcagaactgttcttgccagcatactccactattttataacattgaccagcggcctccgattgagcagcgaaattcctccccgtcgaagtgccacaggtagattccttccgatcatcactggcttttctacttatatttaacttctttgacaaagtccgactattgcatggacctcacaccactgtgaccacatcttggattccttcttacatatgtggacactgaccctgaaaacaaacccttctgctgcatactactgcttatgaccaaaccacgcggagcaggccacccatcaccgagatgagccccaga

SEQ ID NO: 215042 - DNA, 441 bp, Glycine max
  unsure (1)..(441): unsure at all n locations
agctcacttntacatcattaacattacatcattagtttctctgtaagctaaacccccaacattctcatcttctaattaacttctctaataatattggctcctctcatcttttcagttttaattaattaatttacttttatgttggtttttttttctcgtttaattcaaattaattttataccactttattttactattcttttcacaaccttctaaattaatttatttattgcttgaaaattatatattcatctatctaactacaaataaagtccatgtggactcgacactcgaacttccattttactttactacttaggacaattngatgcattggccaatcgttcaacaagtttttggcgccattgtcgaggactttgttctttgtacttggtaatttggatattctaatttaaaaacaatcacttcttcttaaatttc

SEQ ID NO: 215043 - DNA, 443 bp, Glycine max
  unsure (1)..(443): unsure at all n locations
agctntctatacatgtacattagagaaagattatttttaccttctaattaaaaaaggcattgcactatagaattgtgctaaacaaaaatgtcacgttggaaaaaaggatataaaaaaaaatctacttggatttgtaaaaaatgattttaggtgagatttttaccttgatgaacagataattttgttagcttcaatatagaaaaagtaaacttaatttggttttggcaaggattacaaaaatgcaaatctttgaactagtgtaatttggaaatcaaatgttgccttgtagaacttttaggaaattaatgggattggtgtgagaaaactgggataccaagttaaataacacagtcaatgaactctgattttatgtaaaaagtttgtgaaaggatgggactcttctcatttaaattataaattcgacgctcaaacacactggtaat

SEQ ID NO: 215044 - DNA, 439 bp, Glycine max
ggatccttaatcacctgagcatgcaactttatatatattcctatattatttttaaaattcatcacacattacatattatttcaacgctatctttaactttcaatcatatcatgttcaattaatcactttatactgttttataattttcttaacttcttcgatagcaacacattttaatagctattatcatacccacaattaataaaataatagaaagataatttttacgaagagagaaactaatataaccacatcaattttaaataagaatattctaaataaatcaaatatttttttattaaattaaaaatgtcacaatttttattttcaatcttcataaattacttaaaaaatgatttgtgatgaacaaagagggagtagtatttaattctgccaaataataatgctgtgttttaggctattgcttagggtgttattc

SEQ ID NO: 215045 - DNA, 273 bp, Glycine max
tataataccggtaatgtgccactatcattggcatcaaatttttcatcattgaggtgccacttgaactgtcaggtccctccacccttgggcgtattcttttgaaagattcctgccccctttatgcacatgttctgtaactgcatcctatccgaaaacattatactgacactgcctaacaaaggcaaccactgggtccttccaaaaatggacccgggaaggttccaagttagtgtaccaggtaacagctaccccagcaaactttcttggaaagaa

SEQ ID NO: 215046 - DNA, 391 bp, Glycine max
  unsure (1)..(391): unsure at all n locations
tcccggatccttaagtcacctgcggcatgcaagcttgacaggttcaagtgcagatgctgctattggtgtaggcacctcaatttgcttgccagacctcaaggtgatggcactcacattttttggattctacacagtttgtgaaggcaatacgccataatttggggattgagcttggttcaaatgagtatctatctgccccatctgattagacagactctgaatagaggctctagcctcttgctgaaattgcatattctggattgtaatttacctcactaactcatctaattgcttgttgtctttgatgagactgntgctgctgttgctgcattggaggaggaacatatggcttgcttggaccaccaatattctggaaaggagggataggttg

SEQ ID NO: 215047 - DNA, 431 bp, Glycine max
  unsure (1)..(431): unsure at all n locations
agcnttgcagaattggtcttcgccagtgaaatgatcaatgtgggtccgaaaagaggcaaatttgatcatcctactaggacgactgagaaaactggggcaaatgaagagggtgagaaagagggagaaacccatgctgtgactgccattcctatacagccaagtttcccaccaacccaacaatgtcattactcagccaataaccaaccttctccttacccaccacccagttatccacaaaggccatccctaaatcaaccacaaagtctgtctaccgcacttccaatgacgaagaccacctttagcacaaaccaaaaaacaccaacanaaaggaattttgcagcaaaaagcccgtagggttcaccccaaattccgttgtcatatgctaaacttgatcccatatccactcgataattcaatggtagacataaccc

SEQ ID NO: 215048 - DNA, 368 bp, Glycine max
  unsure (1)..(368): unsure at all n locations
ctcagcgcacaggtgcacgcttatcgagttatgtaactctgattggactgcaacttccgctaagcgggacatggccagcttatcggattaaatgcctcaagacgcagtagtggggtcacgcttagcgagatagtctcgcttagtgctatgccattccagagagagtnttgggcttatcgagtatgacccgtttagcccaattgacatgggggtccaggaagagagcttactgtgcttagcacacagacgtgcttagtgagaaactatgtcgcactcagcgagctggctcgcttagcccaattccattaaatgcaatccagagaggtgtttaggctgtcttgcttaacgagaccccttcaccaatggat

SEQ ID NO: 215049 - DNA, 449 bp, Glycine max
  unsure (1)..(449): unsure at all n locations
agcttgaggaattgacttcactaaattaaggctcccagcanaagacaattggtgagccttccaattagagaggtgttgattcactttatttaaaataaattgaaaggaattcctctacactttttttatgaaaattgggattcccaaatactctaccaggtcatcagtatgttgatacctcattctctgccaaatagcctgctttcactgccatcccacattattagaaaaataaatacgggtattatcattactaaccttttggcttgagctcttagaaaataggtcaataatatgaaccatcatcttcacttgttcctcactagcttccgcataaaggagaaggttatcaactaacgccagatgagacaatttacgtgttcttttaactatctgaataggcttccactgtgttgcatcaatagcaatttgaattaagtgaatgatga

SEQ ID NO: 215050 - DNA, 429 bp, Glycine max
  unsure (1)..(429): unsure at all n locations
agcttgtgaggatntatggagactcggtgattatagatacgaggatatgggctacgtgggagtacgtgagctcacttggaggtgggcaacaagggatggtgggtttatacgtgatttgtggatgtggaaaacttgttgtgcaccatcgcccgaccgccacctagtaccacatgtgatgggtaccccataatcctacaagcttgaaatgaggaagtgtttaagggtgaaacttcctgcttttattcgttgaccacagagtggtacctggagatatgtcgcgggggtcaggagaccttggggacgtctggtggggtgctattgcccaaaaccaagcttgaccaatcccgacccaacccgggcatagttagttagtgagaacctgtgatgtacctaaacaggcgagcttctggcagtcatcagatataaggg

SEQ ID NO: 215051 - DNA, 419 bp, Glycine max
  unsure (1)..(419): unsure at all n locations
agcttcgagtcgatcatcttgcaccaatgttaaggtatgtatattcgaggttgngtgggtatggagatctacatccaaaatgccacaaagagggaaagtcatcccagatccacgaaggatttgggaaaatgaaaaaaattggcagaatttttgccattattgtgcttttgagaagtcgagagtgattatgagacttaagagtttgtcctataaatcttgtgattggagttgcaatggtgaataataatcaaatcggtgcacagatcgacttatagtggataggctaaagcatatctagattcggagaatctagaacataggaacaaaagatactaccttggttcaaaataaaatcgatatagaaaatgagactttctacaattccaacatctatgtggtctaaataacttgtaaaatac

SEQ ID NO: 215052 - DNA, 374 bp, Glycine max
  unsure (1)..(374): unsure at all n locations
agctngngagcctcggtaagtatttcaatgtcaattcctccaatttcctaaaagcaatctcgcccaatggtgcatcatcactctcattattgcttccataaatttcctctagctcatcacattcacttatccttaaaatgcggagggttggtaaacttgtggttgttgatggccttataatattgaccagggtatgacaactggacacaatcaatttatctaaacactgaaatagcacacaggatggaattatggtcttcatgcctggacacttctctacagttatttttttaaggcaaacatgggtcatatcacaaagaatatcacttttttaaaaatattctttatgccacatgatcttatttcaagaaatt

SEQ ID NO: 215053 - DNA, 316 bp, Glycine max
  unsure (1)..(316): unsure at all n locations
agctaccaaggaggagagctcagatttgatatgtgtgtgtgtanctaatctctagcttctcaaggaacttntttcaaagaagcctctcaagaaagctgtctaatgtagctacctaggctataaatagaagcatgttgtacactcattgtcaccttgatgaatgagagtctggtgagacactactcaaagttcaacatcgtctccttgtatgtcctttaatttagtgcttcccccctttttcctatccctctttcttttactccgttgaagcatcctcttcaagcttcttatccaacgctcttcgtgatggtgaaac

SEQ ID NO: 215054 - DNA, 436 bp, Glycine max
agcttgctggtgaacgttacatcaagacatattttcctgatgctgatattgatgccttttttgcttccttctcctggaagattcccgctctacgatccaatggtcctttctcctctctcttttcagatgttgactttttttctcttttttagtttaacaccaggacatgtcgccattttcattttcttttgtggttgaggttttctcatttcttgctttaaaatgcgtgagtttcgttttttcacgatgttgatttcatggtaataagctccctgctgagttcaattgccctgtcgttttttctgaactgagcttatatgtgtaattctaattgggatcacgccgccctgaatgcatacagataataatttatttaattaggagctgaaatctgactacaaaacacttaagaataaagattaaagttttgacatga

SEQ ID NO: 215055 - DNA, 343 bp, Glycine max
  unsure (1)..(343): unsure at all n locations
nngcttggactcaaggtgccactcaaacttgtacaacggagtaggctcaaccttgagcaaattctgagcacaatacctcaacggcattttaggcacaataacataatgttcagtaacaggaaaggaataaacctaaccaagtgcaggaccacccctacagttgacccttccaatgacccttctctcattggtcctaggctccatcctcaccacaagataccctcctcaaacatgcatgactccaccctctcattgaaagttgtgaattttaggcatcaacgacatggcttcaaataattgttagtattaattaatagaaaattgggaaacaaaaatatataaa

SEQ ID NO: 215056 - DNA, 346 bp, Glycine max
acagcatgaggaggtctttggtctaccacatctaattactaccctattatgataagttattggtgcttttccatgatgatttctagacaaagcatgccacaacaaaacaaaacacattttttgtccttggagcagccccattacagatccgaaattcgagtgagggtggatacctaaatataagagagtccatgttgtggacatgccaggtatcattaacggcaaatactgcttgcatcctccatgattcttcatgaggaaatctattgagaaactacgaatagtatgggctgcttattttatagtcgagttaatcgaagaacctaaatggcatttaaaaaaaaaa

SEQ ID NO: 215057 - DNA, 414 bp, Glycine max
  unsure (1)..(414): unsure at all n locations
agctngtttaagtcacgtatgagactagcggagcacatcaaatgtgcctngacatagatgttacaaaacaaactctcgtttattaccctgccaagacagcaccatttgaaccatttgtgttggtcttacctctcctttttggattctttcactattcaccactcatgcatttgaagcctccctcaatcgagtataaatgagtcatcttacctttgaattgagaaccaagacaatcaatcacctccaagttcattgtcttcacagtggctgattcagtcattgttagccaaaaaaaaaaaaacaccataattatggcagggggtaataggcaaaagaagtcatcttcgggtttcttctctatgtccaacatcttttcattaaggaagcccagaggagggtactatgatgcccctg

SEQ ID NO: 215058 - DNA, 387 bp, Glycine max
ggcagcatcttcatcctttatcgtaacatctatatctcttaattccatcaaaatagaattgaattcatcaagatgatctttaagagatgtaccttctttcatgtggagaccaaatagatgcctcttctaaaaaagcttgttgcaaattgacttagacatatacagctttttcaacttgagccataggccacttgcagtttcttcatttccaacttcatataaagacttcattagaaaaagaaagcaagattagtgagtgattcttttcttcttgttctgcagatcttcagcctttgaaacatagtgatgaaagcttgcttgtggagctcttatggagggtggatctttgagcttcaatgacgtcctttaatggtgattttccaccat

SEQ ID NO: 215059 - DNA, 448 bp, Glycine max
  unsure (1)..(448): unsure at all n locations
agcttgngacaagcctataccaaggctcaaataaacttgaaagttctagacaactttcccaaggtgtggaagacaacaagcacccaaaatgctagagacctaaagaacctttcctaggatgaactgttgggggttcttatagtccatgaagccaacctttcgaatagatatcatatgtgtcataccctaatttcgtccggggttcattatttgatgatatacaacctttgattggccgcttcaagatactgggcaccctttgttttacaatatgtgaagtcccgagacgtgccaaaaaatcaaaaggaagcaggcttacgcgatccatgaaaattccgtaatgtgacagaaatcgaaatgaggtgtttatcgcaatccgtgagttttcgaaacttcttcgaaagctaaaaaagagtaaattcataatctgtgaagattcgtaaccttg

SEQ ID NO: 215060 - DNA, 453 bp, Glycine max
  unsure (1)..(453): unsure at all n locations
atccttaagtcacctgcggcatgcaagcttcattggccaattctcaagtttatagttgtcataagttcatgaaaggagcagaacaagatgcacttcacataaaatagttagcaagaatgacagatcacaaggaagaatcaccaaaaatcagtcctcacaaggctagtgtttctcttaatcccataagcgtctcagttaaaagtgtttcaattataacaactgaatagtaaaattcccaaccttgcacattatctcagtcaatgcaatcatacatgcacaatgtggatcactaatgaatttattaggcttgtaacgtggctgggctaacgaagaaatcatggttnttcttggattccaagcttaagatctaagagagcattcattcccccaaattgttgaccaaccataactcataattttttccacaacaccaactttattgctttactactc

SEQ ID NO: 215061 - DNA, 421 bp, Glycine max
  unsure (1)..(421): unsure at all n locations
nagcttcaattatgatgttagagaatataaaatntnttagnaaaagatacaaaagcatagacaatntgaagtttgcgtatttttaaatatacgtttccaaagttaattttcaataggaatatatttagtaaaaaatacaaaaaaaaagtaagtttgcgaatagaaaaaataggtgcaattaaaaatccgttttaataattgtgagttgtttaaccccccatttggtaacgggcttatgtttcgttcgggtacgtaaaaaacgtaacaggctttttgtttataagcttatctcttttaaccataatcaatgtttcatggcttgacaaaagcagccaatttatttctccggcgaaagttggataattgtcatctaagtatgtttggatggagaaatttaaaattctgaaaaatttgaatatta

SEQ ID NO: 215062 - DNA, 468 bp, Glycine max
gatcttaagtcacctgctgcatgcaagcttcaggcatggttgagagaagagaactgttgtatttgtttgggattgcagagggggaaaacccatgttttgtttatagaggaagaagagaagaagatctgggtccaagagctactagcttcttctattcttttattatttgcaatggaagtcgtttaataatgaaaaaagatgggcatagtgtcatactcatacgcattcccatgttgtttagctttttcattcaggtaaatctttactactttatattggttcttcacatttaacctctcaagtaagaattctgtaatccgaatggttccaacttgttactctttgttagctagaatagtgcttcaaaaatagtagtgaactgtcaaaaaggtgaaaatggtggagcttacaatcatgtaaacagatcttcgttagtttttgatccccacggggacactagcactatta

SEQ ID NO: 215063 - DNA, 424 bp, Glycine max
  unsure (1)..(424): unsure at all n locations
agctntaaggttggtattagcatcatggctattaaaattgttgcatgacaactaaaggaattgtagttgtagccaattacttacaatcttagaaggaagctctccactcaacatattgaactccaaatgaagccatttaaggctggtagagtttgcaagagctaaaggaagttggcctactagcttgttagacgaaagaaatacgaagctgaggtctttaaggatacaccctttgttgcaggggatttgtcctcctaaggaattgttagataggtctacataactcagtcaagtcccattacagaaaacacttgggggaatgtctccttcaaaatcattacttcccaagtcaaggtagtacaagttatgaagtgaaccaaactcggatggaatgtgcccttgaagaaaattcccagacaaactg

SEQ ID NO: 215064 - DNA, 420 bp, Glycine max
gcatgcaagcttcctcggggccagtgactgaaatgcttcatttggaaagatagctctaccaagaaaggctactcttaaaacgaaaatggcatacaacctcctccaataaacacaaacatcaatgtaaatttagagcaaactcatgcacatacttccttacgaacattcactcgcacaagatattcttctaactaaaaaaaatgcacccatgcacaatcaaggcaccttcgtcacgtagatcacttatatgcatttccaaggcgtatttgctacctacatcacatgcatttcctctgctaaatttacatacatgcatactcaaggcacttttgctaccaaaaattgcatacgtgcacattcaagtatttctaatacctatacatacacaaacttcgtgatgaatcttggctatttacacaa

SEQ ID NO: 215065 - DNA, 405 bp, Glycine max
  unsure (1)..(405): unsure at all n locations
ttaagtcacctgcggcatgcaagcttannaaaagcttagaaatcaagtgatcttctattccaaaacatagggggagtgaacgcagatgttatacatatacattgcttgcttgnatcttgattttaggacttatattgccatcatcacaaagggggagattgaataatcaaatgactcttatgtcttgatgatgatcatgatgatttgatgcaaatgatgcagatgcgctttatcctgtttaaattcaagacattgattcttgaatactctacacagcatcaagatgatcactattattttatgaagggaattcctaattgatatagcaacaagtttggccaggtaatttacgttaaaaagtgtctttcaagagatttactctctggtaatcgattaccaaagaat

SEQ ID NO: 215066 - DNA, 177 bp, Glycine max
atccgaagcaataacctcattgtctctcacagactttagatttgggagcccatctcatccttgtggtggaactgtcgaacacttgagatagccgttgatgaaccttcacgtgcttcctaagctttctcattttattaccgcttgaatccgagcctggctaacacctttgattactcc

SEQ ID NO: 215067 - DNA, 351 bp, Glycine max
  unsure (1)..(351): unsure at all n locations
ttacatgatctacatgactgcgtcaaattgaatgggtataattaccctaatcgttggtttaaacttgctacaccatgatgggcacattgcacctatattgtgggagaatggtaattcctttccaaataatacaccctaagctgngatttgttttattagttgcacgataacacatgcactttgcgaaaaaaaaatggtggatgaaaagaaaaaaacaacgcccaaaattgattggacttctgcttgcttaggaaaactcaaagaatggtcacctatctcatgcaacctattttatatggatgtatcgttgcacgcaatgcctccaaaaggacttttcactaaaatggcaag

SEQ ID NO: 215068 - DNA, 430 bp, Glycine max
  unsure (1)..(430): unsure at all n locations
gcttggatgttgccaaccgtttataattattaacaataaccttttgttaattgttggttgcattcattttcgcgtgttggcaagaatttcaattgattcacgttttcacatgtaactgtttcgccttttgaaccttctttctacgccttttgcaatgttctctggaaaagttgtaataataaagaagcatggttgaggtgagccttgttgcggaagaggttttttttttttcttttctttttgagataatgaaagatactgctagggatttaccaaaattcacgtaactgctcgatcccttgatgcgtaagaggatattaggaatgatacactaattntgaactaaaaataaactaaaaaattaaaatgtgttgatttttcaatttttttaactatatctttccatggcaaatatttgcttcattaattt

SEQ ID NO: 215069 - DNA, 418 bp, Glycine max
  unsure (1)..(418): unsure at all n locations
agcttccaacatatagagtgagcaanaaattctaatatggaaaaaacttggaagaaaacaagggaagcanattcaaaatacaatgtacttgcatactataatcgattttgtagaattggcaccataaataccacattttacaccctgcaaacaagaaatatatgaattaagcttaaaagaacaaattgctagaaactataaatataatcatatgcaaatatgaaatatcaaaatcatataaaataaggacccaatatgcaaaattaggtgcaaaaggacatttgtgtcaaagagccaagcacgtgaactcgcatgaccatagtaaccccaattatcacaaagtgaaatattatcccaatctccagcacttgcgaaaccaacctctatttcaatntcgccaattcttcacccttttctt

SEQ ID NO: 215070 - DNA, 385 bp, Glycine max
  unsure (1)..(385): unsure at all n locations
cgctcaacaaagnatatacgacacctactgttcgttgatttgaccaacgctgttatgggaatgttgcgacaattccttcataaccttattgatacattctgagaggttggttgtcatgtggccataccgacgtccttctttatcataagccatcgtccatttttcttttgaaatgcgatcaatccatgttgctatggctggactcagttcacgataattttctagaatttgatcaaaaatgtgcttgcaaggagtataagctgcatcaaattacttatgaataagaattttaagtatatatcaaagttaaataaacttgaccatgatatatgaaatcttatcccaattctttacaattctttttgtttggcatttttgaattccg

SEQ ID NO: 215071 - DNA, 417 bp, Glycine max
  unsure (1)..(417): unsure at all n locations
agcattgaccgtgctttagctctcaaggttatactatgttgtttcacataattccctttccatatttaattatttcactttatatttgtatcgattatttacttgtaatttagtatttgatcaaattttataaataattaaagggatggaacaacantaacaataagagccttatcccattagggatggaacaatgctaaatatttcccatgaactgccagatctattgtgtatgctgtaagaagtcccctttcataattttgttgcaaattaccagtcattagcttgtgattgaactgcgtttagttattttattttgtaggtcctgtagataataaaaaagattangcataagtataacataagtataacattatttgtgataataaanaagattggtggctgtggatgtgccac

SEQ ID NO: 215072 - DNA, 410 bp, Glycine max
agtcttatgaatactaatcttttgagttctgttttgcaccatgcaatctttcatacactcaaacctttaatacactgtttggattgcacgcagtccaccagatccatccaagattcgtgaagaagatataattggtgtcactgtgcttctgttgacctgctcctatctgggtcaggaatttattcgtgttggctattatgtgaacaatgattatgatgatgagcagctgagagaggaacctccaccaaacgttttaatcgatagggctcaaaggaacattttgtctgataaaccaagggtcacaaagttccccatcaatttccaccctgagaacaatgaaaatgaagagcaacaacccccttcatctgagcacccatcggatactggagaagatccacttgctgtagttg

SEQ ID NO: 215073 - DNA, 450 bp, Glycine max
gcttctggagtaagggatcgatatggccaaatgttttctggctaaagcaacgtataagatgaatcgcatggtacgtgtcacgttgtgggggcaagatggtctgatccttgaagatgcggtcaaacttctgaataataagagctattgtcagatgaataatggctgattaagaagtttgtgatgaaaggagctccatcgatagtacacgaatttgaaagaacccgctcgagatattggtttgaccatttgcataattggcgtgtgattattgcttgctctcattatcacggtcaccttgagttctatcacctttgccaaacgcatgcacttcatatagagatcattgtactcaatgatgaccggccaaaggacttaaccattatactttattccaagtaactccacacaatggctcacatgtatatcatagtgatgcgacacctggacatg

SEQ ID NO: 215074 - DNA, 407 bp, Glycine max
  unsure (1)..(407): unsure at all n locations
agcttggttcaaccccataatccaaggaaatgttattctgatcgccaatacttcaacaacatttcataaggataaatgactcgggcatactttagctatgcatggaaagtgtaattatgatattgagatgcccgaagaaacatcattttctagttaaccatgcattaagtaccatgttcactcattntgtttttaagtgaaacgggtttatgatcccaacatggttggcttatggtaccgaatatatgcaaccaagaatgcatcgtgaattttcatgcttccctttttttttttttacagaggaaaatgcaaggatcatgcatgagcgaacatgaaaacaaaaggtatgttgtttgtagaacaaaaagtatattgaacgcatatgcatgatgatgcaatgactcatg

SEQ ID NO: 215075 - DNA, 346 bp, Glycine max
  unsure (1)..(346): unsure at all n locations
aaatgcgaaaaatgatgaccctagggctgcatactcgtaaatcccatgggtatggcttttgaaaggggggaaaagaagtttttgaatgcaaaaacgtcccccctttcgtcattcttatattttggtgcagaggtggctcgcccaggcgagctcatctcgcccaggcgagctaacctgcacccccccccctttttttttntttttttgagaggaacattaaccatgtccccttcttccttatggtttagcattttgcctaacttgaacttacttaagttaaaattaagcgttgattacttattttttaaaacaaacaaatagtaaaagacaactgcgaatcaaatga

SEQ ID NO: 215076 - DNA, 127 bp, Glycine max
attgaaatattaaaatctgtaactttggcatgatggactgtcaacttaaattacccaaattatatatctatcaaaaccccaactatcaagttgtcattttttatatagagtacttataacccccctt

SEQ ID NO: 215077 - DNA, 456 bp, Glycine max
gggagaattagggaagatcgagtgacttacgtgtttcaagaggtctatgacaattgtgacgagttggctcgggtggctacctcccccagccaggacaacttaaaaccttcattcttcattcgatgcccgaaacagtctctcgagacaagaatctttacaggtggaataagcccctctgggatggaataaagagatactaaactattcttgagcaggagatactctcagccaataagagccaagctaggaagataagagcacaagccgctaggtacatcctagtggccgacgaactatatagaagaggtcacgagaggtaacccgatcgacatgtgataaacgcctctttctgtcaaggcaaaaaggactcgggggctagataccaaataaatatattttttgccgaagtacacctggagcccaattgacatacccttcgcacatatcccatatgca

SEQ ID NO: 215078 - DNA, 395 bp, Glycine max
  unsure (1)..(395): unsure at all n locations
agcttgccactgcagcagttttatttaacaaatgaagtgtccacagncattggatggttgcttggtagaggtacatgctaataactataagatttcctgtgcagggtatcattgtttttgcatgactgatggctaccttggggctggagattttggttgaatctgcctcaagtgttattttgaaggtaattgagataatcttttgttgttgtttgtttattatatacctaaatttgggttcaagactagttattcaacatgtggattatctaccataagattgttctaataagtgattntatcatttgagcagatgatattatcatttgaccttgcttttgctttgattccgctcctaaagttcagtagcagcaaagtgactagcagcacaagca

SEQ ID NO: 215079 - DNA, 400 bp, Glycine max
gcaagtattcttcaagagcctgcagaagatcagccagcattgaacctcctgcagaagaaatcaaaggatgctaatgcatcaataaattagagtaacttattcatcataaaataattttgttgttgttaaaactaaccatgctgagtttttctttttgttcttgtaattgtaggaccttcttgaccagccattataactatgcgcattctaagagcagacaggtgttccactatattcttggacaaataattgccaagtgattgagcaaaatcaacaggcttaggaatcctcataccaggaacatatactgaaacttcaccaatactccctggcctccttctatttccaccagagtccttcgtagttgacaccacgcaacccatatctaaggctcactgga

SEQ ID NO: 215080 - DNA, 404 bp, Glycine max
agcttctcggctcatgctgttaacgcctctatctcaacacccgtgcagcctaaggcacccacccagagggaagctccccaagttccactccgaacgcgactcgaccgaccggtaattccaacacgacaaggaacttccctccaaagccattgccggaattcaccccgctcccaatgacgtacgaagatcttctaccatccctcatcgccaatcatttggccgtggtaactcccggaagggtcttcgaaccccctttcccgaagtggtatgaccctaatgcaacttgcaagtaccatgggggtgccccggggcattccatcgaaaaatgcttggcccttaaatacaaggtccaacatctaatggatgccggatggctgactttccaagaggatcggcccaatgtg

SEQ ID NO: 215081 - DNA, 398 bp, Glycine max
  unsure (1)..(398): unsure at all n locations
gaacgaacgatgaatgttgaagaatggttgaaaatcttcgcgtaattacccacggaaacgttacagaagcgcctcggcttggattntcttcacggaaacaattttcctcagcaattttaagagaatacgaagtgccaagaaggttgaaccctttccttcttcattcctccccctatttatagcaaaataggggaggagcttgccacctagctagcccaggcgagccaagttgcttcctccagaagcaaccgccttttggaggaagaaactggaaggcccaagtgggccttgatgctatttacacccgctttttactaaatgcacccnctttgctttnttttgtgattctttntccgtaacgttacgaaactttacgaatttcgtaacgatacttattt

SEQ ID NO: 215082 - DNA, 402 bp, Glycine max
agcttctacttatgtggcatgtcgggcttccttcactttcttgtctccaacgcgagctttgaccaccgctcttccttcccgcgtgcttctcttcatatccgcctgagtgggcttatagcctaaaccatacttcccacgatttcctttggcatttatcaggctagttatgccgccgttgtctttgcctaaacccattccgggttcgtaaccgttcccaaacataactcgggccatcattactgctgcatcggacaggcaagcttgcccagggaaggagtccacggaggaaatgcttaccacctcaaaagactggaaaacggtttctaatgactcctctgcggcctccacataaggcatagaggacgggcagctcaccaagatgtcttcctcgcctgacaggat

SEQ ID NO: 215083 - DNA, 475 bp, Glycine max
  unsure (1)..(475): unsure at all n locations
taggctanattaagctaaactttatattctgctcgtgttgagtctagtcttacacgatggatctgcggacgaaattcagtttaaattagtctaaacctaagagggccgtctaaattgggcctagttcaacaagagggatttgaggacgaggcttggattgattcggtctgacgatggatcgaggtttagtaatttaggttacaacatanaacacaagaacatgattgataaaagaaatatatttatatgcatcaacttgtttgttagaaagacccaacatttctacctactactgtcacttttacttacctttcatcttatagttntagcataaaaggttagtttaaattctgtttgacattatcaatcatacatgttatctcaacaattctttcattctgaacttaactcatgctaacattagtttccttgtgttcgatactcgggatcatcccgttctaattttaatacttga

SEQ ID NO: 215084 - DNA, 382 bp, Glycine max
agcttaggataccaatagtatttaaaagatgttgattaaaatacaacgaggttttaattatgataatcatatgcattaattgattttccatgatccatgtaatatgatatagaaaagcaacatcatttgataactaagaatttcattactgattaacaaaatatatttgacacatatagttagatttcttaagtatatatgcaaaattaaggttcaatttttagtaatttgtatgaacaatacttttaagacgaacaaaggatacttcagttatctctatacttaaagaggattgatcttcgactgtagataaatatctttaagttccaaaaattactaaagaaaaaaaaaccttgaaagttcattattatataaggtggct

SEQ ID NO: 215085 - DNA, 417 bp, Glycine max
  unsure (1)..(417): unsure at all n locations
atactatctatactcaagctttagcgcttgtttaggtacttatagccatctggatagtcccacctcaacaatatctctccctgtatagtttgtgcatgggaaaccaaattttggcactagtgcggngagaatacaagcaaacaaacagacaccgttcgcaaagctcttctctgataatncttgtttcaagaaggaaaataaaatcccaacaatgatactgcaaatatagtgttcaaatgcttaattatgtagacatgacatgttctgctttaaataagccgacaagggagttacctttatattattattttgttcagaactacttcagctaatttggaggtatagtaagttgagtttattctaaagaaagttggttatctttatatattattattttatctggatagaatacctaat

SEQ ID NO: 215086 - DNA, 406 bp, Glycine max
  unsure (1)..(406): unsure at all n locations
agcttagaaatcaagtgattattaattcctatacatagggggagtgaacgccaattttatacatntacattgtttgcttgtatcttatttcaggacttatattgtcatcatcaaaaagggggagattgtagaagcaaatgaatttggtgttttgatgatgatcatgatgatttgatgcaaatgatgcaaatgtgcttttcaagtttaaattcaagacaatgattcaagaatacaagccacaacatcaagatgatcactagtatgtcacgaatggaattcctatttgatatagcaaaaggtttggccaagtaatttaagttaaaaagtgtttttcaagagatttactctctggtaatcgattaccagaggatgtaatcgattcccagtggccaaaaatgatttacaa

SEQ ID NO: 215087 - DNA, 458 bp, Glycine max
  unsure (1)..(458): unsure at all n locations
taattaattaattatatcatgtggaaattatggattgtattaaacacttaaaggcaaagtttgttgccatagtagacctatcaagcttaagtaagatcgtcttgatacatgtggtttatacaaaacaaaacaaataatcctccatcttcttttagcaattggccctaacatatgaatgntacatatagattctaaacttgatgtggtttgtgttgtaccctaccaatgaaaataatatgtgatatacttagattagtccttatgatcaaggtttgtatcccttaacatggtttattttaattttatttcaccttttataaccaaatattaattaagaattgttcagttatgcaaggagataaaattggtgcgataattgcatacacttatctatatctttgtatccaagttgatagatggggaggtatacatgttataaaagttcgttgtaaatcaaa

SEQ ID NO: 215088 - DNA, 401 bp, Glycine max
  unsure (1)..(401): unsure at all n locations
agctntctcttgttatgtgacaatggtttcttgtgggatgtgatcaatccagaatccagtgaaccgctaccagaagatgggtgtctagagaaaatgcttctgaggtgagtatcttttatgtttttggtagttgatttgacttgtttgtttaaggaaataggtgatgcttggataaggggtatgtggactataaattccagatggaagtggttgtatagagaaatcacgttgtttatggaattgtgtagcatcaatgtgaaggctaaatcactgaatggggagtgaactggcttcacgactgctactgctgtcttagacaggcttcttaaattcctgcttataaggtaatggcttggtataatcagtccctggtatctacccattatccaagtactcccttg

SEQ ID NO: 215089 - DNA, 436 bp, Glycine max
  unsure (1)..(436): unsure at all n locations
tgttggttgttgcctttatgtgtagcattcaccttttctgcgtgcagctagggctgagcgtctgagcatttggttcccttgcgaccccatttcagtaacccttgttcattcaccaactctcatgcagaaatactactcaggcaaattttctctttatataactttatcgatgtatttaatttaagattaataatagtataaacttaagaaatgcanttaataatttcattctcttaaaacttattatgatggacctcgatctctagatcattttggcaaattagtcattcacaataataaaactcataactaagctccaaaaaatatttcgttccaatggcaattttgtcactatgtggcgtactaaatttcaatggaaattttaaaactacagaaatatttcctattgtgtaattttagagcactaataatgggt

SEQ ID NO: 215090 - DNA, 393 bp, Glycine max
  unsure (1)..(393): unsure at all n locations
agcttcagcaactattaccgtgactctgattattgnaccaagcacattaaaatgaattggcccatatgaggaaatgaaactccaacactgaccatctccatgttccagaatacatcacaccttaatttctcagttccacaagtaacggccacaacatatgttgctactggcactgtaaattaaaggaaagggacaaccattcattaaggaagtctatctgcaaaaaaaaatgttatatggaaagatgatacacaaaagttaacttactctgggctttaagcatctggatgaaggccactgaaatgtacaaataaacagtattcccaaaccttaatagacaatatagtaacttaacgaatatatacaatacagtcatgtcatgaaactgaggag

SEQ ID NO: 215091 - DNA, 363 bp, Glycine max
acacaatcttccttctttgtctaacaataactacgcttttgtcatcaactacttcatctggtagccatcgaaagttgttgcatccactgtcaacctcacgttgtattcaatcaccaacataaatcaatagttaaaaatggctaagcctagcaattcagcatgtagtcttgtgaaaattcaacaatgcagccgctataattaagaccaaacaaatacaattaagataagaaaagctaagcgtatgaactcaccatgtaatcaataaaaaagtgcacggccacaaggaaaatattgatgcacagatacatgtgcaagaatctaagatagaaaattgattctcacactgtagttgggacattccca

SEQ ID NO: 215092 - DNA, 418 bp, Glycine max
  unsure (1)..(418): unsure at all n locations
agctttacaattaacatgcacatcttgcagatgctagtgtatattnttgtttctaattttaacaattgaaatttgaaactttggaagtatttttatgctatgttacttttttatttatcggcaaatattagttgttaattgttagtggggggattccaatccatgccccctccccctcccttctccctttcccactaagccaacactatatctcctatttccatgtcacttaatctgcagttgtcatctatgtcaacgaaatcttaacttttatgttgtaattctcaaatttgattttgtcatgtggtcctatttatgatgcaacttaatattgaaaagagctttcaattcatctgtcattagaatattttctccaataagttaggatggcaaaatttcaaaagtgagttttaacttt

SEQ ID NO: 215093 - DNA, 355 bp, Glycine max
aacgaaggaaagcaactatgttgattataaatactcaaactaatagctatggaattagataacaaccgaagggcacatatttccttgccacgtatgatctagacattcacatggtgaaattctatgcatcttctcgtgttaataaatgtgtcttaagaaataagctttgaaattgaatgattgtccagatagcttaagagagattaccattccagtagggcgtaagcaagtccttcatagttttgcctcataaaagacaacaatcattgatcaattattcaacttagatcggaaaaaaaacgtagaacataaacaccaataatatctttatggagatttttataaacatctatta

SEQ ID NO: 215094 - DNA, 221 bp, Glycine max
  unsure (1)..(221): unsure at all n locations
agatgcactgattcccataacagttttcttttttaagcacngatagattataaagtttatgtatagaataaaaatatttttgaagtgggcttacaaatactgaagtgtttgcgtaattataaattttatctaataatgtatttgtagttatatatgaggtaatataatattttttattttacctcacaatttatttcttataaataaactcaaacctcttc

SEQ ID NO: 215095 - DNA, 409 bp, Glycine max
agcttaaacatatataaacactagactcgaatatctaatccttcccgccacaacaactcaggtaagtttaagtgatcagtaatctagctattttctatctatagaattttgttttttcttttatttaatatataaaacaaatctaccatttcactttctctactttaattttcttcttttagaaaatatttatttttacattttttttagctctattatatcacaagaataagaaatacagacattattagataactgtgataaagtggagtcagcttccactaataagagacaataagtatataacaatttagctagagaaagtcacgagacatacaaaaagggtatgtccaaggccccttgtctcttcacatgcataaacaaaaataagcattaataaaagaatgac

SEQ ID NO: 215096 - DNA, 402 bp, Glycine max
  unsure (1)..(402): unsure at all n locations
catgtctgccatcctctttcggaaacagctcacccgcgacgactcttacctctggccgcgcctctcccctcagacgcagtcttccctcaaatcgctcctgctctcctcgattcaatcggaaaacatcatatccatcttcaagaagctctgcgacaccatctctgaactcgcctctggtatattacccgacaacgcctggccggagcttcttcctttcatgtgccagtgtgtttcctccgatacccctaagcttcaggaatccgngttgttaatcttcgcgcagttggcggcagacatcggcgattccctcactcctcacatgaagcacctccacgatatcttttacagggcctcacgaacgctaccggtaaccctgacgttcgaattgccgcgcttaacgcc

SEQ ID NO: 215097 - DNA, 413 bp, Glycine max
  unsure (1)..(413): unsure at all n locations
agcttgtaggattatggggtacccatcacatgtggtactatgtggcggncgggcgatggcgcaagacaattctccacatccacaaatcacgtaaaacccaccatcccctgttgcccacctccaactgagctcacgtactcccacgtagcccttatcctcgttcctctcaacgccgggtccccatcaatcctctcaagctcccacaacatccaagaaattcaacatcccatcatcacaaactaacaaaaccaagtaaaacagggcaaaggcagaaaactctgcccataacacaaaccaaaaatcacagcttttcacatacaaatactctagtaacattttcttcgttccaatttgttaaccgtcggatcgactcgaanattntactggaagtctctagtacataagtctacatt

SEQ ID NO: 215098 - DNA, 331 bp, Glycine max
ctaatatgatgagagcactattaggtctcgctttctctgcttgatataagctagaattacaggtgattgtacgtggataggccctaggcactataatgcactcatgtgaacgatgggacattgccacattagtccccgtcttcttgctattgacgcctaaacgcacgcccaccaagtgttcgatgaaatgcctcaatggcactagcgcgtgacttttgtaaggaaacaacccatggagcattttgggtttgacatattttctatcttggaatatgtattcatttccgaaaaatgctacagtatatgccccacatatattctataactatga

SEQ ID NO: 215099 - DNA, 410 bp, Glycine max
  unsure (1)..(410): unsure at all n locations
agcttgtaagttggtaaattggttagncatattatgaaaaggtttcatgaatctgaaactgttactttggttatatttgatgacacagcattgttagcaaaacctggatattttaccccgtttccctgctgttgttgcagagagtgagattgagagtgaaatcaaaattaaaccaaaaactcacagctaaatggcaaaagaacgagaaatttgtgttgttaacgttacgataattctgccctgtagcaatttgctaaaaaccttcggattttatgttgaatgctcctgctctactttacttgaacatgcctgtgcaagagaaattcttggcgtttaatttttacttattatggttttgtccctaaattctttatagggtaaatacctcgaaagtataagatagtgataaa

SEQ ID NO: 215100 - DNA, 96 bp, Glycine max
ctagagagagctctgccatggagataagtgagatgaggcaagaagagatccctctgtacacagttattttttatgatagtttgatgtgtaaccatt

SEQ ID NO: 215101 - DNA, 400 bp, Glycine max
  unsure (1)..(400): unsure at all n locations
agcangccctctangaacatttacccctcattctaatagaanccaccttgggcctttttcccacaactcttgtaaatgggagagaatgttcatctaaagcatacaagtccctaatattatcaaatcctaaaatttgagctcctagggagcaaaacaatgtgtgtctcctaaagagggcatcagctaccacatttgtttttccctttttgtatttgataacatatggaaattgctttaggtactctacccattttgcatgcctcttgtttaactttcttttccctctaatgtacttaagtgattgatgatcactatgaatgacaaattccttggaaacaacgtaatgttcccaagtttggagggcttttattaaggcataaagctctttatcataggtggg

SEQ ID NO: 215102 - DNA, 417 bp, Glycine max
ataccggacaaatttatggctgctcgaagacttgacagaaatcactattgctaccttattggaactttcagatatgaccatactaagggttccatcttttttcccataaaatatggatcagaaataagtgaccacacagaaattcagccaaaaacaacaactatagctaccaagacaaaaaatctctattaattcagcgagggtggtctctaaaatctgtcgctaagggatttacactactaccctgatttccatgtcacaaaagtggtcgctaaatccattgcatatcactattcacagccaaacacaatactgatatatgagaggcgctgaacagaaaaacttacacagaacaccacacttaacaaaattacaagactctaaacacacttaacgcacaccaacacaacactaaca

SEQ ID NO: 215103 - DNA, 409 bp, Glycine max
  unsure (1)..(409): unsure at all n locations
agctggcaggagtatggggttttcatcacatttggtactangtggcggtcgggcgatggtgcacaacaagttttccacatccacaagcgcgcataaacccaccatcccctgttgcccacctccatctgagctcacgtactcccacgtagcccatatcctcgtttctctcaacaccgggtccccatcaatcctcccaagctttcacaacatccaatcaaaacaacattcaaacagcacaagctatcacagccaagcaaaataaggcaaaggcagaaaactctgctcaacacacctaccaaaatcacaacttttctcacttaaagaccccagtaacaattccttcgatccaattcgataaccgttggatcgactccaaaattctattggaagtctatagtacataagccta

SEQ ID NO: 215104 - DNA, 315 bp, Glycine max
  unsure (1)..(315): unsure at all n locations
cgcccttcaggcggcttcaactattcctccgtctatagcntaatctcattnaaaagttcctcaaccctttccaaggatgtattctatgagaatcgaactcattcctttcccacaaactcagcatgtgttatcaactgagctatatccattgagttctgatgtctatacatatatgtgttctcatttctaatgaaatatttgtattggcaactctttatgtctctgttgtaactactaacgtggttgcgtaagctgagaatatttagcttttttcacatgaatgtgaaaaggtttattttacttaagtctgtggat

SEQ ID NO: 215105 - DNA, 398 bp, Glycine max
  unsure (1)..(398): unsure at all n locations
agctttagagaaantcaaagtgtcataacttttctctcggagggccgattcaggtgcataatatatcaagacgtttgaaattgacaacgaaagctcttgacaattcaaatggtcataacttttaacccggacgaccgattcaggagcattacatatagagaagctcgaaaatgaagaacaaaagctctcgagaatttcaaatgggcataacttttcactcggaggtccgattcacgcgcataatatatcgagacgctcgaaattgaacaacggaagctctcgtgaaattcaaatattcataacttttaactcggatgtcagattcatgcgcataatatatagagacgcttgaaattgaacaacggaagctctcgagataatcaaatggtcataacttt

SEQ ID NO: 215106 - DNA, 361 bp, Glycine max
  unsure (1)..(361): unsure at all n locations
tcgatagctgtcgtctttctatatcgagcgcctcgatatattatgcgcccgattcggatcaccttgtgaaatgttatgaatatttaaatttctcgagagcttccgtgagtcaattcttggtgtcatgatatattatgcgcctatatctgacatccgagttaatagttatcttcatttgaatttcccgagagctnccggtgtgcaatttcgagcgtctctatatattatgcgcctgaactagacatgcgagctataagttatgaccattttgaattctcgagagcttccgctgttgaatatctagcgtcgtcatatattatacgcctaaatcttaactccgtgtgaaaacattgtaccattt

SEQ ID NO: 215107 - DNA, 400 bp, Glycine max
  unsure (1)..(400): unsure at all n locations
agcttgaaggggggnagcctatcatctntttatagtagaacactggtaatgtgtctactatcattgtcatcatttttttctccgcattgaggtgtcacttgagctgctaggtctctccacctttgggcgtattcttttgaaaaattcgtgccccctttttgcacatgttctgtagttgcatcctatccgaagacattattctgacactgcctaacgaaggcaaccactaggtccttccaagaatggactcgggaaggttccaagttagtgtaccatgtaacagctaccccaataagactttcttggaagcaatgtatcagcaattcctcatcttttgagtatgcccncatcttccgataatacatctttagatggttcttgtggcaagtagtcctcttgt

SEQ ID NO: 215108 - DNA, 369 bp, Glycine max
tgcgctaagccgagagagcacgctaagcctagagtatgcgctaagcttgaagtgtgcgctaagcctggagtgcacgctaagcgagctgtccaattcttccaacttttcttcaaggttttttcttgagtatttgcatcaatttttcctctaaagcacttgaaatcttcttctgttgacttttgctaataaaaaattgcaaagatgttaatttcttcattatttcattaaaaacaattagtaagtgaagaaattacaatcattattagccaatattgactatcaaaataactcatatttcgcaattattaacaagtcatctagacctaacaatatattgtacactatgattctcattgagatattcttcta

SEQ ID NO: 215109 - DNA, 406 bp, Glycine max
agcttgtgactcttggcattttctttaaatttattcacttaaaaagttgacttttgaaaaaatctttagaaacaagtcacttgaagattgtgacttttggaaatgtactttttgaaatcagtcactggtaatcgattaccattaaggtgtaatcgattacacatcaacagatgtgactcttcattttaaattttgaaaatcaaaacatttatgagctctagtaatccattacaagtattgtgtaatcgattacacatgtttaaaatgatttgaaaatgtttaaacacaagttgtaactcttgaaatatgaaatcttaatgatcgaggccgtacccgaatcaaataaacatgaaaatgtagtaactaggaagtgatcctatgtcgtttcccaacgagtaatgacaaa

SEQ ID NO: 215110 - DNA, 318 bp, Glycine max
  unsure (1)..(318): unsure at all n locations
gagagcancctccgggtcgtgaagtgcgtggctacgagtgggacttctaaaatccacgtttgggtggacttctttctctcttaaattttctgggtatggggttttgggagatatgatgggtggccttgtacgtttctgctgtgcaatgattatttgtgaaagaacttggtgaaagcttgttgaaattgtcatgcttggatgagttagacatacccactctgtcttacggtttcgcgatgatgcttatatgctgagactgcctatggaaactggtagagattacaggtatagtttacctatgggttgaaagtgacaatg

SEQ ID NO: 215111 - DNA, 401 bp, Glycine max
agctttgagcaaattctaacgattatatctttttactcggatgtccgaattaatcccgtaatatatcgagacactcaaattgaaaccaaaagctctgagcaaattcaaatgacaataactttttactcagatgtctgattgtggccagtggtatatcgagacgttggaaattcagaatagaagctctgagcaaaatcaaacgacaataaatttttactgggatgtccgactgtgtcccatagtatatcaagacgctcaaaattcaaaacaaaagctctgagcaaattcaaacaacaataactttttactcggatgtccgattgtgtcccgtagtatatcgagacgctcgtaattgacaatagaagctctgagcaaattctaacgataatagctttttactc

SEQ ID NO: 215112 - DNA, 417 bp, Glycine max
ttttttcgatatacacggttcacaatcggacatccgagtaaaaagttatcgacattcgaatttgctcatagcattcgttgtcaattacgagcgtctagatatattaaaggattcattcggacatccgagtaaaaagttattatctatttatgttgctcatagcttctgttatcaatttcgagcatctcgatatattacaggactcaatcggatatccgagtcaaaagatattgtcgtttggatttgctacgagctaccggttcaatttcgagcgtctcaatatgctacgggacacaatcggacattccagtaaaagttattgtcgtgtgaattactcaagcttccgtcgtcattacgagcgtctcgatatattacacgatacatttggacttccgagtaaaagcatggtcgtttgat

SEQ ID NO: 215113 - DNA, 385 bp, Glycine max
agcctgaagggagaaagtgtggataaacttttcccctacatttattcgctgaccacagagtggttcctggagatattcgcgggggtcaagagacctttgggacgtcaggtggggtgctattgcccaaaaccaagcttgaccaatcctgacccaacccgggcatagtcagttagtgagaacctgtgacgtacctaaacaggcgagctcctggcagtcaaccgataaaagaacaaagaccacacagcatgtaggcttgtgtggtggctggccagctatggatcttgagtgattattgcctctggtaatcgattaccaagggtgtgtaatcgattacaaggctctaaaatgaagacaagaagttaagatggtctctggttatcgatta

SEQ ID NO: 215114 - DNA, 342 bp, Glycine max
  unsure (1)..(342): unsure at all n locations
aacggatactaaccctgaatgggtctatgcagagacaacggccgcataactagcctgataaatgccacaggaaatcgtgggaaatatggatnttgctatctacccactcatgcaaatataaagagaagcactcccggaacggtagagcggctactctgagctcacagttgagacacgatagtgaatgaagcccaccctgccacataagcaggagctttataaactcgggtcttgtggactaaggtcaacgggtcccgatatacgaagatggtggtcctagtacattggattatgttcaaccttgccctcctaattatcagctggaaatcgtcgagtggaaga

SEQ ID NO: 215115 - DNA, 416 bp, Glycine max
  unsure (1)..(416): unsure at all n locations
agctntgcctttagggttgtacctcatcactttcttccgaagctttaacctcgtcatctctcatagtctttagatttgggagccaatccaatcctgtgtccggtctcttagccgcttatgatagccgccgatgatcccattactgcttcccctaagctctctgtcctttcttcacgccgcatcccatgccttgcgaactccttggagtaccctcgcgttgtggtcactgaaaccccgtgcgatgaaaggcgtgatgctttcgtctgatggcactcctctcatggggtagccaagctgtcttatggcgaggacgggattataattaatacaaccccttgttccatcaagggaacatttggacatccttcgcatgaagatagaatcctgattcttccttccttctagcgagggaacca

SEQ ID NO: 215116 - DNA, 410 bp, Glycine max
gaccggggatctctacggggcagagtacatgctcaccattgctatggccttggctagcattcggagaagttcttgactcccgttcaatgtaagagcagatacatccatccatagtgttgcctcttgatgtaacgcgtctatcacccttcctttagcctacatgtaatgcatacaacttgggcatactcgtacgtcactttgtgctcgtgggccagggctagagcaaaccttcaactcatctttcacgaacaaacgtgtctactcacgaatggtccctttcctctttctggagcataagctcgctgttactgtcccacagagcctctcggaacttgtgccgggcgtgttcttcctacaaccctcttggactctcgatcaagggcctggtggagctatatttgtatctctca

SEQ ID NO: 215117 - DNA, 418 bp, Glycine max
  unsure (1)..(418): unsure at all n locations
agcttatgcacagaanatgtaattatgataattgttatgcccttattaaacatcctttcttagttaaccatgcattaggtaccatgttcagttatttgttttgttgttgtgtgtttttttttttagaaatgggtttatgatcccaacatggttggcttatggtgcctaacacatgcaactaagaatgtagtgtgaagttttcacgcttccccttttttgtttttgttttgtagaggaaaacgcaaggatgagcaaacatgaaaacaaatggtatgcaattttgcagatcaaaaagtttgttgaacgcatatgcatgatgatgccatgattcatgcaaaatgtgaggctggaatatgataacggacaaatgcaggaacgatatgttcattatgatgttatgaagagattcttatgcgat

SEQ ID NO: 215118 - DNA, 410 bp, Glycine max
agcttaggttattcttcatagatgaataactaatgtcattctccaccagggacctactgtccccaatggacctttctctgccttctaagattagttccttctcttcacaaacatgcatgtagtactgcacacctttgttgctgtttgcaagccatctcaacatcctttctccaatgaccaccagtgaccaccgtcacctctccccagcgaccaccatgtcggaaatcccgtcatccaaagctgccacacgcgcctccatgcatgcccttcttctggcctgtgacagctttccggtgccgctcactcaccagcaaacctttcccgggccttccttgcctttgatgaccatcactagccccttgtttggctcttttttcatggctaccaagattccttcagactccgtttct

SEQ ID NO: 215119 - DNA, 412 bp, Glycine max
  unsure (1)..(412): unsure at all n locations
agctntgaatgcactattcaatggagttgattataacatcttcagactgatcaacacttgcacagtggccaaagatgcatgggagatcctgaaatcactcatgaaggaacctccaaagtgaagatgtccagattgcaactcttggctacaaaattcgaaaatctgaagatgaaggaggaagagtgtattcatgacttccacatgaacattcttgaaattgccaatgcttgcactgccttgggagagaggataacagatgaaaagctggtgagaaagatcctcagatccttgcctaagagatttgacatgaaagtcactgcaatagaggaggcccaagacatttgcaacatgagagttgatgaactcattggttctcttcaaacctttgagctatgactctcggatagggctg

SEQ ID NO: 215120 - DNA, 418 bp, Glycine max
  unsure (1)..(418): unsure at all n locations
agctttcagctaccaattagctgtttaaatatgtttttcaattatatcctaaaangaaaaaaaatacaaagacaaaaagcaaaaaatactaaattgcaggactaacaagtatttaaatctttatacttttatggcttaaatatattctaggtttccgataaatgatccattcttattctaggtatcaagtaaatttttttattacattgaatttttaatatattaaaaattttgttttaagaccttgtcactgactaaatgattaatagctgatactcaaaagatctatggctaacatgtcacccgataatgggccacgacctgtggatcctactataatgcatattctacattttgatccaactatggattgaatgcatctgtcctaaacaataatattagaaaaaatgactatttt

SEQ ID NO: 215121 - DNA, 350 bp, Glycine max
cagccggtttcctctttacattgaccatcactgtctgccaattttcttgtgtagtgcttcgatgatcttcatgtccactgagttcccagatgcatttctcacatagaacacattgaggcctttctcccctacagatgacacacctgccctactaactgttaagccattctctcttataatccttgtcactttagatagcaaccccactcttgcctttgcacaaagctcaagactcacacactgtgtccaccaccatccacaaaatcaatgctaacaacatgatgatgatgatgataacaattgcatgcataaatgtcagataggaatagtgacttatgaagcacgaactc

SEQ ID NO: 215122 - DNA, 407 bp, Glycine max
  unsure (1)..(407): unsure at all n locations
agctntaaagagggagnttgtttaggntgttataacnagcaaaagggcggaagagatcttgaattggacacatgaccaaatcttatattcaatttaaccaacaattcatgttttttaaactggacactctccaaatttatttgattggagaggatctataggctataatttcatgagtagtgagtatccacgattaagatattatgatattcatgtcctatccattattgaatgaataatgaataaaaaaatatccgtattcataaataatatatatctatctaaaatatttatcatttgtgcataacaaattttattcacgaatatccatggtaaggattntttnttttaagtactacatagtacacgacattntagtacacacaatatttccgtatcttgtacaa

SEQ ID NO: 215123 - DNA, 401 bp, Glycine max
  unsure (1)..(401): unsure at all n locations
agctntgatggaagaaacctcttatcacttgtataaagctcaaaaaatgacaaagaatgacttcctctccctcttggtgaaccgtgcaaatgaggaaggaaatgggttccaaattggtttttaacaaaatataaagatgaggtttaaggttggtccaaaggaaacttggttaggttaaagttgacaagcttaattgacaacatgaatgactcatgaccagccatgtttaatgtgccaagccatgccatttaaggttattgttgcttttgaaattttaaccaaaagtggctaaagtaggttttaaacaaaaatgaaaattttgcttttactaaaattggtatatcctatcctaattctcgagatagacgtattaaaattccttggattacgtgtaatcaaag

SEQ ID NO: 215124 - DNA, 399 bp, Glycine max
  unsure (1)..(399): unsure at all n locations
agcttgatgtcattcaaaacttactatgtttacctaaatgaagactaaacattcattgtttatttatttgtattcattatgcgaataattcgttgtaacccgtcactaaccaattaatattatcaactactcgtttggttaagcaaggaaattgttggtccaacaaaaatcatttacgcgtacagcatacatcattgtcataattgacaacacataatgacatgcatgcgtgttacagtttgagcgtgacaacacattggttgacttgactacacattatcgacaacacattggctgacttgactacacatttacgcgtgtctattnttttgtaaacaaagttaaacaaaggctctgtcacaaccatctatatatatggcagactaggctactaaatca

SEQ ID NO: 215125 - DNA, 407 bp, Glycine max
  unsure (1)..(407): unsure at all n locations
agcttaaagagggaaagatattctcttctgtgttgacagggttaattnggttccatgcatgtcatttcctggagtataattataaagatgctagtttattagagccaatgatgcttgactaagcaccaattcagagttcacatggaagaatgactctgcccctgtaaaggcaagatattactttaatgatttggaaattgaaagataaagagatgtgggtgtatgtcgacatataatatacaacctaagtggcatatgtttgaaatgtagttttatcatcttttcttttcttttttgttctatataattcggngaaactgaacatttaaacgaagagtcagggatcaagttctgtaaaaccatggaagtcactaaaatgtggttttagtatcttatgaacatatata

SEQ ID NO: 215126 - DNA, 401 bp, Glycine max
agctttgatgcattatttggagatgttaatgaaacaacgagatgatgcgctccatgagaggttggatcaaatggagaattagatcataatgaagaagaaaggaggagaagagggaatgatggtgatcctatacaaaaccaaattgatggtattaaactcaacattcctccctttaaatgaaagaatgatctggaggcctacttggagtgggagatgaaaatagagcatgtcttctcatgcaacaactatgaggaagaccaaaaggttaagctttccgccacggagttttccaactatgctcttgtgtggtggaacaagctacaaaaggagagagcaagacaagaaaagccaatggttgatacatgggcggtgatgaaaaggatcatgaggaagcggtatgt

SEQ ID NO: 215127 - DNA, 397 bp, Glycine max
agcttgtaggattatggggtacccatcacatgtggtactaggtggcggtcgggcgatggtgcacaacaagttttccaatccacaaagcgcgcataaacccaccatcccctgttgcccacctccatctgagctcacgtactcccacgtagcccatatcctcgtttctctcaacaccgggtccccatcaatcctcccaagcttccacaacatccaagcaaaacaacattcaaacagcacaaactaccacagccaagaaaacagagcaaaggcagaaaactctgccaaaacaccaaccaaaatcacagcttttctcacttaaagaccccagtaacaattccttcgttccaattcgttaaccgttggatcgactcgaaaattttactggaaatctctagta

SEQ ID NO: 215128 - DNA, 414 bp, Glycine max
agcttcatcctcagatccctcttggtggactatgcttaatttagacagccctcctaggtttagactaacctaaactaagcttcatcctcagatcctcttgttagactagacttagcttaaatagcttacgaaagtttagactaatttagcctaagctttgtcctcaaatccctcttgttggactagacttagaccaaacagcattattgtaatagcatatttaaaccaaaacttaatccgtagatccctcatttaagactaagtttcagtcctgcttcattcaagttctaaggcaacaatacatttcctaatgctaaagtcacctaaccaggcacacaaatgggtgatcagaccaagagcatacagaatttaaacactgaaagaagcattgaacacaatcaattagatattaaa

SEQ ID NO: 215129 - DNA, 406 bp, Glycine max
  unsure (1)..(406): unsure at all n locations
cgatctttcgangaatctaatcaactatcccatattcacaagtgaggcataagcacaccatccccagttgtccacctttaaattgagctcacgcactcttacgtagcccggatactcgtaccgggtcacaacgggtgcgacacgacccctccgatgtgactcacattgaatgctacaggtcctaaaccatgtctaaatcatgtttgaacgcaagacaaatttcaaaccaatgtaaatgggaatataggtatgcaatacccacctattaagtaaatttgaaggtttgaaagggaagatagaattgggtatttagggtaatatcgattttatcagtctatgcgtggattaacttgctaaactggtttaggggagacgtcccattgaaattgccttcaacaccattgcc

SEQ ID NO: 215130 - DNA, 209 bp, Glycine max
  unsure (1)..(209): unsure at all n locations
tattnntttaaatgccnnnccaacatgaatctgggtcagaattgcnnctgaaagtcgttgaacttcttgaactgcaagaatttgtgaaagttcatgggaaatacaagggagctagaatttctaaaagttcattaacctgttggttgagtttgagatatgataaatctatcacccttaagttgcagagattacccaaagaagttggaatg

SEQ ID NO: 215131 - DNA, 411 bp, Glycine max
  unsure (1)..(411): unsure at all n locations
agctnttgagaacttcaaatggtcataacttttcacacngatctccgattcggacgcaacacatatcgtgaggctcgaaattgaacaatgaaactcttgagaaattcaaatggtcaaaacttttaactcggatgtccgattcaggcgcatcacaaataaagacgctcgaaaatcaacaacggaagctctcgagaaattcaaatggtcataacttttcacactgaggtccgattccggcttataatatatcgagacgctcgaaattaaacatcggaagctcttgagaaagtcaaatggtcataacttttcactctgatgtccgattcaggcgcatcacatatagagatgctcgaaaatgaacaaagaaagctctcgagaaattcaaatggtcataacttttcacactgagat

SEQ ID NO: 215132 - DNA, 310 bp, Glycine max
gatgttcagtttcaagcgtctctacttattatcagcctgaaacggacctcagtgtgaaaagttatgaccatttgaatatctcgagagcttccgacgtttaatttcaagcgtctctatatattatgcacctgtatctaacatccgcgtgaaaagaattaccatttgaatttctcaagagctttccgggtgcaattgctagccgttcgatatatgattcgccccaatctgacatccgtgtgaaagaaatgacctttgaactgttcagaccttccgaatgcatttaaagcgtctctactatactcgcccgata

SEQ ID NO: 215133 - DNA, 295 bp, Glycine max
gtacaagagaacgaagcttgttgggaccacaatcatcaactaactgacccttttttctaatataaacacttgagaccctcttgatgaatgaagaggacaacattattaaactacataccacacaacatacgaataatagggcatgacacaatgaagctgcccaacacatagttataaaagacaaatgaggagggaataacctcaaacatcttgctagcttggtagaaactctcaacccaaactgaacaaattcaaaattattcttcaagaggaatatgcacaaaaaccttgtgag

SEQ ID NO: 215134 - DNA, 416 bp, Glycine max
  unsure (1)..(416): unsure at all n locations
agcttgtcactggttgcaaggttaaaattatttcttgcttagatgccttgatgagtatgagctcaagcacatttttagagaaaacaataacagagcaatgtgctatcaaanttnccgagtttcaataagttggggcaacataaaacattcatacaagacacacttgttacatctagcatagataaatctgatatctttgcaagtcaaattggtagtgactcttggatgaacctgatatggaattatttactgaatgatcaattactagaggacgaaattaagcccaagaaagtaaagttgaagttgccccattatgcttatcattgatagagagattatcatatagtgaatctatgccccattgctgataattttgaatgatgatgaagcccaatatgtcatgaacaagattcata

SEQ ID NO: 215135 - DNA, 356 bp, Glycine max
taagcaaacaatgaagttctatagtggagaatgtgcttgagaaccctgtactgtgcttaaagtgtgatttgctaaagatccaaaaattaatcaagtcttagaagctatagatgaggaggtatgaatatataattcaacgagttaactatgatatgattctttaccaagaaaaaacattcttttaatttaggtacctacaaatgggtctactatttaaaatcatcaaactacaaacaatctcaactagaggtgagttgaaatttaatagtttatatgttgacaatgccattcttgttagcatatggtatagctcgcagtgtatcccgactatctatgtatgtagtaagttgacattt

SEQ ID NO: 215136 - DNA, 401 bp, Glycine max
agctttagtgcccttaattttttagcaatatttaacattcccataatgtattccttgacatttccttttccttgatacttcatggaatcaagttccaaagaagagtacttgttttcgccttatcgctttttgcaaagcgcttttcaattttagcaagaaattctttggcactaattatatcatctgaaacagtgcctttaaagacctcaggaatgccgcgcttaatgatcataagactcatgactcatgcgatttgagtgatcccagttctcatgaagtttcccctatttagaggtattggaatcagccggagaagggggtttctcaatccttaatgcaagcactagatccatgcagccaaggactatatgtgtgtgtgtgtgtgtatgacccaaaattgc

SEQ ID NO: 215137 - DNA, 402 bp, Glycine max
agcttctggtatcaattacttatcgtctcgatatactacgggacataatcggacatccgagtaaaaagttattatcgtttgattagctaagagcttgtgttttgaatttcgagcgtcttgatatattacaggactcaatcagaaatccgatttaaatggtattcattcggacatccgagtaaaaagttattgtcctttgaatttgctacgagcttccggtttcaattacctgcatctcgatatactatgagacacaatcggacatccgagtaaaaagatatcatcgtttgaatttgctcagagccttcgttgtcaatttcgagcgtctcgatatattacgggattcattcagacatccgagtagaaagttattgtcatttgattttgctcatagcttctatt

SEQ ID NO: 215138 - DNA, 397 bp, Glycine max
  unsure (1)..(397): unsure at all n locations
agcttgctgacattatccaaagactggtattttccagattttcagatatatagttcaagtcaatttatttgattcatacctgttgttgttttaaacttttggtattctagatcactgcttattacacttaatttttccataagagcaaggtgatctaaagctgcgagttcgaactttggaatctgagagggcattccagcgtgttgctgctgtccagaagactatagggagtgtgagtcaatctaacatgtgatttatttgaactgtaaagtttacttctttggtcaatttggttaaagattgttctactgcctgtaaaacatgtatttgtcaatctttgtgggtatgctagcacctcanatttattatctaccgtaagcagctctatgttcaattg

SEQ ID NO: 215139 - DNA, 402 bp, Glycine max
  unsure (1)..(402): unsure at all n locations
agcttcagaaaaatatttgttgagtgatttttgcgacttcctcaaataattcaattatcaacaatttgtcttttttgctacttgttaggagagaggaacaaaagtacaatatttttgcagctttttgcgccactacttgtatggctgattttgttgttgataacatactacatgtctatgtgtttgtcattgttaaatcatatattttatacatgacgagacatgagttttgtctctgatagtgttttatttttttacattattttggcaaaaaaatgttagttagaaatagagaataagaagtgggtgtgaacatcttttactttgtttgaaaatattatatgtaatatatgacttttgtgatgataggtaacacatttatcacaagtgacttgtnttgac

SEQ ID NO: 215140 - DNA, 392 bp, Glycine max
agcttgttgtatgagctgatgatgaatcctctttggcataactttgaggtcttctatgctctgcatagctcctgaccatctggaatcaatcatgcaataacaactacaattagtaactacttttttagtgacaatttagaaaaaaaaatcagcaaaatgcaatttgcattgtctattaagtgtagtatccacctaatatgtaagtctaccaatagttgcctagggtgtggttgtactgggatggatagtaaatgtacaagaccacgtgatggctttccctcatctagcagaatgacataggggtgcgaaaccttgtaaaaccaaggcaaatagttagaggtgcaagtccaaggatcctcaagtggcacaacattgccctaaggaattatata

SEQ ID NO: 215141 - DNA, 394 bp, Glycine max
  unsure (1)..(394): unsure at all n locations
agcttaaatccacttactcgtgctaagcgcgagggtggcgctaagcacgatgtcgtggatttagagcctatttaaagctgttttgtgtagaattagggttcataatttcactgatagcttttgcaaagaatttcatagcacaccatagtgcctattttgggaaaagagctctggaagcagcaagaggagcaaattttgtagagagaccaaggttttgtaattagagagagattagtgagttgtagagtgattttgagatgctgagaaaaggaggagggatcccccttcttgtgtaaggagtagttattctctactcttaatctcattattattanggtttttctgtaatggctggctaaacacccttgttggggatttctaaagaacagctgat

SEQ ID NO: 215142 - DNA, 414 bp, Glycine max
agcttctccaattctattggaatctcaccactttagatcatttccaataaaacatatcactttagcatttgttaaatttccaatagagggaagaatgacccagtgagtttgtttgatgataaagataacatagtgagcttggacaaatttcctagagtggaaggaatggacccagagagttgattttcaaaaatatgaatggattgcaaatggggtaagttacctaatgaaggtggaattggtccagagagattgttggaaaatatatcgaatgtgagaagagaattgagatttcccacttcattaggaatagacccagatagaccattggcactaagattaagatattgtagtttggacaaattaccaatggtgttgggaatgctaccagagagtttattagtggacaagtca

SEQ ID NO: 215143 - DNA, 405 bp, Glycine max
  unsure (1)..(405): unsure at all n locations
agctngtaccaaacataggaatgtcacattctcatagcttgtttcaaacacaaccttaagggttaaaatcccacccctgtacatgattattgcttactgtcctattgccaattttgccactaccatcccaggtcctgcttgagagcagccatcagtaccttgagcaaaggctccggcagatcagtaaaaaaatcaatttctaaaagatgttgagaattaatggatggagaaccatttaatggccatggaaacttatgatggtgtcatgatgtgaacatatggaggaatgtagatctccagatgctcaagattgtaaatcgaaaaaatgtgatctttcactacaataagtgaggccacaaattttatagaggagacagatcagaaactcaaaattttgatcacaag

SEQ ID NO: 215144 - DNA, 405 bp, Glycine max
  unsure (1)..(405): unsure at all n locations
agcttgcacaagatgctttacagggaaccngtaatggggaatcttttgagttggnctcacaagcaaaacattgcactagggttggcttctgtgcggtttaccttcaccaagagtgtgagcagagagtgattcacagggatattaaggctgggaacatattgctagatggaaatttcaaccctacgttaggggattctggattggcaaagcttatggatcatgataagagccctgtttccactttaactgctggaacaatggggtaccttgcacctgagtatcttcagtatggaaaagccactgataagactgatgttctcagctatggggtggttgtgcttgaggtggcttgtgggacgaggccaattgaaagagaacggtctaagatgttgaatctgactgatt

SEQ ID NO: 215145 - DNA, 201 bp, Glycine max
agcttctagccaaatggacttaccttgaattatttcctttgatagcccctttgagcctatgttcccctttctttgttttgaagctcattacaagcttaagtgaaaaaccatgatatcaccttacccttaaggaattttggagttttggaattgttttgggaataagtgtgggggggggggggggtctctccctcctttttc

SEQ ID NO: 215146 - DNA, 387 bp, Glycine max
agcttaggttattcttcatagatgaataacgaaagtcattcttcaccagggacctactgtccccaatggacctttctctgccttctaagattatgtccttctcttcacaaacatgcatgtagtactgcacacctttgttgctgtttgcaagccatctcagcatcctttctccaatgaccaccagtgaccaccgtcacctctccccagcgaccaccatgtcggaaatcccgtcatccaaagctgccacacgcgcctccatgcatgcccttcttctggcctgtgacagctttccggtgccgctcactcaccagcaaacctttcccgggccttccttgcctttgatgaccatcactagccccttgtttggctcttttttcatggctacca

SEQ ID NO: 215147 - DNA, 399 bp, Glycine max
  unsure (1)..(399): unsure at all n locations
agcttggtgtcaaagactgtttttagagttttttattgnaaangaagctaagagctacgtggtataaaaggaaaataaagtgaataagctaaacagaatagttagggtaaaaaagtttcaaatctggtggtactagtttaaaattaaccttattaagtgaaattttgcatatgctactctcgttgcaataaaactcaattagtttttagtatcctttttgcttctgtttgagtttctatatggatgtcattttacatccaattttaaatcgcatttcatactcctcaccttaaaaaacaagtggcggacttgtaaaaacaaaatgatgtatttagagccattggttgacattaagttctagaaagctgagtctagctagaagataaaatttaaacagaa

SEQ ID NO: 215148 - DNA, 402 bp, Glycine max
agcttgacgaatcaactctctctaatgtattttaggtctttccatcctgacagaaaaggacttaactattaaaatcaagcaaagaggtaacaactaagtactaacaattgatttttcaatcctatatgacaaattgaatcaacaaagagtattataactacaataaaaaaggtactcatttgtctacatggtgacatatattgattaaaaggacatgaaaaaatttcaaaactgagtcttgataataaattatattcaaatttagtttagtatttacatgcaattctctaaattggacataatgtttccttagaccaatgcaacacatgatcatgatgcacaactatctttcttcaacataaacaaacctctttatcaaaagaggttttgggacataaccca

SEQ ID NO: 215149 - DNA, 401 bp, Glycine max
agcttggcgatcgtcttcattttaactcttgtctctcttcaacttaagtaactcagaacctaattcgaacagcacaagccaacaattctctaaccaataagctctgtgcttaaagtgcaaatcctctatgcatacaaccagaaaccaatcgaagttccttatcattcgcatttgtgtagaaaaagtcgttgggtgaatgtgcctctagttcagcaaacacaaacctaactagaagtaatttaacaattccagcaactaaacaaaacaagctttctattcagagaataaaaaaatgggaataagaagaggaaggtagaccattaatggcataattgcatactacgaagaaaagatttaaattatgcccaaaaaaagaaacttgagttgtaattgcaagtgtg

SEQ ID NO: 215150 - DNA, 350 bp, Glycine max
aaatataagatacactgcggtcatcccagccattagtatattgcagcttgtattcgggatcatgaaagatctaaaacttgtatgtgatattagatgatataaaccatatacatatacgtctgatattttttggtatataagttcaaaatataaacatatctgaagaaatggattcttctagctatagatatgaaggtccatgacatatttacatcactgcttgattaacatatatgtgacaattgaaaagaatttccggtttgaactttcaccccccacttattcaaagggggttaattaatttcaacaccaaggctataggcccaaatacctcattataatatcatatg

SEQ ID NO: 215151 - DNA, 406 bp, Glycine max
agctttcttttgaaaacaaatgtcataggtaggcataataataggatgggtcatggtgagtttgagtctccattccatccttgcaaagactgagagtcgggtttatttgtttaaaggtggggaaaagaatgaaacccaatctcatctccatccacatttatcaagttcaggaaagctcacaaaaaaatcatctcacatttttaaaaaaaattattttttatataatataataaatcacatgttattagttatttttaattcaaaaagatttttgtaaaatttaataaagaatcaatactgtaaaaaaaaattaaaaattaaatcatatttttatttcaatgtataatttgtaactttgttatttaattagtatgggaattataatattatttatatacctattaaa

SEQ ID NO: 215152 - DNA, 398 bp, Glycine max
agcttttgagaaacaggcctcagattagcataactggagtaggagggcaagctctccccttcctctatgaccactggttcttcaagaaggtgttgagggcgtcaacatcaaatttaattaggtgccctcgcaccctcacctgcttaggtgatttttcttcaaggtcatagaggttagcataaaattctttaacaatagcaacaacaatgcttccctctgcgaagttagtgagctccttatgacaattccttctctcaatttctctcctgaattcatcaaattctgtgatatattgcttcacattcctttccagaatgatcttccggctaaggacattgtctgcatagcggtcccaggcatcttgggatacaaatcttgagctatcatacctagcctac

SEQ ID NO: 215153 - DNA, 398 bp, Glycine max
  unsure (1)..(398): unsure at all n locations
agcttgagaagtaccaattagaatagcaattgctttgngaacgagttagagagcttgtagagcataatgtatcacttcaagggaagtctcttcttttagtaagagggaaatagaaagcaaaagtgtgatggcatttattgaccaacaactcaagggattgaccgataagacagagacaatgaaaaatgagattattgatttccagcaaaatctcttggaactacaagagaaataaaagatagcagaagcaaatagggactatatccttagaaatattgaagagaaggagaaggaatgcaaggagttacacaagtccctaaccagattattaagaacttgcagtactacaaacttataaatatagagaaatatattaaataataaattgacataatcat

SEQ ID NO: 215154 - DNA, 413 bp, Glycine max
agcttgagtattggctgctgcgccgagtgcattactacgagttgtgttaaggttgggagcaagactgcgaggtcactaaccatagaacttaaacccgctttttgtccaaacaatatataaactcagtattagggacattagacctcactcattcaaacaagcggcttatatcacctccgtgtgttatatatacagcatttttggaaacgcattatattctacgctatatattgaaaatttaggcattgttccaatagaattcaattcattaaaatacacccagtataatttttttttacatcatataatcataaaatgcagaataaaatgcagtgtttgattaactttcacatgcagaactgcagaaaccaaaatcaaaagctaaaacaatataataaatgaatttcaattgc

SEQ ID NO: 215155 - DNA, 250 bp, Glycine max
tgattttatattagttatcttccaactgagtaccatctatcccggattccgacttggctaatccgtttaacatgacttgagatgatatatgcagccttcctcagtacaccactagtgaattccactatttatgtgtcatgatatttcgttggcccattttaataggccaggatcaagacactttataacccctggatcgccaggcctcggttgccccataaccacttcgtaggctctctctcgtatatct

SEQ ID NO: 215156 - DNA, 202 bp, Glycine max
tgttgtagaataaataggtatgtgctcgttgtgtactggctcaattgagcatgtctgctgcgtagagtcggtaaaagcgagagaaaaagaaaggtttgttccagtctttaagtggccttattctgtgcagaaggacaaaatcatgtgtgcctctgactgcattgaatatattaggtgaggatagactaatgtgggtcactga

SEQ ID NO: 215157 - DNA, 409 bp, Glycine max
  unsure (1)..(409): unsure at all n locations
agcttgctcgtcttgctgatatttatcatgcttacttttctgatgatgaccgaggaacaattagggatcaacttgaaacttatgtgcttcaagtagaagaaatgcttctttttccacttgtgaagatgttcaaagtttggctatgaagatggttcaaactgagaaacatttggtatttccattggtttataaacttattgagctagctttgatattgccggtgtcgacagcatccgttgaaagagctttttcagcaatgaagattatcaagtctaaattgcgcaataagatcaacgatgtgtggttcaatgacttgatggtatgttacaccgagcggaagatattcaagtcacttgatgatattgatattattcgaacatttaccgcanagaagtctcggaaaggacac

SEQ ID NO: 215158 - DNA, 412 bp, Glycine max
  unsure (1)..(412): unsure at all n locations
agcttgnggatctccaacataatgcattgtatataaacatatgtgcatgttactctatttctgctcattcttgacttcaagagatattgagaaaattgtaattggtaaatttgaagatttgaactagctagtgcgtgcaccttaggggaaaattcttctgtaaggtatacagcactagaattcagctctgagatagtaaatggaggctccacttctgtatgcaaatacttgagtccgcgtgcaatgcctatggcaatcttcatacgccgtgtccaagagaattggcatccttcttcatctgcagtcataattgcatgctgaaggaactgaaacacttaaaatttaaaatatacacatgagctgagagacttgacttacaacaatgtatgtgatcatgaagtgtcccatttga

SEQ ID NO: 215159 - DNA, 409 bp, Glycine max
agcttgtgttgtaattgcaaaagaaagtaattatctccaattttgcttgggaataagcgcccaaatccacaattcgcagatgctcctctcgaatgcaccactaggcgtcttcctttaacaaccagggaaacagaaagggctatccatgatatggcattattgttataccaagcccagcagctccattatgatagtgcaaccatgatcatgagattcaaagcaaaaattcaagctcttgaggaacagatgaattctgttagtgaaaagagttcaaaatatggacaaatagctgctgaagaagtcccaaaaagcctctattgtctaggtgtccggttgactacagaatggttcaaaaacttcaattttgcaaagaaatttaaggacaaaaggcacgtggtgatgaagctta

SEQ ID NO: 215160 - DNA, 231 bp, Glycine max
gcacaccgccagaaacaggtaccacgatagccagaccaaacgtatttttatatgcaaactacagcaaatggtactaagggggaaaaaactaaaagatattgactgccgataacaccttgtcctataaaagtcaaatgtgactgtttatcttgaacatcacaaacgcagcattgacataatcacataatatcggaaaaaagtggcctgtaaatcataaaatccaagactaac

SEQ ID NO: 215161 - DNA, 403 bp, Glycine max
  unsure (1)..(403): unsure at all n locations
agcttgcaatgggagnnctttataatatctttactcttcttcaacctcagttcaatatagtcatatattgatgaattgttcctcttggggcgttacttaatttagtaatcatcttattcaaatacaccatactataatgattaaaaaaagcaatcatacaataaaacaagaaataatgttgctatattctgtctagctaattagatcatactaagtgaagttcattttcaagttcttcaactttaatattgatagcattcacaataacgagattaggccagggttttaattacaaaagaaaaggctacgtgatgttttggaagtccattcgttcaaaataactctgatcttgttagtggtggagaaaattntaagtaaatgtggaagaatttttgagaaagca

SEQ ID NO: 215162 - DNA, 228 bp, Glycine max
tcgaatggcttcttactttaatgatctctaacacattctaattaatgaacgatgcccactgctgatcgcatgaacaaatgaattgtaatccttccaatcctatgaataacctctcatgctatcatgcctgaagaatatagtgccatcttattcatatgcccacatatataaaatcctcgaccacatcacagattggcataaactcatcatccatctatatgaaattct

SEQ ID NO: 215163 - DNA, 404 bp, Glycine max
agcttgaaaggtagtcatacctcacaaaatatatatgtatgtgtgtttaggtagcaagataccttggatatgcatgtatatagcaaaatacctcacaaaaatatacatgtttaggtagcaaaatacctaaaaaaaaacaaaaacaaacaagaaaaaaaatatatctttcggctgaaaagccaacacatttttgaaaagaaataacttctagcttttctttaaaaaaagattcaccgatcaaaacaaagggtttttttttgaaaaaaatgtgtatacacctgaagggtgaatgctgtgaaaattttcccgaacacccaaaatggactcgaatgaatgcatgaattgataaaagaacatgttttggaaacactgggttaacttaatcgggaaaattaatcttgagc

SEQ ID NO: 215164 - DNA, 404 bp, Glycine max
  unsure (1)..(404): unsure at all n locations
nngctcgtaaggcaatagggactctgcggatttttttatttctncnncaccgagttccaaactgactcacagattcacattgtacaacaaacacattacttctttgcccttctactggatcattgccctctactgcctcttattattctctatcattcgagaagccttaattattaatgtccttatgtactttaatcttcacgtcgacgtgttctcttttggcattgtcttatgggagattcttactggtgatgagccatatgctaatatgcactatggcgcattcattggcggccgtttattcacttctctctgaaacctttattcacgcccatggactcttatagtaatcatttacttttacgaggcactaatttgcatcaatatcacttccatttgcatcc

SEQ ID NO: 215165 - DNA, 410 bp, Glycine max
  unsure (1)..(410): unsure at all n locations
agcttggagcgctatccgcagactcagcagatgtcagttgggaaagaaatcagactatgtgcacgaatcttatacccagtgggttatgataggaccaagagctttggcctaccctaccgcttacctagatacctatcgtccaccatcccaccatcatccttgcctatccccttcgacaccaaggaagagtttcatgaacaattaaccaaagaaaggcaagaaaaagaaacttggaagaggagatgccaggaactcgagcaagagaatgagactttgaaagggaagatagcccaacagagccgtgagctttttatccagaaccagaggatgattgagaaggacgacttgcttcgtctgaaagacgctntgctccaccaagatgctagaaggaagaggaggtttatggactt

SEQ ID NO: 215166 - DNA, 372 bp, Glycine max
aacaaagaacgtcgccgctacctactatcatgttagactgtgaccaacagctgctagttggaatgtgagctacaatcttttcaactaccttattcacaacattctaatattgtgggttgacattgtgaccataatctcaactcatatgtatcattaagccatcgctcacattttttctttgaaatgcgatcaatgcatcttgttatggttggactcaaatgacgagagttttttaagttttgatcaaatacatgcttgcatagagtgaacgctacatcaaatttgctatcatcaaaagttgtattgatgacatgatactcattataattatatgttaaaatatacctacccacttcttgaacatcttttttg

SEQ ID NO: 215167 - DNA, 311 bp, Glycine max
ttctacacattgagtcagtgctcgcgagaactctctgaatcgctatgcaaggtactggatcatgctcataaccatgattgttttccacgccaattaaagaactcgttatgcctttaaaggacaaattactataactttattcaaagaccgcttgttactagaaatgatcccgactatcctgaatctttaaggctttgcatgaactacttgataaccctcattctcctccagttcaccactcatgtatatgatatgcgaccaccgtgtggtgacaatcaatcttgcattgacgtgctactgaataccctgac

SEQ ID NO: 215168 - DNA, 393 bp, Glycine max
agctttatttaaaacatatagacgctaggtttaacacaaaaacttactgtcaacaggttcccataatcagtatggtttgggttccctgagtcaagacatcttccattgattttagaagctcatggagtagtttaagatgtccccacttaggttgatttttgttaactaacattaaaaaaatattatattatcaaattaaaaaataatagttaaataaaaagataataccatttttcataattacaaaaagtatagtatgccttaccatattcatctaaaggagcatcatagtcatatgaagtggtaatatatggtcctcctgaagttcgtccgaaattggtacctctgtggtactgtcatgaaaaaaaaatagaattacaactttagtaatga

SEQ ID NO: 215169 - DNA, 410 bp, Glycine max
  unsure (1)..(410): unsure at all n locations
agctngatgaaagataaacacagntcagtcttttgagtggatggatntcccattttctgataatcttcttgtctgtcttaattcttctggcctattgttctctactctgcaatgtctggtgaatatgtgacacatttaaatgttttacaggcttgtggccttaaccctcattttaatttgcaagggttagaaaagttatattcacatgataatatatatgctaaacaagagtgtagcataaatgataacatgtctgatcagcagagtgattcttttaggggatcattcaagaggttagttgttgcttcacactcctccctgttagctgtggttgatgaatgtggtgtgatctatgtgatctctttgggggaatacatacctgacaaaatttactcatctgagaagttact

SEQ ID NO: 215170 - DNA, 448 bp, Glycine max
aatctcaacataagtgctctacgatctcttatcacatgttatattcataccaaatagaatgacccacagtttagcttccagaatagttcaatgcccaagtcttcttgaaaatgtttccagaaatcacctttatcatttcagagcacagaatcacatgcggcaagagctttcacaaataattttcatagtaccatgcagaggcttcttccacattccataagcattgtggttgtcattgtcatcatttggtgtcaatatcatatggctgagcttgcttctacttatatcacgtacaccactccaaacactcagcaccatacctagagtgtttgtccacttattactgaagatgaattcatttcttctcgaccatatacgatcaacaataggtccaaatatagtgctccacttcacctttccctttgttctcatgttgcaacattcatga

SEQ ID NO: 215171 - DNA, 416 bp, Glycine max
  unsure (1)..(416): unsure at all n locations
agctnggaaggatgcttcaatgggggaaaaagtaagagggagagaaagagagagggggggagcacganattgaaggaataaaagagggagagaagtgaactttgagttgtgtctcacaagactctcattcatcaaagttacaacaagtgttacacatgcttctatttatagactaggtagcttccttgagaagtttcttgagaaaacttccttgagaagcttctttgagaaaacttccttgagaagctagatcttagctacacacacccctctcataactaagctcacctccttgagaagcttccttaagaagattcctaaagaagttagagcttagctacacacacctctctaatagctaagctcacccccatgacaaaaaaacatgaaaatacaaaaataagtctttactacaa

SEQ ID NO: 215172 - DNA, 273 bp, Glycine max
cgaagcgcttccgtaacgtgtccgtgagagatttcgcgaaagttttcgaccggtcttcgacggtcttcattcgatcttcatcgatctttggtcctcaacgggtaaggacctgggaccaagcttttcgattcattctatgtacccgtgaggggccacagcgcgtatcgggaattatccttctcgatttcatgtaactttccgacccccttcgacgtgcttaagccatgtgatgtaagtcatcgctcgcataacctaaaaaaaaaaaatttccac

SEQ ID NO: 215173 - DNA, 382 bp, Glycine max
  unsure (1)..(382): unsure at all n locations
aaactaattttatatgttggtgattaacttaattaacattttttagataaataattttatattctatatatagaaaagatgtagaaaaaaataaaatccaattttttataaatacctaaaactaaattaagaaattaaaataaataattaaaaaattaattataaatgtaagattttaatgtactataataaatttaatataacaataatactaatatgaatatttatttataattttntatagtcaccttattagacctaaaggcttttttaatgtcttatgatttgatttgtttaactaaataattttattaaaaaatttaatctgaccttttttttttttaagatttgatctggcataaacgtaatataaactagttct

SEQ ID NO: 215174 - DNA, 334 bp, Glycine max
  unsure (1)..(334): unsure at all n locations
tcccgcgcacattcagaatgtacatcccatatactatcagcaaactctacaaaacctggtcattttaatgactcatatcaaaataagcaaaatcagcatctggttcaacccttcttatatatctggacatttgaaaacagatattntagcatagaacacatcatcacaaaaatggacatgcgactattgcctacaactgtatttctttacctctcctgaagaaattatctttcctaatgctttctttcgttgacgaatgagaacaaagatatgacgtccaaatcaatacagagttatacttactctaatccttgcgctctggcatttaaaaaac

SEQ ID NO: 215175 - DNA, 405 bp, Glycine max
  unsure (1)..(405): unsure at all n locations
gctttaaccgatcgtttaagccgttttctcacctaataaatgataaaatgaatttcaaccgatcatttgcgttgtaatctcatttaatcactgtaaaacaaaatctaaccgatcgttcacgctgtaacctcagttaaacaaaaaaaaagcaaaataataataaaataatccaaatatcttgaaaaaaaataataaaataatcaaaatatctttgaataaaataatcaaaaaaatcaatcggacatttttctttggaagtttccttggatcaattaactaataaccaaagtgaaactaaggctaaaatcaatttacaaatcaagttttgtccgtaaaaatcactaaaaaccattttaaggtccaacgccttaaacgggcctctttgcttttatcggntaacatgga

SEQ ID NO: 215176 - DNA, 412 bp, Glycine max
tgccctgtgactggatatcttcatacccatagtggttccatgcagacagtcctactgggtccagctctgcacttgtttctcgttgattacttgaatatttcccagaactcacttgattgtgggcatattgcaattcatcatctagttcaaaacctttctgcttttctgcctcttcaagacttatcaaccgtgcaaccatcatttttcttccaccaacaagtgacaatccattgtgtcgacaccgtctttccagctcagcaagaggaagactcattagctccttcattgcagcccctcgacccattgccaatgcagcatcttggttggtcttgccaccaacaaccatatcttcggaagcggtcttctgctcaatctctggcgcatcaccacatatggaattgaatggaattac

SEQ ID NO: 215177 - DNA, 413 bp, Glycine max
  unsure (1)..(413): unsure at all n locations
agcttcctctgccgtaaaaaagatattatctgtcagtgtttgtataaaaattgcgcaatgtcggctgaaaaatatccgtcggggctatttaactaccatgtcggctattgttttttctattccacccctgaattatatttggatgatgcctattangaaatgttcggtcggggtcatccggtcatgcttctttttgaggcctcgatctgtcgtctttcctagccggccgacgtcggctagcatttttttcgatcaatatctgtgtgaatcatgattttttttgccaaggagggctaatgttttcgtggccgacaaaatgagaacatgccagtgtctgccgaaacacaatcccgcacgaaaaaccctagccgacctacattgtaattttttcaggcaataccgagcgacaaaac

SEQ ID NO: 215178 - DNA, 417 bp, Glycine max
gatcttaatcacctgagctgcagcttgtatttcagagtttgattaatatttcagcaactaagggaactatctctggaaaagttgcctaacttgaaatccatcttattgatgaaggagccctccattctttggaaatactccgaatttgggcattatctgaactcaagaccatacttcgtggcattcaacacttgaaaaaacttatagttctcgctgtacatgatatgtcaactgaattcaacaagtgaattgcttctgatggaggattcaaaacttaggctcgtgatggtacatacaaaactgttcgacactagggcattagaattttaaaaaaggtatgcattttcttcctaatatctttagaagtcggattccaattacatatgtatttatgagtctcctttatttcttaataaa

SEQ ID NO: 215179 - DNA, 226 bp, Glycine max
aaaacattctgcttttataacggaccatacaacataaaaaggacccgacaatgatactaatggcatgcccacacaaggaaaaaggtcacgttcaatgatctatgaacataaacacgtccatcacttctactgaaaggatacatagaaaaaaaatcagccaatgcgctaccattattactaaacataattcatacagtgaacaagcacaacaccagcaaaacttcag

SEQ ID NO: 215180 - DNA, 401 bp, Glycine max
agcttaaacattcaactgtgagcgtctcgatatattacgggactcaatcagacatccgagtaaaaagttattgccgtttgaattgctcagaggttcaaaattcaatttcgagcgtctcgttattttacgggactcaatcagacatccgagtaaaaagttattgtcgtttgaattggctcagaggttcaacattcaattttgagcgtctcgatatactatgggactcaatcagacatccgagtaaaaagttattgtcgtttgaattggctcataggttcaacattcaatttcgagcgtctcgatatattacgggactcaatcagacatccgagtaaaaagttattgtcgtttgacttggctcaaagcttcaacattcaatttctagcgcctcgatatattac

SEQ ID NO: 215181 - DNA, 407 bp, Glycine max
  unsure (1)..(407): unsure at all n locations
gacaataactttttactcgcatgtctggnngatgtcccgaatatatcaagacgcactcaattgaatgttgaagctgagagcaaattcaaacgacaataactttttactcggatgtctgattgagtcccgtaatatatcgagacgctcgaaattgaatgttgaacgtcagagcaaattcaaacgacaataactgtttactcggatgtctgattgagttccgtcatatatcgagacgctcgaaattgaatgttgaagctctgagccaattcatacgacaataacgttttactcggatgtctgattgagtcccgtaatatatcgagacgctcgaaattgaatgtttaacatctgagccaattcaaacgacaataactctntactcggatgtctgatagaagcccgtaata

SEQ ID NO: 215182 - DNA, 402 bp, Glycine max
  unsure (1)..(402): unsure at all n locations
agctntgcctcaaaaaatagtgatttaaagttatgcaaggctctgttaatcgattaccaggaagtgtaatcgattactagaaggaagaatgaaaaggagctgttgaaaagggttttgaatttgaattttgaacatgtaatctattaccatatgtttgtaatcgattatcagcaacggaactttggaaattcaaattcaaaagtcataacccttctaattataactgtgtaatcaattacacaaacattgtaatcgattaccagtggagaacttagaaaatctgccaacaatcacatcttttcattggatttgtgaatggccatcaaagacctataaataggtgacttgggcacgaattttatgagagagttttgcttggcaaaaatgtcttatcctctcaaa

SEQ ID NO: 215183 - DNA, 404 bp, Glycine max
agcttttgcaataactaaatagaaataacatttaaaatgaatgctattaaactcttagttttaaatttttatattttaatttaagattaaactctcaattaattctcttacacacaataaacaaaattaaatgaaataaaattttgaaaatagatacaagaaaattctatttttatattgtattttttaatcattttttttggattaattcgttgacatttttattacagactcacaaactcaaattaactgtaaaaataaaaaagcaattcagtgcggatctaaaatatttatacaaaaagatgaaagtgaaaagaaaccaacaagcccaataaacttggagcagtagctttgcttcggaaaaaccaaataagggaattactactcccttcttctttcccttt

SEQ ID NO: 215184 - DNA, 248 bp, Glycine max
caaataacatttctattgagatcaagttatctgagatggctccttacgttatagaactagtgtgcgtgatctatcatgcgtgtgaccacgaccttctgctagagtacggactcttactatcatgatctaaaaattcgtgaaaccgactggagtggtgaatcacctaattgctggcaccactttcagaatacccatatccatgtagaaatgagttttgggattcactgaaagcattataaattgaattt

SEQ ID NO: 215185 - DNA, 395 bp, Glycine max
  unsure (1)..(395): unsure at all n locations
agcttgggattgcatttgggcgtctatttctactttcctatgctgnctctacatacataaaacagccccaccatcccaatttgcaaaatcatattcatatatcattggggcatttcaccaagcacttgataagcgtatgtttggacataaattgcaagagatggaggcaatgtggcatgccccattgcttcaaaatacaacataggcctaaggccttctcattcaaatcctcaactccacaaaacaagcatggatttcaggtgcaaattgcttcacgaattttgcaaaaaatgagcaactaaagcaccaaaacacatcaatggagagccaaataaccaagggaaattgcacttacttgtggggagtgaattaaagcgtgaaagggaagcaaaact

SEQ ID NO: 215186 - DNA, 343 bp, Glycine max
  unsure (1)..(343): unsure at all n locations
ccctagaggatggggccttctctgacctcttttgctttgtctctcgctgcatctccatggtggaaaatcaccattaatagacctcattggagctcatatatccagcctccatagaatccccacaagcaatcttccatcattaatggcttggcccctcttaatcatggtttttgtggtggggcattgacaagtaatatgtcattttcccagacattttaagcactttatagagcttactctttcttgcatactattcttangggcttgcttttctttggcttcccctgattatctttggctagaatgtggccccctaacatgccttgcggtggtcttcttggat

SEQ ID NO: 215187 - DNA, 395 bp, Glycine max
agcttgtccatcacaagttgacgaattaaggtttgaatctctgctggtaaaggtgtccacatttaccatttaccatcaagtgcatgtttggattaaagaatgcaaaaacaagccaagtcttgcttttataaaactgacaaaattttcatgtgcaaactacttgtaggggtaaccaaattgtccaaatatgccaccaagatgagtttactctttttttttttatcaataaataatagtaattagtatgttatgttagtgggaggattggaactcataacctccttatcactccaactcttatgatgcccctccaaccgtcaagccaccttataactcccgggatgagtttattcttcaaacagagtttggacctctcaaaacaaaaatataaacat

SEQ ID NO: 215188 - DNA, 428 bp, Glycine max
  unsure (1)..(428): unsure at all n locations
agacatcccggatgatgcgagggaactttatgcttattttntgtggaataaatatttaatatagaatgatatctactttataggggaaggctataattgtaatgcgcttaaatagatttggaaataaccatgttgtctatattataacaagtataaccattgcgccaaacaaattctatatattatgcttcttttagaggtgtattctaaaagatttccttgttcttttttatattagcttctgcaaaatagttatatcatctaatctaatntgctgtacccgtgaaagattttctaattcttataattctttacaatctgtatttccttaaaatactttttacggcctctgaatcttagccctttaacattgngctggttgatatagtgaaagtttggaagtggaaccaaccattcgtagtgtactg

SEQ ID NO: 215189 - DNA, 397 bp, Glycine max
  unsure (1)..(397): unsure at all n locations
agctntactatgctttgaataaccaaggaaaattccttcgtctgacttagcatcaaactttcctaagttttcttttccatgtttgatacaaagcatttgcaaccaaaaacatgaagctgtgaaatgttgggttttctaccattaaacagttcatatggagttttctttaaaatgggtcttattaaagccatattcatgatatagcatgcaatattaatggcttcagcccaaaaatattttggaagaggagtgtcatttaataaggttctagaaatttcttccaaagatctatttttcctttcaacaactccattttgttgaggggttctagatgcagaaaagttatgttcaatgtcatacttatcacanaataattcanattctttattttcaaatt

SEQ ID NO: 215190 - DNA, 461 bp, Glycine max
tatccaatgaatgaatggtctttcgtgtttgtgcccttatatatagtaatatattaatattcttcatcagataactcataacgaaacagtattacattttattttgaacactataataagctaactataactatattttagtataaaaaaacataggaacacgcatgaaccatagaaaatgaagaaatcggcactgacccgtttgcaacccagtacctgttgttcagaaaaggaagaaattccctgcaaccaacattacgaaacatcagccgtaaaagaagttccctcacacttggttattttcaacgccattcttaaagtttaccatttatttaataatttgacggcaattgttcgaaagtgtgaactacgcaactgttaaaagtgtgaacttcatattaatgtcaaatgagcgtatacaataagcacgaacgtgactggggttgttcgaagctcctaat

SEQ ID NO: 215191 - DNA, 412 bp, Glycine max
ctgcagcttatcaaacaagaaattaagattttaagatggatgatcaagacagtctctagagtcttaggaagggtatattaaataggaagggattcctaattgaagtagcaaaaggtttggccaagaaatttaagttaaaaagtctttttcaagagatttactctctggtaatcgattaccaagaggatgtaatcgattaccagtggccaaaaatgattttcaacagctattaaaatttgaattcaaaatttgcactgtgtaatcgattacacatatatggtaatcgattaccagcagttattgaacgttttaattcaaattttaaagcttgtaatcgattacacatatactgtaatcgattaccagaggagatttttcagaaaatattctcaacagtcacatcttttcattt

SEQ ID NO: 215192 - DNA, 423 bp, Glycine max
agcttatagcatctcacaatttggtggcaagtgtttaagatgtatattcactactcgataagtgaattttgagataaaaggacattgggagtttgttgaacatattctatgcatgcgagatcacagagggatcaagtatagaagaaagttctttttgtgtcagaaggaatacattgattaagtgttgaattgttttgggatgaaattcgcaaaaaaaaaagtatgtactcctctgacaatgtccattcttctatctaaactcaatactactcagttagaattagagaaggaatacatgtctcatgttcctattcaagtgttgtagatagtctcattatgctatggcatgcaccagactggacctagcacaagaagtaagtgttatgagtaggtatatgggtaatcttgggaaagaacattggc

SEQ ID NO: 215193 - DNA, 403 bp, Glycine max
agcttgaatcggacatccgtgtgaaaagttatgatcatttgaatttctcaagagcttccgctgttcaatttcgagcctctcgacatattatgcgccgaatcggacatccgtgtgaaaagtcatgatcatttgaatttctcgagagtttccgatgtttaatttcgagcgtatcgatatattataaccctgaatcggacctcagtgtgacaagttatgaccatttgaatttgacgagagcttccgttgttcaatttcgaatatcactatatgtgatgcgcctaaattggacattcgagttaaatgttatgaccatttggatttctcaagagattctgttgttcaaattcgagcctctcggcatcttatgggatcgaatcggacattcgtgtgaaaagtatgacca

SEQ ID NO: 215194 - DNA, 118 bp, Glycine max
  unsure (1)..(118): unsure at all n locations
agcgcacagtcatacatgggacacagaggcttgaggattgttcntcctttatagagagacactgaaaagatcatacggtagctcttcataaactgcaatggtcagaactttgcgcaca

SEQ ID NO: 215195 - DNA, 415 bp, Glycine max
agcttttggttttaaataaaagggtttcctctttttctattattttattcaagctctgccacatgtccctatttgattggagcaaaaggacccatttttttctttttgactgtgacccatacgcggtcacaaaagtgagaaaaatctgacctttgaaacgctaaaatcctgcctcggtttgcgtgccgtttctctgattccagtttctcgcgtttctctgcgtccgtcggggccagttttcgaaagcaagcaatatatatatcaaaacgctcagaataaaaccccgagcgtggtttagaggttggtttcgttaaattttaagtcgcacgcaaaacgatgatttttaactaattaattaggaattaacccataacctcccagttatggatttctctcccttaattagtctaacccg

SEQ ID NO: 215196 - DNA, 399 bp, Glycine max
  unsure (1)..(399): unsure at all n locations
agctgtcataagttaagtcangtgcagccatctccctaagagtcgnctcacgaggtggagattgagccatgttctcagtataaaattatcagtcgaatgctcaaaatcagaatgttcagaatcaccaacaacttaatgcttagaatactcagaatgctcaaaatgctcaaaatgcactaaatgagcaggatgcacactatgcctaactaatctatgaaaggttctatctatttcaggatcaaagggttgtaaatcacctggattgcccctagtcatgcactatatgcagcaaatcatgtatttctcaaacaagcatcaacgggggtaaaactacaactatactctaacgatatccaaatgagctgaaaacttgtgagcaacaccctaaaatcatgaaaa

SEQ ID NO: 215197 - DNA, 349 bp, Glycine max
acgtcacaaagaacaatcatgaggtatgatcctatctaaactacccatcatatctcccataacccaattcccacgataatttttgtaagaagaagtctacccatacctgatatgtgaagtcttaaaatggagaggtgcgccttacgactccgaaaatggctttctttcgcgatttggagcagatatggtgtgcaaaagttggagctctgttggatcatccatggtgaggaagaagaaaggaaaaagcacgtgatgaagagagggagataagcttctgaaatttttgggctgagtgatgagagagacatggcttgtgtttaaaagctctcttttattatttttttttaaa

SEQ ID NO: 215198 - DNA, 399 bp, Glycine max
  unsure (1)..(399): unsure at all n locations
agcttcaacctttggccaccatttctgcccttaatcgcgaaaggagagcattttcggagccgtgaagtgcgtggctacgagtggacttcgaaaatccaggtttgggtggacttctttctcccttaaatttcgtgggtatggggttntgggagatatgatgggtggttttgttagttttctgctgtgtgatgattatttgtgaaggcatttgctgaaaacttgttgaaatcgccatgtttggatgagttagacatacccattctgttttagggtttttgtgatgatgtttgtgatgtttatatgctgaaattgctgatggaaatctgttagagacgaagggtagaactaacccaaggttagaaagtgagaatgtgatgttatgagtggaaaaagagtgag

SEQ ID NO: 215199 - DNA, 401 bp, Glycine max
agcttgtcaatgtgatcgacttattaaatttttgaatattttaggagttggttatactggtgtgaatgtgtctctctcggtcttatctttgtctctctctcacaacagcaagctccgacttgtgtccaacaactatgggatctggccacccaaccaggttggattttatcctgctttaatttaccattgaagtaaattacctcataatcttatctcgcaacctaccatttttcgtttttatttaatcatattgtgcttactgcattgtttttatttgaaccatgctgtgcttatgtaaaaattgttctaagtttatattatcaatttgtaacttattttttaaaaaatgacaccaaacacaagtttatatatacaatgttattaatttgttatacataatt

SEQ ID NO: 215200 - DNA, 431 bp, Glycine max
  unsure (1)..(431): unsure at all n locations
cataatctatgncngataagcacacaaagtcattaacctgcaaatgagtatgaatatcatcatatatcaattatggaagaatatggtgggcacggcatctgtctttctggtgtgtgacctttctagaatatgaatgtttgaacattctaacccaatagtaacattgactgctttctgaaacccaatttgtgtaactcattgtatgtgtagtactgctggacagacttatgtaacaagaatgatttgactgattaagcatgacgaaagtatcatgttatagatggtatccaagaatagggtctttcaatgcacaatgtctgcatgatatgacaatcaaaattgctaagataacgtttaggatggtttcccagaccagacccttgataaattcaattgaaagtatactgcctccggataaagaatgccgttaa

SEQ ID NO: 215201 - DNA, 403 bp, Glycine max
  unsure (1)..(403): unsure at all n locations
agctaataataaaantcttatttaatcttctacacaatacaaaattacttttttttttttttaatttttagttccatatgctttggaattaaaagcaatttttgttcaaaaggatcaaatatttttgtacatatttgtacacaattaaattttttcttataagatatcacagatatcttctacaggaaaccgttctgtttgagcgagtaaactggaccatgcataaaactttctctttaaatatataatgcaattaattatatatttaagagttaaaatcaaaacaaataattaactaaactttaataacttcgtactaattagtccatgaactccatgaatgaacaattaaacttgggattcattgtgatcccaggttcattatagaaagaatagaagctga

SEQ ID NO: 215202 - DNA, 403 bp, Glycine max
agcttttaatgctctcaaaaccaggctagtatctgcccctgtgattacaacaccagattgggggcaagagtttgaattgatgtgtatgctagtgactatgccgtaggtgctgtacttgggcagagaaagggcagaggtttccatgccatctattatgccagcaaagtcttgaatgatgcacaaatcaattatgctactgatgtgccatcattttcttctatttcttaaaccctttttgcaccattttaattactgattagtcttaattgtcaaattaattaggcagttttattatttgggctcatttagctaatttgatgtttttaatctaatttcaggaattaataaaacattgggcttaatccggattttggttgtggacttgaagagggcaaataaagca

SEQ ID NO: 215203 - DNA, 240 bp, Glycine max
gaggcacctggagatatgttgccggggtcaggagaccttggggacgtcaggtggggtgctatagcccaaaaacaagcttgaccaattccgacccaacccgtgcatagtcggtcagtgagaacctgtgatgtacctaatcatgcgagctcctggcagtctacagattaaaggaacatataccacaaagctaggatgcttgtggtggctggccaactgtgaatttgtgtgatatgtggagta

SEQ ID NO: 215204 - DNA, 399 bp, Glycine max
agcttctatagaatgttcgttcctaatttctctaaaattgcatcacctctcaatgagctggtgaagaagaatgtggcattacttggggtgaaaaacaagagcaagccttttctttgctcaaagaaaagcttactaaggcacctgttttagctcttcctgacttttctaaaacttttgagctagaatgtgatgcctctggagtaggagttggagttgtattgttacaaggtgggcaccctattgcttattttagtgaaaaatttcatagtgccaccctcaactaccccacctatgataaagagctttatgccttaataagagccctccaaacttgggaacattaccttgtttccaaggaatttgtcattcatagtgatcatcaatcacttaagtacatta

SEQ ID NO: 215205 - DNA, 396 bp, Glycine max
agcttgatgactttggtggagacacatgactaagcaaatgtgaacctccagtgttcaactcagatgattggacatttctacatactcaaaccgagacgttggagatggcccagcaggcatattgtttgttgaagatgaaactggagcagggggttcctcaggcttctgctcatagagagactcacttggctgcatttcattaggataattagtcatcaaatgaaaatagtgaacaagataatgaaaaaccaacaaccaacaggcgcttctagcatgcatctgcaaacaaagataactatttgcatacctttttagtgagtttacgagcgccgagccccccactcttcactgctttcttagcaccaataggtttcttaacggtacttgaaattactg

SEQ ID NO: 215206 - DNA, 391 bp, Glycine max
  unsure (1)..(391): unsure at all n locations
agcttgagagatttatgtaattntataaaatttccaggataattagtgtaatttattttatactttttgaacagcaaccatataagtacatttttttatttttaatcattatctaaacatggtatttttttttaaagatgaatgtgataattcgttaataatatatgtattatataagaaacattaaatatgcttgattaaacatttcaaattaattttaaattacacattaaatgtttttaagtttaataaatgtgcattaataatataaacattaaaaattgattaatttatataaagatttttacttaaatgaaacttttacatgtctttttaaagaggcatgtattgcttattcaatgagttttattccttccaacataaatctatc

SEQ ID NO: 215207 - DNA, 402 bp, Glycine max
  unsure (1)..(402): unsure at all n locations
aatgatctctttcataccttgttattacatattctgctggtgaacgaagctgaaacctagtgatgtggattttaaagctttgcttctggatcccctgctaatagagtataagttcgagacttatatttcatctgatatatcaccatcttactaattgagaatttctccaaaattgtgattttgggcttgcagaatggttaccagaactgtgtactcaccgtattgtatcataaatttgaaggcacaattggtgttagcagatatttatacatattgataactactacaactaatgttagagaattcttgttctcatgatctaatgtntacccatgatcatttaattgacacgtatgtagctcctgaatattttatgcacgtgatagtaagcgagaaaactga

SEQ ID NO: 215208 - DNA, 403 bp, Glycine max
  unsure (1)..(403): unsure at all n locations
gcttaacctcatcgtccctcacagtctttatatttgggatccaatccaatccttgtgtcggactctcagccacttatgatagccgccgatgatcccattactgcttccnctaagctctctgtcctttcttcacgccgcatcccatgccttgcgaactccttggagtaccctcgcgttgtggtcactaaaaccccgtgcgatgaaaggcgtgatgctttcgtctaatggcgctcctctcatggggtagccaagctgtcttatggcgagaacgggattataattaatacaaccccttgttcccatcaagggaacatttggacatccttcgcatgaaaataaaatcttgattcttccttccttctagcgagggaaccaattaacagacgcccccccatgctagcca

SEQ ID NO: 215209 - DNA, 218 bp, Glycine max
  unsure (1)..(218): unsure at all n locations
tcttgagttcaagaaagcactcattcattcaagcaaaggtcttgcatacaattgatcaagttgtgtcttgctttgactttgttcttggtcgtaattgttagtatatgcatgaatgtctgaagacatgctataataagttnttttaattgaggctaaagtatgtttctcttacgctcttattcacaaaggaccttacggttgggtatcttggtctcttt

SEQ ID NO: 215210 - DNA, 393 bp, Glycine max
gttcatgttaacaaacgcctattaagtattttaatctccaacatatgaacacggaagattccagccaaatgatataattgaacacagagaataccacttgtttttttggtctagaagaataccacctgtttaagagaacatgcatttacaagatattgcgggtttttcttcttcttatgatagcatagaagaatattattgtgaaaattctgaagataatttgtcttatcacatgaaagtttgaggacacaatttctgcccaaaacataagctcccattactatctacttcatcaacagactacatatatgggatatgattctaaaaacaaaacacttattaacagcccgttcagttaaatcaagcaatacttttcaagtgtgccaaccctta

SEQ ID NO: 215211 - DNA, 418 bp, Glycine max
ctctggaagataagagagaaggctattgtttttattctctgtcctttctctttgaagtctcctttctgtgcacaatgattttctttctccattacccagctatgtattatgtgcatatagttatagtaatgcacacttgaagtctgtaatgtgtgtagtggtgaaacttcttatgtaattgcattagtcttttatttgcttacttcaaagacttatatgatttgcatctcaccataattcaattatggccccatcacaaggaatatggatccatgaccaatatgaattgaattgaattaatatctggggagagtttcatgcattgatgggttcatccacaatagactaatgtcaacagtggttcagagaagacataagcgacttgaaatttacaatactgaatttactcaaattttat

SEQ ID NO: 215212 - DNA, 438 bp, Glycine max
  unsure (1)..(438): unsure at all n locations
agctttgaaacttttaatgcagatatagatataaatgtntttgtttggcaagtcatccactgaagtgaacacaagttttaataaggataggattgatcgttgagtgacttaataaaagagagagtccttaaaacaatttttcagataaatacttggtaataaggaagtgacaaagagttctaatagaacacttaataaattgttactagttcactcaacctgagctacgtccagttctcctttactcaatagtaaagggtccactaatcaaaacttgattacaaagaaagtattttgatctgccactcctagctttacaagtattcttaataccacttctggcacttccttagactccctctgaatataagaaacccaagtattgcttaacactaagccactcttggctttcacaaatagtagtttgaatgaatacaa

SEQ ID NO: 215213 - DNA, 349 bp, Glycine max
acgagaagttctgaactcatcacgttatctattataccttgaggtggatccaagtgctctgatcattcatttgcatattcatgtttcggtggcatactcaccgctgtttgtttctttagggaattcactataactaagaaagcgcataggcacccctataacactcgatccagaaaaatggataatgaagagggcgtgcaagaacagatgaaggccgacctatcatccttaaaagatcaaatggcttctatcacggaggccatgctaaaactccagaaaactatagaggataatgccacggtgaccgtctccaatgcaactagggaagcggaaccggtgctacagcctg

SEQ ID NO: 215214 - DNA, 399 bp, Glycine max
  unsure (1)..(399): unsure at all n locations
ttacctttgtcagtagttacgagagagttttntgattgtttgttctcggccaaaggaattatagtggattatttaagttttagtccttaaaatttttcagattctaatttttagtttctaaaaaaaataaaattacaatctttactcctccattaatttttggttgcagttgtagttcctataaaaaaaattacccatgtccttggttatttcattgttcataattagtcccaggtaaaaattaattaagtgactgagtggataaaataggacatattgagtgatgaaaataaacgagaaattaaaagtggataaacatatttaaagacaccagaaatgctattaaaagattaacgggatgttaaaagtcgtcactanaaaaaattgagactaaaatta

SEQ ID NO: 215215 - DNA, 418 bp, Glycine max
  unsure (1)..(418): unsure at all n locations
ttcactctnngtgngaatcatggtatcataatctttntctaacatacttaaactagaaggtagagacgattcttccatcaggtctntaaaataggtcaaaccatctacaaacaaagggataataaacatcagttagagagatcaagcattcctgatgcataaataataataacacaatgaaaatgaacctttatcaaaattctctagggtttcggtttcacattcagatgccaagcaaggctgcttcttcaatatatctgctattacattatnggctntctccatggttctcctcaactcatcttcagaagtgttgtatatgtngcaaagtgatgcaaggacgtcacaccttcgtactttcttaactgatganaatttgatcgacagcgatattgcctttagctgtngcattatatta

SEQ ID NO: 215216 - DNA, 254 bp, Glycine max
tgggagtgggaggccatattctcaattaaaattctggcttcagcaggagtcatgtctccaagggctccaccactggcagcatctatcatacttctctccatattactaaggccttcataaaagtattggagaagaagttgttctgaaatctgatggtgggggcaactggcacatagtttcttaaatctctcccagtactcatacaggctctctccactgagttggctaatacctgaaatatcctttctgatggc

SEQ ID NO: 215217 - DNA, 401 bp, Glycine max
  unsure (1)..(401): unsure at all n locations
tctacactactctagagtggtngaggacgttttattttattctaccctcttctagaaagctgtataattttctaaaacctctccaattaaagaaggatcccaacaaatctcccccttccgacttaatcgnggggtagtagcaaaccggcaccttgagaacaatctttacacttttttgtcggtagtactctggtcatcatgtctgaccagctctcgtctatgtgaatcttgtcaagatgtactttcttttcctcgaggacatctcggattcaatgataccttatgtcaatgtgctttgtgcggaaatgaaatgttgagctccttctcaagtacattgcactatgatattacacttcacacatactaacttgatctagtccagctcttgcacatgtcttcat

SEQ ID NO: 215218 - DNA, 399 bp, Glycine max
agcttgttgggggaggtttattgtttgagtttcaaatttttttaaaataacaaccaatttttaattttagtttaaaaatattttaaaaccaagttttaaaatatgattaatttcaaaataaactcattttgaaagtttcatattatattaaaattagtttaagagtgctttgcatgagggtgatgacaatggtgatgttggtagtgttagtagcgacaacggtagagatactagtgatggttgtgatgacagtggcgtggtgatgatagcgatgtcaatggtgtcaatggtgatggtggtggtggtgataacgacgttgatggtagttgtggcacaaatgttgttattattggtggcgatgacaggtggtattggtggtggtagccatgattggaatga

SEQ ID NO: 215219 - DNA, 318 bp, Glycine max
  unsure (1)..(318): unsure at all n locations
gggtgttttgataccattgtatttcttttataaaaaacaagtgaaatttttaattaataaaaaaatccattaattattctgttaatcacggattaaagactaaatacatgtattaaatgagtggtcaattnnttttaaacggtcaactcaagcaacttaacaaaaggatcaaaattatgaaaaactcaaacctgaggggtcaaaatcacaaaagtatttaaatctgaacgatcaaaattataatttaatataataactttggagcagtcattgtcctaatgcagtgttggagtattatcacaccaagaacatttaaaa

SEQ ID NO: 215220 - DNA, 374 bp, Glycine max
gctttgagacagcccatgctatgggtgttattatgtttgacttgccaaattgccctaagaaacgttgtcaactatagacatcctctgttaatggagaaggatcatctacccatactgttactgcatcttttgaaactgccctgaggtgggcagagaagtagttgttgcagtcaaaactgcatttataaggcttgcaaattgtccttcttttagtatcggtgaattcaaggaactactaagaaaaattagtaatctggacttgtctgagttctcttcagagtgtgagtctgagtctgggtcagagtttgattcactctctcaaaagagtgacttaaactgccaagacttggattccaaaatatcatttctggggg

SEQ ID NO: 215221 - DNA, 411 bp, Glycine max
  unsure (1)..(411): unsure at all n locations
tgccctgaatgtagctgcgagaatactcgttgtttcttgactgcacttgcagtggggatcttttgtatataatggaccacgacacttgcataagtgagttattaatgcacttgatattcttttacttgcatggcatttgaattgcttggtttcatttatttcctactggtattctgcaggtaaaactgccagtcangagggaagatcagcttgggctgctctttgggttattttaattggcttagttgtggctgctgcacgggcataccttgtgtacaaatatagaataagggtaagctttatcacattctcagtttggtgatgctatttgatatttagatgccttattntattcaattctaaaattatatagcattgtggcatgcaatgaaatgattaaatttcgtatca

SEQ ID NO: 215222 - DNA, 414 bp, Glycine max
agctcactaaaggacttttggggaattttttaataaacggggaatgaaggaatatggagagagttgaactctgaaggaagtctcaaaagtttttcattcaccaaagttatgacacgtgttacacatgtttttatttatagcctagcatatgggaaacttccttgagaagcaaggaaggtagcttccttgggaagctagaggaagaaagcttccttgagaagctagagaggggctatccacacccctccaatagctaagctcaccccatgccaaaatacataaaaatacaatgggaagcttctttgaaaagcaaggagtgtactttcttgggaaacaaggaagaaagctttcttgagagctagagggggctactccacccctccaatagctaagctcaccccctgcaaaaaatat

SEQ ID NO: 215223 - DNA, 322 bp, Glycine max
ccggactgattaagagaaagttgtagattttccgcgaatctcaacagtttctattacatgaactgagcacgggacgactaccaaaggcaaatggtcagcaatcaatgcagaggaaggcaaaaaattaaggacattcttctgaatgtacagagagtacttacaacacgcaagcccaaaaaaacaatgacaaacagaaccatatacaatcccaacacactgagctcgtaccatatcgcactgatacccgtattatggactgctcaggcgttcccatacccttaaatatactacatgtctgagattcccccccctccacgaatct

SEQ ID NO: 215224 - DNA, 351 bp, Glycine max
ctgcaagctcgagcaatatttgtttgtcggggaattattataccactcaaaatgtagggcatgatacgacattcaaaagtgaatgaaccagttaacaattgaccagtcttattagcattttcattacaaaccattttgcgaacatcatgatttgaataaatatgtttttagtcatcaaccaaagggccctcaaaaggtacaccttgactacttacatttttcaatgaataaaataaggaccaattaaccataataggagatttatgaacctaagaaaagatgagaccatcaccaatcttcaaattattataaaaaacaaggactaactcaggatagtatggcaatttgaga

SEQ ID NO: 215225 - DNA, 375 bp, Glycine max
gcaagctttaatctctacgaggcctgccattttctcggccttccttccatgggaggacaacttcaactcaagacgttcttgaaaataaaaatataaatcatttgaaaaataataaaaaattcttatgaaaatattatttatttaaaaatataaatacctttccattccaaactgtcattgccacatgatgaacatagtccatcaaaactgatgtatcatgggactcgcctagaaaactctcggtatcagtaactacatcatcagtagttgtctttaggctgttcatggacctcatcagttgcatgatccacttgctcaacatactcagcaacaggtgcagcttcttgttgcctacatgcagatgttgtgggcctt

SEQ ID NO: 215226 - DNA, 377 bp, Glycine max
  unsure (1)..(377): unsure at all n locations
ctactatcgatatatagcattgaacatacattaaactagctagagagaataaaaattgctgataatagtacactccataagtagtcatgatgcgtaaaccactactgcaaganaacactntaaattatagtattagctagttatatttgtggttgtcttgatcatgcttggcctcacatgactgacaggtggcgaatccatctgcctatatagacccttccccataacttccttttttactacttcttaagagaatntctaataggagacagtagaagacaattaccatgagacttccatggctgataatgaagaggcagttaaagagagttattgtgttaatgtgttaaaatgatgagtattattacttatataac

SEQ ID NO: 215227 - DNA, 344 bp, Glycine max
  unsure (1)..(344): unsure at all n locations
gaatattattcaatggacccatactgtgattaanagacactgaaattggttctcgaaatgtgatcccatctgatctttgcatcgagattctaaatgttctctccaattctagttcttttctcacttcatcttccagttctcgtcgttgtgcaaatgccatctcgcaagcaatgatttctctcctgattccttccttctctagctctcgccatatattctctttctccaactctcattggaacacttcattgacattaatcggcatggccattagaaaaactctaggcactgaaacatttttgggaaagccacttgattcaaagccacaccctaaaaattggatt

SEQ ID NO: 215228 - DNA, 301 bp, Glycine max
  unsure (1)..(301): unsure at all n locations
ctaataactaagctcaccttcttgagaagcttccttaagaagatcgatgtgccatcattttcttctatnttctanaccctttttgcaccatcttaattactgattggtcttaattgtcaattaatcaggcagttttattatttgggctcatttagctaattcgatgtttttaatctaattncaggaattaatgaaacattgggcttaatccggattctggttatggacttgaagagggaaaattaagcagcgcttaccttacttaatttctaattaggaaatttcgcacatttattctatg

SEQ ID NO: 215229 - DNA, 439 bp, Glycine max
  unsure (1)..(439): unsure at all n locations
agctntgaattagtttctagtctaaagatattctacaataagagccaattcgggtgtctgggtaaatctgagggctggtgtagggaggcagctttttctctcaattgcagccaactggaatttcccttttcttaccttggaattcctgtaggggtgagctctaaatgtaggtctgtgtggcaacctattattagcaagtttgaggccaagcttgcaacatggaaacaaagaaatctatcaatggggggtagaataaccctcattaattcagtcttaatagccttacccatctatttgttgtccttcttcaagattcctaaacatgtcgtgcaaaagattacatctattcaaaggaattttttatggggaagtcaccaagactccaataagattccttgggtgaggtgggacatagtttgcctacctaagagaaaggggg

SEQ ID NO: 215230 - DNA, 432 bp, Glycine max
  unsure (1)..(432): unsure at all n locations
tagccttagtttcactttggttattattcaattgatccagggaaacttccaaagaaaaacgtccgattgattnttttgattattttattcaaagatatttttattattttattattattttgccttttttggtttaaccgagattacagcgtgaatgataagttagattttgttttaacagtgattaaacgagattacaacgcanatgatcggttgaaattcattttatcatttattaggtgagaaaacggcttanataaacggttaaagcatgttaaaaaacggaagaaaagaaaactgaaagtaagcgaaattaaagtgaaagtacacaaaacaagtagggaccactaagggtgcataaaatgaattgaaagattcgatttcgggaacttaccggttgaagaccgaataacgactacaacaaatgaagaa

SEQ ID NO: 215231 - DNA, 276 bp, Glycine max
tcattatcaccctcacgcgcttcattgtctatattcatactagatcaaaattcatctatccttcgtattctcagagctatttatatttatattctacattctaagtcctactgatttggcctgactgactctttctgagattcgactacaatatttgcatcacatatcactgtccttattataaagtgcttatatgaatcatttatcccatacattttgtacggaatggaaaggggaaactatagaccacatcctattacgtatatcatcctactc

SEQ ID NO: 215232 - DNA, 450 bp, Glycine max
cacctgcggcatgtaagctagattacattcttatagtgaagaattgtaaggaagcaaacgaattggtgatactagtaggatcgctgattctaaagtgcgcagagaaaactggtaacttgttgctgagaagagtaatgggctacttacaaaaacatgtaatgccctatgactttacatttaagggataataaagattcaaaccttgatgtagcctgatcatcggtaaaatctctaaacgttgtcctatcaccactaagcatggaccttccacgtgctcgaaatgatggatgttctggactgcaaaaccagaaatatttccaacacaaaaagaaggctgagaagtatttagaattaggagactgtttagattaagatacctttgccactaaatgcaaaatgataacatacatagagcaattcgaaagacaaacttggaatgtcctaagtact

SEQ ID NO: 215233 - DNA, 424 bp, Glycine max
  unsure (1)..(424): unsure at all n locations
aagaataacctttctttctctntgctatctagtttcggatgtattgatataatgagtgtgttccacattcccccctcccctatttcgctntataaaatattccagactataatagatgataggtacatctcatgcttttttttctcgtttgtctatataattaatttgtctctcttgattntataagagtgatatacatatacttcattttataagagtattaatcgaattatattgattcgactaaattttacattagtttgtattacttagctaattagtttttttccctttaaatcttagtcaaattaattgtaattgatttggttttcagaatgttttttaacttgacaatacaaaataaactaaataaatatattgtatatttcatacttagaacagttttcttttaattttgctttac

SEQ ID NO: 215234 - DNA, 381 bp, Glycine max
cgcttataagaacaaaattgcctcaatcatttccaaatatgtatgtgaattaggaagcatcaacaagaatcaagccaaggctattgtgcaagcaatcaatggggcaaaacacaccaaatgattatgatgatggatggctcaaattctcacaaaggtaaactcatcactttcaaattgagctttcaaaactatcatgacatgttgtcataccctaatattcgccggggattattacttgatgacatgcaacctttggttagccgctttgagatacttggcgtcctttgttgcacagtaaatgaagtcccgagacgtgtcggaaatcaaagggaagcaggcttacgcgatccgtgaaattcggtaatgtggcggaaatcaaaa

SEQ ID NO: 215235 - DNA, 361 bp, Glycine max
  unsure (1)..(361): unsure at all n locations
aaagggatgctccacattatgtccatgacacanatgcaaaaatgatgatctggaaactctacgcaaaactggtcatgcatgcacctatgcggacactcaagtgtcaaatttttatggtcatgtgatgctagggctcaagattcgtttcctctattttaatcaacccaatgtttccaaaatatgttcttttatcaatttgtgcattcatccgagtccatttctggcgtccggggaaatttcacagcattcacctctcatgtgtagacacatcttccataaattggctatgatcaatgaactctttcaaagaaaagtgtgacatcttctctcttcaaaagcatgttggttcttagctaacaac

SEQ ID NO: 215236 - DNA, 358 bp, Glycine max
  unsure (1)..(358): unsure at all n locations
catgcacgcttattgaactccaaagaagcatatatgttactaatgttaaaaaagggatctaaatcgaagatgcttaacccattatgatttctgaatgtcatgctcatccacacctacacaatcccatgctatcgcaggtgaaaaatatatagtaactatgtggacttttaattctacgaaattctatttttttattataaaacagtaccacaagtgcttaaggaaatgcatgtnaggtatgccttttatgaattttgataaaaactctctttatttcaaagacattccttatttaccaataaattatatgacattcctttttgccatggacaatatgccatcgcttgtaaactttatt

SEQ ID NO: 215237 - DNA, 405 bp, Glycine max
gatgagatggtctctgcttctactcctgatcttccactgtttaagaatttagttcagctaaggatttttcttaaaagggatgattccttactttttgaacttccatcaaagtgtcccaagcttgaggttcttcaagttaatatcacgcataacctatcaattcttcctctttgaaaaatgcctagtaagaagaaagaaatgaattgagtttctccataaattaaaataagttctccattaattaattattaactaatttgtaaatgtcttcttatttttaaaaaagttatataaaaaagtttctcataaaactcattttatcttacagagaagttcatctcattattcttcttttctcttaaaagtgttgttgaagaagcttacccagaccataagtataagctt

SEQ ID NO: 215238 - DNA, 360 bp, Glycine max
  unsure (1)..(360): unsure at all n locations
ggaccttaagctacctgagctgcaacttaactttagagactaataaggcttatcacaacagtcacgctaagcgcacnttcaagaattcaaaacccgtaagagattggcacttagtgcctcctagcccgctaagcccaacataaaaactcaagttacaaaatggatttggggcttagcgtaagacagcgcgcttactactgttacaataaaaattttcccgagaagaagtggcacttagcgcatcatccacgctaagcccactggttaaaattcaattaccgcaaagatgtggggcttaccgtagtgatgtgcacttagctgaactattcagccaacccatcagggggctatgcacttatt

SEQ ID NO: 215239 - DNA, 358 bp, Glycine max
gcgcacaacaaggtgttcacatccacaaatcacgtataaacccatcattccctgttgcccacctccaactgagctcacgtactcccacgtagcccatatcctcgtttttctcaacaccgggtcctcatcaatactcccaagcttccgcaacatctcagtaattcaacatccaaatcatcacacactatgaaaccaagcaaaacagggcagaggcagaaaactctacccaaaactcaaacgaatatcacagctgtttctcacttaaagaccccagtaacatttccttctttccattcgttaaccggtggatcgactccgaaaatttactaggaaggttctacgacataattctacattt

SEQ ID NO: 215240 - DNA, 360 bp, Glycine max
agcttatacaaccacgtttttgtatggattcccagaacaaaacaagaagcatcaaatgtgggatattatgaagatttagaaacctcatgatgatagcccttcgatgtgagtgggggatatgaaccaaatcgttcatgttgatgagaagaagggggaaatgctccaaatattcaaagtattcaacaatttcaagatatggtggattattgtggtttggtggagctgcaagtggagggccaatgctttatgtggacaaaccagagatagggggatgatttaatagaagaaaagcttgataggattttggttaaccgttctaggcatgataactagagggatagttgggcatcgtcggtagta

SEQ ID NO: 215241 - DNA, 422 bp, Glycine max
  unsure (1)..(422): unsure at all n locations
agcttgtgactcttggcaatgtctttaagattagttacttacaaaagcggtgactttggaaaaaatcttcagaaacaagccacttgaagaattatgacttctggaaatgtatntttcgaaatcagccactagtaatcgattaccattaaggtgtaatcgattacacatcaacagatgtgactcttcattttgaattttgaaaattaaaatgtttagaagctctagtaatcaattacaagtattgtgtaatcgattacacaagtttaaaatactttaaaactgtttaaacataagttataactcttggaagacaatgctttcacattgaagactctacctgcccacttgaagtatgtatttttggatgacaatgaagcccaaccatgttggatcaaagggccccggaataataagaagggggg

SEQ ID NO: 215242 - DNA, 354 bp, Glycine max
actaacaaaactacgtccaagtgccattatatattcagctgcttcttcaaaattacaaatgaaaaacaattgaataataatgtaaaaaccataatgcatcatgatgatagaatacagtgttgctctgtcaacattctactggtagatacagcaatggaagtgtctttgtccctcaccattgttctcttatacatgatatagtcccggatcttatatttgcatgttgttgctctgaagttaaattcatagaatcattgcagctccgctgtgcaaatggtgtatgcaaaggtcgacaacctcgattctaatattgtgatcttttcttaatgcctctcaatcagtctctctatctta

SEQ ID NO: 215243 - DNA, 356 bp, Glycine max
cccacgtgaacagtgaacacgatttcattcaccaataagattcgatctggccggatttttaagatggcatcgattaattaaagtaacgggtactacgggatcgattagcgcaagttgagtgctcttattaaggaatttacccaagtgtcaatgatcagctatgtgtacggaatccaattagcaagatatgagacttttaactccatgtttaaaaaatattccacctttggaaaaagctgcttttactggtcatcaggccaatttgaaagtactttttttgggaagaaattatcggcatggtatcagtgaagcacatgaaacttaatctttataagcgcgttttggtaacttgtatt

SEQ ID NO: 215244 - DNA, 244 bp, Glycine max
  unsure (1)..(244): unsure at all n locations
cttctacagncttaagcaaaaccgaaacttggttgtcactcttaaaaactgatctgttctacttctaccgccactatgaaacactatcaacaatcgggatgatgaagagaagatattaatacgaaatatgtcgaagtataaatatcatcaatcgaccatgtcgcatagcatatatacaccacgttctgatctaatatttaataaagtaacatattatatgtacattgaagtgtccaacttggag

SEQ ID NO: 215245 - DNA, 371 bp, Glycine max
acatacatctgtatggtgatctacagaggaacatagaccacaaactcttgccacaggtgcagatttcttattcatggcaaggtgagatactaggttgaccacagcatcaagttttccctcaagctttctatttttagtagatgaagatgaatatgtggccacctcatggactcctctaaggataataccataatttcttgcactgaattgttgggagttggaagccattttttaatcaaattcctagcctcagcaggggtcatatcaccaagagctccaccactggcagcattaattatacccctctccatgtaactaagttgcctgaggcctaatacttatgcaagctctctccaataaattgccttgat

SEQ ID NO: 215246 - DNA, 352 bp, Glycine max
ctcccagcccaacagaatgatgtcgagattgattcttcacgttcaagatcaagattaaagagaagacatcttgaagaatcaagattcttgagaagatgaattatcattcaggagaagaaaccaagaagcaacaagtcaagactttacatgggaagttttgtaaaagatgttctaaaaccaaacatagcacatttttcaaaaagattgttcacaagagagtatttactctctggtaatcgattacaagtttcatgtaatcgattaccagtgatcgaattcgatttcatacagctgttaactgaatctgcaactttcaaatgatttttaaatggtgtaattgattacaatatat

SEQ ID NO: 215247 - DNA, 406 bp, Glycine max
agctaataataacaaaattgccttaaccatttccaaatatgcatgtgaattaggacgcatcaacaagaatcaagccaaggctattgtgcaagcaatcaatggggcaaaacacaccaaatgattataatgatggatggctcaaattctcacaaaggtaaaatcatcactttcaaattgagctttcaaaactatcatgacatgtaaagaagaatcaaggatttcaagtcacaaaatgtcaagaacttttattttcaaaacaattacccatttcttgaacatatcctataattcaaagaaaaacatgtaaagtcgtacctgcacatgaaattgacccaaatattaaactgaaaaaccaacgaaactaacaacattaacaaattaacacaacttacaaattaacaaaacc

SEQ ID NO: 215248 - DNA, 414 bp, Glycine max
  unsure (1)..(414): unsure at all n locations
cacattcttggtggcgaatcttcttctttcatggcttattccctagtggatggcgcctcctctcacctcttctcctttatcttccgctgcatctccatggtggaaaatcgccattgaaggacctcattgaagctcaaagattcagcctccatagaagctccacaagcaagcttccatcaagtggtaatcagagcacaagagcttcaagtaggtgctccttaaacctccattaattnttttgctttaccttctcttccattgttgtttcttcatttttctccatgtatctcctcacatgtcttgtgctaaatgtttttaacatgattctttagagtttccaccgattaaactctctatagaagctagatntgattntctatggttcaaaattcttgttcttgttcttgaaccatg

SEQ ID NO: 215249 - DNA, 426 bp, Glycine max
agcttagacaattacatatcctccttctttttataactaattcaaaataatttgtttcatggtttacccaatgaagacccttatgctcacttggccacctatatagagatatgcaatactattaggttggcgggtgtgcctgtgggtgtaatcaggttgagtctgttctcattttctttacctggagaagctaagaggtggcttcattcttttaaaggaaatagtctgaagtcatgggatgaagtggtagaaaagttcttaaaaaagtacttccctgaatcaaagactgtagaaggcaaagctgccatctcttccttccaccagtttctagatgaattgttgagtgaagcacttgaaagattcaaaggtttattgcggaaaactcccactcatggtttttcagaaccaatacaacctaacatattt

SEQ ID NO: 215250 - DNA, 300 bp, Glycine max
  unsure (1)..(300): unsure at all n locations
gtgtattttccatttggatcataccaggaatttgatcaattatactgtgaatagttggcctggatcatactcttggatcataccaaagtaatcttgaaaagactttacttaattctnggcaacctttgctcttcaaggattccttctattaaatactcttctaaacttaaactgcttgcatcatctgatatttgcttgataagtttaaacatgaacccttgcagcttccttggatataaacattcactgtcttgctacaacgtggcatatcttctaatatacacttatagcttgttacat

SEQ ID NO: 215251 - DNA, 405 bp, Glycine max
  unsure (1)..(405): unsure at all n locations
agctntaacctcatcgtccctcacagtctttatatttgggagccaatccaatccttgtgttcggactctcagccacttatgatagccgccgatgatcccattactgcttcccctaagctctctgtcctttcttcacgccgcatcccatgccttgcgaactccttggagtaccctcgcgttgtggtcactaaaaccccgtgcgatgaaaggcgtgatgctttcgtctaatggcgctcctctcatggggtagccaagctgtcttatggcgagaacgggattataattaatacaaccccttgttcccatcaagggaacatttggacatccttcgcatgaaaatagaatcttgattcttccttccttctagcgagggaaccaattaacagacgcccccccattgctacc

SEQ ID NO: 215252 - DNA, 321 bp, Glycine max
  unsure (1)..(321): unsure at all n locations
tcacaacttctaaactntgtttatgaagatctcattgtgaaaagttagttgtgaatttctcttgagttcaagaaggcactcattcattcaagcaaggttcttgcatacaattgatcaggttgtgtcttgctttgactntgtttttggtgtaaattgttagtatatgcatgaatgtctgaagacatgctagaataagttnttttaattgnggctaaggtaggtttctcttaagctcttattcacaaaggaccttanggttgggtatcttggtctctntttttggggtaggaactagatngcttgtaaaaattctatatgcat

SEQ ID NO: 215253 - DNA, 321 bp, Glycine max
tccttatacctccattaattttcagctttaccttccccttcattgtggtttctccattttatatccatgtatctcctcacatgtcttgtgctaaatgttgttaacatgatactttagaatttccaccgattaatcttgctatagaagcaagatttgatgttctatggttcaaattctttgtttatgttcttgaaccatgagttgtgttgagtttaggatccttagagtattgtcttgctattttttgtggctgaaacctaaaccataatattcttacaaatcattaaagtataaaaaaccttaaaaattagagtgactcgt

SEQ ID NO: 215254 - DNA, 388 bp, Glycine max
  unsure (1)..(388): unsure at all n locations
agcaagntctatgtttatcaacttgaagagctgtattttaagaaatttcaattgttgaaatgtatagtaagtcggtcatgtagtgacagcataacaaagtcacaaatactagtactaagtgggagaacatccagccttccatatctagcctaatttggcagcgaggtgctccttataaataggagtacctctaaccactaagtagtaacctttcaatagcagcttatgttcctaacattctgcattgttggcctccaccatattaagttaaagttcccacccaccaaacttagtgagattgaggtcagctgttgtcaaaatctataggaaacattaattcaaccccatagctttgtaggtgcagcactccacataatttagcaactta

SEQ ID NO: 215255 - DNA, 458 bp, Glycine max
  unsure (1)..(458): unsure at all n locations
tagtcgccaatacttgtagttggagcctacatgtttctcatcaccaaactgcatatttgatctgtttcctccagtttgcaagtccatgaaaaccagttcagtctaccttgaattcttagagccaagaattgaaaaagagaaaaagtccagatcaaagtccaagctccagataccataaaacaaataaatgaatatttgaaatatgaaaaataggctaccagaacccaatctatgttttattgtgtactgaactgaggaatccaaagttagagtgctggttttatacatgactagtgatgctgaaattagggaaacaaactcctagactntggctaaatntaaaatgatgacagataattctcctaatatgtcgtaacaacaacttattttaattgcataaatcaaggcatactaacaagaataaagattcgcatacacacattagctgcttaattttc

SEQ ID NO: 215256 - DNA, 367 bp, Glycine max
  unsure (1)..(367): unsure at all n locations
catgaacatgttatggttggttttgtccaaagataaaagggatgccccacattatttctatgacacaaatgccaaaatgatgatttggaaactttatgcaaaactggtcatgcatgcacctatgcggacactcaagtgtcaaacttttatggtcatgtgatgctagggctcacgatccatttcctctattttaatcaacccaatgtttccaacatatgttcttttatcaaattgngcattcatccgaatccatttctggcggccgggggaaattcacagcattcaaccttcaggggtaaacacattttccaaaaatgggtataatcaagaactctttaaagaaaaatggaaattgcttcttttaaaa

SEQ ID NO: 215257 - DNA, 428 bp, Glycine max
  unsure (1)..(428): unsure at all n locations
ataagtganatcaggtgcagtcatatgtgtaagagttctttattatgtggaggtcgacccatgttctcagtatgaaaattcacagttgaatgttctaaatcataatattcagaatcaccagcaacagaatgctcataatgctcaaaatgcacagaatgatcatgatgcacactatgcctaactaatctatgaaagggtctatctatctgatgatcaaagggttgtaaatcacctggattgtccctactcatgcactatatgcaacaaataatgtgttctcaaacaagcaagaagggagggttaaaactacaactatagtcaaatgatatccaaatgagctgaaatgttgtgagcaacaccctaaaatcatgaaaagagagcacaaaatatttcgaacataaatgtacagtctaactatgaaaactact

SEQ ID NO: 215258 - DNA, 441 bp, Glycine max
  unsure (1)..(441): unsure at all n locations
nagcttataatgatgccaaagatgaaagctattcaagattgatcaaagtcaagatcaagaattcaagagaaacgattaacaattagtctattgtatgttaaaagaattccttaaaaagagattgcacaggtttggccttagtttaattcttcaaaatatcttacaaaagtttttaagtaaaactatttttgaaaatatgattttctctctggtaattgattaccagaggctctaatcgattaccagaagcaaagatatgttttaaacagaagagactgtaatcgattaccagagacaaaaactgttttaaacaactttcagatgtttttgaatttaaattttaaatctataatcgattacaacaccagtgatgaaattttgaaattcaaatttgaagagtcataacctctcaaaactaactgtgtaatcgattaccacata

SEQ ID NO: 215259 - DNA, 347 bp, Glycine max
  unsure (1)..(347): unsure at all n locations
tggatatgatactcggtcttgccattntatatactacttgtgcgaatcggtacacttgccgatcaccgaacactgataaataatgttcgttacaatataccattaacaatatttatgtcaaatatttgaaataggtttatgaatgattggagtactagcttacgttatggatcaccgtatagtttccttgaacctcagtctatacacaaggcatatgacatacatcaagaatgccaacattatattgaaacatgggtcacgaaatcacaacgacaattgtacttaagagcttacctgaatcagtaagtgaaattcatgttgtacagtatggatattatgtgcattat

SEQ ID NO: 215260 - DNA, 373 bp, Glycine max
  unsure (1)..(373): unsure at all n locations
gagctctaagcacctgcagctgcngcttttactcggagtttattaggtgtatttatatcgagaacgccgaaactgaacaatggaagctcttgagcaattcaaatggtcataacttttcactaggatgtccgattcacgcacataatatatcgagacgctcgaaattgatcaaccgaagctttcgagaaattcaaatggccataatttttcactcggaagttcgattcaggcgcataatatatcgagacgctcgaaattgaacaatggaagctttcgagaaattcaaatgagcataattttctactcggaagtctgattcaggtgcataatatatcgacacccttcaaattgaaccacggaagccttcaagaaa

SEQ ID NO: 215261 - DNA, 412 bp, Glycine max
agcttctaaaaaaacttatttatcaaacaatcaaacaagttttccggttagtaaaaaaactaaaaactaattaaaatgtcttgtgaaacataaattatatcccttatcatatttacttttaagttagtcatgaccgatatcagtagaaaaaatctaaccaacgtcggccaaaaaaattattagtcaacatcaactgaaaaaacctggatgacaacgacaaaaaaaatctttggccgacgtcagcaaaaaattcctattacttatgtcagtgagaaaataaccctaactaatatcatctaaaaaaatctgagccgatatcgacaaaaaatagctttggttgacatcatacaaaaaaattctatccgaaaaaacctcggtcaaggtcggtgaaaaacaacttatgtcgatgtcg

SEQ ID NO: 215262 - DNA, 411 bp, Glycine max
  unsure (1)..(411): unsure at all n locations
gggaacccggtgttgagagaaactatgtatatgtctacgtgggagtacgtgagcttagttgaaggtgggcaactggagatgatggatttatgtgtgatttgtggatgtggagagtcgacttgcaccatcgcccgattgccacctagtaccacatatgacgggtaccccataatcctacaagcttgaagtgagaaagtgtggaagagtcagtcttcctacttttattcgttgaccacagagtggtacctggagatatgtcgcgggggtcaggagaccttgnggacgtcaggtggggtgctattttccaaaactaagcttgaccaatcccgacccaacccgggcatagtcagtcagtgagaacctgtgacgtacctaaacaggcgagctctttgcagtcaaccgataaaagaa

SEQ ID NO: 215263 - DNA, 427 bp, Glycine max
agcttgtcaacaggttatattactgcattatctcctcagacatgtcatacacaacacacaattgaagagcaccaagaaggaaaaaagaaaaggaacttggacagtgttcagtgaggttcacggagtaaaacctgtaactttgcaccacggagcacctgtttggaaaaacaaagaacgacccattatatggaagggtggtttaatgtatatggtgagagagaaaaacagaggaaacagagaacagaaccttgggaagtgaaactaagttgagtcattggtcgcgcaaaatttgatgcttcaacggtgaacgtgtttgaaatcaaggtaggttaggtagttgaaaatgccgtaccatgtaaactgacaaagacatttattgcgttgttccacagggcgctgctgccattaatggggtcggtaactattg

SEQ ID NO: 215264 - DNA, 411 bp, Glycine max
  unsure (1)..(411): unsure at all n locations
cctgtccgatgcagcagttatgatggcccgagttatgttgtttaacggttacgaacccggaatgggtttaggcaaagacaacggctgcataactagcctgataaatgccaaaggaaatcgtgggaagtatgggttaggctataagcccactcaggcagatataaagagaagcatcgcgggaaggaagagcggtagtcaaagctcgcggntgagacaagaaggtgaaggaagctcaccctgccacataagcaggagctatataagcgcgggtctgggggacgaatgtcaagtggtcgcgatatacgaagatggtgttccgagtacattggatttggtacgaccatgccctcctgatttccagctgggaaattggcgagtggaagaactcctcggcatttactcgacgagcat

SEQ ID NO: 215265 - DNA, 91 bp, Glycine max
ggtcctgcaatgcttggaaataaccactcccttaaaatataaagggctattcggaggctataataaaataccttcctttaaaactgggcaa

SEQ ID NO: 215266 - DNA, 368 bp, Glycine max
  unsure (1)..(368): unsure at all n locations
agcttgagacttaattgctttgttcttcccataagcagnaatcagcagggcactctcacccatctccattacaagcctttcttcttcctgaacacacatggtcattaattcattgatagaccatttatctttatgtgtgttgtaggaaatcttaaatggcccatattcatgcggaagggtgttcaaaatgaaatgcactaggaaggactcagacatatcaacctctagtttcttaagttgagctgaaatatttcgcattttcatgatgtactcacgcacaccttttacactggtgagccgaagaaaaaaaacttcatgatcaaagtgcttgctaaagtcttatctgaagtgatgaactgttcattaat

SEQ ID NO: 215267 - DNA, 416 bp, Glycine max
ctcacctacaacaaacaactgcacagagttttacaattgtatttatatgaaagctctgtatgtgtatatatatatgagcacaaggataataaatagattgcacaatgaggatgagaaagcatatatggcagagctttgagagatccaagcaggtatcatatgaaaaaagaccaaataaaataatgaatatgaagaagctcgctagcaatgtcattactacagctattataaagggaggtgttttgtttcttttttccactctgtattcaggaggtgagcaccaattgtgcactctaaactaatcaaaattcaataataataaaaaattacaagtttaataataaaactctaaactctctaaaaaattagtgccttagactaagattacaaggatttaccaaacctagtactgtgat

SEQ ID NO: 215268 - DNA, 321 bp, Glycine max
  unsure (1)..(321): unsure at all n locations
agctngcatgtctatccgatatttngnattgatgtngaaagtcctgatagatcttttatgtaactnttctgctttaataccattgcaatggtaggttctaactctttgctgaacatgtttttaggacttgcttggtgtgtgaaatctgattgacaatgtcttgctaaacattagaaattttntatttctgatgattaatgaatttcttatngtttatcactataaatccatctgaaataaagaaatgtgagtgccttaacattcctttaataattgtgatgataggtgaggaagctagaaacttcatttgtaagtttctgg

SEQ ID NO: 215269 - DNA, 425 bp, Glycine max
tctaagaatcaagatcaagattcaagactcaatattcattattaagagaagaattaatcaagataagtatgatataagtttttcaaaaactgagtagcacatggtttttcatcaaaacctgtttaccaaagagattttactctttggtaatcgattaccagattattgtaatcgattaccagtagcaaaatggttttcaaaaagctttcaactgaatttagaacgttccaattgatttcaaaaagttgtaatcgattacaatgttttggtaatcgattaccagtgtgtttgaacattgaaattcaaattcaaatgtgaagagtcacatcctttcacaaaaaagctttgtgtaatcgattacactgatttggtaatcgattaccagtgatagtttctgaacaaatcaaaagatgtaactcttaaaa

SEQ ID NO: 215270 - DNA, 389 bp, Glycine max
agcttctgacagtatgacatataagaaaatttttcatattgtcgacgagcgctggaggcagtttatatctgacttgactaggaaatgggcacttgtagccgacaaggacgatgtggacgacattgtctgtgaaaaatatggcattatcaaggagaaatgggcccagttttgtcagacccgcagagacccctcatgggaggtatgtactttgtcattttagttgttttccacaacaaaatcacttcttataatttattggaataatcattttcattaatgttaaaattttgcaggatgtgcggaaaaaggaacaggcctcccagaagcaaaacactgccccccacgtattggctcgtgggggttatgaatatttaaaagaaaagctcatg

SEQ ID NO: 215271 - DNA, 299 bp, Glycine max
cggcagaggagcataaaccacagagtctggtgacaagtgcagatttttgattcatggtcagttgggttaccaggttaaccaaggcatctagtttaccttcaagcttcttagtttcagatgatgtagatgagtttgtggctacttcatgcactcctctaatgactatagcatcatttctggcgctaaactgttgggagttggaagccatcttcttcaattaaattcatgcttcagcaggggtcatgtcttcaaaggctccaccactggcagcatctatcatacttctcgccatgttactg

SEQ ID NO: 215272 - DNA, 439 bp, Glycine max
  unsure (1)..(439): unsure at all n locations
agctnttacataaggaggtgctctaagcctagttaatatagcctattctggtgtttatcagtggtggtatacaatcggtttacgtactaatgaggatctttatactggagctctttttctattatttctttatactatttctttaatagcgggttggttacacttgcaaccaaaatggaaaccaagcgtttcgtggtttaaaaatgccgaatcccgcctcaatcatcatttgtcaggattattcggagtcagttccttggcttggacaaggcatttaatccatgtcgctacaagtgttagcaacagtcaagtaagagtcaaatattaaaggaaaaattgttattgccttaagaaatgtccattcaccaggtcaattgttaattnttttattgagtatttaacaaagatgttagggcaattttatctgctcacatatttc

SEQ ID NO: 215273 - DNA, 436 bp, Glycine max
ctaagctcgctaataattcactattattgtcacctactccttctataacggacttgtttttccttagttccctaattgtttgtttatccttgtcactaatcttgaaaggtttgaataaaggtttttctatggggatatttgacggagatccttcaagagttttctgtttaggatttacttttgttttgatggactctcctaaaacttgtaggtacttattggtgtaattagcctattccattaggcttttgatgtctttagaagttatttcttcattgacatcttttgtcttgaatggagtggccatgacagagttatcatgactatccttgacctttggcagttggtattgagatgtgggaggtaattcccatcggattaactaaccatctctgatttccaatagcgattgacaatacttgttggatcacatata

SEQ ID NO: 215274 - DNA, 432 bp, Glycine max
  unsure (1)..(432): unsure at all n locations
agctntntgctaccaaatattacacagtgtatactttaagtattaacatacaaaccaatacaggtatcctgctaaccaaatgaatatatcaacaaggtagttgccaaagtaattaccaaagggcgttctaatcacctatcatgcaacatatacattttatgaggtattttactatctcacatgcaatatgcctatacattcaggtgtcttcaatgatcacatttttgcttttcacatttcatttatacacatgtgcctactagagagtgaatttcatgttatacacttatttgcatttatttgaaaagtaatttcatgtcacacactcatgggaaaggcagaaatattttcactactcattcacattttgaaaattcatttcatgccatatgttcctattttgagaagcattttcgcgccatttttggcaca

SEQ ID NO: 215275 - DNA, 295 bp, Glycine max
aagctgttcaatccctagagaattatctgtagtaaaatgaacaaagtgttgtaatgctgtcagtttacttggatgaaggaaacttgagcgaattgagttaattctagctccgctaagctagcaagtttcattgtattcatgcttattgtcgaaacactctttgagtgagtagaatatattttctatcaaacatctattattcgtgaaagctcggagtgacttcctgacaaacaatacttaagtcttaatctcagagggagattataggtagtgtctagaatgagctacagaatac

SEQ ID NO: 215276 - DNA, 420 bp, Glycine max
  unsure (1)..(420): unsure at all n locations
cttggcattcaatacggctatttatatatttcaggtaagtttcatggtcttttctagctntccagtctttacactgtatcctctgtggccgattcttctctcaccttccatactcaactgggtcatcctggtcttagcaaaatctaacaattggtgcgacatctatccaagctatctcatttttcatctgtgttagttaagatttgtccctttgctttactcccggttgatgtatgaggtcctagtcataatgtgacaaacttatttatactaatactaagcttcccactatttttttcaactcctctaatgatatctttggccaccattttgcccacttgacatgtcttttcttctttccaagtatgatctcgtcttatttaactaaccactttactctaatagccacttcttctccat

SEQ ID NO: 215277 - DNA, 345 bp, Glycine max
aaatattgaattattgtatatatgtcacttaattcgtagtcctaatctattaaaatacattgagcaacatgtgttatttagttaaaatcttataaaaagtaactctagaacaattaataacatctgaaatggtacgatgcacgactaaataaacttacgactttcaatcaaacacataactaatggctctgttcaaagaatttatacgaagaagatcgaagcccagtgtcactagaacaacttatatattatgcatatacggtcacttgccactgcggacccgaaaatctctgatggctgtctacgactactcactacctgtttgtatgagacatttatatcact

SEQ ID NO: 215278 - DNA, 443 bp, Glycine max
  unsure (1)..(443): unsure at all n locations
agctngtattacataaacaaagttagaatctattcattaatgtatctattcacttgaaaagagagtttatactatgatattgacatattnttattttattttatagcttatgattacgtaaatgtcaatttcaaggcttgatcataactcagttattagacttttacattgtgctaattttttatttcttgagtttaaaataactttaaaagatatttaaaataaattaaaaatataaaaattgccaaattgattcaaactaagctacaaattaaatatcagttcaatttgattcagatttaatattgcattcaataaattttagttaatgatgaaaagtgtataaaaaatatactaaaaaatgtgttgttaatctctttctctgcaaccaaaatcatatgtcccttaggnnctgttctacctttaatcccttactcattttt

SEQ ID NO: 215279 - DNA, 351 bp, Glycine max
  unsure (1)..(351): unsure at all n locations
gcagcttactcatcttggaaatgaaatccatattntgtttaaagctctatttttgttagagctataaaatcgtgccttcacctaagagctttattagcttttcacaaattntgtttataatttggtggtatcaaattctctgtcgcgtctattcttcttagtagaagtttgaatttaagatggggcgggcctatacaatgtccatgtttcagactcggctcttgtgtgggaggtgttagccataaaataaaactattcacgagtcttgaataagagctntattattntggaagaagttgttgttgatacctgatatcatatcatgtcttggcatggtgacgaggtgatcta

SEQ ID NO: 215280 - DNA, 429 bp, Glycine max
  unsure (1)..(429): unsure at all n locations
agctnttgaaatcaaactttgccactggtattctattacatgaaactcgtaatcgattaccagagagtaaaaactctggtaacttataaaattttgagaaaaactcttttgaaaaacaaaactgtgctatgtttgtttttgaaaaatcttttcagtacttcccttatgaagtcttcttgatttcttctcttgaatcttgaattcatcttttcgtgaatcttgaaatcaaacttctcttgaatcttctggatttcttttcatgaaacttgaaattaatcttgatcttgaacttgttgactcaatcttgaaatcattctcttgagctttttgtcatcatctttgtcatcatcaaaactacgtgaattaacttgattcatcatcatgaagcttgcttctacaccaacaataatgaaaccttaatctaatatg

SEQ ID NO: 215281 - DNA, 404 bp, Glycine max
  unsure (1)..(404): unsure at all n locations
gcagtttgtgatacccagtgtgtctccatgatgagcactagtgttgttagtgaagaagaaagatgggaccatgaggttatgtgtagactacttccaattgaataaggtgacgatcaagaataagtatcctttgcctagaataaatgaccttatggactagctggtaggagcttgtgtgtttagcaagatagaccttaggtcaggctaccatcagatccgagtgaagtctgaggatattccaaagactgtttttaggacccgttatggtcactaaaagtatctagtcatgccttttggtgtgactaatgcccctgtggtggttatggattatatgaaccgaatctttcacccctaccttgataagtttgtggtagtattcataaatgatattntggtggtactcg

SEQ ID NO: 215282 - DNA, 424 bp, Glycine max
agcttcccaacctaaggaatccaaggttgctactccaaacccaagcgttatgaaagggaacaaggctagttctgatatggagtctgagaacgatatgggcactccatcaagcatgcaagcagatgttgtgacatgtaccctctatcccgacatacatatttatataatatcatacatgaaaattcataattaattaaaatgattttattcaataaacataaaggaactcacgtgggtaaaaggttcacattcacgttaatcgccaaattaaaatcttatcaaataagggtatgaaaatatcttttgcccaaaacaaggccatctaatttttaccaaaggaaacaagttaagcaacaaaataacataaagtaacatgtttagaacattatgcaaatactatagaaacctatgccccaatggcaca

SEQ ID NO: 215283 - DNA, 433 bp, Glycine max
agcttggaaggatgcttctttggaggaaaagaaagagggagagaaagagagaagggggagcacgaaattgaaggaataaaagagggagagaagtggaactttgaagtgtgtctcacaagactctcattaatcaaagttacaacaagtgttacacatgcttctatttatagactaggtagcttccttgagaagctttcttgagaaaacttccttgagaagcttctttgagaaaactttcgtgagaagctagagcttagctacacacacccctctaataactaagctcacctccttgagaatcttccttgagaagattcctaaagaagctagagcttagctacacacacaccctataatagctaagctcacctccttgagatgagaagctagaacttagctacacaccccctataatagctaagctcacccccat

SEQ ID NO: 215284 - DNA, 419 bp, Glycine max
aaatcaaattttaaagactgtgataattcgtttaattcttctggtaatcaattacaagccttgtgtaattgattacaggcttaaaatttaaattcaaattttgtaagagcatttccaaaattattttggccattggtaatcgattacagcctctggtaatcgattaccagagagtaaatatcatatttaagaaatcttagaaatttttttggaaaatattctttggccaaacctgtgcatcatcaattaagaaactctttcttagattctaggaactaagttcatcaattatcttgaatttctggattcttgacttgaattaaacttgagaagcgcttatctttggcatcatcaaaacttcatagcatacatgctactacattcctcgaataaacgttggtggcgcctcccactcattt

SEQ ID NO: 215285 - DNA, 405 bp, Glycine max
agcttgatgttttctaaattatctaaactataatccatatattgaaaaaaaatcaaaactaaaatctacaaatttataggaattaaagcaatagcattaaggattaatgaaggtcaataaataaatatgacgttcgtgttaattttaacatagcttgagccatgaaggtcaatgtattcatttacaatatgttaatttacacgtccaaacaataaaaagacaaaagaagaaaatgcatgttagtgtatgtatcaaatatcaacattcatcttaaacaaatcgaaactgtaaaagagaacatataacatgcgttgaaactatgctcgcgtgtgaaaaaaaaaaaaaataaaaaaataacatgtttgaaactacgctcaaactcacatccaacccttattaacatga

SEQ ID NO: 215286 - DNA, 338 bp, Glycine max
  unsure (1)..(338): unsure at all n locations
ctaatattattgatttcatttctatccccaaaatgaataacccaaatggaggaatctgtttccttctctttctcttcctctttcctttagcggcggcgcaacctgccaccaaccaaaaccaatcctattacaacaagttcagcccttccatggccatcataatcgtcatcctcatcgccgccctctntctaatgggcttcttctccatctacatccgccactgctccgactccccctccgccagcatccgcaatctcgccgtcgccactggacgctcacggcgcggcacccgcggcctcgagcaagcggtgatcgacaccttcccgacgctggagtac

SEQ ID NO: 215287 - DNA, 405 bp, Glycine max
  unsure (1)..(405): unsure at all n locations
agctngaagctttaagggttctccggagttttattgaaacgggtttcttcccaatttgtggattcctcgttacattggttgatttccgaaactcgatctctccctcttcattgaggattgattcttcaaattctcgtgaaaaaaaaaatgctcggttatattgcctaatgcatgaccttttttttttttttgttgttgaaaatttgaatgtgggtttgccttcaaaatttggtcttgtgaggagaggagatagttgcttgtgtttgtaaagcgtcctgttgtttttgaagatgaagagaacgaatagtgatccttcccactcgaggaggtttaaattggtctattttttggttggcatttggggtgtgtacttgttgtttgtgtcatggtaatttcccagttttt

SEQ ID NO: 215288 - DNA, 360 bp, Glycine max
attgcgtgtcaaagactcgtcaatatattcgtcattctcaatcttggaaggggattttacatcaacttccaccatctctggccttgttgccttctggggtttcatagcacgcttgccagcagttcggctgcgagaatcctttatatcggaactgggttgtgtcaatatagtcaccggtggctcagaaccttccaatggttccgagtgttccttttccattgctatcgttgcagcctgatatgcaagatcatggatgatagagctgctaaaaagtatagtatttcgtgcctcttcaagtgtcaggtttctagcatcttctccatcttgacactgcaccgtaactgtggatccctctggcat

SEQ ID NO: 215289 - DNA, 356 bp, Glycine max
agctttgatagatttcatagtaagcagaataacttgagcatctttgcctatgaatcatccaacataatagggaacaaattcatagtaaccctcgagtacaagaccgagatgactatagagtagtattccctcatatttgatttccccatttccaacaacttagtatatgttttattttcatttgaaaatgttgtgacatgtgtttcaataaatccaacgaataaaaacaaaataaatgttaaaacaaggattctttgataaaattattttcacctcaaacgtaattttataacatgttcttagttaagtacgaggctttccaccttttgcttgacaatggcaaaggagatgcacat

SEQ ID NO: 215290 - DNA, 370 bp, Glycine max
  unsure (1)..(370): unsure at all n locations
ggagctnttcgactatgctcttgtgtggtggtacaagttacaaaaggagagagcaagaaatgaagagccaatggttgatacatgggcggagatgaaaaggatcatgaggaagcagtatgtgccgactagttactcaagggacttgaaattcaagctccaaaaactaacccaaggcaaaaaaggggttgaggagtacttcaaggaaatggatgtgcttatgattcaagcaaagatcgaagaagatgaggaggtaactatggctcgatttcttaatggtttgactaataatatccgtgatattgttgagttgcaggaaattgttgaaatggataatttgcttcacaaagaaatccaagtagagcaacaatta

SEQ ID NO: 215291 - DNA, 386 bp, Glycine max
agcttagccttataagctgtcccataacaagtcttctccaaaacctgcccagttgcattcaacacatcatccaatgtcaaattctcacctccagcaaataacatgagcttcccctcaccagctccaccaatagcattaccaccattctcttcatcatcttcctcttcatcattcaactcatcctcactctccccactccccttcttcttcttgttctgcatataccctatcagcaaagaagccaaaaccacagctcctgtcatcagactaataacaatgccagcaacagcaccagaactcagtgtagaggtcctagcacagcttcccaaaggtggtccacacaggctagggctattccccttaaaagcatccacaccaaacttgga

SEQ ID NO: 215292 - DNA, 405 bp, Glycine max
  unsure (1)..(405): unsure at all n locations
taacaagtctaggttcctaagctagagattgctattgggcatctantttgactntcctatgccgtctctacatacataaaacagccccaccatccctaattgcaaaatcatattcatatatcattggggcatttcaccgagcacttggtgggcgcacatttggacacaaattgcaagagaatgggagcaatgtggcatgccccattgcttcagaatacaacctaggcctaaggccttttcattcaaatcctcaattcaagaaaacaagcaccaaagcaaacaaaactgcctgacaaatataagcatgttctcacaatttaaggcaccaaaagatgaagaaaacacatcaatgggaagtaaaaatatcaaggatggaatacttacttgttgtggtgaacaataaca

SEQ ID NO: 215293 - DNA, 427 bp, Glycine max
agcttataatatatcgattcgctcaaaatttttcatagaaactctcaggaaattcaaatagtcataactattcacacggatgtccgattcgggcgcataatatgtcgagaggctcgaaattgaacaacggaagctgttgagaaattcaactggtataacttttcacacggatgtccgattcgggcgcataatatgtcgagaagctcgatattgaacaacgaaagttctttagaaattcaaatggtcataacttttcacaccgatgtccgattcaggcttataatatatcgatacgctcgaaattaaacatcaaaaactctcgcgaaaatcaaatggtcataacttttcacacggatttccgattcgggctcatattatgtcaagaagctcgaaattgaacaacggaagctcttgagaaattcaactg

SEQ ID NO: 215294 - DNA, 198 bp, Glycine max
atttctcgagagtttccgatgtttaattacgagcgtctcaatatattataagcctgaataggacctccgtgtgaaaagttatgaccatttgaatttctcgagagcttccggtgttcaattacgagcgtctctatatgtgatgcgcctgaatcggacatccgagtgaaaagttatgaccatatgaattctcaagagctt

SEQ ID NO: 215295 - DNA, 433 bp, Glycine max
  unsure (1)..(433): unsure at all n locations
agcttcttggggttggctagntattatagatatttcattgtttgtttttctaaatgggcgttgcctctaactaagttgactcgtaagaacgagaagtttgtctggaatgagaagtgtgatcaaagtttccaagagttgaagaggcggttgacgacagctccagtgttaattttgcccgaccctaagaggacatttgaagtgtattgcgatgcaagcgggcaaggcttgggatgtgtgttgatgcaagagggaagagtagtggcttatgcttcacgtcaattacgtcctcatgaagttaactatccgactcatgacttggaactagcagcgggggtctttgccttaaagatttggaggcattatttgtacggtactcgtttcgaagtttttagtaaccccaagagtctcaagtacttgttcgatcagaaggagc

SEQ ID NO: 215296 - DNA, 407 bp, Glycine max
  unsure (1)..(407): unsure at all n locations
tgagtggatatgactacttgtttcttggccggaaacttggaacagatggatgaagatgctaaagttgaagctccacaagagcctgcacatcaatggagtcctcttgaataactcatgattcaaaagatggatgctatgcttcacctccatcaagagcactcaactgaagttcacagttcgctggagaacataactacttggctagaaaacataaaaattaggctgacccttagcaacctccttaacctctatgaggatggagcttagtcatgtctcaagtgattgcttctaatgtctggttgtttcccaatttttcttatgcttttgtttgtttctgtgtctctgactaagaagttagagtttcatataatagtntaatgattctatgtaatgaataacatgctatg

SEQ ID NO: 215297 - DNA, 411 bp, Glycine max
  unsure (1)..(411): unsure at all n locations
tcaagcttggttaccatttgatagtctttacttgtttcttgaaaaagcanatcaaaaccatttcctttcaggccctgatcaattcttgcaaatgcaccatttgtaagctttgcttctttagatgcttgaacttcattccatttttccttgcagcattcttgaacggcatgcacaatctcgtgacgagaagtataggctacgcaaatcaaaagaactctctggttgttgtgagcagaaactctcattgctttttccacagaagccctgacaggctcagtcaatagttgcaagtctccaatgaaatgtaatcgaacaccgtattcattgataagactttcttgttgaagtaactcttcaatctttctccgcatcaattccatcaaggactgaacctcgttaggcttccttttg

SEQ ID NO: 215298 - DNA, 164 bp, Glycine max
ggcgtgagcttttcttttgagttatctatcctgagatatcctcggaccctccaaaccaagaagatgggcttgaagctactgttgcatgagctccaagacgtatttgtgagacattctgtattagcatgcttgataatgagagcaagctgtgctgttgagttgct

SEQ ID NO: 215299 - DNA, 293 bp, Glycine max
ctgtcatgcaaactatgacaatgaccactaaggagaatacaatgcaacggaactccttatgatctatgatgatcaactccaaatggaacatatagtgatacgaacatttatatcattatatcttcgaaacttattccttaaaataataccatcctgaatcttgtatatgttgcgactcacaccatgacatatgaactcctattaaaacatattatttccttgtttaaacaacttataatcaaatgacacgtgtaactattcttagaattttgactatgattcaacaaaaaaaa

SEQ ID NO: 215300 - DNA, 236 bp, Glycine max
tctctcccctctccacaactactctaatattcaagtctggtagcgattatcggggtccccaattacatgcggcacttaggtgcgtggctgggcgatggtgcacaacaagttattcacatccacaatgcgcgcataaacccaccctcacctgatgcccacctccatgtgatctcatatactctcacctagcccatatcctcgtttttatcaaaccgagtcccttcaatacctcaagc

SEQ ID NO: 215301 - DNA, 327 bp, Glycine max
ctgcgccgggacaacttttcgacctctttgttttgacaggcccggattcaaggcgggctgcagcaccggctccctttaccttactgtattggaagcgcgtgttatggctatatcctctatggttctatggagtatctaacatagaccctcgagatggacgccattcgattctttaacgccgatagataggcctttatctggtcctgcaccccgcctttataatccatttttctggatcgagagataaacgggtcaccttggtgtttcctcagttatgatgaaatcctcaagaaataaacacgggtgagtatccccccactacatgaa

SEQ ID NO: 215302 - DNA, 357 bp, Glycine max
aaagaatttcaaccgatcatttgcattgtaatctcgtttaatcactcttaaaacaaaatctaactgatcgctcacgttgtaaccttggttaaaccaaaaaaggaaaaataataataaaataatcaaaatatctttaaataaaataatcaaaaaaatcgaacagacgtctttctttggaagtttccttgaatgaattgactaataaccaaagtgaaactaaggctaaatcaactcacaaatcaagttttgtccgcaaaaaatcactgaaaaccgttttaaggtccaacgcctttaacggtcctctttgcttttatcggttaacatggaccgttaaaagcataaaatcaacacattact

SEQ ID NO: 215303 - DNA, 394 bp, Glycine max
  unsure (1)..(394): unsure at all n locations
tagcttgagatggggaagattaatttgttatacttcctgctttaatncatggaccacagagtggtacctggagatatgtctcgggggtcaggagaccttggggacgtcaggtggggtgctattgcccaaaaccaagcttgaccaatcccgacccaacccgggcatagtcagtcagggagaacctgtgatgtaccttaacaggcgagctcctggcagtcaacagataaaaggaacatagaccacaaatcatggaggcttgtgtgggggctggccaactgtgaaacttgcgtgatatattgattatggcctctgggaatcgattaccaagggggggtaatccatttcaaggcttataaaataaaaccagaggcttaaatggtctcttggaatcaaa

SEQ ID NO: 215304 - DNA, 340 bp, Glycine max
  unsure (1)..(340): unsure at all n locations
tgaancataaatcggtacctggcgcaagagattgtggtttatgctcctctgctgaccaccatacatacctttgcccttcctatgcagaatctgcaacaattgagcagtctgaagcttatgttgcaaacatttacaataaaccttctcaacctcagcaacaacatctatcacagcagaacaattatgaccgttccaggggaccatcctgtgttgggatgcgaccctcattcgaccacttcgaggtacttggcacccatcgttacgcaatttgtgaagtctcatgacgtgccggaagtctaaagaaagcattgtagcacgatccgtgaagttccgcgacatg

SEQ ID NO: 215305 - DNA, 367 bp, Glycine max
  unsure (1)..(367): unsure at all n locations
agctngtagaatggctagttactatacatgtcatggcttgatttggnncaaggataaaagggatgccccacattatttccatgacacaaatgcaaaaatgatgatttggaaattttatgcaaaactggtcatgcatgcacctatgcggacgctcaagtgtcaaatttttatggtcatgtgatgctagggctcaggattcatttcctctattttaaatcaacccaatgtttccaaaacatgttcttttatcaatttgtgcattcctccaaatccctttcgggcgtctggggaaattttcacagcattcacccttcaggtgtaaacacgtttttcttttcaaaaatcggttatgatcaaagaatttttt

SEQ ID NO: 215306 - DNA, 431 bp, Glycine max
  unsure (1)..(431): unsure at all n locations
tcctcggtgccatttcatgctaaagagaacatttggttatgtagttttaccacgaaaggctactcttaaaacataaatggtatacaacatacaaacatcatcgtaaatttatagtaaacttatgcacatacttctntacgaatgtttacttgcacaagacattcttataactaagaaaaatgcacacatgtacaatcaaggcacatccgttacctagatcatttatatgtacttccaaggtgtatttgctacctacatcacatgcacttccttggctaaatttacatacatgcatactcaaagcatttggggtaccaaaaattgcacatgtgcacattccgatatttctaatatttatgcatataccaactctgtgatgaatcattggtatctacacactaaagtgatacatttcatgctttattcaagtg

SEQ ID NO: 215307 - DNA, 401 bp, Glycine max
  unsure (1)..(401): unsure at all n locations
agcttagggatggaacacttactngttggttatgaacaatagcgcacaacggaatcaaaaaaagcgaaaaagggtgaccctagggctgcaaattcgtcaatcccgtgggtatggcttttgaaaggggggaaaagaagtttttgaatgtaaaaacgcccccctttcgtcatttttataatttggtgcaggggtggctcgcccaggcgagcccagctcgcccaggcgagctaacctgcactttttttttttttttttntttttttttttgaggggaacattaaccatgtccccttccttcttatggattaacattttgcctaacctgaaccttctctaggttaaaataagcggggaatactcatttattaataacccttctcttttttttaaaacaaccaaat

SEQ ID NO: 215308 - DNA, 378 bp, Glycine max
agcttttgaagggcactctaaagctactactagtttcaacaagtgatcaagtggcagattttctcaccaaagcattggcaccacccaaatttcatgattttgtctccaagcttagcatgatcaacatctaccatgataagcttgagggagggtgttgagattataactagttagttgtagtcttgtttagtagtagcttgtatctgagaatataaatactttgtaacacacactttacaaatcaatcataatatttttttcttctttcatcttcattctctatttttctctcctctggaactgaatcctaaccaactcaacaagattgtttctggttgataggattgaatggattactttgatgcatggctatataca

SEQ ID NO: 215309 - DNA, 339 bp, Glycine max
  unsure (1)..(339): unsure at all n locations
agctattgttacaacctacgaccgctgaccaggttcttttattattattattattattattattattattattattattattattattattattattattaattgttttgcctctgttgaatagaatgaacaattaccctttangaccttgattcaatgtagcatttggaaatnggcctccttccttatgtgtatatcttggtctctctacttttgttcggaatttctattaattgttttgtgaacttagtataattnttggtgagcactgtactgcatttccactgtaaaaaatagaatcattatatatttctaaatcaggttatacatacatctgat

SEQ ID NO: 215310 - DNA, 435 bp, Glycine max
  unsure (1)..(435): unsure at all n locations
agctttcatcaagaagtactgcgtccccattatggcgcagggcgaaacaccacaacagcctgtgaattgccagcagcgggcaacagacgcaccgccatcacctctacagttcacctcagctcatccacaaaaaggttagagcgttgcttacgacccatggccgaccaataggcgaccaagtccaaagccaaaggtaagcaaagtactaggtccgtgaccgacaagccatcaagcgtccagctcaagacgttaaagaagcgctactaggaggcaacctagtaccttttaaatctctgcttgttatttgatcacttttgtttctcaagtcataataggacacacctagttgctcatgatcctnaggaattaaataaaacaagcacaagctcggaagggagtcatacctcacacaatatatatatgtatgattaggta

SEQ ID NO: 215311 - DNA, 355 bp, Glycine max
gggagcacgaaattgaaggaagaacaagagagagaagttgaactctgagttatgtctcacaagactctcattcatcatagttacaacaagtgttacacatgcttctatttatatactacgcagcttccttgagaagctctcttgagataacttccttgagaagcttctttgagaaaactttcttgagaagcttctttgagaaaacttccttgagaagcttctttgagaaaacttccttgagaagctagagcttagttacacatacccctctcataactaagctcacctccttgagaagcttccataagaagattcctaaagaagctagagcttagctacacacacctctctaata

SEQ ID NO: 215312 - DNA, 400 bp, Glycine max
  unsure (1)..(400): unsure at all n locations
agcttacttggaatggaagaacaagaacattttggactgtttaatgancgaaactcgacttagcccattaatcaagtgttaggcccattaagtttgtgctattactccaaagaaaattctagagaagtgtaaaattaagtcgaagtaatatttaattggaagaagtgtgtataactaagtatttgggagaagtgtgtagaactctcccttaatgtgcgcggaatctttcttgatgtatctagaactctcccttgaagcctacaaaagggggataggttgtcattttgtaagtatccaacgaagccaaaacaaaaacatttttcaagtaataaaaactagccttctattaaatattctctcctcctccatttctcttaaatacttcctataacctttccct

SEQ ID NO: 215313 - DNA, 410 bp, Glycine max
  unsure (1)..(410): unsure at all n locations
cgcctaagcaatggcgagaaagacgatgccgccttattcacttcgagacatgctgtgactcactgcccatgccgccattcatactggcgggacatgctgactagganagatgagcatctcgccagtccttcctgcgagacacgagcccatgccgccattggtactggcgggacatgccaacgtggacagtcccgccattggctcctacgagacacgttcacgccatgcttaagtctgaagatgccactgttgatgatgagactgaagcattgtgatgcaggctatggctcaaaggctagggctggtggtcacatgcattatatgcagaggctgaagctattttttcgtgatgcaggctanggctagaagtgtagttcacatgcattctgtgcaagtatcacatgcataca

SEQ ID NO: 215314 - DNA, 418 bp, Glycine max
  unsure (1)..(418): unsure at all n locations
cgcttggatccacgttgattaatcttttccttcacccactttattatacctgttggaggatgtttctccgagtgagttcatcaaaggcacggacgagagcgtaaccgccgccgaaaacgccgacggtggctccggcattgtagagcagatcttctgctgcgacggggacaacaaagcgcggcaacctttgatccaagcggacagctggcacgtcgggagaacacaaaaaccggacagtgtggtttgttgttggggtggtggtggatggcggaagaacaccacggtggacggcggagaaaacaagtaggggagaggataaaagcgtcatgattcataacaaaacacacccgaagaggagngccaaaaacaaaaactttccgggatgatgggagaaaccctctttatggatatatatttc

SEQ ID NO: 215315 - DNA, 414 bp, Glycine max
tcatggaaagagggggagatgtattatttgtttcttttactatcaaaaataacacgggtcacgagaggaagctcaatataaaagtataaagacagaaaaaacatgaaatgaatatgggttctctctttaatttctccacctcttgacttctctggattttgacctggacatcaaagtccttacacctagtcgcacttctacatgcgcctgaagacattatgaatttatgataagttcacacatttcattattcttaaaagccacacatataggaattcttaattccttttggctattactaaacaatctctaattacatttaaagatcaatcttataaatacaaatgaatcatgtctttctccacatccaatcatggttgtgacatgagagaagagaattaagaaaaaatattc

SEQ ID NO: 215316 - DNA, 442 bp, Glycine max
  unsure (1)..(442): unsure at all n locations
cacctgaggctgccgcttaaacaagatctactagagctgtttttttgtattttctaaaaaaggnaagaaccaaacactcttataaataaaaaaagatcttctttcagtcgataagataataaaagatcttttgggctgcatccaaatgggctcgtaatcattcttcactagtctcccattgcttttaagtttgtaaactgacatttgaaaaagatttatgcatccaacttagttgtaaacatatctttaaaacctttttgaataataattttataaaaaaagcatataattctaaagtcaaaatctctttatatgagtaagtaaaagcataaacgttgacaccaggttgatccacattatgctttttttttgtggaccttttgtgaagaaggggctacaccattctctaatttagatgaacacataaaaatattgggttttt

SEQ ID NO: 215317 - DNA, 260 bp, Glycine max
ctgatgatgaaaaagatcgggctatgtattatttaagaagatcggtagtcgatattggatgtagatacacaactattgaagagctttgtttatcattttactttgcctgcactaaattagaatactatgtgtttctaaaacaacgtgttataggttgaaagatcaacttaattaagtactttctaaataggtctaccttgcgaggacggctgatgaaatgggctttacaattaagtgcataatcgcttaattatattcca

SEQ ID NO: 215318 - DNA, 408 bp, Glycine max
agcgtgaagcctagagggtttctatgtgatttattcaatttactcacagcagctaaggggggcgcagtatttattgaactactactcaagatggtagactgcttgaaaggcttttgtaattctccaggtaaagttggcaagacacaatttgcaagtctgcggtacactgggcagataaactctcccttgaaaaaaagaatgaacattcaaaaaggaagagagtgaaaagatttaaaggtgcttcacacaaggaaaaaaaataaattataaaagacataatcctgatctgggtcaacaatatgtcctgcttcaaaaacaattcttctgacagatctgtccagtcacaatacaataattatcactccacagcaagaaaacttgaccattactcatttcatataaatcatt

SEQ ID NO: 215319 - DNA, 287 bp, Glycine max
  unsure (1)..(287): unsure at all n locations
ttaagacatcaagcgatatgtcctcacttattgtgacgactttaggattactggggaattcaacacactatcccttcatatgacggaatcatatcaccattataatacacaagagtggacatacttttcaagtttaagtaatatggtgaatatatacaaaagtatcgagttgcatctaacctttattgctatatatattatatgatgaagtgtnttcttgtgacttataccaacagttcatatcacactgacaatatacacaatttatattgtgtcttaattaatta

SEQ ID NO: 215320 - DNA, 413 bp, Glycine max
  unsure (1)..(413): unsure at all n locations
agctttaggaattntntattatttactgtgtggcctggagacaggaaaaattatgctgacattcattgagctccttattggggttgtggttattgtgggtgtagctcgctacatcattaaagggtattccgccactggtgtgttatttgtcggtggcctgttattgctgattatcagtgccattatggggcacaaagtgttaccgtccagccaggcttcaacaggctacagcgccacggatatcgttgaatacgttaaaatattactaatgagccgcggcggcgacctcggcatgatgattatgatgctgtgtggatttgccgcttacatgacccatatcggcgcgaatgatatggtggtcaagctggcgtcaaaaccattgcagtatattaactccccttacctgctgatga

SEQ ID NO: 215321 - DNA, 476 bp, Glycine max
  unsure (1)..(476): unsure at all n locations
gccgccagcaccacatcttctgaagtcggtgcgagatatatcttcgtcggggaggcacaaatggcagcagctgcgccacgactgataccaacgtttaccatcaccggaaatagggttgccatcagcaaaacacccagaccggttgcggaagagacggccagagacatcagacaggcgacaaaataggcggcaatcatcagcaggtaaggggagttaatatactgcaatggttttgacgccagcttgaccaccatatcattcgcgccgatatgggtcatgtaagcggcaaatccacacagcatcataatcatcatgccgaggtcgccgccgcggctcattagtaatattttaacgtattcaacgatatccgtggcgctgtagcctgttgaagcctggctggacgggaacactttgtgcctcataatggcactctaatcagcaataacaagccaccgacanataacacaccagtggcg

SEQ ID NO: 215322 - DNA, 411 bp, Glycine max
  unsure (1)..(411): unsure at all n locations
agctgtccgcatccgcacttgtaaggatcttattatcgccttccttaggtagnatcaatacaactctgacatgctcccgactggactcagttgcagaacatggttaaacgtgaaagcgagtcctttaaaaaatacgctcagcgttggagggacttggcagcacaagtagcccctcccatggtcgagagggaaatggttaccatgatggtagataccttgcctgtgttttacgatgagaaattagtgggctacatgccttctatgcttgcggacttggtcttcaccggagaaaggattgaggtgggcttgaagagggggaagtttgattacatttcccttaaggaaccgaatatcttgggaaaagaagatagaaggagattcccatacagtccttttacacctgttgggcca

SEQ ID NO: 215323 - DNA, 477 bp, Glycine max
  unsure (1)..(477): unsure at all n locations
atgattaagataaatgaaatgtctgatatataatatttcnttttctaaaatggcaaccattcataacaaatgaaatctttagtctatgtttattcaacaccaagaaagtaaaaatatacaaggaaaccagggataagagcatgaaaaggaggacacaagaattttaatatggcaaagataaagcaaaagaacaaattatgaaactgaatttctctcaaggtaaaggttatggcttcaaaagtagaatccttttgtagcatgtggctggaaatttagttattgactatgaaataagataaaatcaatcatctggattcaatgattctaccaacagaattattaactatacctccatgctgcttctgtgaaaccatntcccttntagcatgaactcgtgatccaataaatcactctttggatcatatntagctctgcgngccaatcacggatacaatcataactgtatagcatataata

SEQ ID NO: 215324 - DNA, 415 bp, Glycine max
  unsure (1)..(415): unsure at all n locations
agcacctgcggctgcagcttgatggttcttgagatagtggatnattttttacttgnggttatcaaattgatgttcttagaggatatccagtactcctgtgttataggaaaatatataatatagtattccaattgggacttgttattttctacaaaagtagttgagatctgctagtgctaatgatatattcactttgtatagaattttgttatctatgaattggccagaagttcttaccttaaaactgtcaatggaatttggctcattggttatttatatgttcttttgtgccactgcagtctgttatacttgattaccttgcccccagactatttgtcagatgatttggtagttgtctcaccagatgttggttgtgttgccaaaacaacggcttttgctaaaaaattatctgaag

SEQ ID NO: 215325 - DNA, 373 bp, Glycine max
  unsure (1)..(373): unsure at all n locations
tatcaccaaagggcatgttgatgtagcctatctttattttatgcntaaaaaactaattcttgcggtacaaatctcgaaactgtgagatggaacgaagaactnttttttcacctaataacacatgcatgtctaagacatcaatgaaatccaataacaaattgtcacaatgaaaccacatcaaaatcctagccaccaaagtcattgccatgaacactcangttatcattaatcccacctttataccctccatgcacacttgttatcatcatggttatcgaaatcacgatctaattcttacacatatatataatatatctttaagtgtttgngaggtctattaaagtatacgttaatgctaaacataccatatttg

SEQ ID NO: 215326 - DNA, 344 bp, Glycine max
  unsure (1)..(344): unsure at all n locations
agctttacttgaaattaagttatttaatttatgagttcttgatntaatcccaactttctctccccctttggcatcaacaaaaagccaaagtgcgtatagacacataaaatcgtacattcatccataatcatccaagcaaggaagacaataatgcgtacataaactaagaaagtatgataataattcattcataaactataacgccagataatttagagagtcattcaagataactaaattaaaacaactaaattagaaagtaacatactaataagtgtttcaaaacatagccaaatacacggctagaaatcaaaatactaataataatagtaatgtctaaacta

SEQ ID NO: 215327 - DNA, 348 bp, Glycine max
  unsure (1)..(348): unsure at all n locations
gagantaaagccttcattgtgtattgtcttcatgcgattcatgtttctctcaatataaatattatctcgcaactcccaacggtgaggatgtgtgtaactgaattgtaaaccatgtaccaaaatctcacgacaatccaacggttaatgagttcaggatcatagttttactatgacaggttctgggtctctgcgggaaaatagaaagctataatgcgaaggaaatttctctcaggctcgacattattttgaaatttacaacggtgagaatggtagaaatagagttgcgtacatggtgctgaagcatcatgatgatccaacagataacgagtctgagatcatcgctttact

SEQ ID NO: 215328 - DNA, 420 bp, Glycine max
agcttatattttacgcacgggtgcgtcttttcaagggggaaaatgcgcggagtcgccaccaacgtttatttgtggaaaacgtcagaaaaaccgaaggaaactggtcatgaagaatatttcagattcgggagatgtatttacgtttgaggaaggtattaacacctctcacgtttgtcccaaaggacaacagccttaaatttggattgtgtgacatattgtacctaaacttttatttcttttttattttagaggtcgacaaaagcggggctcttgctcctacgtacccttcatcgaagaggaaataagacctacgtagttctttcaaaagggcgaatcaagcgattcttttttacttggaaggtggcccttttaaggtgttggaccttataatgatcccattttacttggtgagaaaactga

SEQ ID NO: 215329 - DNA, 202 bp, Glycine max
catcttgagtgccgttcatgtgctcaagcggaatccatggggataagcaggttgcctactatggcacctacctctgctttaggatgccatacatcatatctctatcttcgtgagacagtcttaggtgcgctcgatgggagggaatgaatctggtgctaggagtctatatcttcacctgcttggaccatcatgttttaggagc

SEQ ID NO: 215330 - DNA, 426 bp, Glycine max
  unsure (1)..(426): unsure at all n locations
agctntaaagtttgaattcatatttctaatttctgttaaaaatagtttcaacttctggtaatcgattacataccttatgtaatcgattacaggcttttgaattcaaattcgaaatttgtaaaaactgtttcacaaatcaatttggccactggtaattgattacattctctggtaatcgattaccagagagtaaatattatattttgaaatcttaaaaagctttttggaaaatattctttggccaaacctatgcgtcatcaattaagaaactcttccttagattctaggaacaaagntcatcaattatcttgaatttttggattcttgacttggatcaaacgtgagaagcgcttttctttggcataatcaaaacttcatatcatatttgcttctacattcctcagcatcatcaacatcaggttcaaa

SEQ ID NO: 215331 - DNA, 270 bp, Glycine max
  unsure (1)..(270): unsure at all n locations
catcatttanaagtccttcgcgacgttnnttttgcctatactgtgcttttgtaggtaataatccttctgagttttacctacactaatcaatcgtaggcacaagttttttgaagttttacctacacaacatagttgtaggtagaagtctttttttagttttattgaatctatctacaccaaataatggttggtacaagtgtttgagttntacctacattagtcagttgtaggttaaagtatttttgagaattacctacactaattcatgat

SEQ ID NO: 215332 - DNA, 441 bp, Glycine max
gctggagcgctatccgcagactcaacagttttcagttgggaaagaaatcttactatgtacatgaatcttacacccagtgggttattgataggaccaagagctttggcctaccctaccgcttacctagatacctatcgtccaccatcccaccatcatccttgcctatcccctttgatactaaggaagagtttcatgaacaattaaccaaagaaaggcaagaaaaagaaacttggaagaggagatgccaggagctcgagcaagagaatgagactttgaaggggaagatagcccaacagagccgtgagctttttatccaaaaccacaggatggttgagaaggacgacttgcttcgtcggaaagacgctttgctccaccgagatgctagaaggaagaggaggtttatggatttgttctcccgtgcacattcagattccgaggatc

SEQ ID NO: 215333 - DNA, 423 bp, Glycine max
ctccttttcttaataatctactaataatagaaaatatgtttagtttgattagccgcctcttatattccatatacatatgtgaagcattgaaagttctctgaacttctatactatttttttgaagttaagatatacgaatgctgctgtggagtcaactctagcctgcaattaagtaccgatgaagtcagtcagagtgttcctaattagtagtaatactgtagtaattaacccattaaactaataattgagatgcttgatcattaatgcattcatatgagggacaaaaggtatatgcgaaatatataaagttctctaatagtaacaatagaggtatgtgctctggctactatatatgacttggatataatgctaccacatatattccaaaagactgaaatggtaagtgaagaccaatgaatcact

SEQ ID NO: 215334 - DNA, 423 bp, Glycine max
  unsure (1)..(423): unsure at all n locations
cttgggaggaacttgtataggattgtgtcttccctaatataangactggcttaataagaataatttaaataacaaaacccatggtaaaatattcttttttctatttttttctttctcatttctttctcttttcaccataactaggtttagaaggaaaatcctcactataaagtcctgaatggccagttcacaactctattcggagtcatttctttcttaccgctcataatctctaaactattttgctttttcgaaaggaagaatgtaccacccattactttaggtcgtcacgtgaaaacaaaagaatataatacagtcgataaactcttttacaaataaagttgctaatgctttcttttcaaataacaagattgatcataaatgcattcatcatttaaagctgtccaaaatatgggagtttta

SEQ ID NO: 215335 - DNA, 324 bp, Glycine max
  unsure (1)..(324): unsure at all n locations
caagaatgacttcatgttggttcacaaccttactggtatctatgcattaataggtaacacataggttttctactatgacatagtgcatagatcctaccaataattttcaagtactaattaattaaataattgacagttgaaactacactatcgatatacattgattagctttcacaacttgctaaacactataacactgaaacattcttcattntacaaaacagatactaataagaaataaaaagacggtgtggtgttggaagaaccaaaagggagcatactatactataactcattgcttaaagtatgaacaatcttaacctg

SEQ ID NO: 215336 - DNA, 360 bp, Glycine max
cttcttccatggcttactccctagaggatggcgcctcctttgacctctattactttgtcttctgctgcatctccatgatggaaaatcactattaaaggacctcattgatactcaaagatccaacctccatagaagccccgcaagcaagcttccaccatatacaaattattttctattacttttttttaatgccaagctttataaaaaggcattcatatcgcattagctggtacttattatatatattgttgcctcacttgaccaaattttatttattggtctccaaaccagtaaagtaaaatatatcttcccacgccatcgttgggttgtattcaatgctttatttgttcccacatatca

SEQ ID NO: 215337 - DNA, 357 bp, Glycine max
gcattgttaggctgaggtcatccacccactgccttcattcatgtgattatcaatgtatactcctgctgcactcacttcctgaccttgtggttcgtgattcttgacatcaagaaaaagtatatgcttgattacgatcagtatccttataatttaagtgtgaaagaactactatcttccattcatttccataaattatcatgaaattcatctctctctattccttttaacacatgttaaaatcaaaagataaagactaaaccagcctatacgatttaaaagctaaattcactacagattacccttacctttcattaagttatcatgtattagcatgagagtgacactatataaaacgat

SEQ ID NO: 215338 - DNA, 331 bp, Glycine max
  unsure (1)..(331): unsure at all n locations
agcttcaacctttggccatcatttctgccccttatcgcgaattgagggcatcttcggggtcgngaagtgcgtggctacgagtgggacttctaaaattcaggtttgggtggacttctttctctcttaaatttcgtgggtatggggttttgggagatatgatgggtagtcttgctagttttctgcttcatgataagtatttgtgaagaaacttgttgaaagcttgttgaaattgccatgtttggatgagttaaacataccccttctgctttagggtttttatgaggatgcttgggatgttcatgtactgaaattgcttattgaaaactgttac

SEQ ID NO: 215339 - DNA, 359 bp, Glycine max
  unsure (1)..(359): unsure at all n locations
ataacttatgaccattttaatttctcgagagcttccgctgttcaatntcgagcgtctcaatatgtgatgttcctgaatcggacctccgtgtgataacttatgaccatttgaatttctcgagagcttccgttgttcaatttcgagcatctcaataaatgatgtgcctgaatcggacattcgagtgaaaagttatgacaatttcaatttctcaagagcttccgtgcttcaatntcgagcgtctccatatgtgatgtgcttgaatcggacattcgagtggaaagttatgacaattttaacttctcgagagctttcatggttcaacttcgagcgcttcgatatgtgatattcctgaatccgac

SEQ ID NO: 215340 - DNA, 437 bp, Glycine max
  unsure (1)..(437): unsure at all n locations
agcttaccagaagcgccaatcagtggactttgttgttggcgtatttgtctgagctatcatgagtaaagatcgtttacccactcattaatacaactagcttattgctagaaaaatcgagtcatattcatagttctaatgctttcaatgttaatttccttattgtggtaatgcttcttctgatgatgagatggcttttgatctgtggatgaatcttctccaccccgaaaaggatcctgcagtgcaagattgaccaaagttgacccaaaaaagtcattcgtgtccattnttttacaaaggagtacacttttttgaatggaaatgaccttctaaggagactgcattccctactagcaatgtgttgattgatattttatccaaattctattgttaaggggtaaacttgcatttttttttattgtttttagcaaaatctatcg

SEQ ID NO: 215341 - DNA, 389 bp, Glycine max
  unsure (1)..(389): unsure at all n locations
atacatgtggactaagtggttgtctgttgatggtgcacaacaagtttttgcacattcacaaagcgcgcataaacccaccatcccctgttgcccacctncaactgagctcacgtacttccacgtaatccatatcttcgtttatcttaacaccgggtccccatcaatacttccaagctaatctgacatccaggtaatactacattcataccgcacaaactatcacagtcaataaaacacggtaaaggcagaaaactctgcccaaaacaccaaccaaaatcacagcttttctcacttaaagaccccagtaacaatttcttcgttcctcgttcgtaactggtggattgacttcaaaagtttactggaagtctctagtacataagcctacattt

SEQ ID NO: 215342 - DNA, 382 bp, Glycine max
gctgaccacctcaaaagactggaaagcggtttctaacgattcttctgcggcttccacataaggcatagaggatgggcagctcaccaagatgtcttcctcgcctgacacgatgaccaaatgcccttccactacgaaattcaacttttggtggattgtagagggcacaactccgactgagtggatccacgggcgccccaacagacagctgtagggggggttaatatccattatttggaaggtgacttgacaggtgtgagggcctatttgtactgggagatcgatctctcccctaacctctcgacgagtgtcgttgaaggcgtgaaccaccattgaactcggttttaagtgggaaacattgaaagggaatttctccaaagtgctc

SEQ ID NO: 215343 - DNA, 332 bp, Glycine max
agagcattataagaggaagaattttttctttatcttagaaactgttacaacaccgaccttattactttgctactctttccagcacaacaattttctttgatgatggtttaccccacgttatattcttttaaagttattttctttgctactgttactatacataaatgctaggttggagtaaaaccatcactactaaaataatagggtttaacatctcccttgttacatacggttatgataataactgatgttacataatacactgtgacatttttgtaaataaaaactgatgttacaacactattttaatagtctgtatttgaaaccaatgt

SEQ ID NO: 215344 - DNA, 419 bp, Glycine max
  unsure (1)..(419): unsure at all n locations
agcttgtcgctggagctgttctctaactatcctaactctttcagactggcgactcctaggctcttgaccttgacttgatagaacctctttntaagcgaaggcgcctgactcgattccatgttttactaaagtgaaacaaaacccagtgcgaatcaagactccgacatttatcatgggtggaatggatgaatgcatgaagaaatgcgtatggcacagatgcattntacgaatatgggagccagggagattgtccccttcttaggtacaacattcaggtagcatggcgctcgatgtatgcatttaagaaggcgacacggaccctccgtcggttcatgacaaagtgaggggatcaagatgcaacccgtgcatgatgcagatgcataaaaaggcacaacacggggatgttcatagtatgacaa

SEQ ID NO: 215345 - DNA, 326 bp, Glycine max
  unsure (1)..(326): unsure at all n locations
gtcgtatctagtcaaggtcttagagaccatacaagtttcctaacgatttctaattatgtgggccattaagtctatcatatgctgacaatagccgagaagcccatgaatctcttcgggggcggagtaagtgtctgccatcgccttggccttggctaacaatcggggaagttcttgactcccgttcaaggtaagagcaaactgatccatccacatggttgcctcttggtgtaaagagtcgatcacccttcctctagcctctttntccgcgtatacttgggcatactcgtccgcaatcctatgctcgtgggccgcggctagacctaact

SEQ ID NO: 215346 - DNA, 318 bp, Glycine max
  unsure (1)..(318): unsure at all n locations
agctagaactggtgtgtattgatgcnaatttactcagccgttaaacaagtaaaatatattatatctcgctgctaaacaagatgtatagtcttcacaaactaactcggttatgacagggagccagacctctcccttggatagcgactcccaccgcctttgcataagtcccactgagaaaagagcagcgtgggatggcataactatccaatactcgcaaaccgaatggagcactgcgtgaacagcttagaagcacatcctgcctaatcagaatccaactgggccacggatttgactggaacctgatcactatcttgacct

SEQ ID NO: 215347 - DNA, 380 bp, Glycine max
  unsure (1)..(380): unsure at all n locations
agcttatacaagcttcactgcgtgaagcttattgatacgagcttatggaaaatgcgtattttttaaagagctgatgtgaactttttgaagtggtttatgactttccttaaagcccttttaaacgtgaaaggagaagggaagggagggaaaggtcatgggttctaattccccacctacatctaacaaactaacattttcggataatttntttttccagaaagagttattagaaaagggaaaattaagctttttccgtaagttaaaattaacttatgcataatttaaaaccagcttttggagaacctatagtgagcgattttctatacaaagatataaggtgatttaagacttaggncaatttactttcataatttcttctt

SEQ ID NO: 215348 - DNA, 318 bp, Glycine max
  unsure (1)..(318): unsure at all n locations
attcatgtccactgagactgtcttcacccctganaaaatgaccccaaaaaattcaactttgtataacatatgatcttttacccttgattaactaagcataaaaaagcatatatatagtaactaacatgagaacgattattagatgttgagattntatacctgaaataccagatactgccctcatggcctttttcttggctctgtcgtcatggatttccaactttagcacaattttctgtcatacaaaaattatagaacttttaggatctatagttataatcatttctaagcatgagaattccaaaactaatgatcact

SEQ ID NO: 215349 - DNA, 297 bp, Glycine max
  unsure (1)..(297): unsure at all n locations
agcttgtatcacgattcactgtgacagnctatgtgtcattcacttagcaaatcaccaaatgtgccatgagagtacaaagcatatagatgtgaaactacacttcatcagagatgtgattgaatctgaaaaggtgaaggtggagaaagttctaacaaaagaaaacccggctgatatgttcataaagtccctctctagtgtcaagttcaagcactgcctggacttgataaattntgaaggtgtctaaagcagaatggtagaagagcagcccaaaaacacaaggtagacacttgctaattt

SEQ ID NO: 215350 - DNA, 346 bp, Glycine max
  unsure (1)..(346): unsure at all n locations
tctttcccttgtgttcgagtgatcatctatggttagatagaattcattagtcaaggcaagggtgtttggttntgtctttatcgggtacccaaattgtcgtcgagcgaggagtgggttgtagctaattccgccacgcatacccaaaagaggtacgttgggatattcaccacaactcacaataatctctccaacatcactagctgcttggtaccaaacaatgtcagatgggtcaagagtcatgattcggcgaggccaggaaagcttgtcatcattggtcttgaaggcacgggattgaagtaagtggaaggtaagccactgatagagcacagatgcacaacaagaaatg

SEQ ID NO: 215351 - DNA, 383 bp, Glycine max
  unsure (1)..(383): unsure at all n locations
ctgcaacttaattctgtattttgaatntnttttttttttttgaaactttgcaggtcaacttgtactccttattggatatggttgtcttttccaaggcttctttatctatctcaaacttaggtacaatgtccaactcttgcattggcaggttgaatttcatgtcattgaatcaacttcccttaatttcatacaacttgatattgtcctaactatactatccaattaaataaaaaataaaatgaagtataactaacctgtgtagctgttccaatttgaagaagtaagacttatttggcctaaccttgaaattttgaaattcatcgcttctaagtgtcaaagtttgtacctctaccacaggccattcaaataagttactactagtc

SEQ ID NO: 215352 - DNA, 216 bp, Glycine max
tattcatgttgctcagtggtttaatttgattgtcagatggcacttttacgttgatattcttggttttaggcataaatgttattacacacttgatactgatactctgcgggacattattattgcatagaatatgtctgaatgaataatataattattaattaattgggagctatgtgaatcgaggcttatcatgactcttatatcactttcatatta

SEQ ID NO: 215353 - DNA, 422 bp, Glycine max
agcttattgttttctctaaattaattaatcaaagatattatttgctggatttaaattggctcttccattgaaaacataatcacatgacatgatcctttttggctttatattattgaaagtaacagccacaccccttttgagatattcagtgtgtgtacacgtataagggcgagggattaatgcttcaattgttcaagttagaatgatgattgaattaaagctaataatataaaatgaaaacatgcttcggagatgaagaaaagaatgaataaattacacaagcagtctgccatgagttgtatgtattttggttaataatagtctggttaaaaaccatgcaattccaatggcaaactcttcaccgtgcacagatatgtcaaatatatatgaatataaagcatgtatcatgcatctacatcttg

SEQ ID NO: 215354 - DNA, 371 bp, Glycine max
aagaacaatgactattgtagagtctatacatgtttcctttaatgagtctaatgccattcttccaaggaaggattttttagatgatatttcggattccttagaagatacacatattcatggaaatgactctaaaaaaaaagatgaaggaagtaatgaggattctcaagataatggagttagaagaaataatgaacttccaagagaatggaaagcctcaagagatcaccccctcgacaacattattggtgatatatcaaaaggggtaacaactagacattctcttaaagatttatgcaataatatggcttttgtatctatgatcgaacctaaaaatataaaagaagtcatagtagatgataactggatcattg

SEQ ID NO: 215355 - DNA, 428 bp, Glycine max
  unsure (1)..(428): unsure at all n locations
agcttgtaattgaaaactaaagctctgagcttattcaaacgacnaataaatttgactcggatgtccgattgtgtcccgtaggatatcgagacgctcgtaattgaaaacggaagctctgagaaaaatcaaacgacaataacttttaactcggatgtccgattgagccttgtaatatatcgaaacgctcgaaattgaaaacgaaacctctaagaaaagaaaaacgacaataacttntgattcggatgtccgattgagtctcgtaatatatcgagacgctcgtaattgaaaacagaagctctgagtcccgtagaataacaagacgcttgtaattgaaagcggaaactttaccgaaaatctaacgacaattagttttaactcggacgtcctattgagcctatgtatatatcgagacgctctaaattgaaaac

SEQ ID NO: 215356 - DNA, 369 bp, Glycine max
  unsure (1)..(369): unsure at all n locations
taagctcangtttcaatacgagcgtctcgatatattacgggactctttcatatatccgaattgaaagttattgtcatttgactcttcatagagcttccgttttcaatttcgagcgtctccatatattaaagggctcaatcggacatccgagttaaaaattattgtcgtttgatttttgtcagagcttccgttttcaattacgagcgtctcgatatcctccgggacacaatcggatatccgagtcaaaagttattgtcgtttgaatgtgctcagagcttctgtattaaattacaagcgtctcgatatattacgggactcaatcggacatccgagttaaaagttattgtcgtctgactnttcttagacctt

SEQ ID NO: 215357 - DNA, 457 bp, Glycine max
ttcagtcacctgcggcatgcaagctgggttcgaggtacttacccgttgaagttcgaagaacgatgaagaacgaatgaagaacgtcgaagaacggttcaaacctttgcgagatccctcacggaaaacgttacggaaacgtttcggaagcgcttcggcttagattttcttcacggaaacaatttttccaagcaatttccaaagagagagaagtgcctaaggggctgggatccattccttcttgctttcttcccctatttatagcaaaataggggaggtggttgccgcccagctcgcccaggcgagctcagctcgcccaggcgagcagggttgcttcctccagaagcaaccgccttctggaggaatcttctggagggcccaaatgggcctgggtgctatttgcacccccctttttactaagtacaccccctctgctgtttttttggtgaatcttttttcg

SEQ ID NO: 215358 - DNA, 393 bp, Glycine max
  unsure (1)..(393): unsure at all n locations
actaagctcgtnggttaaagtctcacgattgtcacgtgctcatgcattatttgttagccgnggctatacgagacatcttgccaaacaaagtcaggttcacgataactcgcctgtgcattntcttccatgctatatgtagcaaagtgattgatccagtaatgtttgatgagttggaaaatgaggccgcaattatactgtgccagttggagatgtattttccccctgctttctttgacatcatgattcacttgattgtgcatctggtcagagacatcaaatgctgtggtcctgtttatctacggtggatgtacccggctgagcgatacatgaagatcttaaaagggtatacaaagaatctatatcgttcggaagcatctattgtngagaggtaca

SEQ ID NO: 215359 - DNA, 428 bp, Glycine max
  unsure (1)..(428): unsure at all n locations
tggatatgatcaccatgtgattcagctatctttcggtcccttcacctgatttgaagctctgtagtaaaatgtcaaggatagatccacgacttgccattgattcatctaccatggttaggataactgttctgtctggcaatttagcactccacagtacattatccaattcttcattttctgagtaatactgatagggaagtaatggtaaataaactgagcagaactcaaaatcattttgaaaaattactcaatatatgctctcatttaatatcccaacagtcaattttgaccagccttaaagtccattcaatttcatgtccttacattattaaaaaagggtgacttcaatataaactctttaataatgtaataacaaattacatgataatgtgaagaannaaaaaccatacacacccctataacaattt

SEQ ID NO: 215360 - DNA, 406 bp, Glycine max
  unsure (1)..(406): unsure at all n locations
caaatttaattcatatgacagacagcggcacacctagaaaggattgtaacagttcttcaatcaataaagataatttctgtctacaaatctgaaccagtttctatcattctatgtgttacaagttgttgattagtcttttggttactagntcaataagctttataaatagaacatgcacctcactggctggtatctttatcatttaaatcaattcaatgactaatttctataagtcttctcatgttttntgagctctatgattntcttctttatctcacacaagttgggatcacataaacctcctctcacaatatcgaatcttcaagcatatggataaattgaacaaggtacaagatcactgnatcttatggcttacacaaccactaacaatggtgaataatatatt

SEQ ID NO: 215361 - DNA, 388 bp, Glycine max
  unsure (1)..(388): unsure at all n locations
tgcacgcttgctaaccgatggaagctcctaatatctcccacactttttggggtgggccattcttggatggccttgattntctcagggtccacttaccccatttctaccaactacaaaccctaagaaaactatattatctacacaaaaagtacacttctttatatntgcatagagggtgtttttcctaaggactgaaaaaacttgcctgagatgtcctaagtgatcatctagactcctactgtacactaaaatataatcaaaataaacaactacaaatctacctatgaaatcccttaagacatgatgcataagcctcataaaggtgcttggtgcattaatgagccccaaaggcatcactagccattcatacaaaccaaacttggtcttg

SEQ ID NO: 215362 - DNA, 154 bp, Glycine max
  unsure (1)..(154): unsure at all n locations
acttaccttgaattaataccttntctagctccnttgatcctatgttcccctttctntgttttgaagctcattacaagccttaagtgaaaaaccatgatatcaccttacccttaaggaattttggagctttggaattgtttttggaataagtgtg

SEQ ID NO: 215363 - DNA, 411 bp, Glycine max
agcttcattatatgttgcatttcaagatcgcttcctcttatgggagaacggaatgcacttcttgcattgtatatctgtttaatagtcgcatagctattggcattgtgttccttcagagttagcagaatgcttcttggcttcaccatggacttcgtcatatcagcaataagtgttttttagatttagtcaatcgccccgcatatgaatgtccaactaatgacttggccaattcatgattatgcactccacaaatcaacttcaccatccagccttctcctccagccactggcttgcaacgaagcttgaagggacacccacatttcctagtcccagtgtctcttctgataaaaatctttttcctacacttatactcgccactcctttcacagcccaataaaacaaacgtacttc

SEQ ID NO: 215364 - DNA, 443 bp, Glycine max
  unsure (1)..(443): unsure at all n locations
cctgttcataatacccaattcttactatgaattataccatatttctaagnagaaaatgactcaggacagatcttttgattcaatgcatacactagaaagtaaatgaagaacaatcagatacctcagcaactaccattgctcgcaacttgttaccaagaagtgacagttcatctgcaaccagtgaaaatggatcatgttcattctgagaacagtacatgtatcataatggagaattaggtatagacaaacaattgaaaaacacatataaaggtcttcaatgaaatcttttatattataaagggtgtgtttgattgtgcttntttttttttaagttttaaaaataagttttcaaaaactaaattttagagagtagtagacgtgaaagtgtgcagaaacatgatctataatttttcaaaactattacgctagtcacaacacaaaag

SEQ ID NO: 215365 - DNA, 424 bp, Glycine max
  unsure (1)..(424): unsure at all n locations
agcttataagaacaaaatnttctaaatcatttccaaatatgcatgtcaattaggaagcatcaacaagaatcaagccaaggctattgtgcaagcaatcaatgggggcaaaacacaccaaaagattatgatgatggatggctcaaattctcacaaaggtacacttatcactttcaaattgagctttcaaaactatcatgacatgtagaggaaaaacaaggatttcaaatcacaaaatgtcaagagacttatattttcagaacaattacccattacttgaacatatcctataattcaaagaaaaacatgcaaatntaacacaacaaaactaacaaaattaaactaatttaacacaactatgaaaaccaaaaccaaagaaaactcccctcatacttaaacaacacattgtcctcaatgtagcacaatt

SEQ ID NO: 215366 - DNA, 385 bp, Glycine max
ctatggaacaacaacaaaatagaatggatgagatgctcatataatgtcaagaactccaaaatgaaaaccattattattattcttactactactactattactttttttccattttgaatcccacattcggtagtattacttttttttccattttgaatcccaaattcggttcactttaaaaaagtctattgatgtaatgtaaaaatgtttatgaaccaaaagtccaaaacataattgagagaacagtcaaatcttggttagaacaaatggagcaagagaagggactaaaaagacaacaaaacttacatgtttccgtgcacagaacacacgactagggccggaaatttctttggtttagcattagggtcatgacatacaagtgtac

SEQ ID NO: 215367 - DNA, 448 bp, Glycine max
  unsure (1)..(448): unsure at all n locations
cgacccgggatccttaagtcacctgcggcatcaagcttgtatttatcagtatatgtgaaaataagagaaactctagcntttgtaaatgcacagaaaagcactgcagttgcggaataactctaacgttctaatgaaagggagtgcgagatcaggagcggaatttttggcaaatcgatcttatcagggtctgaacatgtccagtgagaacacctccccagaaccatatctcattggacggaggggaagggcatctgggtacgaggatgagaagaacaaacaatgaatttttgaggcataaatgtggtttttgctttagattgtagtatgaaaatgagagttagtaagaaggtcagagattgacaagggaaagaagagtaatactccttggtgagctgctcgttcattttggctggtgacttttgtctggtacgagtttcttataacccgc

SEQ ID NO: 215368 - DNA, 335 bp, Glycine max
tgctacattttaagatatgttgcacggcattttgagattctatagaatattgaactgtccctgttaataaattctgactcttgttcttgagaatgcagaagtagggaaacttcgctactcttctccagaatccaagagaatgcgaacttttgcagctgctccaagtgatggctgctgttatgcagaacaatggataatgcaaacttctgctgctacaaatgcctcaactagcactgtggctactaagaatgaaccatcatgtcctggtaagctcatattcacaactattgatctcaaaggatcagtggcatctatgctgagcaaactggctggac

SEQ ID NO: 215369 - DNA, 335 bp, Glycine max
agcttcgcacttgataatgtagaacacatgaacagcgctaggcaatgacattcatggtgctccgaacaaaggtggagtatggaggattgtcttgagggtccgcacttatgcaatcatgaaactcagctccaaactcgaaagtggaggacacatgaacagccctaaacaagaacattcatgtggctccggaacaggatgagaatggaggattgccttgagggtcctctcttatgcaatcatggaacacagctccagactcgaaaatggagaaacacatgaatgacaacgcaattcatccatgtggctccggaaaaggatcaggatggaaggttgcc

SEQ ID NO: 215370 - DNA, 270 bp, Glycine max
aacaccttatgagtttcaaaacatatagctggcttgtcaaacatttgataaggtaggaaaaccttctttatttgcagcactaagataccaacattgcatctagttctggctttcctgctatggaggctatgttaaactcactattttttcattcaaggcttctcactgtacatttttccagagtggtcggaaccaagatggaagttagtccaagttagaagtgagtaccactctggttgtatactctctaatatactactctaacttctg

SEQ ID NO: 215371 - DNA, 323 bp, Glycine max
tgacccgcgacaatgttatctattgtagagtttgattgatgttgaatgggtgtgttgtgcggcaccgtgatagaaatttgaagtaggatatcgtgagtggtgtatgccagtgaaccacacgtggtggttacataggttatacatgtgacttaatgtttgtgtttgtggcttctgagaagatggagtattcactcccttgttaccattttacggatctaattccacatgtgaggccgactctctagcttttgattgaggagatgacttgtaaagggagcaccatgattcacatcatgttgatcatttctatgggtacctctact

SEQ ID NO: 215372 - DNA, 383 bp, Glycine max
tcagaaaattagagtctatctattgtatcttagtgagagtgattctcctaagttcttgagtaattcaagaacaccctggctatatcaaaggacttttcacaacatttgtgtgttgccctcgccggaaagagtgattctttccttcctttcatcttcaaccttgttctttcaaaccacaattccagaaaatccacttctgcctagaattatctcgtggccataactcccattgtacgcactcaaattaagtgattcttgagcctaaattgaatttcaaaacaagacctgttacctcgttttggaataacctcatctggagccatgtagcttgagttattgccatttctatatttctgtctcagccccacttaacctatgcttat

SEQ ID NO: 215373 - DNA, 390 bp, Glycine max
  unsure (1)..(390): unsure at all n locations
agctntgcttccacatcatattggtttaatctatgatgtgccatcattttcttctattttctaaaccctttttgcaccattttaaatactgattagtcttaattgtcaaatttattaggcagttttattatttgggcccattcagctaatttgatgtttttaatctaatttcaggaattaatgaagcattgggcttgaatccagaattgagcttggacttgaagagggcagactattttattctacaaaattagatcttatcttatctttatcttatctagatttgaatttctcatctagatattatttaatctagatcttatcttatcttatctagatttgaatttctcatctagatattatttaatctagatcttatcttatcttatc

SEQ ID NO: 215374 - DNA, 417 bp, Glycine max
gctagacatgatacacgtcaaggtttggttttgttcaaggataaaaaggatgccccacattatttccatgacacaaatgccaaaatgatgatttggaaattttatgcaaaactggtcatgcatgcacctatgtggacactcaaatgtcaaatttttatggtcatgtgatgctagggctcacgattcatttcctctattttaatcaacccaatgtttccaaaatatgttcttttatcaatatgtacattcatccgagtccatttcgggcgttcggcgaaaacttcacaacattcacccttcaagtgtatacacattttttcaaaaactagttatgatcagtgaaattttttcaaagaaaagttggaagtcatctcttttaaaagcatgttggttgttcacttgacaactaatttcctt

SEQ ID NO: 215375 - DNA, 421 bp, Glycine max
  unsure (1)..(421): unsure at all n locations
agcttggaatcaaagagaaacttagaatggctctagagtagagtaaanaaactgaaaaaaagactcaacaaaactctagctntggaacttgtcttcacactaattttcaattgaaatttccaattatagaataaattttgagccaaaacaacaagcacacttccctttcaccttttttttttttggatactgattttcctgccaacttgtgtgatttttcgtattttttccttttatccaaatcacttgtttcctttnttataacttttttccagatgtctagaaaattaagtaaaaatttcagctcaaaattcgaagtaaacaattctcagtaatatttacaagtttgtatgtccaagctgccagcaccagcgatttgtttctttaagcatggtatattgattgccttgggcttactttc

SEQ ID NO: 215376 - DNA, 284 bp, Glycine max
  unsure (1)..(284): unsure at all n locations
agttagtggaaactcggtggattgccaagaactgggcgtagacttgtggtagagatgaactagtataaacttttgtgtgctnttctntactatttatctntgtgttcattgacaacagttcannatttttattagataatacatctacgtttgatctatcaagaaaaatggttttgatcatcatntgacaaagttntcttaatctattnttagctatattngcatcagacgataaatgagttntcagtcttaganaaagtcttaaatttctaanaacacaattc

SEQ ID NO: 215377 - DNA, 328 bp, Glycine max
  unsure (1)..(328): unsure at all n locations
cattgcaccatatgaacatgatattttagagnttttagttagatattgtcttgtatgtagtgtgagttgaagtatcaaaatagacatacatgtttctaacatagaaatgtaattagtcgcctgatatgaaacagaaagttttctttaaacacatgaattgtaatatatttattctttatttaaaaactacctaaaataaatctatttttggatcaactggttatggacttaccataacataaatgttattaagaactaaaataaaaacatgcaaagcatagattacatatccatggctcgatgcaactcaccaataatanacatgata

SEQ ID NO: 215378 - DNA, 356 bp, Glycine max
agcttgtaactgaagtggtcgaagaagttcgtcattgctctcttaactaagagtggaacacatttggaagcctttaacatccaaggccattctgacttaagttcctggaccacccacctaaatggtcttggtatggaaaccttttttaaaaggtttattccacccagtctcgaccgataatctataaccatctagttggtttgaaattggggttaatttaacctttattttttagacaactaaaggagaggaataaaaactcaaaaaataagagacagtctatgtttaaaagagaaaatatgagagagtcttagttgtttttttttttttttataaacattgttctctcaggaaga

SEQ ID NO: 215379 - DNA, 422 bp, Glycine max
agctttattatgccctctcccctcggcggtgatctcttcttcggcgaaggcgagatagttgttggcagtgatattattgaccagccctccgaaaccttctaccgagatatcttgggccatgtgggcctcgttcaaaaccttcactagcagagcccgatgaggctcggagctcatgagtaactccaacagcgagactctggccggagttttgttgagctgttcgataaccttgaattcgctctgctgaattatacggaggaactcgctggcttcctctaacgacacctcctttttaccatcctttttctccggaaggccttttgtcggaatatctttattcgaagcgtggggtgcttcgccatcttgttcctcccccacttttccttttcccttgacatccgccggatggactggtaggtctg

SEQ ID NO: 215380 - DNA, 396 bp, Glycine max
  unsure (1)..(396): unsure at all n locations
ttgcaacggaaatgttaggaagaattcagagtaacccatgaatggaacattggaaagctgcaaagaagtttctaagatacttacaagaaacaaaagatcacatgcttacaaataagaggtctttgtcctcttaagggtatngggnattcagacttagactgctggatatgagtaaatccactcttggctatgtattttctttttagccgagacattnntnattcnctcccccnnnngtgcacactatggaacaaattgtaacgtttgagctacancangctattggtacggaacttatttcaggctggaatgttgacgattgtangcgtaaaatgattgaaaactcatacatattttcttaaaacaaagactctaaaggctacaatgcattgagac

SEQ ID NO: 215381 - DNA, 466 bp, Glycine max
agaccagctgcatgcatgcaagcttgaaggcgatgctttgatggagtataataaagagagaagggggggagcacgaaatgaaggaataaaataaggagagaagcggcactttgaagtgtaactcataagactatcattcatcaaagttacaacaagtgttacacatgcttctatttatagactaggtagcttccttgagaagctttcttgagaaaacttccttgagaagtttctttgagaaaacttccttgagaagctagagcttagctacacacacctctctaatagctaagctcacctccttgagatgagaagctagagcttagctacacaccccctataatagctaagctcacccccatgacaaaatacatgaaaatacaaaaaaaatccctactacaaagactactctaaatgcctcgaaatacaaggctaaaaccctatactactagaatgaccaaaatac

SEQ ID NO: 215382 - DNA, 452 bp, Glycine max
  unsure (1)..(452): unsure at all n locations
ntataagcgcgggtttgggagacgaaggtcaagtggtctctatatactaagatgatgttccgagtacattggatttggtacgaccatgccctcctgatttccagctgggaaattggcgagtggaggaacgccccggcatttacgcaacgagcataatgtaaacctttacggttttaaaagctctatagttgggcctatgctttagagctttgcttttgttaaggctttgnngtcttttggtttttgagatttataatacaagggatctttcttcatctgttcctacgttctacctattctcatccatttgcatgtttacttctttatttctgaaacggcagatccgatgacgagtcccccgaaggtactaatacctgggacccgtctatcaactttcaacaagaaatgaatcanacgggagatgaaggaaacgaggatgtgggacttcccct

SEQ ID NO: 215383 - DNA, 396 bp, Glycine max
  unsure (1)..(396): unsure at all n locations
agcttccttgaaaagctagagcttatctacacacatcnctctataactaagctcaccttctggagaagattcctagagaagctagagcttagctatacatacccctctaataattaagctcacctccttgagatgagaagctagagcttagctacacacaccccctataatagctaagctcaaccccatgccaaaatacatgaaaatacaaaacaagtgcctactacaaagactacttaaaatgccctgaaatacaaggctaaaaccctatactactagaatggccgaaatacaaggcccaaaataaaaggaaaaacctattctaatatttacaaagaagagtggacccaaccttggcccatgggctataaatttaccctcaagttcatgagaacc

SEQ ID NO: 215384 - DNA, 398 bp, Glycine max
  unsure (1)..(398): unsure at all n locations
tgnatgaggaagtgtggaagggtgagacttcctacttttattcgttgaccacagagtggtacctggagatatgtcgcgggggtcgggagaccttggggacgtcaggtggggtgctattgcccaaaaccaagcttgaccaatcccgacccaacccgggcatagtcagtcagtgagaacctgtgatgtacctaaacaggcgagctcctggcagtcaactgataaaagaacaagaccacaaagcagggaggcttgtgtggtggctagccagcaatgagtcttgagtgagattgggatatggcctctggtaatcgattaccaagggtaggtaatcgattacaaggcttaaaagtgaagataggaagctaagatggcctctggtaatcgattaccaagggagt

SEQ ID NO: 215385 - DNA, 336 bp, Glycine max
tggccggcataatctggtgaattggcggcaattcattccagttggcctccaatttccccattcctatacagcctaggatctaacgtggtaaattctctcggattggatcctatattcgaaattcgtggattggatcaaatcttaatgttctctgtctgtattcggttttcgatcagctgctggacagaggaacactggacccaaatcacctttttttcacgcatttacgcgatggtgagggtttaagctcctggcttttttattaatgaaactgttttatgcaagctcgggtctggtttgctcccgaggttattgttaaggcccgaacttgatgta

SEQ ID NO: 215386 - DNA, 441 bp, Glycine max
  unsure (1)..(441): unsure at all n locations
tgcttccattatcaacatgacacaagcgcgtcctttatctatatcaccccatgttaacaacttaccactagcactattgtacctgaaacggtcaaacatgactttaacaatagcttccgtatgctcatgataccacacagacagcgagaaccttcactcgcgtgagtacncactttaaagaggatattcaaacttctctcttctgtgactatgtaaggaggaactcccanaantctccatgagcgtggagacgacagctctgagctccgtgagagataacctcccacaactagagacaattcagtatgccattccccacaggcaacacttgagatactaataccatctaaggatccaccaagttttagtggtatccactgacttttagttctgcctttaatcaataaatctgcacaacaaacaatatttcccccagtatat

SEQ ID NO: 215387 - DNA, 402 bp, Glycine max
agcttttaaccaatcccaacttatgattttctcataggaattatatgtatattaatgcagcaaatttaatgaagttgtacaaccccaattcatgagttccgatcgggtttgacaacacaattttacggctttcatcaattcacaatattctaaaactcatacccgatatacatgaatattcaaatacgatccatctaaaattcttagaatgtcacttatcttaaattatttatattaaaaataatcttcaaagaatataccatgatcattttataggaaaacaaagtgtttactcacctctggattgaagacccacaaaggtctaacattctacaacatattctatgtcacaaacaatttctcctacacgttacttttttactaattgatctcacctttccc

SEQ ID NO: 215388 - DNA, 434 bp, Glycine max
  unsure (1)..(434): unsure at all n locations
tagctacacatacctctctaatagctaagctcacctccttgagatgagaagctagagcttagctacacacccnctataatagctaagctcacccccatgacaaaaaacatgaaaataacaaaaaaaagtccttattacaaagacaactcaaaatgccccgaaatacaaggctaaaaccctatactactagaatggccaaaatacaaggcctaaacgaaggaataactattctaatatttacaaagataagcgggctcatacttagcccatgggctcaaaactaccctaaggctcatgagaaccctatggcctttccttggatctctagcccaatctacttggagtcttctagccaatgcccttgtgggataggattgcatcattccctccaccttggaaaggatttgacctcaaattccgagttcatcatactc

SEQ ID NO: 215389 - DNA, 288 bp, Glycine max
tttttttggggaggaaccctggaaaccaaaccgtttgaaggatttctaaattcaaaaactatgggaaatgctggagaaacacaaatgccaacatatataattgaatgaaaatgagagggggggtgagcaacggcaatttgcttgggtgaacggctattatgttagtgatcgttggccctttcaattgagagctgtatattcttatcgacaatgccacttgccccattttcaactgattgtccaagccttggaaaactgttttgtctcatgcacctgcttagggacctt

SEQ ID NO: 215390 - DNA, 385 bp, Glycine max
  unsure (1)..(385): unsure at all n locations
ntcttagtagacaattagagctcggactagagaccttntgtccatgctcatgacctgagtggtaccatccattgtggggtgaagcttagcaggctccctagtgggaggataaggtgccaccttcaggcttttagcgtagcactatcatgcttgcttttgatcagccttaacagtcacaacctctctcatcaaggtanggaacttcatttagatcaccgctagtaataatatactatgatgtttctgcatcaaacaataaagattgctcacataaaacctaatataagctctcagagcggcttgacgaaatatattagatcacataccttggctctactttctctgcaagtgagaaggacctctgagctaatggtcaggaaatcag

SEQ ID NO: 215391 - DNA, 413 bp, Glycine max
  unsure (1)..(413): unsure at all n locations
ctgcagcttgagaaaatcatacgacaagaacttttgaatcggtggtctgattgtgtcccanaggatatcgagatgctcgtaattgaaaacggaagttctaagaaaaatcatactacaataacttttaactcggatgtcctattgagccctgtaatatgtcgagacactcgaaattgaaaacggaagctttaataaaagtgaaacgacaataacttctgactcggatgtccgatatagtctcgtaatatatcgagacgctcgtaattgaatacagaagctcttagcaaattcaaacgacaataactttttacacggatgtccgattgagtctcataagatatcgagacgctcataattgaaaatggatgatctatctacaattcaacgacaataacctttaactacgatgtctg

SEQ ID NO: 215392 - DNA, 399 bp, Glycine max
  unsure (1)..(399): unsure at all n locations
tctggattcattacgagcgtctcgatatattacaggattcattctgacatccgagtaaaaagtaattgtcgtttgaatttgttcagagcttcagttttcaattacgagcgtctcgatatattacaggattcattcggacatccgagtaaaaagttattgtcgcttgaatttgcttaaagcttctgatgctaaaaatgagagtctttgacctctatggaaccaattaaagctttgaaagcttacaattaattgctcaggtatcgttcaatatgacatctgatatactacaggccaacggactncgataaaatgtatgtcgtgaattgctaagcttagtttcattctgcgttcattattcgaactcatcgaatcaataaagtatgcgttaaaatctgggct

SEQ ID NO: 215393 - DNA, 439 bp, Glycine max
  unsure (1)..(439): unsure at all n locations
gcttgtcatgaagtccacaaactgataatctcactgatcaatgatatataatgaccactcantaaataaactatttaatgttcgcttgaatgaccttgctcaatatgatgggaaaacacttcatcacacatcgagaataaccttctaaaatgatcaaacatataagatctcaacttaattcaaaattttagcaagtcaagtgcaaggggtaatgaaaaagtccagaaaactagagcatattctcagacgttctttaacttattttatttatgatgaatttgtggaattttataataaatcaagtatctcaccagggtagtcagctagattgaccaaatgatgccattgttgaattggacccaatcaaaaaccaaattttcaataaatccatatttgaaaaatgggtttcctaattttttctcctcgccctctctatcat

SEQ ID NO: 215394 - DNA, 379 bp, Glycine max
  unsure (1)..(379): unsure at all n locations
ngtatcatttcatcaagataattaagaacatatgttacttttatataatgaaanttcaaattgaatagaacaatcaaatataagataaaaactagtcaataaaagataaaatatgatgacaacgaatatattaaaagcaggtgagtcatattataaaaaataggagatcaaatgttaagacatttcacattatttatctcgcaacttatatatttattagatagctgactttaaatttaaattctatacatatatattaagaacatagtcttcctatcttagattattgtgcattatataacctcatgtatttgacaagcatatgtgaataaagatgataataactcccttatcacccacattatttttcaagattatt

SEQ ID NO: 215395 - DNA, 441 bp, Glycine max
agcttcattaatattttatttatgaccattattatgttttatgaacaaacttgtaaacccttggacatcttcatcacaagttttatgaaaaaacttgtaaatcctttctttacatgattccctcttcagggtatgaccccctctcatctaaggtgttggctctcttccggttgatggtttttctcatatcaagaatctttatttatggaccaatcataattttaaaaagaggaaacacatcctaaaatatattaaacaaattcataatattttataaatttaaatagtatcctaaaaaatttaagaaaatagcaaattcataattttgattgtttctttttttaatatttgataaaaaaaaaacgtgtctttgagttggacgtattcaataccaatttttgctcaccactcgttctatattattatgttataaaagcatgt

SEQ ID NO: 215396 - DNA, 417 bp, Glycine max
  unsure (1)..(417): unsure at all n locations
nnttcctttccttcaattcatttagtgcaacaacacattattctatgaaagaggaagggaacaaacacaatccctcctgggatttgtattatgcaagaatcaaattcagggtatctccaacaaattcaactgtgtgtacaaactgaactacatacattaaatccggtgggatcatgcttccggttggataatgttgcaacgcctatttttttaatttcttatctttagtagttatgaaatgagactctagtatatagcatgtttagcttagtttttttttctcttcaagcaattatatttaaataattattagaaatttgaaaatagtattctttaaatattttgaacacttaataccaccagcactagatcaatgacttctgatatcaccacacgttttgaaatcaatggttaaaa

SEQ ID NO: 215397 - DNA, 410 bp, Glycine max
  unsure (1)..(410): unsure at all n locations
agctntaactttcagagactaatgaaggcttatcacaacagncacgctaagcgcacttccaagaattcaaaacccgtaagagattggcacttattgcctcctagcccgctaagcccaacataaaaactcaagttacaaaatggatttggggcttatcgtaggacagcgcgcttagcactgctacaataaaaattttcccgagaagaagtggcacttagcgcatcatccacgctaagcccactggttaaaattcaattaccgcaaagatgtggggcttaacgtattgatgtgcacttagctgaactattcagccaacccatcaggggtctatgcacttagtgcgagcaagctcggcttatcgcttgaagactgagcgcttattgcaaggttagcacttaacagatagacaa

SEQ ID NO: 215398 - DNA, 176 bp, Glycine max
tgagatagggacccacacagggaccagtggctgccgctatggcgcacaacaagtctacacatccacaaattacgtataaacccatcatcccctgggggccacctccaactgagctcacgtactcccacgtagcccatatccacggttttctcaacaaccggtacccatcaatcctc

SEQ ID NO: 215399 - DNA, 409 bp, Glycine max
ccaaaaaccagctcatacaatccatctacaagtgaaggtttgattagtttcatgggatggcagataaattcaaaagtatttgccattaacatcaatgtgatctctccaaccttcatggatagacattaaatgattaaacaagcctcttcaacaaccgctgggctctcatacaattacgttggaaatagccaaagttctgtgagatatattttatcttcatccatcgaatccgagttaaagtaaagccacataaagctgaagaatcatacattgaggaaaaaaaggtgcatggaagaagcttattcttctatcaaactgacgcactatctaagtattaaattaccagcagcaatcgcagtacaagtagaaaaaaaaatatagtacacagtcgacaccaaaggaattaaaa

SEQ ID NO: 215400 - DNA, 403 bp, Glycine max
  unsure (1)..(403): unsure at all n locations
agcttctatataagctgaaccatcttatctataaacacaagttgagttttattcaaaaaattagagtttctctcttttatcttaatgagagtgattctcctaaattcttgagtgattcaagaacaccctggctgtatcaaaggactttcacaacctttgtgtgttgccctcgccggaaagagngattatttccttcctttcatcttctaccttggtctttcaaaccacaatttcagaaaatccacttctgcccagaattatctcgtggccataactcctgttttacgcactcaaattaagtgattcttgagcctaaattgaatttcaagacgagacctttcacctcgttttggaatcacctcatttggagccctataacttgagtttttgccatttctatatt

SEQ ID NO: 215401 - DNA, 388 bp, Glycine max
  unsure (1)..(388): unsure at all n locations
tatttgagaattttattntatggatgccatgtttagtcttgtgggaatcatgaggttttgggaaatgcgataaaataaaatcttggtggtggaatgaaagtgttcaaaacatggtaaaaacaaaagagtgttttaaagccttacattggggcaataatgttcgaaattggttaaggtatcaaaatgctataagtgagacaagaaaagtttaggaactctgtaggcttggttttgtcaattacaagatttagacatgaacagagattataagctgacaagaaacaagatttggatcagatgaactatggagaaggaagtctggcaaaccatgtatttaggctgtgggaaaatatagaagaaatatttggtttattagataatattcttt

SEQ ID NO: 215402 - DNA, 426 bp, Glycine max
agcttgcatctcataacttacaagtatttgttgccactcatagatgtcagcacatacactatctatatcccttctaaccaaaaagatcccgttcggatccccacccaattcctcaaacacaaccaataaatttccacttggcttcagccatgagtgaggaacatgatacctgaaattatcagccagtaattagtaaaatgtcaattgacaagaatttctaaccaacattaaacaaaaattgcagaacaattttgatatttctcaccatcgttgagaagcctcgccacagttacttccacatttcttctcattgtaagttccagcatagttacagtaaccacaagaaccggatgctttgtaagcaggccagtagcggcctaagctttgcccatttatccacacttgacctttgcccatgcttgccat

SEQ ID NO: 215403 - DNA, 420 bp, Glycine max
  unsure (1)..(420): unsure at all n locations
cttanaccaagatgtgcagcagaagaagacctctatattattaagacaatgctcaaaaaagaaatcacactataaactccaattaagatgctgctagtaacttattgcatttcaatggctatagcaagccaataagttgatgcacactgaaaacctacaaaagcaaattgtgctaatatgctccaacatagaagcaaagatcccttggggaagataatatagtcactgaatggatttcacccaactatcaccactctccttttcttcttcttgtgtaagttgaatcttggaaaaaagtccccatcactttcacctttagtgagattacaaacatgagagtcctcaagctgaactggaaccaaattatcaacttctcttgtgtatgcactactatattctatcacctgaattgcctctcta

SEQ ID NO: 215404 - DNA, 415 bp, Glycine max
agctttagtttatttcccacagaaattttttctccacagaaaagactcatccatcctttgtctcctttggagttgccttctgaccttccactttctctccaaaaagtacctctcgaactgcccttttctccaaacctacttacggacatttggcttttccgtctgctgcctgtttgtcttgcattgacttttttttcgggtgctcttgttggctgacctttctgatcctgatcattctctgttttccttttttccccgttacttttacattgtatctgagtttttgtttatgacttttccttaataggttggtctcctatccaggcatggttctttttggtttgcttttgatagccaaagtttgatttgcttcctactggctagaccctctgttttggaaattcgctccttttca

SEQ ID NO: 215405 - DNA, 396 bp, Glycine max
cgtaattgtaatctccatctaccttttcttaagttgttttagagcatcacagttcaaggcaaatttgtccaaaatttgtgggaaattattatgtgacaacaagtatggttagacaaatagcaacacacacaataatatcaaaaaacaacaagtaaaagctactaaaaaaagagaaatttcaagaataaaagctgagtgtgtattgttattgaagctaagtgaacaaattgtgtaaatattgaaaggcaagtaatagaactggaataaaagagaaaagagttgattaaggatgaatgctcttctagaatctaagttttgcattctagaaaaaccatgatttgtttgcagcccagcctcattacaagccacaaaaagtcctttggatttaaattgtgt

SEQ ID NO: 215406 - DNA, 437 bp, Glycine max
agcttcatgaagttatgtcagctaatggtcacactaaataggtatatttatctactttatctcatttaccaccctatgggaaatgatttttagtaggaagtttatttgcaataatagtatttattcctaatcatctctggtattttctcttatctgatgattggttgcaatttgcaaatttattcatactgcttttgtatcaaattaatttggcaggaaatagcacaactcagatagttttcatgaaatttctccaaaagattaaattgtaacttgttttcaccattttgattaataattatgctactgtagttgatgtttgttatttcatttctttatggggaagtttctctatctaaattttaaattaatctttcacctttttgtgttgttgagtgtatgtcaaaagctcgagttttttttttttttaaatgaat

SEQ ID NO: 215407 - DNA, 354 bp, Glycine max
  unsure (1)..(354): unsure at all n locations
gacctatgaaactcagcttntattgggttctggatggctactcgatgtattattatatagcagnagatcctgaagaccaagaaaaaatttcttttacatgccctttcggtgtctttgcttacagaaggatgtcatttgggttatgtaatgcccctgccaccttccagagatgtatgctagctatttttgctaatttggtcgaaaaatgcattgaggtgttcatggatgatttatcagtatctgacttctcattgaatcttgtttatccaatatggaattggtgctaaagcggtgtgtggaaactacttggtgttgaattgggagaaatgccatttaatggtccaaaaggggctt

SEQ ID NO: 215408 - DNA, 455 bp, Glycine max
  unsure (1)..(455): unsure at all n locations
aagtgacctgaggcatcaagctttgactctggcaattcttaaaaaactagtcacttaanaaagttataaactttgaaagaatcttcaaaaacaagtcacttgaagtattgtgacttttggaaatgtatttntttaaatcaatcactggtaatcgattatcattaaggtgtaatcgattacacatcaacatatgtgactcttcattttgaattttgaaaatcttaacgttttaaaacactggtaatcgattactaccttttggtaatcgattactagagagtaaaaatctttggtaatgattttgtgaaaacttcttgtgctactcaatgttttgaaaaactttttaatacttatcttgattgaatcttctcttgattcttgaatcttgatcttgataattctcgaatcttggatcttgaatcttgaatcttgaaacttgattcttgaatctttgc

SEQ ID NO: 215409 - DNA, 369 bp, Glycine max
  unsure (1)..(369): unsure at all n locations
ntataagtgcaggtctgggagacgaaggtcaagtggtctctatatacgaagatgatgttccgagtacattggatttggtacgaccatgccctcctgatttccagctgggaaattggcgagtggaggaacgccccggcatttacgcaacgagcataatggtaacctttacgggttttaaagctctatagttgggcctaaggctgttagttttctttttgaatctgaggggttgttttgattatttacaggatcttctatctgttctagtcttacccatttattcattgcatgtacttttttctgaacgcagatcatgacagtccccgaagactatactggaccgctatcactcagcagaaagatcaacga

SEQ ID NO: 215410 - DNA, 205 bp, Glycine max
  unsure (1)..(205): unsure at all n locations
agctagaactgctctgcaccgccgtattgtataggancatatcatttaacttcattcgtcgcctggtctacggtgaatatattcctttccatcatggtcattcgagagagataaaagccaatgtttaattctacgtctttcgccagttactattgttgcgggctgccttgttctaaagcccagtgttattggttgttctttaaaa

SEQ ID NO: 215411 - DNA, 399 bp, Glycine max
  unsure (1)..(399): unsure at all n locations
ntgccanaccactttctattcgcatgtgagaactacgtttccatcgncatgaagcgatgctgaggagtttatgtctgtgctgttaatattggaaacgtccgaggaccaaacatggttcatggctccgtcgaggactacgaggttgccgtcattggaaatagtgatggctcctccggtgccgatgatcggtctgtcgcggatagcgacccatataacttttgtttgtggaatgttgtgngtacccaaattccaactgtagcgggaagaggagttgtcggaactaagaaacccatccaaaagttgagctcttctgacaccaatgtgtaatgctctttgatcctgatcgtgacgccctgcgtgattctggtcttaaaactacctgcgaatgaaaacacataa

SEQ ID NO: 215412 - DNA, 151 bp, Glycine max
agccttttgaaaagacacatctcttcaaaccattttgaaaaggcacgaagacatatatatatgtgtgtggccgacttcaaaatgcaatgagagagattttccaagaaaacttcattgccaaatgctctctcaaaagaaactcttgggtaaa

SEQ ID NO: 215413 - DNA, 385 bp, Glycine max
tcttagtttcagatgatgcagatgggtttgtagctacctcatgcactcctctaacgactatggcatcatttctggcgctaaactgctgggagttggaggccatcttctcaattaaatttctggcttcagcaagagtcatgtctccaagggctccaccactggcagcatctatcatacttctcttcatattactgagtccttcataaaaatattaagaaaagctgttctgaatctgatggggggcaactggcacatagttcttaaattctccgactcatacggctcttacatgattgctaatacctgagatatcttctgatggtgggcctgaagcaggaaattttctaaaatacttttaagcatccactcggataacctgagcagg

SEQ ID NO: 215414 - DNA, 435 bp, Glycine max
agcttgtggattatggggtacccatcacatgtggtactaggtggcggtcgggcgatggtgcacaacaagtgttccacatccacaaagcgcgcataaacccaccatcccctgttgcccacctccaactgagctcacgtactcccacgtagcccatatcctcgtttctctcaacaccgggtccccatcaatcctcccaagctttcccaacatccaagtaatacaacattcaaacagcacaaattatctcagtcaagcaaaatagggcaaaggcagaaaaactctgcccaaaacaccaaccaaaatcacagcttttctcacttaaagaccccagtaacaattccttcgttccaattcgttaaccgttggatcgactcgaaaattctactggaagtctatagtacttaaccctacattgtgaccgttgggatctactag

SEQ ID NO: 215415 - DNA, 402 bp, Glycine max
tcaagaataatggcatcaacaaagtatttatttcctgattggaattctataaataggcatcccattcttaatggcgtgggtcaccattattggaaaacctgcatgcaaacttttataaaggcaatagatctgaatatctaggaagcaataaaaattgggccctacattcccactatgaaggcaggaaatacaacttttttaaaacctaggggaaaaaagagttgaagaacttgtaacatttaacaatttaaagccaaaatttattacatatgcttaggaatggatgagactttaggatcaaattgaaaaggcaaagatatggggaaccctaaagaatactgatgtacaccatgtaaagatctagataatcattgatatgaaataatattttaatgaatcaag

SEQ ID NO: 215416 - DNA, 443 bp, Glycine max
  unsure (1)..(443): unsure at all n locations
agctnggaggaatgttatgaatgaaaatgcttagcangatacaaacgtagaataagatgcaacaaggcttgaggccgaagcaaaagaagaagaagaacacagaagaacaaaaagggtaattagtaaaccacggtaacttgaggattatgcaaccaaatgacattgagctggcaatactcttctagaagcagaatctaggaattcctctatgccattagaggttgtctccatgagtagcacaatgtttattttcctccaaggcatataatgccaaattctgttagaatatgtatctagaatgtgcactggaatatctataaatatgaagatatgtaagtctaatggaggcaataaaaaacagtattatccgtaccttcttccctgctctggagatcctatgcctcgaatcctagattagcttggtagtctacaacaacaacata

SEQ ID NO: 215417 - DNA, 258 bp, Glycine max
  unsure (1)..(258): unsure at all n locations
tgtagaatggctggacatgatatatgatagggagacggtttggttggctgttcacggataaaggaaagttccacattatttccatgacacacgtgcaacaatgatgagncataagatttatgcacaactggtcatgcatgcacctacgtggacactcaatcattaagttttgcggtcatgtgacactagggcttacaattcattatttcgtattaagcctacccaatgtttgtaaggatatgtttttgatttaattta

SEQ ID NO: 215418 - DNA, 382 bp, Glycine max
  unsure (1)..(382): unsure at all n locations
ttaaataataataataataaataatataatctatatttttcgtcaaaaaaaaaatataatctttataatttatatgttgaattgaagaagaagaaaaaaacttctatgtagagatatcaagttaaaaacgacttttccagtatttaaaattgagaggggggaaaaagaaactatactatgatccattaattcaatgtgggtaaaattagacaaaaataaattttactttattattatattttagntatatgattgatttagttcttttaaatattgttaaacagagctatctttttatttattaaaatagttttgtataaacttcatgataaaaatgttaattttaattgtcatgtattatcaaggcaaaaattctcacttg

SEQ ID NO: 215419 - DNA, 447 bp, Glycine max
  unsure (1)..(447): unsure at all n locations
agcctacttctcttctttgagtgaatctattataatttaaaaaacatgaatgttagttacttagtttcaatctcagcttctaatgtttcataatttaaaaaacatgaatgttagttacttacatgctcaaaggtactccaattacgctcacatcccgatgagctacaagtcaaacttagaactctaatggcaatggattgcaaatgtggtgttttcccttcatacaatttccacccactcagctgtaaaatgcaattcataatcatatgcattagcatttcacagattattaattaataattcaaatntgtaagtgaattttcccacttaccaagagatatttcaatccttgctttcattgctttagtcataccagacctcactccagcccttttatacactatcaattgtgtgtgaactttaactacatagtcatcatcttcgcta

SEQ ID NO: 215420 - DNA, 354 bp, Glycine max
atggttttcttattattcgcagaagaaatactggacaaaattaaaatcccaacacaaggtttctataatggacattctgctggctttgttggaggttgctgcttcatataactcatccaccaatcttaaaactcctatgcaccaaatttctgatgaaaggtaagacaatactcactatctaattgtcttaattttggtctgttggaatttctttacaatcggaatgtaggactcttagggtcactaaactattcttggacaggccaccaataaatcttcttctccaggaattagctggtactggcatatatcttggacatcttaccaaaagcaacttatggttgtgaaacaaaa

SEQ ID NO: 215421 - DNA, 366 bp, Glycine max
ctaacaaactcaagctggtctgctgtaaagcagaggagactccggacaacgttacttctcctctgagaatgaagaaaattcttcctttcacattatgcaacatgccccacatgcagcatgaaatacgtgcttcttgctctcctatctcctcttcgcgttaagcaatggaacatgacattgtgaacagggcaccggaaaacaacattggcatctttggcagagaaaattttgcctagtctcataaagatatccacgaaagagatgatttaacgttgtgattccattttattactggcaggaagcccagctcaacgaaatcataatcagtgaatgtgatgaagattcaaaacatgttcaagaatgctt

SEQ ID NO: 215422 - DNA, 305 bp, Glycine max
tattgccactgattgaggttgttgcccttgtgaccaacaggtggggggctaataccctccccgtgcgtaaaaacaactcccgaacctttcacactttaagttcgtagaccccaccttttcggtttttccgaccttttccttcaaataaagttggtggcgactccatgcatttttctttcttggaagacacacccgtgagtctcgcgtcgccctcccgctgaacgctacgttgcgacagataggaagataagacccccaaatttgtgctctataagtgctctgagatctgaagttaattctcaaat

SEQ ID NO: 215423 - DNA, 426 bp, Glycine max
agcttgttggtgagaaagcaaataggctttggcttggtactttctccactgcacttgaggctgctcttgcttatgatgaagcagctaaggccatgtatggcccttgtgcccgtttgaattttcccgagccaatagactctaatggatcatcatcttctagtggaagtgataaaaaatcaccaagtggttcttcggagaatggtggtgatgttgcaatagctgaggagttggaggtgaaccatcgtcggtgtcatgaagacagaccaagattttctaaggttggtgtctttgaaaaagcaaaagagatgccggttctttctgtaggttgtgtggctgatgactcaatagaggaagtgaaggaaatcagtaatggctttgaacagtgtcaaacaagtgaagaatgtaaggcaacatctttgaatgatg

SEQ ID NO: 215424 - DNA, 393 bp, Glycine max
  unsure (1)..(393): unsure at all n locations
tagtatgtgtttgtgcccgcgtctgctttgatgcaacattaaagcaatatgggtgctgcttccatgttcctgcattgggacatgtaattntcaagatcaatgtgcttggagtcaaactcatccaacataaaaaataaaaaaaagacctataataaacattttagaaaaatatcttacttaaaatgtgatatctatataataggtattttttggaaggtaatagaactcttgagacattgcatcatcttgctttgtaaactaatacaatatgttttggtcacctaaaattgctttaattgtttacctgactgataaatatgtatcaaacacagctaagcgccgattaatacactatacctacaccaaccacacgacctttgggaattaaatttg

SEQ ID NO: 215425 - DNA, 327 bp, Glycine max
cccccatcaattaattaagtccttcttagataaatctctccatgaacacttacagaaaaagataaaaaggtcaaatgagacgaacttcttaccgaagcccaattcttcttctaaaagtatttatggcaaagatacttatcataacaatatctaaaaatgacacgggtctataattgcgtcgacagatggataaggcttctataattggagaacagcatcatatgtgcatgaccttcaagctcgagctaagaagctgaaggctgaggtagcaggacttgaagcatatttattagtggctgagaaatatcaaggatcaaataactcccc

SEQ ID NO: 215426 - DNA, 459 bp, Glycine max
ggatccttaagtcacctgcggcatgcaagcttaaaacggttcttaacattatctactatgaggggaactccaaaacgctgggacaaaatttgagctgcagtacagcatgctagtactttccaatttccatcacctttattgtccaaatttctttgatctctaagcacatcagctagctcacgctccatttccaagttccatgtgaagtaacttcttgtgtcctcactagacatctttctttttccacttgacttgttcttcacattgcttgattccatttctctagacaaaaaaaataaaaattctcacatatataattacatatatataaaggtgagacatgtcaaattagcattctacaaaagtataaaattaattacacataaaaagaaaacaaaatccagagttttatgatatacaaaaatccaaagtatcacacatacatgagtaatagtcaat

SEQ ID NO: 215427 - DNA, 445 bp, Glycine max
  unsure (1)..(445): unsure at all n locations
ctataaaactcagcttccttacaacacaganaagagaaagatgaaggattgtatatattcaagtggtggggatgtctcctccacctccagaacctcacaatcactcacaaactcatctcaagtactcatgaaggcctcctcttcaagctcagttctctgcaggtcttcacacaacaaaatctcgaacactctggaacttggacctttctttctctagaaaaccctagacatgcagaagcttcaaaaaagggcccacaactccattccaaaatctaatttcaggcttaaataggtggcttttttatgcttgcgcgcttagcgcaactctgatccgcttagcacgaattagtgaatatcggcttagcgcgcgctnttctcactcaacggatgtactgaagcggtgctcttagcgagatgacccttcgctcagcatacatgcatagct

SEQ ID NO: 215428 - DNA, 410 bp, Glycine max
  unsure (1)..(410): unsure at all n locations
agctagnggcatatgaagttggggtcaatgtttaacatgtcaaaatcactccaagcaaataagtcatcattgctttggagcacttgttccacttccttatccaatgtgtcttcaatttgtatgtcgattttggtacactgatgtaactatttaccaatttggagaggtcaaatctccccaataagagttgggctctgatcttaatgatttggtcagggatcgaggttcgcccatgatgcgctaacggtattgatactggtagttgatgctttgttgttcttctctctcaccatattgtaacttgtaacataacattcatgagcatccttcttatctgctttgacaatgccaatttctccatgagatgagggaaacttcattgccaagtgtggaatggaaactatggctcg

SEQ ID NO: 215429 - DNA, 394 bp, Glycine max
tgttggaagagtatatcaacctgctcggtgacatatattagatttgaggaattaaagcgttccctacttgttgacggattatctatggtgcgtaagtttattggtatgtcactttttttttttaaaataacatttaggtaaccactatctattgcttgttacatgtaggttaccataaacaagtggatgaatattaccgatatgagatatgtcattgcttcacgatacaacagatcgttggttctctttcacgacaacaaaacatgacattttttcctcttagaagtcaacaccatcagatccttcagtgcatcacgtaatatgcattggtcatgtgtatgagaatattttgtacaggtaattgcataattatgaagttagtataaatgctgac

SEQ ID NO: 215430 - DNA, 209 bp, Glycine max
taaaaaagggcactttcttaacaatctgtgccttaacattccccaaatgacgcctttttgtttgtgagtattacaattgttcaaggtcttcagctaaccttatcattgcttgtttatgaaactctatcaggacccttcatcttgactgggaagttgaaaacgatccactttacagtcttttgcttgccacaatcctaattattggcgac

SEQ ID NO: 215431 - DNA, 402 bp, Glycine max
  unsure (1)..(402): unsure at all n locations
taagaggttggaagaagcatagatattattgtttacaatctatggagatattgctngcaaaagatagattnctgatgaatgtatgaaaatgtatttagagtttcttataaacatattgctacgtccctgcttccctgatacccaaactcacccatgaaaataaatagggtgttatgcctatagcctttggtgagtaatctattactgtcaattaaaagagagaattgttggccgtttttaattatattgaatgatgcttttaacatttctattttaaggagggggaatgaagtaaagtattgctctgattaatcaaatatcataagtattgcatttgaattgggatttctgaatcgataaaagtctctctaactttgatacaatttataccgaataaacata

SEQ ID NO: 215432 - DNA, 376 bp, Glycine max
  unsure (1)..(376): unsure at all n locations
agcttgagcctgttgagcatgatccagttcataagtttntgccattctttaatgtgacatggaagaaggtgatctgatcacatttgagatggatccattgcttacaaggattgaatgtgcttccttaagagaaaatctgctggacgatgaaaatgaaatgaaaaatggaacatttcaagtctagaagaagaaaagaggatcaaagccttcacaaataagctgcatgaaaatggaaatgatgctgaaacttgtaatgttaaacccaggaagatggaatctgtggttcacaaaaatatagcccatggtggagctagatatgtttcctcttatgttcatgatgatagtgaggagaagattaaaggcaaaccattggata

SEQ ID NO: 215433 - DNA, 378 bp, Glycine max
  unsure (1)..(378): unsure at all n locations
nggagtggtgaaccacctaattacttatgattaaaggtgtttggatcactggcctttgcttatgttaaacaaggaaagctggatgcaagggctgtaaagtgtgtgttcattggctatcctgaaggagtaaaagggtacaagctgtggaaattggaacctggtgagacaagatgcatcattagcagggatgtaacctttgatgagagcacaatggcaatgctaagcaagaagcagaagtgataacacactcaagtaatgagaataccaattttgaggtggagcatctgtgatttcagatcatggcagtggagatactattgatcacactgatcaatgggaagttggagataatgaagagttgggtacttagcatgactt

SEQ ID NO: 215434 - DNA, 402 bp, Glycine max
actcagctgtatgattttttctttttaaggtcttatacattttcttttctggctataactgcctataagttactacttcaaatcattatattttttgaactaataacaactgatgtttttctcctcataatggtcaagcatttgcattttttggtttcctgatttatgaattgctttctagctaagttttatgtcttcatatggatatcccgaatgatcgatttgaggcacattatatcactcccgttttccatcatggcttaattaagggtgctccaatactctttttggagaaactctgataataaatttgattactgagcgtttctcttctctcgaacttataagataacataaagtgagcatttggcatggaaacaaagttttattatcattaaagat

SEQ ID NO: 215435 - DNA, 432 bp, Glycine max
  unsure (1)..(432): unsure at all n locations
agcttgagctttgagacactctctntatttccacaacatgcacaagtcaaaattaattatgaagatgaagaagaaaagaaacaaataataaaagtattatttaatgcaattagaattgatttgaacgaaaaaacaatagtaaatcaaaatagaactaaatgtattagaataaacgaaaaatagttcctcgatgatcatacaaatttattgatgaattgggtcaaccagatggaaaaaaaatctttataattgcattaagttttaacttgctgatagcttaaagtcttttaataaggttattatattttaaactttataattaagttcccagaaattaaaattgttatggtttttaggcaaaattatatttttggtttgcagtttatctccaccagtttcgaattagtctccattaattaattcacgaatgag

SEQ ID NO: 215436 - DNA, 406 bp, Glycine max
  unsure (1)..(406): unsure at all n locations
tcctcggggccattcctacgaaggcaaacatttggaaagttagttttagtgggacattactcttaaagcaaaaatggcatataacctcctcccataaatacaaacatcaatgtaaatttagagcaagcttatgcgcatatttccttacaaacgttctcttgcacaagacatttaaccgaaaaaaaaatgcacccatatacaatcaagggagcttcgttantagatatttacacgtacatccttgggataagtactacatcacacacatctcttggaaattcacatacatgcatactaaagcatttggggtaccaaaatgacactccatttacattttataccatcataccaattatgataatttgactatacacaaaggcacattatgctttttcagtttgtgcta

SEQ ID NO: 215437 - DNA, 445 bp, Glycine max
gtcacctgaggcatgcaagcttcatgcataaggtaggatcgaatgactcattatttgatcttcaaaagtccattcttttccatctgatggacaggattcctttcgaccttccacatactatctatatcaacatcctatgcaacatgaggactcttgaaggaatggacgacatactataccgccctaggcaacaaacttctctgggattaccaagtcttccatgtaatcaaaagaatggatgaggactccaaaaattccattatcaacaaagaaaccttcattgtaaaacagcaccactttagtgtgttatcaaactcaaagcaatgaaagtggacattaggaggaacaagccaatttctctagtggacgaggaagacattcaaaagaaaagacaaaggaaactcacccaaacaactactgatgaatgaaagacacttcaaacatt

SEQ ID NO: 215438 - DNA, 347 bp, Glycine max
  unsure (1)..(347): unsure at all n locations
tgcctcanagaggtccaggaaggacaaggcggccgaaggaactatttccgctccggagtacgacagtcaccgctttatgagcgctgtacaccagcagcgcttcgaagccatcaatggatggtcgtttctccgggagcgacgcgtccagctcanggacgacgagtatactgattttcaggaggaaatagggcaccggcggtgggcaccactggttactcctatggccaagtttgatccagaaaatagtcccttgagttttatgccaatgcttggccaacagaggagggcgtgcggacatgagatcctgtgttaggggtcagtggatcccgttcgatgccgacgctatc

SEQ ID NO: 215439 - DNA, 365 bp, Glycine max
aataacttttacaaatttagatccgattaatccactccatttatgatccttaaataattacgagtcccactaaacctacataattttcgattggattagacaaccaatttaatcaaatccgactcgtgaattccactaaaatctgctaatagtgttatgcatttaatatattttaaaacgggcgatgaaaaattaaagactgctttacatattgattatttaatacaaaagtctacaactcattactgagaggatatgattggttaagaacaatgattatgttcaacttgagcaccaaatcaaataatttcttaaaagatttagtgtcaatctgttaagaatataaaatacatgcaagggataaa

SEQ ID NO: 215440 - DNA, 92 bp, Glycine max
ctgagataatccaattcttaatatatatacacaggcggttgcgtggccctccaaagatctaaaactctcataatattaagagatgtcgcata

SEQ ID NO: 215441 - DNA, 381 bp, Glycine max
  unsure (1)..(381): unsure at all n locations
nttcgtcctacagaatgcgacaaggttatacggtattatctctcaggtagttccgcccgtcagcgtgactcaaaagtcagtatgacagatcttgtgagcgcggaagataacgtaaatctccacgtgtcaacgggcttgtcagccgcgattgacgaatggcgcagaagacgacgttagtatctgcgggctcatcaagcctattcagagggaacagaaaacggttaggttatacagacgtacctccaagggagatntcgctcctaacgtgactcacaagtcagtatacagatcctgtgagcgcggaagatgacgtaaatctccgcatgtcaacgggcttgtcggccacgattgacgataggcgcaaaaacgacgttagtctct

SEQ ID NO: 215442 - DNA, 260 bp, Glycine max
ttttttccaagaatcgacaaacaactctatgtgaaactaatctatgataaaaaaaaaaattagatgttttcattatagtacctggtcaggaatccagaatccaggaatgccaaaagaatgaaggagatcagaaccacagagaagcatgaccttaaaggattctacactaatcaatacaaagcaaattattgtattgttacaacattgtaaaaaacatgtatagaaagaaatgaaaatctagcacggcctttttatttaat

SEQ ID NO: 215443 - DNA, 427 bp, Glycine max
gcttgggccattatatagctaatggctaattctcttgtataatctatgatgccagccactccaaaatcacatttctagaagaaaaccacatgccaagataatgaaggcgccaaaatagatgcccctcaaagttctgtcacctttgtttatcaaaccaaagtagcagaattattactaaggataaccatttcatggtggcaaggagactaccgatcattacctttcatgaacgccaagatgattcataaatgaaaacggtctctatgtaatatcgatttggatcttcacagtcttggggtaaaaaaggtctcacatcatttgaaataacgggtgcaagagtagacatttatttgggatattcgacgtgcaaaattctctgccacgggtccacagccttactcacgctattatgttgccttggtttaca

SEQ ID NO: 215444 - DNA, 435 bp, Glycine max
  unsure (1)..(435): unsure at all n locations
agctntacattcacaccttgttgattctctgtttctctgttcttttaatggttctatgattttcaacgagcttctaccttcacgatggcaaaaaaaatcacgcctcctcataattccatttcgtttgatgaatctaccttttcgaacagagaacccatgctgatatgcatacctcttataaaatgcaaatgcttcttcctcgctaagaaaaatttgaccaacaaaaggaacaatatttgtctcattataagtttcatctctatcaacttcttctgcaaattcatttatctcaatattctgactagaagacacaatattttctttctcataagtttcaatttcctcaacttctaatacatcatttgccacaatatcatgatcaaaatgttcactaactgttcctgaataaccattctctaaagaaatatctttaat

SEQ ID NO: 215445 - DNA, 431 bp, Glycine max
  unsure (1)..(431): unsure at all n locations
gacacaagaaactaagcttgacgcacatcgntcgcgtgtatgatatccactccattatgttcgaagcagaggagagctttaaccctataacgcaacgtggcggacaaaagtgggcagtaaacttgaatgatcgtcattgtcaatgcggaaggtattctgcgcttcactatccatgttcacacattattgcagcttgtggttacgtgagcatgaactactaccaatatatatacgctgtttatacaatagagcacaattttattaagtcttacctctcgcacaatggtgtgcctcttgggaatgatagcggcattcctccttctgatgacgcatggacacttattcctgacccaactacaatttgtgcgaaaagtccggccaaatccacaaggattataaatgagaaggattgtgtcgaacctactgagcac

SEQ ID NO: 215446 - DNA, 437 bp, Glycine max
  unsure (1)..(437): unsure at all n locations
ngcttaggaagagtaataataatataaaaacccttaaccataagcaagttagtcaacatctaatttagcattgtctaacatcttttttatgaaagaccaattgtcttttacacgaaacatcataaactacacataaacagagcatacatgcatgtttcttacgaaacatcattccctaaaggaaaattaataatcattttattaagagaccaaattttttttcaagaaaacactcacatctcgaggatattattatacatggcaacgtatttgatatatcaaagacagtaaaaaaaacattccaaacttagttcatttagtaatcagaaaatggtgtaaaaaaatttttctgaaaataaagacataaatttcatatagttctcatagcatatgacaaccctctttgacctaataaccttctaataataggttatcag

SEQ ID NO: 215447 - DNA, 236 bp, Glycine max
acccaaagcaagtctctcaggatctcgaactcttcacacacacgacaatattgaacatggcatatagccctacatgaacaagtatcagcaccctatctaggcctcatatatgactgcgagaaaggaatcccgatgaaaccttgattgcatcaaccactgtgtatagacttgggacaacgggaacctttcgaggggacaacattaatatgtccccccattttatttaatcaataaaa

SEQ ID NO: 215448 - DNA, 431 bp, Glycine max
  unsure (1)..(431): unsure at all n locations
agctngnnaaagaaacagagctcatatactatgatgcagacactgcatgtgcaggactataatgtgtttctagccaatacatgaccttttatatataaggatataaatatcaagtccttgggaaaaatatcaatttgtggagttaaaattcacaccaagcacataatgttcctactacatgcattttaagctaggctttatcaaaaaataaagaaagcgatataattctggcatatgatcatatattcatatggatgttgcaaaaattatagcctatatctcttgtggattatgatatggatcatcccaatctcataaggggatttggcaaaagcaattatgaacaaaatggccttgaggaggccaccacgcgctccactagatattttggtaaaagagataactaaaatcccactcgggagaaggaaaag

SEQ ID NO: 215449 - DNA, 330 bp, Glycine max
  unsure (1)..(330): unsure at all n locations
ntagattggacctaaaatgacaacatgagagttatatatattaaataatcggcccgcntacgctttatacatactttgaaatatatagtctcccacacgcctcacgcaatttatntgatcgataacccgatatgaatatatttgtatcattcaagccgaccggcagcatgatctagtgctggtctttaattcagtatactaattctatttcacaatcattcataggcggattattataaaatatagaatgaatgtttaaaaacacaatctacatcaagtttgactaaaaactgccgaaagaaactacacacaatatgtttataaaaaaaa

SEQ ID NO: 215450 - DNA, 311 bp, Glycine max
tcctaaaccttaccttattcaactggcgataatccacacacaacctcatggttccatctttcttcttcactagcaacactggggctctccacggaaacacactaggcctaacaaatttgttatccaacaaatcctctaactgtttcttaagctcacctaactttatatgagacatcctataaggagctatggatatgggtccaacaccaggtactaagtctatggaaaactttatctctctttcaagtggaagatcggatatatcctcaggaaacacttcaggaaactctctgacaacagggaggtcacac

SEQ ID NO: 215451 - DNA, 398 bp, Glycine max
  unsure (1)..(398): unsure at all n locations
gcttgtcaaaagaaagcangtcaaaactctttttcaagtttaaatgttatttctactttcaaaccccttgaactacttcacattgatttatttgatccctctagaaatatgagtttgggtgggaattactatgtcttagttatagtggatgattactcaaggttcacatggacatttgtttttgaaaaccagaagagaaacctttgatgcttttcaaacttcccatttccctcatcccatgaaactgcattctttttgccttaaaagacatcgggtgaattcaaaatgagtctttgaagctttgtgaaaaatggattcacccattttcttcctagacacctacagatgggtgtgtgagagaaaataatccttgaaaagtcaagaccctttaatgaaca

SEQ ID NO: 215452 - DNA, 183 bp, Glycine max
agcttcttatccaaggatcatcctgttgtattaagctccttctaccaaaacttatgcggtaaaggctggcaaaaaagtcttatctatgataataactttacccaacttgaacaggatacatgtatccatacaaacaatctaaatgtatttgatcaaatcttcccacacgcatgagtttacgct

SEQ ID NO: 215453 - DNA, 454 bp, Glycine max
  unsure (1)..(454): unsure at all n locations
ngtgctccaatcattcatgaacctatttaactaaatttcgtcaattntgtaagtnttatattgtaggcaacatcaattatcagttaatatataatttgaatagctactaaacaaaattaacttacatggtccacaactatagtatggatatgttcaaacatttgtcacctaaaattatcttggttacatttgcgtgtgtgatgaaagaaccctatttgttttatgaatcccacattcctccaaggcgtatttgatacttacatgactctcatatacatggaaaagtctttaaccaattctcccaatggatcaactgtaggcactgaagtgtccattcctgcagatgtaacccttttctgcatacacattcgtaagtcctacatgtttaatgaaatttcaattgcgataactttcaagagaaatgtcgttgcaattaatattgataacgaaaata

SEQ ID NO: 215454 - DNA, 390 bp, Glycine max
  unsure (1)..(390): unsure at all n locations
cggcatgcaagctnnggaggatcggaacttacacaagttctgctttgtcgacgcacaattccttcagaagaaattgtcagtcaaaatcaatgacaaaatagcctgtatattacatcaacaacatatagataaaggtcaatgtgggtatcaatcaatacaaattctagaaaaatgagaatagataatgctagagtcttcacgacgtcaagctacgattactgtctgtgatcctaacattaaaaacaaaacctattaccagatgtcaaagcaatacatgcattataaaatctttcatatcttgaaggcttcaactaccaaactctataacaggtaattatagaataaaaaatttcatctgaggaaccgactgttatatcttgtatacctctc

SEQ ID NO: 215455 - DNA, 379 bp, Glycine max
atcgttactgcccccggcttgtctagccatagccacttgttctattatctaggatgatagcaacacctgcgcctatggtgccagacattcatgccagaaatcacctgtcagaaagactttgatgcaagacttatatctgatcctaaccctgtacaacataccagcaaccatgatttgaataaatttttgaaaactaatatgtaaatactagagaaattttccacttaggtcaccaaacaaatacataagtaactcgattcatatcttaaagtccacacttatttttgaataaaaaactgaggcggtctagataatttatagctaaagaaggcaaacaaaatatttagtcaaactaacggattaactgttggaccccttt

SEQ ID NO: 215456 - DNA, 433 bp, Glycine max
  unsure (1)..(433): unsure at all n locations
agctctctccccaattttctataaatagggggagatttgaantanaaaagggttcaaccccttatgcacttctctctttctcgaaatagctgaggaaaattagtttcgtgaagaaaatccaagtcgaggcgcttccgtaacgtttccgtgagtaattacgcgaagattctagaccatttttcaagattcatcgttcgttcttcattttcttcaggcttcaacgggtaagtacctcaaaccaagcttttcaattcattctatgtacccgtggtggtccacattttgtttcatgtattttttattctcgctttcatttactttttatacccccttttgacgtgcttaagccatttatttaagtcattgatgtgccatcattttcttttatgttctaaaccctttttgcaccattttatttattgatgggtcttaa

SEQ ID NO: 215457 - DNA, 476 bp, Glycine max
  unsure (1)..(476): unsure at all n locations
ccttacaaactcagcttttatccaggcacattcttggtggcgaagctccttcttccttggcttattccctagaggaaggagcctcccctctccttttctcctttgcctttcgctgcatctccatggtgtttaatcaccattgaaggacctcattaaagctcatagatctagcctccatagaagctccacaagcaagcttccatgaaggccctcatccaacaactcctttacttgaggaataaactcaagcccttgtgtgtggcatatgctagcaagatgtctttttacaaaagagaaaatgtggaggtgtctaagaggggaagtttctttaatgtttgtctttattgtaaaatgagtttccttcttagctaacctcttggaggagaaacttacctccttatacttctctttaaccactaatggatatccttcttcttgagggtagatttcttcactagattcttacncttttgctt

SEQ ID NO: 215458 - DNA, 437 bp, Glycine max
  unsure (1)..(437): unsure at all n locations
tccttaagtcacctgaggcatgcaagcttcctcggggccatttcctgcgaaggcaatttttcagaaagttagttntaccaagaaatgctactcttaaaacaaaaatggcatacaacctcctccaataaacacaaacatcaatgtaaatttagagcaaactcatgcagatacttccttatgaacattcactcgcacaagatattcttctacctaaaaaaaatgcacccatgcacaatcaaggcaccttcgttacctagattatttatatgtacttccaaggtgtatttgctacctacatcacatgcacttccttggctaaatttacatacatgcattctcaaagcattgggggtaccaaaaattgcacacgtgcacattctggtatttctaatacttatgcatatacaaactttgggatgaattatgactatctacac

SEQ ID NO: 215459 - DNA, 451 bp, Glycine max
tggttcgaggtacttacccgttgtagatcgaagaacgatgattatcgaatgaagaacgtcgaagaacggttgaaatctttgcgaaattcctcacggaaaacgttacggaaacgtttctgaagcgcctcggcttagattttcttcacggaaacaatttttccaagcaaattcgaacgagagagaagtgcctaaagggctgaaccccttccttcttgccttcctcccctatttatagcaaaataaagggtaggtgtgtttgccgcccaagctcgcccagagcgagctcagctcgcccaggcgaggagggttgcttcctccagaagcaaccgccttctggaggaatattccggagggcccaagtgggcctgggtgctatttgcaccctcatttttactaagtacacccccctctgctggttttggtgattcttttttcgtaaagtacggaaact

SEQ ID NO: 215460 - DNA, 438 bp, Glycine max
gatcttaagtcacctgcggcatgcaagcttgctgctcgagcaataaaatgtgttttccttggatattccaagttacaaaaaggttaccgatgttactctcctgttcacaatcattattatctctttgcagatgtaactttttttgaagaaaaaccatactttgctccctccatggttgagtccaatactcttcaagaagtttttcctattccatatcttggttcatcaccttctttgcaggaatcagagtcaaatttagattctaccataaatattcctaacaatcttccacttgaacagattcaaagatcacccatcgtatatcgacgtcgtcctcaaattgctgatgtagaacttgaaggtaatgaaagactagttgaatcatgtcctactccagcagacaacccgaccatggacctatctgaagagaatcttgac

SEQ ID NO: 215461 - DNA, 447 bp, Glycine max
  unsure (1)..(447): unsure at all n locations
ccctgatgatcttataaatacatcctattaatgaaatatgccttgtttccgatatgtcttgggggtcccaaaatttcttaatgaatttgaaattaacaccgtccggaccagggcttttgtcgcttccacagtcccaaatagcctccctcacctcctcctcctgaaatctccctaccaacatgtcattttgctgctggntaattgactgaaatcggataccgtcaagagttgagctgctaggctctggttcatgaaaatctctgttggaagaaaactctaactgcctctttcacctcctaggctcatccacccatgcaccttcaatcatgatgccttttaggagattatgtctgcgggatgcattcatcatgaggtgaanataccttgagttgcagtcaccttctnttagccatctggatcgagcttttgccttaacaggagtgatga

SEQ ID NO: 215462 - DNA, 372 bp, Glycine max
  unsure (1)..(372): unsure at all n locations
cctgcggctgcaagcntttataaaaagatacntattttngaacccttctccatggctatggctaaggatggagcctctctccctttctcctttgttttcgctgcatctcatggtggaaaatcaccattaaggacctcattgaagctaaagatccacctcctagaaggccacaagcagcttcatcaggggtaataaagccaagagcttcaagaggtgctcttaaacctcttaatttttttcttaccttctcttccattttgttcttattttcccatgatccctcacagtttgtctaatgtttaacatgattttaagttccaccataaactgtataaagtaatttatttcttggtcaaattttgtcttgtctga

SEQ ID NO: 215463 - DNA, 402 bp, Glycine max
  unsure (1)..(402): unsure at all n locations
tcctcggagccattcctgcgaaggcaaacatttgtaaatttattnttagtgggacattactcttaaagcaaaaatggcatataacctcctcccataaatacaaacatcaatgtaaatttagagcaagcttatgcgcctatttccttacaaacgttctcttgcacaagacatttaaccgaaaaaatgcacccatatacaatcaagagcagcttcgtttaccatagtatttacacgtaccttcaaggcgtatttggtacttacatcacacacatctccttggcaaactcacatacatgcatactcaagcattttggggcaccaaaaattgcacatgtgcacatcttggcatttctaatacctacatacgcaaacttcatgatgaatcttgactatctacacaat

SEQ ID NO: 215464 - DNA, 413 bp, Glycine max
tcacagtccatgatggaccacccacctaatcaataatttttataatgcataactcattatatagcttctgcatgttaattattaagctgaaattaacgtatatatatagctagttagtttgttactgtgacttacggcaaatgatgcatcacgtgctgctactgctacaatgtcagcgcatgacacaaccccgggacatactttctccaccttaaatatcagatggtcgatgatgatatgtacggttaggggggaacattctgaagtgactctttcctctcgatagggagctatcatcaacaatatgatgatacaccctgcatgcttgacatatatatggtaattaaaggataatcaagtaagacatgctcatgcatgctcaaaaagaattataataacacattgacctgaca

SEQ ID NO: 215465 - DNA, 403 bp, Glycine max
  unsure (1)..(403): unsure at all n locations
agctntnngccaaaggatcttttgatcttttacatganatcagagcttcaactctgaactgtagtcaattcttgtgcaattatgttcttgctcttggttgtgttttttggatcctatggattcttgtttttcttcaaaagtgatatttactaaaggaaaagaattatggagcaacattgatgggagggatccaacaccaaatgacatggagcaattatctaagtggaaaattgaagatgccctagtcatgagctgaataataatttgagaacacacaactacctatggactgaatactgacattattgttgttggtgtccctgcagagtctctctttgctatcaaaaaagtccatgcaaccaacaaaagaaaccaattctttatgaaattgcaatttgaattt

SEQ ID NO: 215466 - DNA, 423 bp, Glycine max
  unsure (1)..(423): unsure at all n locations
cggaacataaaactaagctttacattcttccagttcaccttcttacaagatttttctattgctttcttccttgaagcatgcgcaaaccatgggtattgggtgatgaaacattaatcacctaaaatttgatattataaacattaaacagaatagattaccaaacatttgtcttacaaattagtagtaagctgcacagatgcttgattaaaaaaaattggaatccctatgtcagttgtnttttgccatacatttttcactatttctataaccagggaatttggcaatggaaggtgacaaacacccttgaaagaaacacatcttgttgaacatcaaggacaacctaaaaacataatccttcaaattggatgatcaatcatactactcacatcatggtctggtgaaaggcttgngtgggaaaattgg

SEQ ID NO: 215467 - DNA, 425 bp, Glycine max
  unsure (1)..(425): unsure at all n locations
agcttntgagacaaatatagagaactnttatctggttaattaaaaacatgagtactaaaggttgcttccctgtaagttatattttcacaccattgattttgggtctcaaatataatgctgctgaaaaaggcaattcatgacactttattgtgcctgccattaagctattggtgtcacacgtaactgagaaatggctatccaaaccacatattaactgttatatcaaattaattgtgaacagatagttgattggtttatctcatggttcaccccaaaccaaatgagtgtagtaaatcattgtgtattcttaataaagatggcatcttccattttggtatcttcatcttcctatttaattggggctgttgaccacaaatggatctggaatgctatgcgtcatcattggtgcaagcaggatgcaaggt

SEQ ID NO: 215468 - DNA, 428 bp, Glycine max
  unsure (1)..(428): unsure at all n locations
taagcttgcacttattgtggaaaaactaatcatactgtggagacatgctttttcaagcatggatttcctgctggatatataagtcgtggtaaaggaggttcttcaaatttcaaatcttctactagcttggttgaagcatattctgatgcagcttcacaacatggtaccttggaggatagttccaaccgagaccagttttgtttgtccaaagatcagtacaatgccatcatagcccttcttcagccaaccaaggactcttctacttatgttaatcacattcaacatttagtggttaatcagccaggtattggctcttctctttggattcttgatagnggggccacaaaccacatatgtcctgataaatcttcttttcatttcttaaaaaatcaaacctattctgttcgactcctacaatagtttgttct

SEQ ID NO: 215469 - DNA, 368 bp, Glycine max
  unsure (1)..(368): unsure at all n locations
ngcacttcttcgctttcctctagaacttcagcttcttttccacttaggccttttagctttgggagccaagttatccattgcgtcctagactttaagcacttgtgatagccgacgatgatgccattgctacttcccctaagctccttatctttcctttccactgtattccatgctttatggactctctgaagtatcttcgcattggcttcattgaaacctcacacgacgaaagcgcaatggatctcctccgacagtgcacctctcatagggtagcctagttgtcttatatcagcatgggattataattaatacaacctctcattcccatcaaggggatgtttgggaatccttcacacgagcataacact

SEQ ID NO: 215470 - DNA, 354 bp, Glycine max
agcttgcatgaattaatagcaacaaattcagagtaattagtgaagaggaaaaactgaacagaatttaacaataataatagaacctcaaagagaactgtgcgtgatcctcaagagaaagcaacactagatgcttagccttccattaatcaatagagaatgaaattatagattgaagaacggagatttattgctaaaatgaaaagtcaaaactggaattgcaaaacgaaaaagtgtctaagaaaagcctaaaactaaaaaatgaaaacaagagagagagagagagaagagagagaacagaatgagagagagagagagagagagccttaactagaaccttggtgctgtatatagttt

SEQ ID NO: 215471 - DNA, 419 bp, Glycine max
  unsure (1)..(419): unsure at all n locations
tcaaggtcaatggacaccaactgaaaccattcctcacaaatccctccttagtggatgtagtggtggaggagacctccttacttcaccctacttctttctcaccatgactcagggagttttctttcttctgtctccttctttacttttattgcacttgtccaaatttaattgattgctttgattgttcttgatcttatgattgtgctacatnattttcttgggttgtttaagtgtgagggggtgggggggacaagattgctctttaattttgttggtattctagtttaattttattaggttttctagtttaagtttgttaggttcaaggttaattatgttattatgggtttatgtttgtgtacaacattgcatgttcctctttgaattttgggctatgtacaggtaatgggtaattgttt

SEQ ID NO: 215472 - DNA, 370 bp, Glycine max
  unsure (1)..(370): unsure at all n locations
catgctcaataacgagcaagaggtgtgctgactatcattcctctctactatgatcacataggcaaagtgatgataaacgaaacacacagtgcacacgaacggatattatttgttgcatatcgttgtgatcgtcacttggacattgtcaagacttactagcttgccccaactactctagattggacttcgaaatatggaactcatgcataaaactatggttaatcattcnggggcaaatataacttgctggctcatcgaatccggctccattttggaacctcaaccacaagcgaggatctttaaagaacttcttcatccatgagaggaggatcttaacaagatcaaaacaattgacagtggtgatgctcat

SEQ ID NO: 215473 - DNA, 358 bp, Glycine max
ttgtggagtttgatatctcattggaaaatacaatgatgagagcgctctacatgccgctcctatggatgtcagccacttactcttggggagaccatggcaattcgataagagggctaatcatcttggcaacactaacagatcgctttcactcatctaggcaaaaagatagtgctccattgaaggaaatgtgttgaagtgtgtgaggatcaaagaacaatgagagagaaaattcttcatggaaaagagaaaatgaaaatgagaaccaaacacttgacagttcctaaagtgaggaccaaaagagggaaacacaatagaggagaaagatgagtgaaacacttgaagtgagggagaattttct

SEQ ID NO: 215474 - DNA, 435 bp, Glycine max
agctggcctaattaacctgaaatagagagatactgattattaaacatacaaaatggaagtactgagtatttattacctatacttaacaaaaaatacttataacactacaaaataaccataaattggaagagtttgataaaatttacacaagtgttatacacaaaagttagtcgtattcaccgactaacatgaggcaccacagtagcctagggatgattagcagccggtggcagatgctccaccgccacctacagagtctacctctgatcacctgcggagatgggagcgatatatacgacatgtggctgaccagcatgcaaacaaccacatgggtcaggagcggctgtataaaaatatataccagtacacgcgccgcccgcagggctaggtatccaacccatacatgtggcctactaccgggcaatttgaggctga

SEQ ID NO: 215475 - DNA, 452 bp, Glycine max
  unsure (1)..(452): unsure at all n locations
tctagccaaatggacttaccttgaattaattccgttgatatctctctttgagccttgtttccctttccttgtgttgaagctcactacaagccttatatgaaaaaccatgatatcaccatatccttaaagaattttggagctttggaattgttttgggaataaatgtgggggcgttctgattcattggataacttgatttgttggctatgcttcatgatgtatttcttaattttacttgatgtacattgtatattggttaaatgttgaacatgctgaatgaaatgtttttctcacaggctatatagtaaaaaaaaaatcgaaaaaaaagataaagaaaagcaataaagctgagtgaataagatcttaaatggcacaagaatgatgacactctttgttctactctactccctatgtttaaaatntaatcttcttttattcttttcttaatatgc

SEQ ID NO: 215476 - DNA, 432 bp, Glycine max
  unsure (1)..(432): unsure at all n locations
agcttgaacaaagctccctgagggttgttgtataaggaaggaacanaacnagactacaattcttggagcattgttggccataaagtgaggaacccaatccaggacatgcacaggtactagcacagggtcagtccttccatgtaaaatgaagacatcatgaggaactcatgatcacgtatgccctgataatccaagaactgngaaatttaaaaaatccaactcatagggccctatctgtagaattgggaacatcatgcttcatgtgaggcaatgagtatgatggtggggtgggtgttgttggagatttgggggaagtcaaagtggtggtgagggcaacaaatcattccagattggaatcgattttgctgttcattgttgctcgggatggagagagtgaggcatggttttgacaatagttttttggccttgggt

SEQ ID NO: 215477 - DNA, 365 bp, Glycine max
tgtagagccgcatcgaggcttaccaaggacggaccttgtgttttatgagcttgtgaaactcaccaaggcagaccttgggtgtggtgagctcttggagaatcaaccaaagatgcttgcattctagattttgtagcacgcgtgccatgcttttgcatacatgtcacttatggagcggcatgtattggagtcgtagtgtcgtgctcttgcatacatgtcacttgtcaagtggcacgccttataaacaatggtggcgtgattttgcatacgagtcactcatatagtgacacgtattgagaccgggtgtgtctggagaactgaccagcgaaatatccgtcatgatccatgttcatggtattgtcttggca

SEQ ID NO: 215478 - DNA, 455 bp, Glycine max
  unsure (1)..(455): unsure at all n locations
gatccttaagcacctgcggcatgcaagcttggagngaagtatcccaaatattccaaagctagaccccaaaatcctaaatattggtcagttggaacactaaagaaggaaggggtttgaagaaacataaatagaacaccaatctcattcttaaaataaaacacccaacaataaatcatcatttgccttatctactttctttggcccaaagacaaatctgctatcaactagttgcaacacagaatacctttgaaccctaatctctcttttcattaggcttaataactaccaaggaaaaagaaaaccatagatcatctagttctttggcaattcaacaacctaatacacaatcttaaatcacacaccaattagcactagtaaagcaagtatgaaagaaaaaaaatccaaacagaaatcactacttattagtatgaaacgagatggatcttacgggattg

SEQ ID NO: 215479 - DNA, 351 bp, Glycine max
  unsure (1)..(351): unsure at all n locations
tactcagctntacttatanaataaacatcccgttgctttttacacctaatagttatggtgactaatatgtcctacccattagtaactttggtatatgttggtaaaaattggttcacaatataatcttgcttgctttggtgtcactaaaactctagtaaggtcttgagaagccacanaaagagaataaataaaaccagtgggtgcccattacaaagttgtgacagtgggaaattggtacactgtggttcaaatatcagacaccaagattaagagaagaataanagggttgagagagatgggcctatatgtgtattatactattctggacttttttttcttcttgatttaaaa

SEQ ID NO: 215480 - DNA, 416 bp, Glycine max
  unsure (1)..(416): unsure at all n locations
agctngccttacctgcagagtctttggctaaatgttattaaaacaacaggctggcgtccaccaccatactcaatttctccacttgattcttgtgctatttgtcttatatgttgcaaggcctgcatagttaatttcacaattgtcactcactaagttttgaaaaagttaaacatatctaattcatttaacaagcaactaattaatcttacaacaattgtcaacttttgagtcaagaattctgatgattcatacagaagcctgagtacttcaagtacactctagagcttcattcaataagtcaaacaattgaggactataggttctacaatataaaattcacaaaatgacttggatatatattacacatctaaatcaatatgcatttaacaagtactagttatttagttctcttcaat

SEQ ID NO: 215481 - DNA, 419 bp, Glycine max
  unsure (1)..(419): unsure at all n locations
ctaagcttgtcacaaatactaanaattcgtgtaaggtctctctctcttaacgatcctctttgcttttatcggctaacatggacctttcaaaagcataaaatcaacccataactttaccgctnttgcaagaactacgtaggtctgagttcctcatttgcattgaggatacgtacgagcaaaangccccgctttgtcgaccaccccaagagatcgttaatggtccaacgccttaatgttctctcctttcaaaatcaaaagatcttttaatggtccaacgccttaaataaccttttgttagttaaaatatatcttgcgaaaaaagatcaaaacaacacaaccaacgtttagttctaaaagaactacgtaggtctgatttcctcatcacaattgaggatacgtatgagcgagggaaacaccct

SEQ ID NO: 215482 - DNA, 412 bp, Glycine max
gcaactctcctttatggcttatcctctattatatggcgcctcatctcacctcttatcctttatctttcgctgcaactccatggccgaaaattaccattgaaggaccttattgaagctcatagacccaaactccatagaagcttccaagaaagcttccatcaatattatacttagactatcctaaaaaatgatagctctttcaattggaaacccaagattgctaaccagacctttaagtcagatcccatcctttattgcttctattagagcatgcattctacctttgtagtggataaaaccacaatgggctaaagaagttccttcaaactatcaagagagttgccaatgatgaatgcataccttgtcatagttcttcttgcatccaaatctacagcatagtcaaaatctaaat

SEQ ID NO: 215483 - DNA, 328 bp, Glycine max
tccttgaaaagggaggaagggtgcttccttgtgtagttttgtagaaagctttcttgagaagctagaggggggctactcacacctcttcaatagctaagctcaccccatgcccaaatacatgaaaatacaaaagctgaaggccctactacaaagactactcgaaaagtcctgcaataccaagctaaaaccttatactactagggtaccctttactttgaccatgagatccacaagggtccctactaacctaaaatgtgcaaaatacaaggcctaaaagtaggaaacctattctaatatatacaaagaaagtggacccaaccttggccat

SEQ ID NO: 215484 - DNA, 319 bp, Glycine max
  unsure (1)..(319): unsure at all n locations
agcttgcacaagctaaatattttctatccttcttagncaaaattaaaacactgatatcagataggtatgaatgcatacctgaagtcatnttggccggtgatcttcattctatgccaggagatatggcactagcattcctaaaatctcacttcccctatttcttattttgactaaataataacgttcctgtgtgttattttcctatcttgcccacctttggcttggtattttaagctaggggctaaaataaaaatgttgttccacagaaatcctcggggatgcctttatctgctagccactcatgggtattggttaaccc

SEQ ID NO: 215485 - DNA, 408 bp, Glycine max
  unsure (1)..(408): unsure at all n locations
gacctataatactaagcttaaactcctcatcncaagctaccaagatatattcaatctcgggctcacaatggatctaagatggctctgataccatcttaaatggggcttagggctaactaaacccaaaactggcttgtaagtgggattgccaaactttttagatctatgtatgccatattttaagccaacaagggaacaattttccctccacattttgggcatacttgttgaaacaaaccctaaatatcacccttaagttgtattaaggaacccaaaaggctgcactaaggcagctagggtgactgcattaaacaccttgcattaaataacacatattgattttacaagtgcccccagacttaagccaaatgaatattggaatattcctattgttataactcaattgtt

SEQ ID NO: 215486 - DNA, 432 bp, Glycine max
  unsure (1)..(432): unsure at all n locations
ncaagcttgaggatttggtctttgcctgtgaaaggaccgacgcgggtctgaaaaaaggcaaatttagtcatcctacttggacgaatgagaaaactggggcatatgaagagggtgagaaagagggagaaacccatgctgtgactgccattcctatacggccaagtttcccaccaacccaacaatgtcattactcagccaataacaaacctcctccttacccaccaaccagttatccataaaggccatccctaaatcaaccacaaagtctgtctaccacacttccaatgacgaacaccacctttagcaaaaccaataacaccaaccaaaaatgaattttgcactgagaaagcctgtagaaatcaccccaataccagtgtcctatgctgacttgctcccatatctacttgataattcaatgggtgccataaccct

SEQ ID NO: 215487 - DNA, 392 bp, Glycine max
tgtccttggtttagacatgagtggtacatgatttgttatttgtaggattcaatctgggcaaaattggatgatggatagagtggttttcgaaatctgcactctatgcattattttgctgttgaaatgtgcagcacaatttcgtataagtgcagaaaaatgcttgcgtatggctggttgcgaaaagggtactacatatggggttctggagatatgctagtagatcccaacggcaaaatgtagacttatgtactagagacttccagtaaaattttcgagtcgatccaacgctaacgaattggaacgaatgaaatgttactggggtatttgtatgtgaaaagctgtgattttgagttgtgtttcgggcagagctttctgcctctgccctgtgttgc

SEQ ID NO: 215488 - DNA, 430 bp, Glycine max
agcttaaataaaaagtggtgaatagggtaaaagttcaagaattttgtcaaaatttaaattaggaattaaaaccaaaaattcaaaaaaataaggactaataaactcaatcttaaaataaaaattaattcctaatttaagaaaaatccccatttcttcccacatcaactcaaaataattctctaattaaaataaaaaaacataattaacagacaaagtaaaaaacaattccatgttttaccaatatacccaaaataattataaaatgcactactatggaaagtttgagaaaagaggtctttacctcttgaagatcacctaaagttatagatcaaatctgtacccctaactgacctaagaattaccttttttctttggttctagcttcttctctttctaaggaatcctatgaagaagaaaatgccatacaatt

SEQ ID NO: 215489 - DNA, 443 bp, Glycine max
  unsure (1)..(443): unsure at all n locations
gctgcctgctgcatgcaagctagatgactttattatactttctttactttcttaataggaatgtgtttggtcttttgctctccatgatttagtgatctttgctctaaaaatatcaaatattgtcaatgcttattgaataggagtttattagtttaattagaataccttggtttctcttcatgatttattcttgtttttaatatgtttgggctacttacctccaacaattttactatagaattacccgcaacctttgcaagactcactaccttgcaagctgtgtaagtttcccatttttgttactctttattacacttacgttaggcaaaactatctaaaatctaaaccagtgtctggaagttggaaagctacctagaaattgaanaaatagcttattaaattataggtattcggataaaatagcagcttacctaggtaaaagt

SEQ ID NO: 215490 - DNA, 387 bp, Glycine max
  unsure (1)..(387): unsure at all n locations
tcaatgctaataacacatcagagaatggcaaagatcgtttcaaattatggatatcgcggtatggcaatgtaagagacatccgtggccaaacgggggagattgggacggccctaagcacacgatcacagttgataataaaaacgcttggagcgaatattgcactgtagacagactttaacaaagttgctatccagatatccaaagcagaacggatatgattcttatattttttttcaatcgcataaatcggctaaaccgcttcgattcgaggtgcttcaaaactgggatgaataagtggatcctgtgggctnacagatatgagccactctgtcataaaccctgcaatggctatggatgctgatgaagcgatgagtatagaaacaaatg

SEQ ID NO: 215491 - DNA, 378 bp, Glycine max
agcttcaagctgcttgtacagcaacttattttgagccaacaaagcatcttgtatgacagctcaaaaactccctttggtggggatatgtgttctgtcacacaagattgcatgggcactagcagccatattcttcaataactccattgcttcttcaggagtcttcaatttaatattacctcctacagaagcatttagtaactgcttcgactgtggccctaacccatcaatgaagatgttcaattgtaatacgctcagagaatccacatgtgggggtcttccacaacaagctacggaatcgttctaaagcttcactcagagaatcatcggtaaattgatgggacgaagaaattgtagcttttccctctgttgtcttggact

SEQ ID NO: 215492 - DNA, 432 bp, Glycine max
  unsure (1)..(432): unsure at all n locations
tgcgctattngcaatcaagaatatgctttatttctagcatctntaacgaaagagaaaattcattcagttcaaattctaagagtactttctagtcaaaattaaaatccaatttcatgaaactagtgatcaaatagaatcaaacattatgaatagaatgaaattaccataaacgagtagagaagattcatatatgtatatatatatttatcactccatttgtttcgtcaattaaaagagatacataaggatacaaaaattacatccaatcctttgaataactagctggtcattgcgtagagcacaacgtcaacaaaagaaatcatgaaggaagagattcacgaccacttcctttcctctttctctcccctagatgtgtgctattttctctgggttcttacactccttactttcctttggttatagaaaatgagc

SEQ ID NO: 215493 - DNA, 277 bp, Glycine max
  unsure (1)..(277): unsure at all n locations
agcttatagacggtcgaattggctcanagcatcggaacttcaattcaagcgtatcgacatattacaggactcaatcagacatccgaggaaaatagtgatcgtcttttgaaattgctcatagcttcaacattcaataatgagcgtgttgatgtattacgatcctcgattcgacatccgagtaaaaagttattgccttttgaattggctcagagataaagatttcattcctacccatttgccctactacgggactaaatgcgacatcctggaaaaatgt

SEQ ID NO: 215494 - DNA, 320 bp, Glycine max
  unsure (1)..(320): unsure at all n locations
ttgagcaaattcaaacaacaataactgtttactcggatgtctgattcagtcccggaatatatcgaaactctagatattgaatgttgaagctctgagcaacttttatctacaataactttntactcggatgtctgattgagacccataatatatttagacgctcgaaaatgaataccaaagctctgagcaaattcaaacgacaataagtttttaatcatatgttcattgagtatccgtaatataatcgaaaagctcgaaaattgaatgtccaaaactttgagcaaatccaaacaacaacaactgtttactcggatgtctga

SEQ ID NO: 215495 - DNA, 416 bp, Glycine max
cgagcgtctcggtatattacgagactcaatcggatattggagttataagttattgtggtttgcatttgctacgagcttttggtttcaattacgggcgtctcgatatattatgggactcaatcggacatccatgtaaaaatttattgttgtttgaatttgcaaagagcttccgttttcaattacgagcgtctcgatatattacgagagtatatattatatatatcaaaaaggtattgtggtttgcatctgctacgagcttctgttttcaattcgggtgtctcgatatattatgggactcaatcggacattcgtgtaaaaatttattggtgtttgaatttgctacgagcttccgttttcaattatgagcgtctcgatatactataggacacaatcggacaaccgagttataagttatt

SEQ ID NO: 215496 - DNA, 417 bp, Glycine max
agctctgcgatagaggacctatataacattctctatggtttaagttaaagagggttttggaaggggaattaattctagggttgccattcccattttataccggtccttggccacggttttggtggcaataaaatccattttctgcatattcgttttttggttcaatcggcaatttcgttgtctgcttccaattgccaatgtcgttctctactgataaatggaaggcttagtctctagtgtgtgttcctcttaaggatcaagcacaacttctctttgaggttttgttattactattgaatattgatcagtttttctctcaccaattgctctgtattggtgctattaaccatgctgctagtgcatgatattgtctctgcgcgaatttccttcatgctgatgatagtttcactatgatta

SEQ ID NO: 215497 - DNA, 439 bp, Glycine max
  unsure (1)..(439): unsure at all n locations
taacataaggcatgcgaagcgggtggaattcctagagcaattcttttatgttatcaaacataaaaagggaaaaggtaatattgtagccgatgctctntctcggcgtcatgcattactttctatgcttgaaacaaaattgattggtcttgaatgtttgaaaagcatgtatgaaaatgatgaaacttttggagaaatttttaaaaattgtgaaaaattttcagaaatgcacagggcctaacatagaaggctttcttttcaaagaaaacaaattgtgtgtgcctaaatgtttactagaaatttgcttgtttgtgaagcacatgaaggaggtttaatggggcattttggggtccaaaagactctagaaacattacaagaacatttttattggcctcatatgagagaggatgtgcagacaatttgtgaacattgcattgtatgt

SEQ ID NO: 215498 - DNA, 371 bp, Glycine max
cgaccggatccttaagtcacctgcggcatgcaagcttctcgatatattatgcgcctgaatcagacttccgtttcaaaaggtatgaccatatgaatttctccactgtattccgtgtgacaagttatgaccatttgaatttctcgacagcattcgttgttcaatttcgagcgcctcgatatattatgcgcctgaatcggacttccgtgtgacaagttatgaccatttgaatatgtcgagagcctccggtgttaaatttcgagtatctcgatatattatgcgcctgaatcagacatccgtgtgacaagtcatggccatatgaatttcttgagagcattcgttgctcaatttcgagcgtcttgatataatctgcg

SEQ ID NO: 215499 - DNA, 340 bp, Glycine max
  unsure (1)..(340): unsure at all n locations
gcttctcgatatattatgcgcctgaatcggacttccgtgtgacaagttatgaccatntgaatttctcgacaccatacgttgttcaatttcgagcgtctcgatatattatgcgcctgtattcggacgtccgtgtgacaagttatgaccatttgagattctcgagagctttcgttgttcaatatccagcttctcgatatattatgcgcctgaatcggacttccgtgtgataagttatgacattggaaatttccccgagagcttccgatgttcaatttcgagcgtctcgatatattatgccctgaatcggacttccgtgtgacatgttataaccattgtaatt

SEQ ID NO: 215500 - DNA, 430 bp, Glycine max
caagctttagaaaaagttatgataatcaaatattgctctacatatgcgatatagaatcatgtataatatagaaacatagaagcattgttccttgatgaacgaaaaggggaaagtgacctctttatagatgatttcaaaaaggtaatgaaatttatattatttctatttgtagacaatggaaagtgatttatgatgaaaatgatatatactacctccccgtcccggaatataagacttttttaaaactaattcgcaccttttaagaaagttgattaatataattagtcgtattaaatttgttaacaatttgtattattttgtccaaattatccttaaatattgttttgggactcatgatctctttcgttccacttaattactttcatgcataattaattaatgtgtgctagtcttttatttcaatctttat

SEQ ID NO: 215501 - DNA, 364 bp, Glycine max
  unsure (1)..(364): unsure at all n locations
tcttctccgcgaggcgcgccaaggcttgcttcttcttcttcgttaacaggntaantaccccttccccttacccttaactttgtatgtgcatcactgntagcatagcaatggaaccttatgatagcaatggaaccttaacataacaatggaaccttangaatagtaccttatggtataagaacaaaagggagaagaccagagtatgcctgaaaaagctgaccgcgaagtcttccggatacccgttaagggttcttccataagtttccgaagaacattttcggaaagtttccggagaactgttctttcggaagtaaccaaacgtcttctggaagaacacttcttctggaagactcccggaaaaact

SEQ ID NO: 215502 - DNA, 443 bp, Glycine max
  unsure (1)..(443): unsure at all n locations
agcttcagaaagtgaacccttccaatcctatggatcaatccactacataagccactatgagaaaagctcccatggtatgtattataattgaatataatttgttttcatcaatcaattaattaagtaattctcatattgaattatcttatttactattgttgtatattagtgatggtgccaatggagaaaatatggacaaaaaatggctaaggggaatccatgccctcgagcaaactatagatgcactatggcagctggttgcccagttcccaaacaagtgaatttttcttattgatcagcacattattgntattattattattattattattattattatcaagcatatgagacatcaagtttgtcaacttttgtacagactcaagcaatcgagggtggagtttggaggtatggatttatattttcctatctttactttttca

SEQ ID NO: 215503 - DNA, 456 bp, Glycine max
  unsure (1)..(456): unsure at all n locations
nttcgattcattctatgtacccgtagtggtccacattgtgttttgtgcanttttattctcgntttgtttactttttataccccctgttgacgtgcttaagtcattttacttaagtcatttctcgcttaacttaaaaataaaataaatttccaccgaacatttgaattatattatccgctaacttcggttaaaataaattccgaccgttcggtcgtgccgtaaccacgttggaaataaaaagaggtaaaaaataatataataatcaaaaagacatcttttagtaaaataaagcgaaaatcaatcggacgttttctctttgggatttctcattcttaatcgaattgattaataactaaagtgaaactaagggctaaatcaactcggctagtcaagctcgtccacaaaaataggcttttaaaggttgtcatttcatttctcactaagaaaaatggatca

SEQ ID NO: 215504 - DNA, 447 bp, Glycine max
  unsure (1)..(447): unsure at all n locations
aacacctgcggcgtgcgacactttaataacgtaactgccatttttatttttaatttaattattattggtgcttgacgtgcaagcttctcctatttctcccctccagggaaaaaaaaatcctacgttaacatttttgggggaaattcaacccatgattctgtgaggtttgtttcagcgtaaacgttgcttgtttgggtatttgaggtaacagaggagaaaaagctgaaaactttntctgccttgtgattttngtgatttcatgggtttagggttgctctccttaagcaaatggggttttgaaatgattggctattattaattttgctgtaagtgggaattatttgatttttgggtttgtctaggccagatttggaaagaaaaaaagtttcttttttttgtgggatgttctgtggaatgtcttggttgccgataaagggtgacttcttt

SEQ ID NO: 215505 - DNA, 419 bp, Glycine max
  unsure (1)..(419): unsure at all n locations
ttgattanaatggcatttggaaaaatgagcaatatgctttctactatatagntaccatgaattgccaaaaagaaatcaagaagcggaaatatatcatgagattggtagtttattaagagcacttgaaccgagaaaagcatccatcttttgttttcacagtaccgtaatattatctccttgatcaaaaataagatcggcaccagcaggctcctcagatacaatcgatatctgaagattacataaggaatgccactttttctaataaaatctcgcctgttgacataaccacttttacaaatgaacaatatgtggagggaatatgaattgcataactaaatgcttggaagcataaggagtcctcgacactttaaagaaatgatactctttttataactgaatgcaaggaaaaattatatcac

SEQ ID NO: 215506 - DNA, 412 bp, Glycine max
agcttaccagaactttctctacctcattcgagcaagctttcaatgaaacaaacccatgagaatcatcaaagacttcatgctcaagtatattcacatgtggtcctcctaatgccccttcatctggctcctgatccatatgcagagaatcgttagcaatagcaatttcaaggcccttactttgtgtacgtgcaacatgagcttgatttccaaggtccctaggttgagatagtggttggctgtgctcctttccaatttcttctatcttggccttttgcttatccaaagtgtcattgagaaacacattttccttggaaatttgttccaagtgcactgtggcttctttaaggtcaccttcaaacctcattcgttccgccttttctgtagacaattgctcatttagggcaatgatttc

SEQ ID NO: 215507 - DNA, 454 bp, Glycine max
  unsure (1)..(454): unsure at all n locations
ggaactataaaactaagcnttataatttagccaactcttagagtaagatttatttttatttnttatagnactttgggcctatctttggacttgtaatgagatgctacctttttcttgttatttttaaaacttttaattattatattagttattgggccctgggcctaatttaagattattagtaggagttataaatagactcattaaacactttgttggcagcttttggatgaaattatggtttcttatatagataaagagagtgtctctcttgtttcctgtgtgaaaccttaagttcttataaagaattttattctttgtggcgaatcatcctcaacttattaatcttccaagattggtggcattttctttttcatctcttttctaatatcattgtttcctttttatttccccaatttaagagagaattccaataggttcctagtttgtgatg

SEQ ID NO: 215508 - DNA, 428 bp, Glycine max
agcttctctaggaccttaggcgaacctttatctcatccttcaagatcaaactgtctactcgtggatggtccctttcctctctccgaagattaagctcgttgttactgccccacaaagcccctcagaatttgttccaggcgtgtttttccctacgagcccttttggtctcttgttccaaggccttggtggtagctatatttacgtctctcagtttggcattctcctttcggatcttaagagctgctgatttgaacctttctttggttgtttaggcttgctcgagtttttccctaagggcctgcacctcttcgtcttcctccggtgcttaacttccacccctttagaggttgttaaactcgggagccaatccaaaccttgaatgtgggctttaaccacctatggtagcctgcgatggtcccgttgtacta

SEQ ID NO: 215509 - DNA, 388 bp, Glycine max
ctgagatgaggaagtgttgaagggtgaaacttcctgcttttattgttgaccacagagtggtacctggagatatgtcgcgggggtcaggagaccttgtggacgtcaggtgttgtgctattgcccaaaaccaagctagaccaatcccgacccaacccgggcatattcggtcagtgagaacctgtgatgtacctaagcaggcgagctcctggcagtcaacagataaaaggataacattagcacttatgcaagggaggcttgtggtggctggccagctgtgaattttgtgtaatagtggattgtggcctctggtaatcgattaccaagggtgagtaatcgattacaaggcttaaaattgaggacaggaggctaagatggtctctggtaatcg

SEQ ID NO: 215510 - DNA, 429 bp, Glycine max
aaacaattatataatcatttcaatccactcaaatcatacaattgctcattcaaatcattctcaaacactcatttcatgcaaaacaatccactgcatatcattttcaatcaattcactattcaaacacgcttttggtacaagtaaacaactcaaagtgctgaaatttaaataactaaaatttaaaataactaaaatataataactgatattaaaatgactgaccataaatcataaaataactgaaaataaactaaaatttttaagatgcacaaatttaaatgtcctgctcctgtggttgctcctatgcatgctcattaaggtccaacacctgagcagctggtgaatcctgagagataggctgctctaactcaaatgctagtgcagatggtacaacatcatcatgtatgggcgctaaggatggctcttgga

SEQ ID NO: 215511 - DNA, 440 bp, Glycine max
ttgctagtagaaacatggaatgaagctcatgtatccctttacatctccgagaaggctctgggggactcgtcaataacatcactgccaacaactacattgccttcattgattaggaaatccatgccgaggggagagggcataacagagctttgcatgtgtcaatcaaatgcatgaaccacttcgtggccaaggtactcattgataacgtctccagtttgaacataatgcccaaagcacgttggagaaattgtcatttaacgcttcccatctaaagccaagttccatggagtccatgctattaacggcagccaccgagaggtgatgggagagatcgacctccctgtacagataaggcctcatacctgtcaagttacgttccaagtgatggatattaacccggcttacagctgcctttggacacccgtggaccactccgtggg

SEQ ID NO: 215512 - DNA, 330 bp, Glycine max
  unsure (1)..(330): unsure at all n locations
agcnttgatacgtagtatcatcatgcttggtgggaacgccctttctcgcattagatcttcccacaatactgatggaatcatgacaacactatgacttttatatgaactgaagttgctcctctataaatattgggagcccaattatcatcattccttgcactaattatgtcacaatatagccatcacttgttgagtacttgtccaactggtataaactatatataaaatgcattaagtagcataagtcagatcgcaattagtagtcatactcataccgcatatggctaatattggacaacattattaaacatgattatttggatgtgggtc

SEQ ID NO: 215513 - DNA, 338 bp, Glycine max
  unsure (1)..(338): unsure at all n locations
ngtanaatggctagacataatacatggcggtgtttgtgttggttcaacgataaaagggatgccccacattattttcatgacacaaatgcaaagatgatgatttgtaaattttatgcgcaactggtcatgcatgcacctatgcggacactcaagcgtcaaatttttatggtcatgtgatgctacggctcacgatttatttcctctattttaaatcaacccaatgtttcagaatatgttcttttatcaatctgtgcattcatccgagtccatcttgggtactcggaaaatttccagcattcacccttcagtgtacacacatttttttccgaactagcttg

SEQ ID NO: 215514 - DNA, 396 bp, Glycine max
  unsure (1)..(396): unsure at all n locations
ngaagacaagactatacgaggtatcttccctttgttatcatataccctaagggctatcgtgtctacatcttgcatactaaaaaactcgtcatcaggcgagatgttgtaactgatgagtgcgcatcttggaactgggatgatgaataagtggagaataacgggcttatacccgctcaactaccttaagaagaagctgacgaataagactcgagtgaactatatgtaattcctccacaagaacaagatcaagaactatcatcactagagtctactccaaacgagtaagatcttcggtggacatatatgaaactagaacttggccatacttgaacctggaagcttngaagaacatcatatctcgaatgatgggtcaatgcatggaagaagagatcagat

SEQ ID NO: 215515 - DNA, 430 bp, Glycine max
agcttaaaccactatattaccatacacactaataccaaagatatttcctaccatacctaccaaggctaacactgaaccaaatatgaaatgtaaaacttttgaagaacactcggtgctcatggaaactcaagtgtaaaacaaagctaaaataccacttcaatcaaagtaataatgaggtcattcactcactatattaaaagctcaactgctcctaaaccatgcccatgctaaaattaaagataaaagataagatcttttttctaccaatttcaaagaatctggttaaacaaaaccatatgcaagaaaatagaagttaccctaatggcactatggtgtgtagcaacgcgtacaatgcgagcacctcaaagtctaggagaaattgatcttgaaattgtcacaaaatttaatgcaactaaccattcccttctga

SEQ ID NO: 215516 - DNA, 306 bp, Glycine max
acaagactgcgatatccgactgtatatatatacgctgagcgacgttctctaacagagcttccactatctcctgcaaccctatacgccactgaatgcacatcaatcgagaccgtctcgtaaccatcaattgctctacccctcgatgactactagaatggagtactgttatggacttgcttgacttaggatgagcattctctctaggcttatgagtgaatgcgcatataaacgtgatgagatttgcataccaacatctagctgccctctatgaagatatgaagatgcgatcgccgttacaatcttatc

SEQ ID NO: 215517 - DNA, 453 bp, Glycine max
  unsure (1)..(453): unsure at all n locations
cctgcggcatgcaagcttctagagatgacatcaacatgaactgcttcccttncaaaacctgcgaaaccagggggtctntatnttcatatggaaagggagacacatggaaaaaccctaatttcctttctttaaacacgctcttcacccaacccagtttttatcttcaattccattattttaaccaggaaaaggctaaccatgggttaatcaataggtgaccaatttttaaatgatcgataaccagtgatcagctaccacagtcccctgttatatatttgtaatgagttcattcgttcaagcaccattaaagcaacttggaacatctgtctagcttttctatcaggagtgcatctatcattctccatttccttggaaataagtgggaacctgaccataatattaacaatttatcagcatgagataggcacttgattttcagcctgagttttttct

SEQ ID NO: 215518 - DNA, 383 bp, Glycine max
acacactcatatccaggacactcgactgccacgtttcttttgttgggtgttgctgacacaagagaatgactttctttacactttgcccgccttgagatcttcctgcctccgatcttgcacagccttgctgccactgagttaaagccactcttcatgtagcttactattgcagcgagaatctctctgaaatgtgaaatgacattacaattctggaaaggatttacattttagataaaaaggatctacaagaggagcatgtggctatatcatatcatattaatagaaaaagacagtcgttggcaaccaaactaaaaccacttatttcattttacttgaaattagcatatcatttgacaggctgatgctcattatttcagtcaaac

SEQ ID NO: 215519 - DNA, 225 bp, Glycine max
ctggttaaattttttcgggaacatttttccaggcaaattcgaaaagagagaggggcctaaggggctgaaccctttttttttcactccctcccctaatatagcaaaataggggaggtggttgccgcccatctcgcccagtcgagcctggttgcttccttcagaagcaacagcctcctggaggaatattctggagggcccaagtgggcctgggtgctatttgcaccc

SEQ ID NO: 215520 - DNA, 418 bp, Glycine max
  unsure (1)..(418): unsure at all n locations
ttgtcatgtgtagtgtttaatggtctcaacaaaagagtgtctttagaatataacatgttttatgagtattagtttgtgtttctttgaaaatgttattaatcaaacatagtttgaaaattgatatgagatttggtagtcatggacaaacaggtgtcaacagtcttggcatacgacacaaagcttctcatttttttttgctttcctatgatgggtgaaacaagttgagagggatctnattaaatagtttcatgtcaagagcaggagaagcttcaggaccatattctattgcaaatacaattaacaattaatgtttttacagaaatccttaagtatctcgtacatttgtttgaaagaaaataggagctcatagtacaacttttactagttatgaatgctcaaataattgatatatcccaca

SEQ ID NO: 215521 - DNA, 411 bp, Glycine max
agctggagatgaggaagtgttgaagggtgaaacttcctgcttttattgttgaccacagagtggtacctgtagatatgtcgcgggggtcaggagaccttggggacgtcatgggggggtgctaattgcccccaaaaccaaagcttggaccaaatccccgcaccccaactctcgtggcattatttctggtcaagtgaggaacctgtgaattacctaagcatgctagcttctggcagtcaacagataaaaggaaaacatgaccactaagcatggaggcttgtggtggctgccacttggaatcttgtgaatatgtggattgggcctcttgaatctattccaagggtgagtaatcgataccaggcttaaattgagacggaggctagatggctctggaatcaattccaagggtgaatc

SEQ ID NO: 215522 - DNA, 433 bp, Glycine max
  unsure (1)..(433): unsure at all n locations
tcttagtttcagatgatgctgatgagtttgtagctacctcatgtactcctctaatgactatagcatcatttctggcgctaaactgctgggagttggaaaccatcttctcaattaaatttctggctttagcaagagtcatgtctccaagggctccaccactggcagcatctatcatacttctctccatattactgagtccttcataaaaatattggagaagaagctgctccgaaatcntgatgggtgagggcaaactggcacataattttataaatctctcccagtatcatataggctctctccactgagttgtctaatacctgagatatccttcctgatggtccgggtcctggaagcaggaaattttttttctaagaatactcccttaaggtcatcccaactgatgatggaacttggagcaaggtaatacaac

SEQ ID NO: 215523 - DNA, 380 bp, Glycine max
agctggccccgttttataccttaattgactgaggccagatctcaaagggcaaggaggctgggggcaaatccttgggctctgaattggaccacataattggaggtattatccttccgaaaaagtggaaatggttggtgggcttcgctctaaaactttcttggtcagaaactatttatggagaagtttgatagttggcagtctttgccaaaaaggatacatggtgccaatggtttccaaaagtggattcttagaaatatccttatttaaatttccttcccacctgatggttggccacatcattgaaacacttgaattagagagtgtgggacttagatttctttctctgaaacatggcacaaatactcatacttgaaaactga

SEQ ID NO: 215524 - DNA, 439 bp, Glycine max
gggagaggatgcttcaatggaggagaagaaagagggagataaagagagaggggggagcacgtaattgaaggaagaaaaagggagagaagttgaactttgagttgtgtctcacaagactctcattcatcaaagttataacaagtgttacacatgcttctatttataaactaagtagcttccttgagaagctttcttgagaaaacttccttgagaagcttctttgagaaagcttcctttgagaaagctaagagcttagctacacacacccctctcataactaagctcactccttgagaagcttccttaagaagattcctaaagaagctagagcttagctacacatacctctctaatagctaagctcacctccttgagatgagaagctagagcttagctacacaccccctataatagctaagctcacccccatgacaaaaac

SEQ ID NO: 215525 - DNA, 337 bp, Glycine max
ttgatgggattagaatgggagttttttattgctggaaacctttcaaaattctaattggagaagacctccatatctatgaattttgggtctttaatggaacaagagaaaaagaggttgggtaccatatacgcttgttctctgatgaaacaatggccagaggaatgaaggaggaattgggtttctgtgacccgaatgccgctgacttcacttgagtgcctttcgttcttcatgttccacctttgaggagttttcagatttcaatcggtcaaagaaatgagtgtaaaagatgaagtgggtttgtgggagtgattggacagaattgatgaatatggtggaa

SEQ ID NO: 215526 - DNA, 392 bp, Glycine max
  unsure (1)..(392): unsure at all n locations
ttgccttggagaggtcccatcaatcgtcccaattccttgatgctagtgacatctaaacctttaaccttgacttgataaaaccttttgccgttttgatttgtccccatcatttacctaaaaaaggggtggatcaagactccgacatgaatgatgcaatgcgtatgcatganacggaaagaaaacaacacataggggtaattcacacatacgagaccgcagagatccantttaattgcttacgcttgggcatgatggcgcctcgacgtatcattaaaagggttacgtttactctaaagaaaccaaacaccactggcaaaaactataaactagtgctatntatcaaaagatgcatgagaacaaatggcacggagcgtgtttgctctttgccccta

SEQ ID NO: 215527 - DNA, 333 bp, Glycine max
attttttgtgtaaaaaccaatggttaagctcaattccatttttttggccttgggttatggctggcctcttggttctttgggtggagagttgccatatagggaattgccaaggaggattggtgccactcctttaaaaaattgaggtcaagaaataaggggtccaccacccttagaacttttggcttaatcacacttcaattgtgtgaatacccaagagagaaaaccaccaaattgggaccttctttaactttttatgagaattacttaccttcttgcttaaatttggacaaaggtcttcttggagaaattggagcctccatagtacccactcca

SEQ ID NO: 215528 - DNA, 327 bp, Glycine max
aactcagcttctccttcctggcttattccctaatggatggctccttctctaacctcttctcctttaatcgctgtacatctccatagtggaaaatcaccactgaacggacatcacttgaagctccaaggaaccaagccttccattgaaccttttaaagcaggctttcatcacaacataccttcacaaaccaaattcaatctcaattctatgacattcttgggagaaaaagcactagaccatgctaacttgaaaatagcattcatttttccaaatggatcaataaaaaacaaccaaattgtgtttattttcaatgtcctactccaatac

SEQ ID NO: 215529 - DNA, 408 bp, Glycine max
  unsure (1)..(408): unsure at all n locations
gcatgcaagcttacagacgatttagtaatgacttctatctcagaataaaattaccttattgccattatctctgggatttaaaaaaaaaaaaaaaaccttattggctgagggtaactgaaattgtggctaccaatagtcacctccaacagccaacaagtcagccactctttgggctcccaaagggttgatgcctaggttgccaattgggccctttttccacctggactaaacttactaaagcacttttgttgatgcacccaaacatttttgtgtcaccaacttaacggattggctcatattttacaaacttaactctttatctagtacaatgtgggtntttattactctcctttggccatgccaaccacaaccttgactttcttcttgactggggctgattcaatagtt

SEQ ID NO: 215530 - DNA, 307 bp, Glycine max
  unsure (1)..(307): unsure at all n locations
tgcatntggaatngcgaaagccccactccatcattaggattagtacctgacatctcaaacaaacaaatcaaacgtaacaagacaattatagttgctgttngaatacctcacccactcaagtgtatcacacaattatggcttttctctaatgaaacactcttgccttttaccactctaattccccttgagttcttacgcaattcaagagattatggcacaacaaagaacaatcaccaatatgtgtaaggttaaggctagagagacaaaggaaaaggtaacccaaaaaaaagctacaatggttttaagg

SEQ ID NO: 215531 - DNA, 172 bp, Glycine max
acctgcggcatgcaagcttgtgatagaagtgcaaaattatcttttttatggaattccacaagcccttcaagtttattactataaagcttgtttgaaatccatggctaaatattagcgctgatgggtatttctgtaaatggggtcttatattataaaaaccccgttattttta

SEQ ID NO: 215532 - DNA, 364 bp, Glycine max
  unsure (1)..(364): unsure at all n locations
ctgattganttctgtcatgggctgatggcttattcaactctggtgtctcaacatctgtgagcaataaaagtttcccttctaactaaacctctttggtagcaggttactacaagagatgcagaagtatctgtctttgaggaagatgagtcaggtatttgacatcggagattggaatgaatatctaaaggaaatttgatgagaaaaagtaattgattctcatttnaatgaggaataaagatatttcccgaggtccacaaagaagattgttttctgtttcagagtaatgtccgttcatttgctgaccccataaaagctgaagagagnttccagactctggatcaattaanagatgctaatatctgga

SEQ ID NO: 215533 - DNA, 314 bp, Glycine max
  unsure (1)..(314): unsure at all n locations
agctggtaggattatgggttacccatcacatgtggaactaggtggcggtcgggcgatggtgcacaacaagttnttccacatccacaaatcacccataaacccaccatctcctgttgcctaccttcaactgacttacctttcttccaactagcccatattcttgtttttttttacaactggttcccatacaatctcccaggctttcccaacatcagtgtattcaacatttaaacaggataaactattcaggcaaaaaaaccatgcaaaggtttaaaatttgcccaaatacaaccaaattacagtttttttcctta

SEQ ID NO: 215534 - DNA, 419 bp, Glycine max
tcatcctcagatccctcttgttggactagacttaatttagacagccctcttaagttaagactaacttaaactaatcttcgtccgcagatccctcattggagacttggctcagcttaaatagcttacgaaagtttagactaatttaacctaagcttcatcagtagatccctcatttaagactagacttagatcaaacaacatatttgaaaccaaaacttaattgtagatcccttatgtaagactaagtttcaatcctgtttcaatcaagctctaaagcacagtacatttccgaatgctaaagtcacataactatgcactcaaatgggtgatcataccaagagcatatatgaattaagtattggaagaagcattgaacacatgacacacaatcaattagatattaaaggtagtacatcagt

SEQ ID NO: 215535 - DNA, 422 bp, Glycine max
gcttgcaagctaatactaatgggagcctaataccactcaaacactgccggccttccattaccggtcaacaagaaaatcaaaattggcttggcggtcctctaaataagaaaggcaaaaagttggcaggatggatggaccctggattggggttttaaagattaacttaacccaattggcaaacaagaaaataaattatttccctaactccctaatctaagtactaacttacttattcaattcaatatattaatactcatacattcattttaatacacattatataataatcccaatttgattcatctttttaaaagccctttttgaatactccaattttagcatcttttaaagggccgttgaattactagcattctagagctattacacagactttcaactattcaagacaagtaatatattgt

SEQ ID NO: 215536 - DNA, 436 bp, Glycine max
  unsure (1)..(436): unsure at all n locations
tgtcatactccagaatattgtcccttaagacctacaatgaagccatgcagatacaccacggaagattcctgatcaagccttcgtataggaacaaccaaaggaagattgtctaaaatcctgcaacaatgcaaggataaaatatccttttgtcacaaagacatattcccacaaagttgcatgagatataaacttcagggtcattagtgcctcacatgttcacccgatatcatcatctatcatttccttgaactctttggctgctttttcatcaagaatcaaacgacagcaacattgcacagctgtggttctctcattttaaactggaaaaatttaaaaagttcaatattttattagtgaaacatactaaacataaagtggaaagatggaacctgtccgaaagattaataaaccaaccacatanggagagttttcaatg

SEQ ID NO: 215537 - DNA, 472 bp, Glycine max
  unsure (1)..(472): unsure at all n locations
agcttctcactcacttgacgcttaccgaaataggatgtttctcaatgacatcaatctttgatttgtctacctcaattcccctcacagaaattttatgccccaacacaatgccttcttgaaccgtaaaatgacatttctcccagttaagcaccaagttggactcttcacatctctgcaacaccctttccaaattcgataaacagcaatcaaaagacgatccanagacagggaaatcatctataaaaacttcaatacacttctccaccatatcggaaaagattgtcatcatacacctctaaaaagtagcaggagcattgcataaaccaaaaggcatacgcctataagcgaacacaccanaggggcaagtgaaagatgtcttctcttgatctttangatccactgcaatctgattatagccaaaatatccatctagaaagcaatanaatgatttccctacgagtctttcaagcat

SEQ ID NO: 215538 - DNA, 463 bp, Glycine max
  unsure (1)..(463): unsure at all n locations
gcttgctatgtataacaatctcacctctatactgngaggaaccagnggnctcttccctttcaactctctagttaagaagtccagtttcttttcttcatcccattcactgtacgtgcccatatccaaataccttgtaattacatcaatggtttcagcatgtctgcttgattcctgtcacactgctagtttcaggccacaactgattatccaaacaataatgaacaaaaaactttgaaacatacctgacgcaagtcaagcttcattaacaccatgccaaaagtagcaactcttcgaatcagatcagctagtcgaccatcagctagcaccccagatccacataattgctggagaaatgtagagctaaatgataattctgcacaatattagagggtaaaagggtagaacagaaagaataccaaagattcataacanaggagaagaggtccacaagctgatattttgt

SEQ ID NO: 215539 - DNA, 307 bp, Glycine max
  unsure (1)..(307): unsure at all n locations
gataagcttcgaaanggaatgtgatgcttctggtgttggaataacggttgtactgatgcaagactcttaacaagttgcatgctnttgtgaaaagcttcatggggtaacattgaattattccacgtatgacaaatagttgttgttggatcaagtggcctcagaataattaagaaagatgggttgaattaattattcctaaccctttactaattaaaaatttactcttctaaggcttctactatgtcgttaagtaaatgaggagcataaaagagactaaaccataatgtaaagccggaatctaaatgca

SEQ ID NO: 215540 - DNA, 421 bp, Glycine max
  unsure (1)..(421): unsure at all n locations
cgccacaaagggatacaagtaaaatatgtgtttanagccttaacatgttatttccacttaggcctttagagctcctacaccttgacatgcttagatcaaccaagattgcatcctttccatatgcatatatggtctgatcatagtggacaattgtgggttaggttcctaacccacaagaataagtcttttgataccttttataaattctataaaaagaatcaaaatgaaaaaggcatttgtatctcttcaatcaaaagtgaccattgnggagagtttgaaaatgatattttcaaaaaaaattgtgaagagaatggtattcatcacaatttttttactctaagaataccaccatagaaggaagttgttgagaggtgaaatagatctcttcaaaaatggctaggaccatgcttagtgaccactc

SEQ ID NO: 215541 - DNA, 466 bp, Glycine max
  unsure (1)..(466): unsure at all n locations
aactcaagcttgtaggttacagngacaacgattgggctggagatgaagatgatcgattatagtccaatgggattgtgtttttcatggggagtactaccttgacttagatgtcaaaagagcagctgatagtcattcattcgactggtgaggcagaatacgtaacagctaattcatgcattcgtcatgcattctagcttaagaaatttttanaagagacatgtcacaacaagagtcaaccaagatctttgtgaatagtaagccaactggtactttagcaaagaatccagtgttccatgatcgaagcanacatatggatacccagtaccacaacataagagagtgcatagcaagaaaggatgtacatgcggaatatgtgaagtctcaagaccaagtagctgacatcttcaccaagccgctcaagcaagaagactttatcatgtgtaaaagcttccttggaatgtaaatc

SEQ ID NO: 215542 - DNA, 449 bp, Glycine max
tatgcgcatatttccctacgaacgttcacttgcacaagacatcctattaactaagaaaaatgcacccatatacaatcaaggtagcttcattacctagattatttacatgtacttccaaagtgtatttgttatttacatcatacacgccatcttgtcaaaatttacacacatgcatactcaaagcatttcggggtaccaaaaattgcacatgcgctcatcttggtatttctaatatctatacatatacaaacttcatgatgaatcttgactacctacgcaataaggtgctacatttcatgctcttttttttcaagtttttgctacctaaagccatatgcaaattcaagcatatcttcctttgctgactaaaattgtattcaaattagaaggtatatatttttttgtaatatgtttccttcacataacatgcaacacatctatatatatat

SEQ ID NO: 215543 - DNA, 361 bp, Glycine max
tcttctacccatttggtgaagtaatctatcgccacaagaatgaagcggtgaccattcgacgctttgggttcgatggccccaatgacatctattccccacatggaaaaaggccaaggaacggacacaacattcaaaagatgtggcggaacattgacattgtcctcgtatgcctgacatttatgacacttccttacatgagcgcagcaatcactttccatagtgagccagtaataaccggccctaaggatttttctggccatagcatgcccattggcatgtgtcccaaaggaaccctcgtggatctcctcaatcatgaagttcgcctctttggcatctacgcatcgtaggagggtcatgtcgt

SEQ ID NO: 215544 - DNA, 468 bp, Glycine max
  unsure (1)..(468): unsure at all n locations
ggcacaatggaactgatggtttctcaacaacaaacttgatatgctctgganattntagctctgtctacaaaggaactcttgagttagaagacaaagttgttgcaataaaggtcctaaaccttcaaaaaaaaggagcacgcaagagtttcattgctgaatgcaatgcccttaaaagtattaaacatcgaaatctggttcagattttaacgtgttgctccagcacagattacaaaggccaagaatttaaagctttgatatttgagtacctgaaaaatgggagcctagaacagtggctgcatccaaggacattaactcctgaaaagccaggaacattgaaccttgaccaaagattaaatatcatgattgatgttgcttctgcaatacattatcttcatcatgaatgtaaggagtcgattattcattgtgatttanagccgagtaatgtacttcttgatgatgatatgactg

SEQ ID NO: 215545 - DNA, 380 bp, Glycine max
tatattatactaaacttaattgtgaacttgggtgaaaggaataagcacttaaatcttcaaacaagcttgcgggaggcttgaaattttggatttcaaagtggcaagatttatgactacaagaacaatgtagttttcagtttcaaaatagaacccgttgtgcagtacaacaaaataagataaaattatgaaatttgcatagaatgaaatccctctccttaacggcgtcaattgaagtgattatgtttaacaaaaaatggaaaaattttaattttagaaaaaatattttaaattcttaaattgaaacatacaaggtgattattaagttttgattactagaggcaatttatactatagggtgaaagagaggagaaatcgtaaaa

SEQ ID NO: 215546 - DNA, 463 bp, Glycine max
  unsure (1)..(463): unsure at all n locations
cagcttgattnttatctaagataaacagcgtttnttatcactttatgtgcgttttctttggagntctttcaaagcttaattnttttggntaattgtttgggtgttcctgatccttctcctactttgtttcgcatagagcccgaagaacacactaaagctttgatttttatctcaaaaaaagcagagattttcatcacaacaggtgcgatttttttggttaattgtttgggtgttcctgatccttcttctaccttgatgacactttctttggtgggttatgctctgaaacatattggccttcgcaatttaacgtatatattaacttagccttgacaatatcattcaggttatgttatgttgcccaaattcctatatttttgtcacatttgtctcagattattaattcattggtgggttatgctctgaaacatatnggccttcacaatttanagtatatattaac

SEQ ID NO: 215547 - DNA, 383 bp, Glycine max
tataactgggggtccgcatgcattccattccaatgtgattagttgctaaatggcacctagaatatcagaacatcatgatttacactgtaaaagagcaatttatagaaaaatatgaggatttgacaaatgcgttgttatacaaaccatagtgacacatacatggaagcaagtgagcacctactgtaagaatcacaactttgaaatttataattgcaaactgctttgggattcgattggaacatgggtttgtgccttaaggaaaactattatgaattatgccccagctatagaggattatgagccactaaaagtaccactgttgcaatctccagaagagaaaactaaacttttagaaattacaatcctttactacaacaaagagc

SEQ ID NO: 215548 - DNA, 292 bp, Glycine max
atcttcatctcgtgtactttcgatgttctctttctttgtctaaagcgagtttcaaccgatcatttaagccgtaacctcccttaatcaatgttaaaatgaattccgatcgatcattctctttgtaatcccatttaatcacctttaaaataaaattcaaccgattgtttatgctgtaaccttagttaatcatcaaaaaggaaagtctcaaccggacatttactttgaaagttctctctaaatgagttgagaaataaccaagtgaaactaaggctaaaatcaactaacaaatcac

SEQ ID NO: 215549 - DNA, 270 bp, Glycine max
agggccggaatagccggggtcagaacttggacccaggggtctttgccaatcactgacaatcgaccaccgggcatatcggcgtgaacctgcagacctacatgcactctgcatccaataaagaaacaacccaactagagttggggctgccacttaattggtaatggatgggcttgaatattccaaggagtatcatcaggttatatggcggggtaatgcttgtatatacatggggccatccgctgaacagtggactaggacttggatatcccc

SEQ ID NO: 215550 - DNA, 246 bp, Glycine max
gaatgtctaagctctgagccaattctaagataataacttttactctgatgtccgattgagtctcgtaatatatcgacaccgctcgaaattgaatggtgaagctctatgcctatttaaaacacaataacgttctactcggatgtccgattcagtgacgtaatatatcgtgacgctcgaaattgaatgttgaaccttctgagccaactcatacgacaataaccttttacttggattgctgattgagtt

SEQ ID NO: 215551 - DNA, 474 bp, Glycine max
  unsure (1)..(474): unsure at all n locations
actcagctanacattatactttgagcgtctcgatatattacgggactcaatcatacatccgagtnaaaagttattggcgtttgaattggctcagaggttcaaaattcaatttcgagcgtctcgatatatttcgggactcaatcaaacatccgagtaaagagttattgtcgtttgagttggctcagaggttcaacattcaatttcgagcgtcccgatatattacgtcactgaatcggacatccgagtaaaaagttatagttgtttgaatttgctctgagcttcaacattcaatttcgagcgtctcgatatattacgggactcaatcagatatccgagaaacaagttattgtcgtttgaattggatcgtaggttcaacattcaatttcgagcgtctcgatatatgacggaactcaatcagacatccgagtaaaagttattgtcggttgaattggttcacagcttaacattcaattt

SEQ ID NO: 215552 - DNA, 452 bp, Glycine max
  unsure (1)..(452): unsure at all n locations
ctttatcatgatgacagctgcgtgttgatctcaactatatgccaaaattgcacatctgcacaaactccatatcgttgtccacgtatttggtccaaagattcttgtactggttcaaagcaatatcaagccagggtttcatgtctccattgtaatgaatgactgcagcattgctgatctcatccatgctaatgctgggattgtatcctagcccaagcacgtgccaggatttgtccagtgacttggttgtggagtagaaggtgatcaaaccaggtgatagggtccctgctttccacaaagtttggtcttcattctgataacagaataacccatttagcaatagtacaaaggaatagcttgagcattattcaagaaactttntctaacaaaataatagttttagagaaagcaattacataggtcatgttgtgataagcttctcaataatcaattat

SEQ ID NO: 215553 - DNA, 485 bp, Glycine max
  unsure (1)..(485): unsure at all n locations
aaactcaagcttgtagaccaagtatttgagagtaaaagaatgaagagtattgacaacttattcacaataaataatgtatacaattattccttttataatcatttaagagttgtattgactttttttttaatgttgatctttgtattgactttttatctcaacttttgggtgggttctatgtagttgttgatgcaatgtatataaaaattaaatttgaagaacaatatttatatatggtaagatgacacactagaatttcaatttcttttttatctatctatcttctatatatatactatatactatatgtaaaagaaactcgaacttcaacaagctatcaaataaaatttttaatttgtaaagaaccattgacttaatatactatatgtaaagaaagtttaagttntgacaatcgttggatcaaaatcttaacttttcaacaaccatcgatttgatatactatatatagacatnatgtataatta

SEQ ID NO: 215554 - DNA, 431 bp, Glycine max
  unsure (1)..(431): unsure at all n locations
tctntaacaccttngatatcggacgatgagttctaacatctacctagtgactntggaaatattgtcatagtcgtctcatcgcatgtagcaaagctagcgaaaatttttatatcagatgttatcgggtctcggcattgtgcaagacttaacttataaaataaattcgttgtggggcttctccgtgctcttgaacggcggtcgcattgacggcttcaccaaagaccaatgggtatataatcagcttttcttggggatttggcttggctaagagtggtggtgtggctaacattatctttagtgctggaaaggcatccacacattcgtgatcccatttgattntttttttttntgcttttttccatcaagttcatgatgggtttgccttttccgctatcctgggccgaaatcttgttaagaaggaatctatcaca

SEQ ID NO: 215555 - DNA, 432 bp, Glycine max
  unsure (1)..(432): unsure at all n locations
tgganaccaattcaactaaataaaaggtgttgtctttattgcgcacctagccattgtagacgatattctcgtctttgttgaagcctcacctgactagattgatgttattgagctcactctcaatctgttatgtgtgagttctggggctaaagttagtgctgagaagtcccatatcttcttctctagaaatgttagttagaaaattaaccaagatattgagaccatgagtggcttccaatgtactgacaacctaggcaagtatctagcagtcccgattttgcataaaaagtcaaccaacacattttcagcttcattntggacaaagtgaaaaggaggctaagttcttggaaggccaatatgttctccatggaagggagggtaaccctcactaaagttggtttgcaggcttaccccacttacgtcatgctatcg

SEQ ID NO: 215556 - DNA, 352 bp, Glycine max
tctaatgtgttgaaaaacacacggccgttgcttccagcatctccaactcgttgaacgctgctatgcgtgccccgcattgtcgctggtgcatccagcaaaaattctaaaggccgaaaatgcccctgaagaatatttccttataaaagctcctttgctttcctgcgcttcacaactatcattactggccggtggataactctgaggtggaggatttcgtacgtcattatctccggaaccttgagaactgataggtgaggtgaaggcgaatgtgccttgctgtggtctttgaccgcagactaaatactcggaaggtggttgatgtgccgccgacgtacggatcaacttgaactgt

SEQ ID NO: 215557 - DNA, 248 bp, Glycine max
cacatgctccaaccaaacatgaacccaccattcccaggtgcccacctttaactgagctcacgtactcctacgtagcccttatcctcattcctctcagcaccgggtccccatcaacccctccaagctttcataatatcctagaaatccaattcaactatcatgaactaccctaaaccaagaaaacacagcagaggcagacaactctgcccacaactcattcccagatacaaattctcttactcaaatac

SEQ ID NO: 215558 - DNA, 427 bp, Glycine max
  unsure (1)..(427): unsure at all n locations
tgagatgaggaagtgttgaagggtgaaacttcctgcttttattgttgaccacagagtggtacctggagatatgtcgcgggggtcaggagaccttggggacgtcaggtggggtgctattgcccaaaaccaagcttgaccaatcccgacccaacccgggcatagtcggtcagtgagaacctgtgatgtacctaagcaggcgagctcctggcagtcaacagataaaaggaaaacaagaccacaaagcaaggaggcttgtggtggctggccagctgtgaattttgtgtaatatgtgagatatggcctctggtaatcgattaccaagggtgggtaatcgattacaaggcttaanaatgaagacaggaggctaagatggtctctggtnatcgattaccagcggatgtaatcgattacaggcttgaaacggagt

SEQ ID NO: 215559 - DNA, 325 bp, Glycine max
  unsure (1)..(325): unsure at all n locations
ttgaaaagagatgttgttcaccttctcgctaagccaatcttctggcttagcgagcatccactaagcacaacactcatgggctaagcgtgaggatgactctggaagaagatgagctgtacaggttcgctaagcgcaccgcttcagttcatccgctaagcgagaaaggcgcgctaagccaaaaatcactaacgtgcgctaagtggtccacacgtgagctaagcgcacgagcacgaacaaggccacctatttaagcctgaaatcagattttgtgaagggagtttggactangatttagagctttgcatgtctanggtttctagagaga

SEQ ID NO: 215560 - DNA, 361 bp, Glycine max
tatccaaatactggtattcgagagataagccttgtaaccattaaaggtgcgtccttagtagaataggggtactcgggagggaaaccttgcaacgattcaaggtgtccttggtcgaataagggtactcgagagagaaaccttttagcgattcaaggtacacccttggacgaatatggatattcgggaggaaccttacaataattcaaggtgcatccttagccgaataagggtatttaggagggaaaccttgcaatgattcaagttgctccttagtcgaataggggtattcgggaaggaaaccttgcaatattttgaggtgcatccttactcgaataggggtgggtattcgggagggaaacct

SEQ ID NO: 215561 - DNA, 440 bp, Glycine max
  unsure (1)..(440): unsure at all n locations
ttctgttcgccatatattcatatctgagcaatttcttatcttcttgaatgcaacatccaagaactttaacatgatctcaatgttgaagtttggcacataacagaacctcattcttaaattcttttaaaccttgtccagatgtttgtgaaagcctcttagcagcgatctcttgtccatgttgtagtgtttccttagcaccaaatttgtgggaaagaaaattaaatgtggttaataacaaattttgagcttaattatcaatagccacatagctcgcataccccctgtatacaggcctaaaactacctttgccaagcttatagtgatctgagaagctatttgtgacatgtactatttaggcaaagtcaaacaaaggtagctcanagtcttcttgttggctttcattgttctttcctttaaccctgatgatgaatctctgtttc

SEQ ID NO: 215562 - DNA, 477 bp, Glycine max
  unsure (1)..(477): unsure at all n locations
tattaattcttattaaatatatcaataatgatntttaaacagttaataatataattattttcacacaaacaataaatagaaattaaactgatattttatttcattatatttttaaaattctttcatattggtctaattaattaatggtggcaaatcacgattgggatcggctacatctggattagatcaatatccattttatgtaacatatgtcaaatttgattggatgaacccaactctactatccacttcaagtcacgttagttgcagcccatttcagaatgtcatggaagctgtaagaatacacaatggaaacataaaagtattgtacagaagcaataatttacaagatgggtggatcaatgcttaactatatctatcaagtataagcaagcatacctatcaccctgctctataacactaatngccttaactatatcnatttactactntcacttcctatngtcanatgacaca

SEQ ID NO: 215563 - DNA, 393 bp, Glycine max
  unsure (1)..(393): unsure at all n locations
ccgattacgtgatttttgttatcattaccaatgcatctgaacgctcaaatttataattaattgtgaagagtcatattttttcatacaatgctttgtgtaatcgattacatggttttgctaatcgattaccagtgacaagttttgaatgaaaagtcaagagatgtacctttccaatggttttcagggttttctcaaggtatatactctctcaatggttttcttgaccagacaagaagagtctattaaagcctgaccttgacttgatttcatattacttttccatntacttttgagaatcttctcatattttcttactatgcaaaacttttgatttttggtttttactatttcttacaaaaaaaactgtttattatcttttatctttgtccttgc

SEQ ID NO: 215564 - DNA, 266 bp, Glycine max
acaagtattttgcactgtcacttttggctcttacaactcaagctatacaccaaggttgaccaaccctgtattctttgtcctaccaagtcactactagcgctaaacaaataataagaattgtagtttgtttgcacagtgactaactcttactcgtcttacagacaaatatataatctactcacttaatcttttctctcaaggtgttcaaggtgtattgagagctctttcaacttcacaagaatgtacacagaactttctacaacaaa

SEQ ID NO: 215565 - DNA, 478 bp, Glycine max
  unsure (1)..(478): unsure at all n locations
ntgcttctacaatctccccctttctgatgatgacaatacctggattcaagaaagcacatacaatttgtattcggtcgttcactcattccaaaactccccctatctttntagaagttatgcttaattcttctgagttttgaagagttgaaatttgagtgaaaacttaagttaaaatttaagattctgaaacagaagtttaattaaaaaaaatttaaaatttgagtttaaaactttgtaacataattttaatttaagagatttaaagttttgagtttaaaacttgaaacaaactttaattctgtagtagaaatcaaacaaacttttaattntctaatagaaatcattaaaataagaattaacacataattaaagtttatttataaaaaattaaacttgtaaaactaacaaaaaacttatttgacaagaattcttggatgttctttanacccggttctntcttttcttctccccctttgca

SEQ ID NO: 215566 - DNA, 470 bp, Glycine max
  unsure (1)..(470): unsure at all n locations
tctttgagaaaacttccttgagaagctagagcttagctattcacacctctctcataactaagctcacctccttaagaagcttccttaagaagattcctaaagaagctagagcttagctacacatacctttctaatagctaagctcacctccttgagatgagaagctagagcttagctacacaccccctataatagctaagctcacccccatgacaaaatacatgaaaatacaaaaaaaaatccctactacaaagactactcaaaatgcctcgaaatacaaggctaaaaccctatactactagaatgaccaaaatacaaggcccaaatgaaggaaaaacctattataatatttacaaagataagcgggctcatacttagcccatgggcttgaaatctaccctaaggctcatgagaaccatannggccttccttggatctctggnctaatctacttggagtcttctatcaat

SEQ ID NO: 215567 - DNA, 453 bp, Glycine max
  unsure (1)..(453): unsure at all n locations
aaactcagcttggcattgcctcttcgattcngaccatatcgcgtgtgtttgtcatgtagctctctcaacgaaagcaccagttgttatgaattggcactgggaaatctagaattccaggtctagggcttccagagcaacaagacggaaagacaaggctagtattatttctgcttaatctgctgcattacattcatgttctatttatagatgctctatgatcattctagagaatataatcctaacagattatggctttttgtgccttggaggaattgaaataaaacaagaaaacaatcggaatgcaaacgctgctctgtgtggattgtatggattgcactgtanccagtggacagctntctctaacggtgaacttatagaatctattgtgacttggctgcatacttcactctcattttgctatggaatcatacaagtattatggaatgctaattc

SEQ ID NO: 215568 - DNA, 430 bp, Glycine max
  unsure (1)..(430): unsure at all n locations
tcggaagaaagtgatgaggtacaagctctatatgcagatcttgaaagagcccgagtagtcgaagagaagttcaagtccatagccatcaaagtctgaanagagtatgatgaactaagggacgtcaatatggccaccgctgatgccttggaacgagaaaccaagaaggcccaaaaggaagaacacgtgccagcaaagttttgaggggctttatagggcagcaatagtaagctcaaactccgaagaggtgaaaggaatcatcacgggtcaaaggcatgatcttgaaggacgagctanaggcttaccttatgtcgaaaagaaatttgtcccaacagttaagcgagactgaagggaatatgtgggccatcatcgatgagtgcaaagagaagcttaatctagcggcgactcacgagcaaggctataggatgagtac

SEQ ID NO: 215569 - DNA, 280 bp, Glycine max
  unsure (1)..(280): unsure at all n locations
tattacgtgaactataaaactcagcttattggccaatattttcacctaagtgatgaccacaacttcctttttaantttcgccaacatatataacctgtgtggaagggtacaagtacttcaatagtgattgagaatacccttttctatataagtgagtggtatggtcgcaataaattggtgccactcttggaacttnctggcttctttgtcataaagggtaggtttccatctacaagataagacataattggcatcatccaactttattggcttacaacta

SEQ ID NO: 215570 - DNA, 380 bp, Glycine max
  unsure (1)..(380): unsure at all n locations
tgcatgctgcattgaaatggtgatggcgattttgtatgttctggaggagnnaatgatgaaatggcgttactattaattttattagtcgatattttatgtaccagttctgttcaaatgaaatggagatgtaggctttatcttttgtttgtaatagttaatatgttggtttgatacgcttcgatgatctacctcaagcatgagggtctcttttgttctggattatattatatcatctggtgattttagtttatattaataatatatttgtaggactaccaactaaattaacgttagattaaaaattacgtcacattatatattaacgccttgtctagcctattatagaaagtgcgtgattcttttcttgtaaaacaactatc

SEQ ID NO: 215571 - DNA, 469 bp, Glycine max
cgctttagctggacaggagacccatgaactacaatgtacatttacaactaagctatccataattaactaaaagtttaatcatgatacttacacgtacatgatttcatgtttattattggattctaatttaaatgattactttttttcatataagaattttaattttattttttataaaagaagaaaatcaaatgtgatgtagggataatggatcatacttaaagaaaatcaacaatggaatagagaaatccaacatccctaaaattagactaacaagggttaataagataaagaaataagttacttttttttgtttggaaaattttcaatgtgatgtacgaataatggatcatacttaaattaggttttaagagatagaacccataagaccttacaatagcttatcccataaaatctataaattcttgatctctctattacttatgacgactaatattgtctatagtca

SEQ ID NO: 215572 - DNA, 170 bp, Glycine max
tatggcattctccggtagcgcagtaacagaactgacaccggagcaagcggccacggctaaaccttttgaccgtgtagtggttaccggtcgttttaatgctattggcgaagcggtgaaagccgtttctcgtcgcgcagataaagaatgtgccgcctctttttatgttggcg

SEQ ID NO: 215573 - DNA, 396 bp, Glycine max
  unsure (1)..(396): unsure at all n locations
taacgcggaananacgatcaccagataggatacgttggttatgactgcgcacagccagtatccccatgcggaacaaaagccgattagctcgccaaacccttcgcgggcataggtaaagataccgccgtcaagttcgggacgaatgcgcgtgaggatcagcatggcaaaggccagcaataaaatgccagcgccagtaataccccagccgatgagcagtgctgccgggctggcaactgccgccatattttgcggcagactgaaaacacccgcgcccagcattgagcttaataccagcgcggtgagtgcgctcagtcccagtttcttttccatcgatatccagtgattaaaacgtgataagaagaataaatattagggcaaaacgcataannaatggag

SEQ ID NO: 215574 - DNA, 94 bp, Glycine max
caggcgatgtgcttataagttctacatcctagagtatggtcgactcactataatttctagcacttcagattcaatctccatgtgcatgcgtaac

SEQ ID NO: 215575 - DNA, 264 bp, Glycine max
gtttggttcaatataataccaaaattcacttatttcagttttcattcaatcctttttcaacaattatgaaaaaatggcccagcccttccataactttaacaaaaaaaacttaatccgttaaaataaaaaattcataaagttaccgacattcctgagttcgacacagattccgaattcacattccttcatatgtaggaccttggagtcaacgggaacacactatcggctctgtgtgtgtgtgtgaccaccacaaataactaaaac

SEQ ID NO: 215576 - DNA, 462 bp, Glycine max
tctcttgcacatgcttttatgtagttgagctttggaatgtctgattcttggaccagtctctctttccccactaccgtgtccaattcttctacagcgcgttggagcaacttgggttggtttatcatctctccaagaccccattcaaatgcatttgttggattatccattgctgccatcatcaattcctacaacacaagttttataggaattataaagttggtttaatggtgaaaaaagatgagaggggtgaggggtcacgggtttgactcctcctactataataaaaaattaataattaaaaactaacatttatcaatagaaaagtttcatttttataatctaataagacttttaatttatctatggagtattctcgatttgagttgttatgatatatatacccaaagaaatttaagggttttcgtacaggtatatttcggatcaaataatagaatgagtttg

SEQ ID NO: 215577 - DNA, 458 bp, Glycine max
  unsure (1)..(458): unsure at all n locations
agcttgttcaatgaattccacagattcaaatataagtgattagcaggttggacaactcttgattcatataaaagtatttaggatagcgtactcagcaaatatgaagatttaaatacgaacttgctcattagtctactcattttttagctttgcaaaactgcctttcgagttgtagaacaattgggaataatgttatatttttgttacttttgtggcataatattagaagttaattataaagcgcgtgattgaacattatttcctggcataaatatgctatcaatcttgttggttacacacttacaccaattctcgttagtattctagtaccacaaacaccaaattcaaaacaaaaatgtcttgtatcnttttgtgagttggtggtgaagagagaaatatactggatagaaatacaagagagataattatataaaaacttaaatatggtttttatctct

SEQ ID NO: 215578 - DNA, 399 bp, Glycine max
  unsure (1)..(399): unsure at all n locations
taacaattaanagtatcagtagtgttcaagacaactaatgtttatctgagtttaataatcaagcaccattcaaaaggatgaaatattgcagtagtacgggttaaaaacaggttcaactgtaatccataacaattgtattaatggtgctgatagttacacaaactattattggaggaagccaataaatagtagcactgtgattntagctaatagagtttagttgccagtacttttggttagatttttcattgaacaaaagaaatatganacataaataacagtcttggactgagatcctgaaagaaatgcatcctttgacataattgactcaaaagaatactggctaatgatggctaggatcctgtaccaatcanaaacagaagcatcatgataatgtga

SEQ ID NO: 215579 - DNA, 436 bp, Glycine max
  unsure (1)..(436): unsure at all n locations
gcagcttgcacaacactctgagcgtaaaagtgtgttttttttttagaatgtatataggtgtatggcaattagaatatattagatgttcttgtatgttgacatgggtaataggatactttctacacatgcgcgtgtgcataaatggattacatgagtttggtctaaatcagaggggctagcacgacanttttgcgttaatataagcattatcttgtaaaactaacttctaaatgtttgttctcgcaggaaatggccccgaggaaacttgcctcanagagatccaggaaggataaagcggccgaaggaactagttctgctcccgagtatgatagtcaccgctttaggagcgctgaacaccagcagcgctttaaggccatcaatggatggtcatntctccgggagcgacgcgtccagctcagggacgacgagtataccg

SEQ ID NO: 215580 - DNA, 475 bp, Glycine max
  unsure (1)..(475): unsure at all n locations
cactcagaatactaagctctgaatgaggctgaagaagctgctgctcaggtgaacaatattcggtgtagannaancnatctcagcctcatttgtcacaagatagtgacatggagtttatggtaaatatttgtcacaacaaagtagttttatctcaacctaatttgttgcaacactccaattttatatattacaaatattcatgtttggcatttacatgtaggtccctgcaactattgtttcaccaatagcaaggaataagctagccataacaagagccaaaaaaaggaaggttgctgataaagatgatgcagacaactgaagaagccatttttgttgcattctgaaggttgctgaacggtgctgaagacccatattctgntgtcgcatttgaaggttgctgagcttgaacgttgttgatgaaaaaactgaagaagcatttttgttgaatttgaattacgatgtgagttgatatttg

SEQ ID NO: 215581 - DNA, 456 bp, Glycine max
ctgcagctatgatagctgacccttgaaaatttttaccgcccaagacatttatagaacatgttgaaagtatgggcattattgctattgatgatcattaagtgtaatttaccttatgtaattttgctgacactctgagctcaattatgatatgtttctgattacctgttctctatgtttgcatgcatgtttgtgttaaagtaatgttaacaggttttgtcttgaatgaagacattatgttggaccaattatgtactcctaactaatggtcatattaaggagaagactaatttgtagtacatggaagggactatgtcgattagatgatgtacaaccgccatgactcgaattggttcctattcttaatcatgaaattatgatgtacccaatgtatagaacaatttagtcatttctaatgcgcattatgttagttaatctattatttattccatgcataat

SEQ ID NO: 215582 - DNA, 456 bp, Glycine max
aaatgagggctttcaacgagtgatgtgcttcaattttcaaacaatgataaggaccatcacaacgcgattagcttagcagtctaacacgacaacacgacagcgatgacaacaaccaccacgacgcgagtagctcagcgaaagtcattttggggggttaatagcttgagcaatgtaaagtgagtgagtagagagagtcacgagagtcattttcgggggttgctgtacgacgccgtttcgggttttcataaactcgtggactcggagcatactcacgagtctacccaaactcgttcgagtctactcaaaatctgacgagtctattccggtttcgattctacttccgatttaactcgccaacccttattaaaatcgtaaaatcgtagaattttacgaattaaatcgagagtttaacaaccatgctcttcgacatggaagaagtaacaattgacactaact

SEQ ID NO: 215583 - DNA, 230 bp, Glycine max
  unsure (1)..(230): unsure at all n locations
tttccttgtatagaagctcactacaagccttaagtgaaaaaccatgatattaccatatccttaaggaattttggagcttcggaattgtttggggaataagtgcggggggtttatgattcattggacaactngtcttgttggctatgcttcatgatgtactttgggccatactcgatgtacattgaatactggtaaatgttggacatgctgaatgaaatgctgtttctcaa

SEQ ID NO: 215584 - DNA, 465 bp, Glycine max
  unsure (1)..(465): unsure at all n locations
tctttgaganaacttccttgagaagctagagcttagctacacacacccctctcataactaagctcacctccttgagaagcttccttaagaagattcctaaagaagctagagcttagctacacatacctctctaatagctaagctcacctccttgagatgagaagctagaacttagctacacaccccctataatagctaagctcacccccatgacaaaaaacatgaaaatacaaaaaaaaagtccttactacaaagactactcaaaatgccccgaaatacaaggctaaaaccctatactactagatggccaaaatacaaggcccaaacgaaggaaaaacctattctaatatttacaaagataagcggtcttatacttggcccatgggctcgaaatctaccctaaggctcatgagaaccctagggccttccctttgatctctagcccaatctacttggagtcttcta

SEQ ID NO: 215585 - DNA, 294 bp, Glycine max
atatgacatgtcccacttgtactttgtctatctaatttgcatcctgaaaaatctaaatctaaaaaacctgttaagtttaatgaggtacctttgggataccacaaatttacattggttgtacccttaagatacttaatgatccttttaacagtagctaagtgagattcctttggatcgaactggtatcttgcacataagataatgcttatagcatgatatccgatatacattcaattaagtagagaagtgatctgatcatacctctatatattgattcacccactgttttacctt

SEQ ID NO: 215586 - DNA, 443 bp, Glycine max
  unsure (1)..(443): unsure at all n locations
ntccaaagttntctggttntctaaaccttganaacttgttctattcattcttttcatctcttctccctttgccaaaaagaattcgccaaggactaaccgcctgaattcttttgtgtctcccttctcccttgttaaagaattcaaaatgacacagtctgagaattcttttgattcttccctttcccttatacaaaagtgttcaaaggactaaccgcctgagaattcttttgtatccccattcacaaagtatcaaaggtttaactgcctaagatctttgtcttaacacattggagggtacatcctttgtggtacaagtagagggtacatctacttgggttgttgactgagaacaagagacggtacatctcttgtggatcagttctagtggagggtacatccactangttcaaagagaacaagggagggtacatcccttgtggatc

SEQ ID NO: 215587 - DNA, 287 bp, Glycine max
ccacccatgactgtctttagtagcactctcctattgcataacatgtgttcttccgttgctactacaaactggcatgccacacaatttatggaaggttaaaattcgatgtggcaagagggaatatccgaattagattcacatttagaattgcaatgcctcatccaatgttaagacttcacctatgcttgagttggacaccaatacacgtgctatcaaatttcagcacaaatgcatataatatagctttcttacctaataatgccggccattggcgatttgtcgtttta

SEQ ID NO: 215588 - DNA, 405 bp, Glycine max
  unsure (1)..(405): unsure at all n locations
ttgtagtatttgntggtataatntgcctgtttcattatgcttttaatgtctctagaggttacttccttcgtgacatcttttgtcttgaatggaattgccatgacaggtttgttgttactgtctttgatatttggtagttgatattgtgttgtgggaggtaattccgactggattaactcaccatccttcacttgccaatttgttatgacattcgttgttggattacctatgatgtcttgtttccaagggtagtctatatcctttctgatggcataagcatgaaaccaatcaaagaaaaggacattaattttgactctttcgacaaattcgtagaacttgtcttggatttgttttcttgttgtaccctttgaatgttggaaaaaccatcttctttgacgttcattc

SEQ ID NO: 215589 - DNA, 75 bp, Glycine max
ccccccctcccacccagaagtgtttcccaacctcctgcctccaagaaacatgcctgaaccacattgaaaaccccc

SEQ ID NO: 215590 - DNA, 440 bp, Glycine max
  unsure (1)..(440): unsure at all n locations
ntacttcaatattntccagatcatcaagaatcttgntgttatcagccaattgttcagtggctgttcttgactntgtcatcttgaaggtgtacaattgttgcttcaagcatagccgatttgcaagggactttgtcatatacaatgactccagtttcaaccacattgagactgttgtcctttctcttgcaacttctcttaaagctttatctccaaggcatagaatgattgcacttctggctttagcaatcatctctgatttctcctttgagcttagagattcagacatcctttcttctcttttaagagcttctgcacagccatgttgaatcaagattgcttccatctcgattctccataacccgaagtcattntccccttgaaaattctcaatatcgtactttgnntgtcccatctttcttgatcttgatcttgtccccaca

SEQ ID NO: 215591 - DNA, 209 bp, Glycine max
  unsure (1)..(209): unsure at all n locations
catgcaagctnngagcaaatccgaacgactataactttttaaccggacataccgatcgcggcccgtgtgatatcgacacgctccaaaacgccaaccgaagccctgacaaaaatctaacgacaataactcttaactcggatgtccgaacgagccctgcaatacgacgagaccatcgaaattgaaaacggcagctcccacaaaaggccaac

SEQ ID NO: 215592 - DNA, 387 bp, Glycine max
  unsure (1)..(387): unsure at all n locations
tctgtccctganaaactggntcccagaagacaacagggtttgaaattgttgaanaccctagccttgcaacaagtcctagggaagtagacacggagatggacaagaaaattcgcggtattgtgagtagcattttgaaagaagcctctgtgcctgaagctgagaaagatgttccaacatcttccaccccagatgtttctgtgcctgatgttgagaaagatgttccaacatctttcgctccaaatgctgaagccgtcccttcacccagtgaagaggaatcaacggaagaagatgatcaagcctcagaggagacccctgcaccaagggcaccagaacctgcttcaggtaacctcattgacttggaagaagtcgaatctgatgaagaaccca

SEQ ID NO: 215593 - DNA, 348 bp, Glycine max
  unsure (1)..(348): unsure at all n locations
ntaagacatttagcatctgcaagttaccattgataagaaagccttcctccacttatacatttattgtctgcctacaaaattcaatattcattctaaaatgacaatagaccctactactcttaagtattcaatattcattctaaaattgagaattcaatattcagtattcatacctttttgctctaacaaatctgttgttcatctgatagcaatcaccggagaaagaacactatatcttcttggtgaatcttaatcatgaatagaaacaagaattatcctcttacagctctctttgcctgtcacatgaataagtaacacttttaatagccaacaagcagtttcacatac

SEQ ID NO: 215594 - DNA, 396 bp, Glycine max
  unsure (1)..(396): unsure at all n locations
cgcatgcaagctngaacatgaatgggtggctctctattattaaggcngaacataactcggcttggttttctctcacttggaaggcttcagcataacttcatgatgccccttgatgaactcttaatgctccacaaaagactgttgaagtggagcccactcacatgacaaactcttggaagacacacaaaacaagcgacaattggcaactcatgatacgtcggagagtcattctaaagaacctttccgatgagcattatgaacgtacatcacaatggagattctgatgtcaactaagaatggatcaatatgaaagttgcaccttatgatgaagctcaacttatatggctttctgaataaacatagcttcatcactcctaacccgactctccaacacaa

SEQ ID NO: 215595 - DNA, 365 bp, Glycine max
tagaaatgtgacctatgcgcttatgccataatgctactgagagtggattatcaattctacgcttactaccacgcaattctgcattaaaggattcaccatacgaagctacaatatcaatcaaatatagattatcattaaccaagagtgaaccagttccaacaatatctgaattaaaagacaacctgaacacattgtttccaaatgaacacgaataacccacattgtccaaataagagagtgataccaaattcccgctaaatgaccgtacaacaaaagtggtcttcaaatccaaatcaaaatcagtacataataataatctaaagtgccttacaggtttcacttctaccgatttaccatcttccaca

SEQ ID NO: 215596 - DNA, 424 bp, Glycine max
  unsure (1)..(424): unsure at all n locations
tattatgcaaggcacattcttggtgaggaagctccttcttacatggctcattcgctaatggatggagcctgacctctcctcttctcctatgccttctgatgcatctacatggtggaaaatcaccattgaaggacctcaatgaacctcaaagatccagcctccatataagctacacaagctagcttccatcaagtggtatcgaagcacaatagcttcaagcaggagctccttagacctctattaattctatgctttacattctcttccattggggattcatcattattgtccatgtatctcctcacatgtcttgtgctaaatgtttttaacatgattctttagagtttccaccaattaaacttgctatagaagctagatctgaatntctatggttcaaatctcttgttcttattcttgaatcatg

SEQ ID NO: 215597 - DNA, 390 bp, Glycine max
  unsure (1)..(390): unsure at all n locations
caagcttgatgtggcttctgtgatgtgttanaaattttttgcagagaaggaaacngaagcatcgaactctattatgttatcatgcttaacaactgcagaagagcttagaagggagattgaggaggccaatgaggagcaagtacttgctgaactagctatgatcgaggcttcgaaagaacttgcagatattgaggcccagagagaaaaggaagcaaatcaattttcattcaatttggaaattgcgaggagaaagttgaaggaggccattgaagacattgatgagtcaaaggagcttgaaatgaaattggctgtgacaatatcagatgttgatttcttgcaaacgagtaaagtcagtcaggatataataaaagggtcaaggagatggagtgt

SEQ ID NO: 215598 - DNA, 475 bp, Glycine max
  unsure (1)..(475): unsure at all n locations
tatcaactagtgagattctntgagaccttatctttntcttgatcttgtatgcttaatcttgaattaatcttgaagcaatgcttaatctttgaatgtttgttgaagctatcttatttgattatacttttggcatcactaaaaccctgtattcatatatttacattctccacctttntgatgatgacaatcattatcaagtgaattcttttcagcatcatccaaacctgtatgattaacatatttatgatttttaataagagaaaaagagagaaaaaaatgagaatctaaaatccaaatatatttttgtttatctatttttttctccttttgttaccttcgaatcaacgatttagatgtnttggacgaattctcttctgaaaagagntttcgaattgagccaagtattcttaaattttttatatgacataatcaactttgatcaattatttttttttttgagaaatctatagtactc

SEQ ID NO: 215599 - DNA, 260 bp, Glycine max
gctgaggcactaaaattctaatcaaattggtgaaatattaccaatgtccatttgacagatttgtacatggatatatatgagaaccttatgttcatcatgaagaaattatcgcatgctatgtctatgaaaagattggtcacatgacatccacatgtacacatctatcaaaaattgggtattcctatgcttccaaaactaacatgaaatgaccccaaacggtttgtgcacctaaagagaaaatacattatgttgccaatatc

SEQ ID NO: 215600 - DNA, 448 bp, Glycine max
  unsure (1)..(448): unsure at all n locations
actcaagctntgcaactattcatccttggcacaattgtcagaattcattctatacctgcattagtatagtcgggccaaccaattccaaacaagtcatattccattgactttttttggtcattcaaggcatgtattgatgtgtttgaattctgtaaacccgtggtgcaaatcgatgaaacatgactttatgggtgatacaaagggacgttattaattgcaactgcacaagatgaggctaacaatatatttccattagcattnttcattgtcaagggagagacagcagatggttgacacttttttttgcaaaacttgagaacccacgttacaccacaacatggtatatgcttaatctttgataggcacaagttaatcaaaagtgcatacaaacgacctgacagtgggtggacaacaggcaactcatcacatgttttctgtattcttcaca

SEQ ID NO: 215601 - DNA, 251 bp, Glycine max
  unsure (1)..(251): unsure at all n locations
tatttagacaaaagttgaagatgttctaagcttgttagaagctcttgttttaattatcttctcactaaacaggttttttagaagcttttgttattagttctttttgttactgtgaaaaaaataattnttttaactacaattttcgcgggtggggttggggcggagcttggaaacccgtccccgttgggggcaggtctgggtgtataatttttatccccgacgggtttggcggcggtggcggtgctgggtac

SEQ ID NO: 215602 - DNA, 474 bp, Glycine max
tgtgcaaatctaaggggagctctgtcaaatgatagcaccatattaataatagggtcagcaaattatgcaacatacaaatggagtcaggcaatcttttaatcttagtgtaggaaaggtctagataatgcaaaagattcaaattgcttatatcatcaactaactctgtgagaagacaactattaaaggataacacacgcaaatgttttattctagaaaacaaaacacgttcatttctgtttatcaaacctcatctgccaatttctcattttagttccataagacaaaggagtctgttatacttacaaatatgctccaaaaatgtatcatcaaggttaaatttgtgagagcatgaaatgtggcatgttgtcttttgtatatctttctcaaaacttctgtctatttgtaaacaaaaatctcctaagatagaatttgctaaatcattaagaagatcatgcatagtgaagtgagaaccat

SEQ ID NO: 215603 - DNA, 273 bp, Glycine max
  unsure (1)..(273): unsure at all n locations
catgcaagcttaaggtgattattataattcgtatttngtcgttattcaaaacttcagctntaaaaagtttaaaacaaatttagatgttcagaaccaattcacttaatcaaaatcaacttgtttgtgacaaagttgtttacggttgggttttataaaaaagtaacatgaatccaacctaccttctcaaggaggaagctacagggtacaaattcaataaaacggacaacatttttttgtgtgtgtgtgcgtatgtgaagggtaaaaaagtcggcc

SEQ ID NO: 215604 - DNA, 310 bp, Glycine max
atattcgaatattacccctgtggaaccttcacccaacgaggacactgaccacaaaatatcatcacccatatagacaaaatatggcaggcggggggcacgctaatgtcctgcccaacaaaccttggatgcaaccgcgatcagatgcgcacaccaactagaccttgacaggtatacaagccatacaacacttgccttgaaagtaaggagcgacccaacacaatgcacaaacgatatctgcaaggcataacagcaaacactgtcaactaccaatcagaccatgggaagacaaagaaacggacctcatacccat

SEQ ID NO: 215605 - DNA, 265 bp, Glycine max
  unsure (1)..(265): unsure at all n locations
tgcagctcgaaggagagagagaccatcttagcttctagcaggcngaaaaagaattagctgttgctcaagtccaaaaaactgtctcagcgtttgcgagacaagaccacatgctaccatcgtagcaagtaccaaaagaactaatctacccggccacgacacaaaggcggacagttgcccaaggtcgcggaaaagggcagagaagtgatcactcgtacataagagcacatgggtggccaattgttacttgacagagcaaaccttccca

SEQ ID NO: 215606 - DNA, 400 bp, Glycine max
  unsure (1)..(400): unsure at all n locations
tggcctcaacagactacttattctcagaataanatgctattaataagcctcctatatgtaaaggagagggttaccactactggaaaaataatttgcaaatattcattgaagcaatagacttaaacatttgggaagccatagaagttggaccctatgtacccaccatggtggctggatatccaacaatagagaaacttacagaagagtcgactgaacatgaaagaagattagcgcagcacaacttaaaggctaagaacatcattacttctgccctaggaatgaatgaacattttagggcttcaaattgtaagagatctaaggatatgtgggacactctacaagttacacatgatggaacaactgatgtcaaacgatctaggataaatactctaactcatga

SEQ ID NO: 215607 - DNA, 463 bp, Glycine max
  unsure (1)..(463): unsure at all n locations
tcttagttcttatttatgaacaaacacgattcatatgctgtacggnttggttcatattgctgctggagatctacttanggcagaaattgccactggaagtgataatggaaagcgagccaaacagtatatggagaagggacagttggtccctgacgaaattgttgtgatggtatgtatgtatgtatgtcgtgactaatttctcttcaattcttgtttctcatatcatatccttgtttttttttatgctatatagatggttaaggagcgtctcttgaaaccagattcgaaagagaatggttggcttttggatggatatcccacgagcttatcacaggccactgcacttgaggctcttggctttcggcctcatatttttcttcttcttgaggtttctgaagatgttcttgtggagagagtagttggactgagattagatcctgttaccgcaagatattcacttgag

SEQ ID NO: 215608 - DNA, 259 bp, Glycine max
ctaaaggtggtcttctttattggaagtgcggtagacaggctttgtggttgatttaaggatggccttcgtggataattgggtggtggggtaaggaggaagtttgctattggctgagaaatgacattgtcgggttggtgggaaacttggccgtatacgaatgatagtcacagcatgggtttcttcctctttctcaccctcttcatttggcacagttttctcactcgtcctattatgatgatcaaattgcctctttttgatc

SEQ ID NO: 215609 - DNA, 443 bp, Glycine max
  unsure (1)..(443): unsure at all n locations
ntacttcaatattntccaaatcatcaagaatcttgttgaaatcagcctattgttcagtggctgttcttgactntgtcatcttgaaggtgtacaattgttgcttcaagcatagccgatttgcaagggactttgtcatatacaatgactccagtttcaaccacattgagactgttgtcctttctcttgcaacttctcttaaagctttatctccaaggcatagaatgattgcacttctggctttagcaatcatctctgatttctcctttgagcttagagattcagacatcctttcttctcttttaagagcttctgcacagccatgttgaatcaagattgcttccatctcgattctccataacccgaagtcattttcccctngaaaattctcaatatcgtactntgttgttcccatctttcttgatcttgatcttgtccccacagat

SEQ ID NO: 215610 - DNA, 385 bp, Glycine max
  unsure (1)..(385): unsure at all n locations
agcttctgacactagctgtatgaataaatttttcttgagcataanattgattccaccgcccctacgaaatactaacttctgagagttaaatgctaaacttacctcttcatgtaacatagtcatttcgtgagcaataacatattgcctgcaatatcatcaaattaaagagtcaacttatctgatttatatattacaaaaaaaaaaaaggattctacaactggaaattttgagaggggagacaaaagctataatgataagtgattagaagaaaaggccgacaactgtatagtacttttatcgtggaagtaagcattattatatagcattatctgagtcgtagtttgatcagctgagatcatgagcctttntcttcttgatcctgaat

SEQ ID NO: 215611 - DNA, 454 bp, Glycine max
  unsure (1)..(454): unsure at all n locations
ntatgtttcaatgtatatacaacaacctgcatttcaaattagatttataaccctagtcctagttcttggtcgactcattttgtgcttcatttgaatacttatttaatggaagttcacacaaatttcattgcttcatttgagcaattgttttctattatcctatggtattcatgaactagcaagagagactacaaaagagacatccttaaatctttttgattctagaaatttagtttagggattgaaattgagggaaagtgtcttcatcattatgttctagtgaggaaaaacacaattggtggagtgattcaagctcgtgggagtttgttgtgtacttataacaacattaggagatatagttntcaaatctcaagcttggcttagatcgcagatgtaaatcacaagttgtcaccaaaacaccatgaattgggttgcactctcattataccctatt

SEQ ID NO: 215612 - DNA, 418 bp, Glycine max
  unsure (1)..(418): unsure at all n locations
tgcanaatggaagcaaagatgtctctctatatgtggcatattaaccctcattaactctgtnttaacagctttacccatttacttgttgtcttttttcataatccctaaaaaaatggtgcataagatagtctctattcagagaaactttctttacaaaaacctggactaatatcaagcatcttataacttctaaggagttatttactttcaaaaaagcaaaattaattaacagataccaaccttcaactatacagattattgaggttcttattcagatagcaaagaatgaggaaattgatctattcgtcaatnttgttgcaaaaatagctacaaaatctaagcagaacctcagaagagcaatcatggctctttaagcatgtcatgcacacaagtaaacttctgactgacaacatattta

SEQ ID NO: 215613 - DNA, 463 bp, Glycine max
  unsure (1)..(463): unsure at all n locations
ntgaatgagggtgaagaagctgctgctcatgttcaacattatccgatggagattaatttatctcaacctcatttgtcacaagatagtgacatggagttgatggtaaatatttgtcacaacaaagtagttttatctcaacctaatttgttgcagcactccatttttatatattacaattattcatgtttggcatttgcatgtaggtccctgcaactattgttccaccaatagcaaggaataagctaaccataacaagagcaaaacaaagaaaggttactgataaagatgatgcagtataaagaaaactgaatatccattttttgttgcattttgaaggttgctgagtttgaagggtgctgatgaagaanactgaagaangcattttttgtgcattttgatattangatgtgtagntgtataatttgaaagcttcactggcatgtgaaatgatgtanacatatgg

SEQ ID NO: 215614 - DNA, 402 bp, Glycine max
  unsure (1)..(402): unsure at all n locations
cactttngtctcttaatacctttattttaaatcaatattctcaaacatcaaattaattaatatattatttagagagtattgtcaaatattttttttttggatttgacattaataatacgtaatagctttggtaatcctccttcttaaatgaattaatccctctaatatataatattacattcttctctaattataagagattcttttaactaatttacatcctttaatgaaattgactaactcattcaataacatatttattaatatanttttttcaaattatttttaatattattggaactcaccattctgttaatgagatgggatagaaataaaaatatcttaggtcgctcaataggaacctatggtctaatttacattagatccatttcaagtcaaatc

SEQ ID NO: 215615 - DNA, 404 bp, Glycine max
aattaatccactagtatgtgtaataaatatgtctgttttaaaaaaacacaaacgtcaaaattcaaatagatttattatcggattttagtcactaatccttcaaatctcaaaatcagattatcgggaacagaaatctacaaattccggaaactacctgtctggttcaccattgcatatttgcagtgcccaggcctgaaccatcccaagacctaaacccatggtttaccaattttttttaaaaaaaaataagggaaataaaacaaaataatttgaatctaatgtttataattattgcattggaaggtaaattttttaaaatggtttaactaaaagttacattcgagtataatttgtaaacgttatctaataattacattactaagatcaaatttcacaattaattg

SEQ ID NO: 215616 - DNA, 425 bp, Glycine max
  unsure (1)..(425): unsure at all n locations
agcttgagatgaggaagtgtagaaaggtgatactttctgcttttattcngtgaccacaaagtggtacctggagatatgtcgcgggggtcaacagaccttggggacgtcaggtggggtgctattgcccaaaaccaagcttgaccaatcccgacccaacccgggcatagtcagtcagtgagaatctgtgatgcacctaaacaggcgagctcctggcagtcaacagataaaacgaacaaagaccacaaagcaaggaggcttgtgtggtggctggccaactgtgaactttgatttatatgtgagatatggcctctggtaatcaattaccaagggtgggtaatcgattacaaggcttaaaaatgaagacaggaggctaagatggtctctggtaatcgattaccaaggggtgtaatcgattaccaggcttg

SEQ ID NO: 215617 - DNA, 379 bp, Glycine max
atctgatagtagagatttaagttcaatttaattctttaacacttattagtaatttattatattgacttggacgattgagtgattctgtagacattatctttattgttagggaaaccaaactattacacggaaaacttgggataatttgagcgtcaagagagcttaactattacaagacagacacaatgacagactgacttatcacaccttggaaacagagttatctaatcttatgccatcacaaggttctataaggatctttcttaataaagagtgttcgtcaacacacgattaactactaatatcatatgtctttaataaacatcgacaccatgtttaagagataatccgtctataattaattcaattgctatgatct

SEQ ID NO: 215618 - DNA, 455 bp, Glycine max
  unsure (1)..(455): unsure at all n locations
cttgtatgtacctcgcgatgnctctccagctacaaatagattaaacgtgtatctatatttttcttctacattgcatggaatgcaattaaagctgcacgataccaataagtgtaagccacaacatatatcgcatataacaataacggtgataatgataatgatgataataataataataataatgcaagcatgtgagttgaggcatgcattatatagtgggcagacaaaatttcaaacagctaccaagaatggactaagatgtaagcttaagggtgttctgaggggaaaaatcagtaggtaaacacagccaaaataatgcaagcatgtggggcatgtatagtgttggcagacaaaatttcaaacagttactaccaagaatggaccacgatatcagcttatgggagtttacggaaaaagataatcagtgggtaaacaaggccaaaataatgtatgca

SEQ ID NO: 215619 - DNA, 448 bp, Glycine max
  unsure (1)..(448): unsure at all n locations
gcttaacaagtcttgattatgatgagactttgactcttttatctaaaaaagttntttaaaaagcttgagctagacctttatagtaaacaagtcaagttgagtcgagccttagataggccgagccataggccctagacaagcggctgagctcatttccatccctagttacttcacctgtataaagtttaattgtgattctataaagatattacaataacgtaattattgtttacactctacatgtatttatatttattttacatttgtttntgtggttttgataaactagaattgacgtttgtttaaaaactaaactaatttagaactttatcccaactttntaatctgatacattttatcctaaattttttaaaaacttacgaattttatcccaatcatttatcaattaacaagcacaaaagtttgggataaaacttacccaaaaaat

SEQ ID NO: 215620 - DNA, 463 bp, Glycine max
  unsure (1)..(463): unsure at all n locations
tgtgcttgntntgcctanggttagcatgccaccacgcgctaagctcaattctttctcttttcacaattaggcttagcgagcacctcacgctaagcccaaaacactcattgtctcacattgggcttagtgcacaacctcgtgctaagcccaaccctatgtttatggcactagtgctaagtgcccacatggcggcttagcgcccaccataattttgttgaactggcgctacgcgcccccatcctatattttgattttcttttgctttctttcacttgctttaattaattttacttatattcttattggtcctgttttgtattggttttgcagatggcctcaaagaagcgtcatgcgggtctcgatcgacctcaaagggggagcttgcatgggactcctcccgatttgtgttagagattccctggctccgctaccaagacaacattcaccttcagaacattcttct

SEQ ID NO: 215621 - DNA, 401 bp, Glycine max
  unsure (1)..(401): unsure at all n locations
gtgtttttgtgtaaattaaaattacctctcggtatctagtgaggtaaattttaagaggatccatataatcctcgaaaccgagagtggccatcgcccagagcaaatcatcgccgntaatagtctttctcttttctctctgacacttatcagaggccctacagaattcaaggaattataaattaaaagcaggcgatgataaataagaaaaacggaggagaatagaatcagaagaaaaaaaaaacacactaactcgctggtgatgaagctgatgaactcggagacgcattcctgaacggtctctttggcgtcctttgcgatctcaccgttggcaggaagtgccttcttcatgatgcggcttatgttagcgatagggagggacctgttctgctcgcgccacgtat

SEQ ID NO: 215622 - DNA, 356 bp, Glycine max
  unsure (1)..(356): unsure at all n locations
agcttagaagatttcactgcgattaaaggtttcttctcggngtgnggcttcaacagagaataacgatggtctgtggtggccaccggtggttgtgggtggtggagaagaagcttatgacgttggggaagggttctggaagaaagaaggagaaatgaatggttgttcttcaaggctacacgaaaaataagacttgaaacactcatgtgtttctactctctggaaaagaagcttttttcacacaccagaagacatatcgcagatcgcaacggtcagatcatggacatctgttctatgaacctccagaccagatttcgagaagctccagcgggtaacaaatgcacgaggacacttttacc

SEQ ID NO: 215623 - DNA, 460 bp, Glycine max
  unsure (1)..(460): unsure at all n locations
ttaaaactgatnataaagttaagttgctgtaaacacaattttaaanaaacagccaagatacttatttgcttgccttttggttgcacatggttatactcagatttttcttgaggaattattattattattattattggtgctgctgttgctgttgatgctgttggaatctcaacttcaatttcaagtgctagtcaaccatatgaagctatatttgtgtcatcaaaaactaagaaaagtgatgcacttgatccattaattgtagttcttcatgggggacgacactctgtctcattgtcaagcttttcagagccattggcttatctttctttccttggatatagcttgttaattgcgaactatatgtaaatggtatcctccttggtgctcaagcatttgatctacgctatacaatttccatcacaagtggatgtgtctattatatcctatagacctttacata

SEQ ID NO: 215624 - DNA, 420 bp, Glycine max
  unsure (1)..(420): unsure at all n locations
gtatttagcaaggacattcncacgaaaaccatttctttggtaaaataatgaacctatacaaagagagatgtataaaatttagatctataaaattctgaaagcccttttcgaagcatgcatatcgccaacatataataagaaaacaaacatggatggccaacataattctcattcatttgtttattcacacaattaccattaaaataatctcaaagcaaaaatacccatcttaattttttaaaaatatttttgtctcaaaatacagaaacaaaaaacatggcatataattattttcatttttntgttattccaccaatctcctctttcaaacaactctgttgaagcactcttattatcattcgagaattattataaaatattcaagcagaatactcatttaattttttaatattaactcaa

SEQ ID NO: 215625 - DNA, 467 bp, Glycine max
  unsure (1)..(467): unsure at all n locations
tgacttctacagcctcaagtgtgagagattcttaatttatggcgangtcagcagntgcttaatctcaaaattcttgatgatgaattgcaagcagcaatgattttatcacgggatgatacaaaagttgtgctagttgcatggtttctattaatgatctcagcaatgtcgcaaacaattcgtcctagctgccaaaataaatgtggaagtgtgaacattccatatccttttggtacaactgagaactgctgcttgaacagaaacttttatgttgcttgtaacacaagtcacaaccctcccaaaccatttctgtggaatgtgacaaaaaatattgagattntagaggtgtcgttgaatggccattcgaggataaaatcccctgtagcttatgtttgctatgatgaacagggtgtgctagtggattccgggaaatcattcatgactttgcaagcattccacttctcatactc

SEQ ID NO: 215626 - DNA, 451 bp, Glycine max
  unsure (1)..(451): unsure at all n locations
agcttctccctctattcccaatatatagggggaggagggcacaacaaaaaggttcaaccctcctgatagctgagaatcacttgaaattagtgagaaaaattgtttccgtgaagaaaatccaagtcgaggtgcttcctttcgtaacgcttccgagacgtttccgtgggtgatttcatgaagattttccgccgttcttcatcgntcttcgttcattcttcatcgttcttcaaccactaagttcctgaaatcgaacttttcaattcattctatgtacccttagtggtccccacttgtttcgcatgcttttattttcatttcatttactttctgtactcccttttgatgtgcgttcagtattcatttaagtcatttttctcgcctaatcacaaaataaaataaatttctaccgatcatttgaattgaacatcttttaattctgttaaatgaaatc

SEQ ID NO: 215627 - DNA, 445 bp, Glycine max
  unsure (1)..(445): unsure at all n locations
ntggcanatcctaaatggaccaaagcaatggttgatgatatggcagctntagaaaaaaacaacacttgggatcttctgtccttaccaagaaggaagaaaattgtgggcagcaaatgggtatttacaatcaaacacaaagctgatggaactattgagaggtataaaacacgacttgtggctaaaggttacactcagtcttatggtgtagattaccaagagatgttcacaccgatagccaagctcaacactgtgagaatacttttgtcgttagcatcaaatcaagattggtctcttgtacaatttgatgtgaaaaatgttttcctatatggagaaattttacgagaaatttatatggattccccaccaggcatgatatattcaaatagaatgaaggtttgcaaatgaagaaggctatatatggattaaaacaatccccaagacatgg

SEQ ID NO: 215628 - DNA, 390 bp, Glycine max
  unsure (1)..(390): unsure at all n locations
ggacctataaatactaagctntatagtgcgggttcgggagacaaaggtcaagcgttctttatatgcgaagatgatattctgagtactttggatttggtacgaccatgctctcctgatttccagctgggaaattggcgagtggaggaacgccccggcatttacgcaacaagcataatgtaaacctttacggttttaaaagctctatagttgggcctaggctttagagtttttccttttgttaaggctttgtgtcttttggttttgaatttataatacaaggatctttcttcatctgttcctggtctctacccattctcattcatttgcatgtttacttctttttctgaaacggcagatccgatgacgagtcccccgaaggtactaatacct

SEQ ID NO: 215629 - DNA, 459 bp, Glycine max
  unsure (1)..(459): unsure at all n locations
tcactgcngcatgcaagcttcatcaaggtgatcagattagtttcttaagtgattgaagacgcattagtacctatatagatatatgcgggcttatgcaaagcaagtatgatgaatgggctgagctgcatataaagggatataattaacatcctgaattttggaaaattcgtataattccttgctttcaatctcttggaaaattcatatcctcttaaatttattggtaatgcctgttactgaactaaatagaaacaaaagtttttaagctgagatctgctaccttgatgttcttcatctttccatccttcagtttagtattatagaaaaactctactgcttttactttggtttaaaccttgattttcttaatataaataatttctctatagctgtctaacattattngcctcatgaaggtacacgtaaatatactttgacatcatggctcacttctggata

SEQ ID NO: 215630 - DNA, 436 bp, Glycine max
  unsure (1)..(436): unsure at all n locations
ntatctaatgggaatctggcaaaatctgtctatgagaatgaattgatggcccttgtgctttgtattcagcactggagacattatttattgggcagagaatttattgtgcacacagatcataaaagcttgaagcattttttacaacagagagtttcatctccagatcagcagtgttggttggccaaactgctaggctatcaatttgaagttaagtacaagcctgacttagagaatagagccgatgatgctatgtccagatgtcatggttaggtagaaatgaattctattatttcttttcccttgtgggctgatagacagaaactnttggatgaaataactaatgacccgtacatttaaaagttactgaaagaagtgtaggagtctnctaatgttagacctgngtttcaggtgaaacatggagttttactttatcatg

SEQ ID NO: 215631 - DNA, 454 bp, Glycine max
  unsure (1)..(454): unsure at all n locations
ggctcgtcttgctgatatttatcatgcagactnttctgatgatgaccgaggaacaattagggatcaacttgaaacttatgtgcttcaagtgagaagaaatgcttctttttccacttgtgaagatgttcaaagtttggctatgaagatggttcaaactgagaaacatttggtatttccattggtttataaacttattgagctagctctgatattgcggtgtcgacagcatccgttgaaagagctttttcagcaatgaagattatcaagtctaaattgcgcaataagatcaacgatgtgtggttcaatgacttgatggtatgttacaccgagcgggagatattcaagtcgctcgatgatattgatattattcgaacatttaccgcagagaagtctcggaaaggacacttgcctcgtaattntatttaacccgctattgtaagattatgtgtatctc

SEQ ID NO: 215632 - DNA, 443 bp, Glycine max
  unsure (1)..(443): unsure at all n locations
agctngcttctacacatgggagagacaaactagataatcttcacctctntnngggggcttaacccatagagtaattcaattcctagaaaggaagacatcttactacaaaaccaccccaattattggtaggcaacttgcaacaccccaagtgttgagtactataccataaggagaaatctaacatctttgagaaaattggctccgaagtagatcacttgatcattaaaaacactttagtcccacattggacagattaaccatatgaattcctttccctctatatagagaagaccaccaagccttaggagcaccacaaaatagagtgggcttaaatgtggagcccctcatagttaataattttatcttcccaaacttcatgcatatagttgacgttaggttgtgtttcaaaatacacccatgtgccttaataagagttggggggt

SEQ ID NO: 215633 - DNA, 456 bp, Glycine max
tataaaactcagcttttagtttagatgatgcgatgggtttgagctaccttatgcactcctctaatgactatggcatcatttctggcgctaaactgctgggagttggaagccatcttctcaattaaatttctggctttagcaggagtcatgtctccaagggctccaccactggcagcatctatcatacttctctccatattactgagtccttcataaaaatattggagaagaagctgctctgaaatctgatggtgggggcaactagcacatagtttcttaaatctctcccagtactcatacaggctctctccactgagttgtctaatacctgagatatccttcctgatggctgtggtcctgcaagcatggaaaattttttctaagaatactctcttaaggtcatcccagctcgtgatggacctttggagcaggtaatacagccaagtctttgccact

SEQ ID NO: 215634 - DNA, 433 bp, Glycine max
  unsure (1)..(433): unsure at all n locations
agctntgatgcaacatatggagaggttaatgaaacatcgagatgatgcgctccatgagaggttggatcaaatggagaatagagatcataatgaagaagaaaggaggagaagagggaatgatggtgttcctagacaaaaccgaattgatggtattaaactcaacattcctccatttaaaggaaagaatgatccggaggcctacttggagtgggagatgaaaatagagcatgttttctcatgccacaactatgaggaggaccagaaggtgaagcttgccgccacggagttttccgactatgctcttgtgtggtggaacaagctacaaaaggagagagcaagaaatgaagagccaatggttgatacatggacggagatgaaaaagatcatgaggaagcggtatgtgccggctagttactcaagggacttgaaattc

SEQ ID NO: 215635 - DNA, 429 bp, Glycine max
  unsure (1)..(429): unsure at all n locations
tgagggtgcgcagcccaccatcttttcatagtagagtaccgataatgtgtctaccatcacgattatcgtctccctttccattattgggggtaccacttgggccgccagatccctccaccttttgggcgtgttctttgaaagatccgcccccctttntgcaaatgttctgtagttgcatcctatccggaaccatatcaaaattgtactgatactgcctaacaaaggcaaccattangtccttccaagaatggactcgggaagattccaagttagtgtaccaagtaacagctaccccagtaagactttcttggaaggaatgtattagcaattcctcatcttttgcgtattcccccatcttctgacaatacatctttagatggttcttgggacaagtagttcccttgtacttgtcaaggtgcaacaccttga

SEQ ID NO: 215636 - DNA, 382 bp, Glycine max
cttgtttgtgcaagagctataagtgacactaaggaatacttcgtaacttgatagcttcctccaaatttgatggattgtctagaagtgaacgtagtctcaatgttgagatgaactaatacaattctccgtgtgctttctttttcttggtttaattgacaacagaattaatgaatttgttttaaatcttatatatttatttgtttcacaaagaaaacaatttttctcattgtttaacaaagtctgtatcaaaaccttctttcatctgtttttatgtttatctatatcagacgataaacatgtttttatctttaagacaaactaaatgtctacaacacagttgaattgttatgtatatccttctcaagaataatgcatgtactat

SEQ ID NO: 215637 - DNA, 479 bp, Glycine max
tcttaccagtgttggaaaagcaccaattgcttgtaatacattacgcatgaacagttaaggaggaggaatctgctcaacctgcaaggaagatcatttgccttgtgagatcaactaagttgaatacgcattccaaatatataaaacaatttccacataacacaccaactgattcaaaactctggcaagaacttcttgagtaaaagtttgccgctgctcaaagcaagcattgcatgcgtctgtgacctgcatataaacacctcagttgtgcaatgtgtcttcattaaataaacccaatgcataaaaccaatcatcatcagatacctacctttttcaaggcaattccgtccttttcaggatcaattccatgaattgcaattaaaacttcagccggagtaagaactggacctgattgtgatgatcccttgtaaagaattctgcaattaatcaactatcaaaatgtacttaacggttcagaacta

SEQ ID NO: 215638 - DNA, 442 bp, Glycine max
  unsure (1)..(442): unsure at all n locations
tatttattggagggagttgtatgccatttttgttgtaagggtagcatttcttggtaaaaactaactctccaaatgtttgccttcgcaggaatggccccgaggaagcttgcctcaaagaggtccaggaaggacaagacggccgaaggaactagttccgctccggagtacgacagtcaccgctttaggagtgctgtacaccagcagcgcttcgaggccatcaagggatggtcgtttctccgggagcgacgcgtccagctcagggacgacgagtatactgattttcaggaggaaatacggcgccggcggtggacatcactggttactcccatggncaagttcgatccagaaatagtccttgatgtttatgccaatgcttggccaagagaggagggcgtgcgtgacatgagatcctgcgtaaggcgtcagtcgatcccgtttgatg

SEQ ID NO: 215639 - DNA, 468 bp, Glycine max
  unsure (1)..(468): unsure at all n locations
tctccaggtggtctntggcatcacatgtaaacttgaactattatcgttgagtaccttagcgacgacatggtccatgcatctgacagacacatgtagggctttgttgtgccctctcccctcaactggaatctcctcctccgtgaacgcgaggtagttattggtagttatgtgattaacaatgccttcaaaaccctcgactgagatgtcgtgtgctacatgggattcattgaggacctttattaatagtgcacgatgaggctcggagctcatgagcagttcgagcaaggagatccttgctggagttttattcaattgctcaaccactttaaactcacgttgttggatgagacgaaggaactcatgcgcctcctccaaggtcaccgcccttccttggagatcttccttatttccaactccccttactactaanggatccacctcttttgaaggggtgctgcgcatatagac

SEQ ID NO: 215640 - DNA, 279 bp, Glycine max
cctgtgctcctccgcctcccgctgcatcttcatggaggaaaatcaccacttaaggacctcattgaagcttaaagatccagtcttcatagaagccccacaagctagctttcatcaatagcttgcagaaatctttgaaggtaatataatttggttggtacaatgtttgaattaccaaattatgaagtgtaattctttcaaaaaacatcccattgtgtagatgttggaagtctttgaccttgtattaacctttcgtagcctaaccctaacttttttcttgtc

SEQ ID NO: 215641 - DNA, 365 bp, Glycine max
  unsure (1)..(365): unsure at all n locations
caccattacagatacgtgtcagacatactcctaattttgttcgggaacaaatgacttggggcatgtaacctttgattgaccgcttcaaagtacttggcaccctttgttgcacaatatgtgaagtgccgagacgcgcctaaaatcaaaaggaagcgtggttacgcaatccatgaaattccgtaatgtgatggaaaccaaaaggaagtattgttacgcaatccgtgagtttccgtaacttcttcgaaagctaaaaaagaggaaatacatgatccgtaaggttgcgtaaccttaagaaaagaaaataagtatcattacaaaattcgtaaagtttcgtaacattacagaaaaagaatcaccanaaaaag

SEQ ID NO: 215642 - DNA, 467 bp, Glycine max
  unsure (1)..(467): unsure at all n locations
tcacctgcggcatgcaagcttcatggcgaagcatgtatggcagaatttcattactattattcaatatatacaaatgaacttgatgcaattcttctagacttggagtgataacatacagtcctcttgaacccttaccccccattctctcgtcatagcgatactctgaaatgccaacaagttttgccttttccatgtactcagaacaaaactcaatatgtttttccgcaatgtacctttcaacaatagatgctacatgatggtgtagattctttgtataatcttttaagatcttcatgtataactcaatcaggtacatccaccataattatttttgtatcatgatacctcacacttgnggcaattgtgcatttcttcanactcatttctatacagtatgcaatcattagggcatgcatgaatcntttgtactccataccatcgacatagtatctcttcgctgtagaact

SEQ ID NO: 215643 - DNA, 462 bp, Glycine max
tcgtgccttctggaggaatcttatggagggcctctttgggcctgggtgctatttgcaccacacattttgctgagaacacccccctacctatatttggcgattcttttttcataaagttacggaaacttactaatttcctaacgacacttgttttctttcaggaatgttaccgaaccttgcgtattacataatcatcccctttgttgacttacggaatgatacggaacctcacgaattgtgcaacgatgcttcctttttgatttgcagcgtgtcacggaaccttacggattgtgcatcaatacttgcttttgatttgtggcacgtcacagaacttcacaaactgcctaatgatgggtgccaagcaccacaaaaagaccaaacacaagttgcatgccaccaagcttatgtccccggacgaaatagggcatgactgatgcccctcttacttgtctttattggaga

SEQ ID NO: 215644 - DNA, 457 bp, Glycine max
gcaagctgaaatgaacaatggaagctctcttcatactcaaatgatcataacttatcacacggaggttcgattcacgcacataatatatcgagacgttggaaattgaagaacgaatgctctccagaaattcaaatggtcataacttgtcacacggaggtccggttcaggcgcataatatatcatgatgctcgaaattgaacaacgaatcctctcgagaaattcaaatggtccataacttgtaaacagatgtccgattcaggtgcataatatatccagacgctcgaaattgaacatcggaagctctcgagaaattcatatggtcataacttgtcacacggaggtccgattctggcgcatcacatatcgagacgctcttaattgaaaccgtgagctcttgagaaattcaaatggtcattacttatacaccggaagccgattctggtgcataacatattga

SEQ ID NO: 215645 - DNA, 443 bp, Glycine max
tcgcgatatattctgcgccttaatcggacttccatttgttatgacatgacccattgaatttctcgagagctttcgttgttcattctcaagcttctcgatatagtatgcgcctgaatcggactttcacttgaaaagatatgaccatttgaacttctggagagcttgcgttgctcaatttcgagcgtctcaatatgtgatgcgcctgaatcggactttcgcgtgacaagttatgactatttgaatttcttgagagctttcgttgttcaatttcgagcgacttggtatattatgcgctggaattggaccgccatatgacaagatttgaccatttgaatttctcgagagctttcgtgaccgatatcaggtcatatgatatgagatcacggacgaacccgactgagcattggctatacacatcaatcgaatatgtagagagcgattga

SEQ ID NO: 215646 - DNA, 437 bp, Glycine max
catgcaagctgggatacaaccagaatgttacctattatagcaccatagtgcaagtcagcatatggctcctctccagtcaagagttcccacatcacaataccaaatgaaaacacatcaacctaaaatgacaaatatcaaaacaaaagcctcaaacttacatagtgacaaaatatcaaggtaccattaacacatcaacaattcagcagttccggagccatccatggtagagttcctctcaccaccagaaatcagcgtctgacattttcctttggacagacccaagtcgccaacctgatatcagatgcaaaagtgtaaaaggtaaagaaactactgaaggatcaactaatcaattgctccgtgctacaagtagagttgtgctgactagaaagcaagtattgatgatcaaaaatcatttagcagaatattatggtacttga

SEQ ID NO: 215647 - DNA, 456 bp, Glycine max
  unsure (1)..(456): unsure at all n locations
tgtagataattcacatagtcattcgagatatcagatcttctttctctntgagatcttaatactatttcttgtgattgttctactatatgttcatggttcaacagtataaggaacaacaatttttgaagtagaagcactagttaaaggaacttgtactctaacttctttaatcttcacattttgtgaagcttcactcccactggtttcaccattctcaatgaacctgacatttccagtttcaacaattcttgtacgatgggtagaacaataaaatatataccattttgattttactggataaccaataaaatatccattaattggtgttgcatcaaattttctttcttgtggattatatattctaatttctgcctgacaaccccaaacatgtaggtgtctcaaactgggtttcctacctatccacagttcaaaacgtgtctttttgactaccttact

SEQ ID NO: 215648 - DNA, 420 bp, Glycine max
  unsure (1)..(420): unsure at all n locations
gcaagctntatctgcacaattgacaatattttctccanggtcaccgttatgctcccgagaagcaactttatccatgttcaggattgcctcttttaagcaaccatttgcctctgccttttctgcacttctgcttccagagtcaacctttgctgtattcatgctcagggtaatcttgactctatcctctgttccctctctgcatgtgtcatcaaagtagttgttacccagcggtctggactggtatgtggtgtcgcggctgtaaccactggttntgtcatctgaccagtggctcgagcggagtgtcgacttcttcaaggatagctccggcgagaaggagaagtggtatcactgtcatcgtcggcgtcaacatcgtcgacttctttcttcgacgttacctcatccgaccatgagccggacagt

SEQ ID NO: 215649 - DNA, 469 bp, Glycine max
  unsure (1)..(469): unsure at all n locations
ntangctgctcaatggctccaggttgctacatggaatgtgttaaggtctgtatgggggtcagcagaggagcacaaaccacaaactcttgcgacaggaacaaatttctgattcaaggccagctgggttaccaagttaaccaatgcatccagtttgccttcaagcttcttagtttcagatgatgcagatgggtttgtagctacctcatgcactcctctaatgactatggcatcatttctggcgctaaattgctgggagttggaagccatcttctcaattaaatttctggcttcagcaggagtcatgtctccaagggctccaccactggcagcatctatcatacttctctccatattactgagtccttcataaaaatattggagaagaagctgctctgaaatctgatggtggnggcaactggcacatagtttcttaaatctctcccagtactcattacaggctctctcactg

SEQ ID NO: 215650 - DNA, 343 bp, Glycine max
  unsure (1)..(343): unsure at all n locations
acacttacaaactcaagctngaccacgtattaatatgggtttatgtgctctanccttctcattnataggcaanacattctcatttcttttntcagaccatggactctcatttctgaatcctttggtcttgaattttcgtctactttcgtctcaataatgtgtctctccctagtccctacctttcttaatttggatagatcggctttttctgccaatctgagtatgctagagttatctcaatctctctgacctggatactaatgagggcatacctaggccagtgtttgtttttaacctcattcagatcgtgctgagctgacactcttcatgaatgaggttcttt

SEQ ID NO: 215651 - DNA, 427 bp, Glycine max
  unsure (1)..(427): unsure at all n locations
agcttgcttggagccatattctaaaaagatttnacattngggaagttagtttcacaagataagcttatcttaacacaaaaatggcatgctaatccctccgatttagaacgaactcatgcacacgtttaatgtaacacatttatgcacaggggtatgtgtaaaatatcctactatttatgtcaatgtacaaggacatccaacacattctagttaccatacatatatatgtattttttaaaagaacacacattctcatgctcaaggcactgcgtcaaaattcacacctaatcacatncttaaatatttgctatcacaaactacctacacatatttgaagcacatatcataagactctcattgnttcactcacatttatttatatgcatattggaaagcctaatacgtcatgcacatactttgcattaaa

SEQ ID NO: 215652 - DNA, 460 bp, Glycine max
  unsure (1)..(460): unsure at all n locations
ggacctatgatactcagcttgcaaggttgggacaggcttagaatatcataagtgttttggtnccgcccaaacctgcatcttcagttgcacttgaacttatttttcgatttttcttaatttcgctcatatttcttcaaatagcgttagtcaaaactcgattgcgaggaccaaaagggtaaacaacttaatagagactaaaataagatattttaaactataaaaaaataaaagaaaatgctgttacggttatataaaccaaaaagaataattacacccttaaaaataatattagagcaatacttttgcaacctaaacgaattgcaaagatagtgattntcttattacctttctatcacctcgaaggattatttcaattaagttttataaacaatctgcgttaaaaaggcagcctttctacattgacgataataatatatacatgctgccatctatcatatat

SEQ ID NO: 215653 - DNA, 462 bp, Glycine max
  unsure (1)..(462): unsure at all n locations
tcggacaatcaaccttctcagccaagtggattgtctagtcctcctagatgtagcatctgaaggagtatctgaatgtggaggggaggttggaggtattgtcatgagtctacacaactgaaacaaataaagttaccatgacatgtcagttataaacaacatataagcattaacttgaaaatattcaaatacataaatgtattacaattatgcgatatgttatatacattaccagtaaaaacataagcagttacgtatgattattctcccataaaccttcatcatgaccatttcaatttgcatgtacaacatcctcctaatcttcaccatttatgaaaggcattngttgaaagaaagctagcatcttgctcacatcaactgatgaaccatgaatatggtcattgatagaaattggtcttcctttgagaactactgaccatctcgagtcgcacggatcttggacat

SEQ ID NO: 215654 - DNA, 456 bp, Glycine max
  unsure (1)..(456): unsure at all n locations
cgctntgatggtgttgagaagaaatcacatgtttgtcatcatcaaaaagggggagaatgtgaatgtatgcatacatgattntgatgatgccaaagaagaaccaaacaaggctgcttcaaatgataagcatttgcttcaagaataattcaagattgcttcaacaaacaaagccttatttcaagattcactaaagaccaagccttgccttaaaacaaagtgctttcaagacatggaaggctctggtaatcgattaccaggaagtgtaatcgattaccagaagacagggttgagaaatagctgttgaaaaaggttttgaatttgaattttcaacatgtaatccattaccatatgtctgtaatcgattaccagcaacggaactttggaaattcaaattcaaaagtcataacccttcnattataactgtgtaatcgattacacaaacattgtaatcgatta

SEQ ID NO: 215655 - DNA, 444 bp, Glycine max
  unsure (1)..(444): unsure at all n locations
ntganatggagggattggggaattctctccatcgaatccttgaggaggattccaaggattccgctctgattaagatgtttctcttggtgggggggtttggtggcaagcaacggcggctcgtggcggccactggtggttgtgggtggtggaaaaggaggtgttagtgtttgggtgacgttttggagaaaaggggagtgaaaaatcatgtttttcacgttgaggaacgtatttataatctacagatctcacttagcaagcctgtctcactaagccagagtccacttttctcgcttagcgtgataattcgggcttagcgcaactccctctacactagggctcgcttagcgggccaaatctcacacaacgcaattctctcttgggttcgaattactctcagcacgcctttctcgcttagcgagacaccaaanattggtaattntaaat

SEQ ID NO: 215656 - DNA, 465 bp, Glycine max
agcttcttatccaaggcacattcttggtggcgaagctccttcttccatggcttattccttagtggatggtgcctcccctctcctcttctcctttgccttccgctgcatctccatgctggaaaatctccattgaaggacctcattgaagctcaaagatccagcctccatagaagttccacaagcaagcttccatcatctagtgtcaagggagattgctcggtgtcgagggtggtaacctcgactagtgtaagagttgcaggtttgtgaggcatgtcaagctcccctagcttggaccagtgttgtttaggcttcttctgtcaagttgtctggggtggacaagcttttgatcttgcaagcaaaattagacgtgtcaggtggatgatgtccttatatatgacgattctgccctcttttgatcggtggaggatgcattgaagacaaatgtttcattttgtcttttgctac

SEQ ID NO: 215657 - DNA, 422 bp, Glycine max
  unsure (1)..(422): unsure at all n locations
ctcttaatttaattaagcaatttaacttcttatggtaagttgatagcaaaagattagttctcatttcagtattttcttttaatcaaatcaacacaataactcgtgtttgtgttcctttacaagtgaattgaaataaaaaaattagttagggtttagaggagaaagatgatggaaaatattttgtaccttgctaatacccctgtcaccaattcaagtagaagatatcaacctatttcataccttgtacatgacggtgctcaaggtggcattgtcgtcagtcccgatttattgcttattaattactatggccaatagtcacaagagtatgagaaggtatggtcttgtttctcagataaaacaatataataagtagagggctctaatggaacaatgtgcanagggtattttcatggtctcttaaa

SEQ ID NO: 215658 - DNA, 467 bp, Glycine max
  unsure (1)..(467): unsure at all n locations
agctncaaacattgctggatgagctcaatatccatttcactataattagcgaggagtatataaatatacaaatctgcgtatcttatatggatgcatgtaatgatgattaagacgctagttaattagcccaattaatcatatgaccattcccaactaatacttctccctcctaaaataaatgtcatatttaaagaaaaaaaattatcttaaaataagtattacatctattctttaatataatattaattcctatttttcaaaaaatatccctaataaatgttattttagtattaatatcatttttttcatctatttaataagaataattctataaaaatatcactctttttatctatttattaacttctttatctatgtaaaataactaaagataatacttaatctgagaaanaaataattaatcattggtaggcttaattcttattaatagctatatatgtaacaaa

SEQ ID NO: 215659 - DNA, 477 bp, Glycine max
  unsure (1)..(477): unsure at all n locations
tctacagagtattannaagtaacaggtgagataagtctatatcatggcttttaacactgaaccttggacagcagtatcattaatttcctatgagttgcaatttgcaaatgagctaaaggtttggtctgggttttttcatcaaacaggatggcatgcattgggaatggccacaaacaagaattttccactcccattggattgacccaaaagataaactgcaagacttggagttaacaataagagtctatggacattgctctatcaacttgtacttcttttcctgttggggtcatcgatgaggagctcagaggtgtcttactcaatttcaggggacaattcagcaaaatattgggtcagaaacctcgttcagagatgaacatagaattttttaccataaacctctctatagcctataaagatctcccagcctcattcttattatactgtgtgcatcttctcctagatgattcacccatt

SEQ ID NO: 215660 - DNA, 451 bp, Glycine max
  unsure (1)..(451): unsure at all n locations
cacctgcggcatgcaagcttccatcaagtggtaatcagagcacaagagcttctgtaggtgctccttaaacctccattaattntttttctttgccttctcttccattgttgtttcttaatttttctccatgtatctcctcacatgtcttgttctaaatgttgttaacatgattctttagagtttccaccgattaaacttgctatagaagttagatttgattttctatggttcaaatttcttgttcttgttcttgaaccatgaattgtgttgagtttacgttcctttgagttttgtcttgttattttttgtggctgaaacctaaacataaaattcttacaaaaatattaaagtagaagaanacctcataaatctagagtgacttgttcacctattngtagtttgtcatagaagtcatgtctagtcatganacttgtcacataagatntcttat

SEQ ID NO: 215661 - DNA, 475 bp, Glycine max
  unsure (1)..(475): unsure at all n locations
ntgagaaaattcaaacgacaataactgtttcatcggatatccgattgtgtcccgtaggatatcgacacgctcgaaattgaaaacggaagctctgagaaaaatctaacgacaataacttttaactcggatgtcttaacgagccctgtaatatgacgagacaatcgaaattgaaaacggaagctctaagaaaagtcaaacgacaataacttttaactcggatgtccgattgagtccggtaatatatcgagacgctcgtaattgaaaactaaagctctgtgcaaattcaaacgacaataactattgactcggatatccgattgtgtcccgtacgatatcgacacgctcgaaattgaaaacggaagctctgagaanaatctaacgacaataacttttaacttggatgtctgatcgagccctgtaatatatcaagacgctcgaaatttgaaacggaagatctaagagaagtcaaacgaca

SEQ ID NO: 215662 - DNA, 459 bp, Glycine max
agcttccatcaaattcgattgtcaatttgttgaaattccatgtcatatcccctagtgttactagccattcaattcctaatactaaatcacaacaaccaagaggtaacaacatcatatcagaagtaaagttggtattttgaattgaccaagaaaattttggaacctttgaagaaatttggactttatgtccatctgctacagtgacagaaataatgtccataacttctgtttgacaatgtgtaagtccaaaaagttatgagtgcttccactatcaattaaaatatggagaggtttctttccacaataaccagtgactctcatggttcgaaaattagatactccaattaatgcattcacagaaattaaaggttctgaatcaggttcagtaaccacattagcatcatgttgttgaggtccagcgccctcctctttattcttcaatttcaacacatggatctg

SEQ ID NO: 215663 - DNA, 368 bp, Glycine max
  unsure (1)..(368): unsure at all n locations
ntcttgagagaacttccttattaagcttctttgagaaaatntccttgggaagctagagcttagctacacacacccctctcataactaagctcacctccttgagaagcctccttgagaagattcctaaagaagctagagcttatctatacacacctttctaatagctaagctcacctccttgagataagaagctagagcttagctacacaccccctataatagctaggctcaccccatgacaaaatacatgaaaatacaaaaaagtcccttgatgtgtcattattttctcctatttcttaacctttgtgtcaccaatttaattaccgattaactctaattggcaaatttattattcagctttatcaatt

SEQ ID NO: 215664 - DNA, 461 bp, Glycine max
  unsure (1)..(461): unsure at all n locations
agctngngacgctgggcaatgtctgtaaaactagtcacttaaaaagttgtgactttggaaaaatcttcaaaaacaagtcacttgaagaattatgacttttggaaatttatttttcgaagtcagtcactggtaatttatttctgaagattgaaagatagatcataaattaaatacatgccatggtcacatatttataatctcttgatgactcaagtcaaagcttgtgacgcttggcaatttctttaaaactagtcacttaaaaagttgtgacttttgaaaaaatcttcagaaacaagtcacttgaagaattgtgacttttggaaatttatttctcgaagtcaatcactggtaatcgattaccattaaggtgtaatcgattacacatcaacagatgcgactcttcattntanatcttgaacattaaaatgtttagaagctctggtaatcgattacaagtattg

SEQ ID NO: 215665 - DNA, 416 bp, Glycine max
gctttacagaagctaacgaacgccttcagatgtatcgctctcccgcccgctttaaatgatggggacctattactgaaaattatatatttattttaactcaacccatcttggaacttggcctctacatccgagggacctttaagaattaaggtcttctttatcttttgcgactcttgctcaatcaatatattctggtcagcactaactaaattctgtgccatagagaatttattatcaaacttcctgtattcttctgcatcaagttcacgatacgctagtataaaggttcgtatacctgcatcagcatacttatgcacatgcttcatggatttctgttcaaacttccttccattctttggcaagcttataaacatgatgctgggtgaaagtttcactcatacggtgaaacacacaat

SEQ ID NO: 215666 - DNA, 466 bp, Glycine max
  unsure (1)..(466): unsure at all n locations
taagcacctgcggccatgcaagcttgcttgtcctcaagagaaagtactaatgacatggttcagaatgtaccaaccacaattcatgagataactgcatagcatttcaaacactntaatggccaactcttaagttcacatttgtcatgatcacatgataaaagcatgaaaggattcccttggagataagataggttagcaagtatgaccatcgtcacagaagattcaccatgcttcattcctcacaaggctagtgtttctctcaagcacacaagtgtctcgattatgaatgtttcaatcacaacaactgaaactaacattcccaactttgcacatcatctcattcaatgcaatcatacatacaaaatgtggatcactaaggactntatcaagcttgtaatgtggccgggctaacaaagaaatcatcattnttcttgaatcaaagcttaagttctacgagagcattcat

SEQ ID NO: 215667 - DNA, 389 bp, Glycine max
  unsure (1)..(389): unsure at all n locations
tcngaagaaagtgatgaggtgcaagcgctaaaggcaaagcttgaaagagcccangtagtcaaagagaagttcaagtccatagccatcaaagtctgaagagagtatgatgaactaagggacgttaatatggccaccgatgaagccttggaatgagaaaccaagaaggcccgaaaggaagaacacgaccaaaacaagttttgaggggctttatagggcagcaatagtgagctcaaactctgaagaggtgaaaggaatcatcatgggtcaaaggcatgatctggaaggacgagctaaaggcttgccttaggtcgaaaagaaatttgtcccaacagttaaagtgagactgaagggaatatgtgggcaatcatcgatgagtgctcagagaagct

SEQ ID NO: 215668 - DNA, 427 bp, Glycine max
  unsure (1)..(427): unsure at all n locations
agctngaaacgtgctgctgataagtattgttagaagatgagtgctggatttgactgcagatgactgtggaaaaaatggactgcaattctcatgtgaagacaggagacggaggaatgctttaacaggagcccacatcagcgttttagcctaaagcttgttacctctcctgtctttgacactgacaatgacctttaattgtgtagtttcagcttgccttagtaggatccagtgcgccttttaattggatacacattggctagtagtgttttaaagatgaaaacaatttattttgttgcaatgccatagttgcaagtcttttgttcatcatgctttgcctgagagtagcctattctgatgttgctactctgttggtgctggtgagccacttgattggatctcacctttctctgcacctagactgaccact

SEQ ID NO: 215669 - DNA, 466 bp, Glycine max
  unsure (1)..(466): unsure at all n locations
ctgcagcttatacaacttgttgaattgattctttgaggctataatcgattaaaatagaaagtttttgcctttgaagaanattctctaactaagaaacttttcttcacacaaaccatgataatgcatgatgtaatacaaatatcaaatgtactaagatgtaacaaccaagataacaaccaatacaaatgccactcaatggagttggggatgtaaaaaccaaaacttcttcaagctttagcccttatgttgttcagaagctagctagttagttaagttgaacatcctttagattgctagctggttgaaatcaagcttaacgaggtggatatagataaataataggaggaaaaaagttctaaaatataaaattctattaaaacttttaaattataaaaagatatttaaaagtttaatataattacaaagagtagcaactatttaatgtattagttgcacatacttgtta

SEQ ID NO: 215670 - DNA, 474 bp, Glycine max
  unsure (1)..(474): unsure at all n locations
tgaaggcaaactggatgcgttggtcaacttggtaacctatttggccttgaatcagaaatctgtacctgtcgcaagggtttgtggcttgtgctcctctgctgaccaccatacagacctttgcccttccatgcagcaacctagagcaattgagcagcctgaagcttatgctgcaaatatttacaatagacctcctcaacctcagcagcaaaatcaaccacagcagagcaattatgacctttccagcaacagatacaaccctggatggaggaatcaccctaacctcagatggtccaaccctcagcaacaacaacaacagcctgctccttccttccaaaatgctgctggcccaagcagaccatacattcctccaccaatccaacaacagcaacaaccccagaaacagccaacagttgaggcccctccacaaccttccctcgaagaacttgtgaggcanatgactatgcagaacatgca

SEQ ID NO: 215671 - DNA, 428 bp, Glycine max
agcttagcttcagtgtttgaggtgattatatgtattaggctttattatgacaaataaagtaatagtctgcatctagaagaagatagtaaacttgatacagggtaaatagataatgttcaaatgaagtaacggattttattacaaattcgtatgaatgaattgccaacaaagtattcaatatttctgccaatgtattgtcttgtaacttgtaaggttataagaacttaaaggcccctcaatatcaaaataacagaagaatcatcttgcactggccttaaattattctgggaatttgtagcacaaattgttttcaacctctccgtctgtgttggctgataatcagcagttggttggactttggtcatcaattggattgctggtttcttcactctcttcctttcttggactggaattaatgtgtacaaatt

SEQ ID NO: 215672 - DNA, 375 bp, Glycine max
  unsure (1)..(375): unsure at all n locations
tagttgtgattnttttttataatcaaagccacccttactaaaagttagtagtattttttaaatgagagcaattttaaaaactattttcaattacaatgtttttagacaattttttaaacgaaaacgcttttaggaattattatcacttttattgagtcacatagtttactctaatatcataaatgaaagattttgttttattttaaatttttatttctttcaaatgtaccttttaattttaatttgattgaacaactagctcaaaaaaatattttatcgattactcaaactactcttctttttttgttatacacatacttaattttcttaagttttttaattggtcatttatttatttaatttttgaaatttttt

SEQ ID NO: 215673 - DNA, 385 bp, Glycine max
ctatgaaactaagcttttatacacattctattcgtgtcaagcttgaccttttatgtgtaaaggggttttatcttcttaacattcattatatatattttagtatagagcaagagaacatatttaatttactttgtttcatacttgccgacgtgttatatcttcttctcatttgataaaaacaagcactcaatgataaacccgctatgcatacattggattgatcgttttatttatttgcacatgtttattaattaaaatcttacaagatgtggtctgtaattgggtttaatcggagttaatggcattgttgatctatgcataattgacctcatctagtaggataagaatagtattgttaatttggcacttttgcaatacttggtgg

SEQ ID NO: 215674 - DNA, 449 bp, Glycine max
  unsure (1)..(449): unsure at all n locations
tctttaattgcgatgaccaatcaaggctactttatttatatctagagaccttagcagactntgaatcgttntgttaaaaaaaatcactttgatcggttattgaagcagtatcttgcattgaatttgttcggcagaacggttttcttttattaaactaaatgacatcaacattcaaggacctcaaggtgcgtcaatgctagatattaaattgggttgtgtatatcagtatatggtttttcaatgtttaatttccatatgatggataatgttctttgttagggaaatggttccacttttggaaaatacagcatcagcttcctttttcaaagattagttggcttcaagaacacgatacgaccttaattatttggtggtaggctaatttctcattaaatatactggtcatggatgatattgatattttaatcatcttattggttcttgacgta

SEQ ID NO: 215675 - DNA, 472 bp, Glycine max
  unsure (1)..(472): unsure at all n locations
agctntagcctttaggttgctcaccatgttgctttgttgctccccctatctctaacagntacgaccattgtaccatggtaaaggtgtaatcttgatagattatgtgtgtattttgttgtagtctttttgtgtttctgttgacgaagtangacgactcacaccttaggtttgtttatttaggatcatatggagttggatccacttcttgagctggattgctaccttcgaggtatgatacacaatgtgattagatgtgtggatcacttccttgggtacctttgttgtacacgaacacctattgactcatgcttttgtgtagtttccacactagattgngtgttagagatgactgctctgagtttatgatctttccttttatatgtattcgatctacgtaggccaaagcttcagtacttctgtttngttatgattangactcaaaaataagttcagaatagagaaaaagattatc

SEQ ID NO: 215676 - DNA, 413 bp, Glycine max
  unsure (1)..(413): unsure at all n locations
agcttcaaacagcaactcttgcatgatcatgtacataattttatttgnngnatnntaatgcactatgtttctgcatagaccaccaccattcaacaacattcagctattgtaaaagttacaaatgcttaaatgaaattcaaatcatttcttttataaaaaaaaaaacatggaacatgtataataggcagcaaaatcatgtatacgtccaaccttgattaatgactaagctaaaaaattattattttaattaacactaattcgtttattttaagccacactaattagtttagtgttttgccactaaaatgcaatcttaattaatggctataataaaaaaatagtttaggatcaagggcagataacaataatttnttaacatattgatatatatatatnagtaaatgatcgcgtaa

SEQ ID NO: 215677 - DNA, 461 bp, Glycine max
  unsure (1)..(461): unsure at all n locations
ttaagtcacctgcngcatgcaagcttctcccncaattgtttataaatagggggttaagtgaagtgaaaatgggttcagccccttaggcacttctctctctttcgaatttgcttggaaaaattgtttccgtgaagaaaatccaagccgaggcgcttccgaaacgtttctgtgaggaatttcgtgaaggtttcgaccgttcttcgacattcttcattcgttcttcatcgttcttcgatcttcaacgggtaagtacctcgaaccaagcttttcgattcattctatgtacccgtggtggtccacattgtgtttcgtgtatttntattctcgtttcatttactttttatacccccttttgacgtgcttaagccattntatttaagtcatttcttgcttaacctananataaaatanatttccaccgatcatttgaattgtattatccgttaacttcggnntaaatg

SEQ ID NO: 215678 - DNA, 432 bp, Glycine max
  unsure (1)..(432): unsure at all n locations
agcttcttatccaaggcaattcttggaggtgaagctccttcttccttggctnattccctagaggatggtgccttccctctcctcgtctcctttgccttccgctgcatctccatggtgaaaaatcaccattgaaggacctcattgaagctcaaagatccagcctccatataagccccacaagcaagcttccatcatagccgcaattgatgctttccttgcatatcaccatagcaaagagagcccggtggtagctatcttggcgggcttattttacacatttgactgaagatgcgaaaagagtagcgcacggatcatctgttggttacccgctctatccttgcatatcacttaaagatcgtagaccacgtcttttccggattttctgatgttatcctcaaataaacgttggtggcgacttcacgcgtattcctt

SEQ ID NO: 215679 - DNA, 446 bp, Glycine max
  unsure (1)..(446): unsure at all n locations
agcttgaggagacgctaaaccaatttatttttatttcaatgttgaattaccgaagcacagaagcctaaatcaaaaacttggaaatgcaggtaggacaattgggcaaacagatggctgaaagaccctccggtagctntggaaccaacacggaaaagaaccccaaggaagagtgcaaggctgtgctgaccanaagctagaagaaggcacaagaggaggaagaagcaaaggaagaccagtctagggaatgaaggacagacaaagaaggagagagagaagaagagatgagagaagaagaagaagcagtcttaactcctaagaccaaaagccagctagcccgagaagctaagagagaagagccaccagccactctaaaggagcccctatattctttggtaccgtaaaagaagaataanggagcgtacttcaagtgtttcttggaaatattc

SEQ ID NO: 215680 - DNA, 481 bp, Glycine max
  unsure (1)..(481): unsure at all n locations
ggaccttaagcaccgcngctgcagctagaattaccttcataactctctattgctgatatcgnnncatttccgaagagtgcacaaccaataagtacagtcttcccatgactattcatacccacaaaaatcccaaatggcatttcataagaattgaccttgtatgtagtatcaaatacaacaacatcatccatattttggtaccaatcagagcaagaagtaggagaccaaaaaatatgctctaaccttctctcttcatcaagtgtatatgcatactgaaatttagagcaactctnttttgcatcctcacagtacttgagaagatctttggcatcatttctttcaactattttcttggttttcacaaaaagaatacgaatgtccctttcaatatatggaagataaccatgcttcacatttttctctaattctatgacacgcatcaattgtctaactgaaagcccccttctttaacaagaaatgc

SEQ ID NO: 215681 - DNA, 464 bp, Glycine max
  unsure (1)..(464): unsure at all n locations
agcttgcatgagaaacttctatggatgttttatcattgagcttcaataaagtccttcaatggtgattttgatccatggagttgcagtggaggataaaggagaagaggtgagaggaggcgtcatccactatggaacaagccatggaaggagaagcttcaccaccaagagtgtctaggataagaaacttagaaaggaagcttccatggaggaatagaatgggagagaaagagagagagtggtgtggaaattgaaggagaatatggagacaagttgaactttgaagtgtatcacacaagtttctctttcatcaaagttacaacaagtgttacacatgcttctatttatagcctaggtagcttccttgagaagcttccttatgaagctagtggtacacccctctaatagctaagctcatcctcatgcnncaaatcatgaaggaagaaagcttccttgtgaagcaagtg

SEQ ID NO: 215682 - DNA, 459 bp, Glycine max
  unsure (1)..(459): unsure at all n locations
agcttttacaagagcacaaaaaattattttgtataanacctacaaagttttttacgtggcataaacaggcccaaagttgaatgggaaaaaaactggtagaaatatagacttgtggctgcataccattaaagcctatgactttgttnttagaggattaaagtctataatttaattgctactatatcatctactcctactcgtcactttgcagtaaaaaaaaatatactcatcgttttaaagtcacagatttcaaatacaaaaagtcacgtcttgaaaataacgacaaaacatctcataattcattttgggttcaattactttatatatagcatggttatatctcattcatcagagacntgttttttcttcatttaatttagtcaataccagtcatcgtcgcgattttatttacatgacagcttanggatcgtctcacatggttttttagatctaagcata

SEQ ID NO: 215683 - DNA, 468 bp, Glycine max
  unsure (1)..(468): unsure at all n locations
agcttatgctgcagacatctacaatagatctcctcaacctcagcagcaaaatcagccacaacagaacaattttgacctctccagcaacaggtacaatcccgggtggaggaatcaacccaaccttagatggtcgagtccttcataacagcagtaacaacaacaaccttattttcagaatgctgttggcccaagtagaccatatgttcctccaccaatccagtagcaatgacaacaacagcaacaaccccaaaaacaacaaacagttgaggctcctccgcaacctttccttgaagaacttgtgaggcaaatgactatgcaaaccatgtagtttcaacaagagaccagagccttcattcagagcttaactaatcagatgggacaattggctacacagtttaatcaacaacagtcctagaattctgacatattaccttctcaatctgtccaaaatgacananatgtgagtat

SEQ ID NO: 215684 - DNA, 437 bp, Glycine max
  unsure (1)..(437): unsure at all n locations
agcttataagaacaaaattgcctcatttatttccaaatatgcatgtgaattaggaagcatcaacaagaatcaagccaatgctattgtgcaagcaatcaatggtgcaaaacacaccaaatgattatgatgatggatggctcaaattctgacaaaggtaaactcatcactttcaaattgagctttcaaaactatcatgacatgtagaggagaatcaaggatntcaagtcacaaaatgtcaagaacttttattttcaaaacaattacccatttcttgaacatatcctataattcaaagaaaaacatgcaaagtcgtacatgcacacaaaattgacccanaatattaaactaaaaatctgacgaaactaacaacattaacaaattaacacaacttacaaattaacagaaccaacagaactagcataaccaaagaacactcc

SEQ ID NO: 215685 - DNA, 399 bp, Glycine max
agctttgacttgagtcatttatatattatttatatgggaccatggcatgaatttcaataataatcaataatctatctttcaatcttctctcaacatcattcaatatctttcaactctttctacaaaattttttgattcatttctgttcatctttctaaaagtttttgttcaacactttctcttccaagaaaagttctttgttcaaaaacttatgctattcatctttttcattctcttctccctttgccaaaagaacagaaggactaaccgcctgaattcttttgtgtctctcttctcccttataaaagattcaaaggactaaccgcctgagaattcttttgattcttcccttccctttaagcaaaagaattcaaaggactaaccgcctgagatatcttt

SEQ ID NO: 215686 - DNA, 468 bp, Glycine max
  unsure (1)..(468): unsure at all n locations
agcttgcaccagaacagcagccttgtagtataacattccgaacatggctggcacaagctagggtgaacaagagacatatataaatgaatgaccaatgtatttaaggaaagttgaatagtaaggccatgattggataaacttctctccatgcgtacatatgggagaagaaattatgaagataaaatgaattgagtttctcctgtaagcctaagttaatttacatactttgacttttagagaatttaaatgagattgcttttatagaagtaaagtgcatgagttgattttaactcataggagatgcttaatttattttatcttcttattttcttcttctataagggcttatgaagaaatttatccaaacaagaaaccttggcggctcaagaaaacattntttgatatgcatgctgccaaggattacctggaaatcaaanatgtcattggtaaaatactgatgaaacagaa

SEQ ID NO: 215687 - DNA, 441 bp, Glycine max
  unsure (1)..(441): unsure at all n locations
ctgccgcatgcaagcttagngaagatgatgagttgtgagtttaagttcataaacaatngncagngtatanaagggctatagagaggtttggtatgactgcagcaatgaaagcaaggactgaaatatctcctggtaagtggaaaaatccacttataaattctaatgattaattaataatctgtgtaaatgctaatgcatatgaattgcatcttacagctgagtggtggaaattgtatggaggaaaaacaccacacttgcaaaccattgccattaaagttttaagtttgacttgtagctcatcatgatgtgagcgtaattggagtacctttgagcatgtaagtaagtaacattcatgtttttttaaattatgaacacttataagctgaaattgaaactaagtaactaatattcatgttttttaaataatatagttcactcaca

SEQ ID NO: 215688 - DNA, 452 bp, Glycine max
  unsure (1)..(452): unsure at all n locations
gtcacctgcggcatgcaagctngcctcanatagatctaggaaggactctctctgncgctaggactagngncgcttccgagtttgatagccatctgttcaggagcactgagcaccagcagcgtttcgaagtcatcaagggatggtccttccactgagagagacacatccagctcagggacgacgagtacacgaatttccaggaggagatagctcgccggcgttggacatcgctggtcactcccatggccaagttcgatccagatgtagtcctcgagttttatgccaatgcttggcctacagaggagggcgtacgggacctccggtcatgggtgaggggccagtggattcctttcgatgcagacgcccgcagtcagttcttgtgatatccgctagtattggaggagggccaagaatgcgaatatggtcagaggaggaactcggccgatggactt

SEQ ID NO: 215689 - DNA, 460 bp, Glycine max
  unsure (1)..(460): unsure at all n locations
agcttgaaattctgtattgtccgaatttcttctccatttctaattnttgcagtcttcctataatgattataaactatcttacagttttcataaatgagtacatggtactcgacacatcctgaaattaacatgaaattcatattagatatgtatatgattttaaaatttgaaatatagaggagtgtttaattactcatcaaactgttgcaagtcactttgtactctgtcagcaggactttaaaagtgattgagttatgaacttggtagtacaaggagtgtcatttaaggtaagcttttggttcagagctacttttgaagatggtgagaagaanaatactttgtccatagtgggtcaaggtcacatgatgatttccagtgagttcgtagaactctttgatgtctttccatctagcangtagagctaggctcaccagatcttggtatatgtgatagggacatg

SEQ ID NO: 215690 - DNA, 456 bp, Glycine max
  unsure (1)..(456): unsure at all n locations
agcttgtaggattatggggtacccatcatatgtggtactatgtggcggtcgggcgatggtgcaaaacaattctccacatccacaaatcacgtataaacccaccatcccctgttgcccacctcaactgagctcatgtactcccacgtagcccttatcctcgttcctctcaacgccgggtccccatcaatcctcccaagcttccacaacatccaagtaattcaacatccaagcctcatgaactaacacagccaagaaaatagggcagaggcagaaaactctgcccaaaacacaaaccgacatcacagcttttcacactcaaatactccagtaatattctcttcgttcaattcgtaaccggtggtcgactctaaaatttactggaagtctctagcacataaaactacattatgacccgtgtgatctgctataaaacgtncaaaacccaatctgtactac

SEQ ID NO: 215691 - DNA, 461 bp, Glycine max
  unsure (1)..(461): unsure at all n locations
ggctgcagctgggcatggatcttaagatagtgcctaaactattgtaaataggctaaaaagattcttcctcccttgggttttgagaaacaaagtgcatttttccataatcgttttatcacagataatgcctttctttcttttgaagttttccatgctatgaagagctggaagagatggaagataggttttatgacacttaatttagatatgtctaaggcatgtgatcgggtggaatggaattttgcatcatatgggttttccatcaaagtggaagaatctcattatgcaatgtgttggtttagtcttcttttgtgtcttgctcaatggtaaaccatgcaaggaatgtagaccccaganaggcctccttcanggcgatccattattgccatatctatttatcatgtgtgctaaagcactttntgctctaattccaaaattagtagttgaagcatctcttcatg

SEQ ID NO: 215692 - DNA, 402 bp, Glycine max
actcaatggtcaatattttgaatgaagaacttgagcttttagaatctgttaagagagtttgaacacacaaacttgaagatttaattgaaagaattctggaattaatccagaatttgttgtacagattacagaacactgatgcgggcataaactataacaaggagtctcctcctaacaaacttaagtaatttaacttacaatgaatcagaaatctatcattcatcctatgtaaaaagtacacacataactgtcacaaaacacatcttatgttatggctgtcctacttgtactaaacacacataattgtcatcagaatcattacattacacaattctctttaagatacatgataatcatctgctgttgaaaataataccttttttcatagtgctgtatacagcg

SEQ ID NO: 215693 - DNA, 460 bp, Glycine max
  unsure (1)..(460): unsure at all n locations
agcttcacaaccattatgtgacactcgctatgtgtgttcacacttcggatattgtatgctcattagtcttgatgccctgtaacaagcagcaacaaataattttgtccaataaatattntctgcaggcttttacaggctctattatagaggatgctgaaaatatacaaaacaactgcaagagaacaaagttcaacttcatcacaggtagatttaatttactgatttatatgtggtagtatttcccataaaaatatttgataaacatggtttttatacatgatgctttgcagtttcatcactgacttgtatatatactaatcacgagtttgaccttcacaggattctggttctcaatcttcaaaaccggtctccagaattcaaatgcagagaagataactacaagaaaatgagaaggttggatctattttgtatttggcgatctaatggtgagcatncatga

SEQ ID NO: 215694 - DNA, 431 bp, Glycine max
agcttagcaccactaggcgcttagtctatcttaaccactggaacttaattggcttagcgagcaggctcgctaagccttattcaaaaatagagaagaaattgtgcttagcgacaacgactcgcttagtgcatgaaaaaaatttcaaaacaacttaattgccttgggcttagcgagactaactcgtttagcccaggcttattcaaacatcagaggcatggtggcttagcgagtgtggctcgcttagccgcaaccagaataccaaaatcctcatagacacaaacctaactaaactaactcgcttagcgcggcatgctggcttagcaagttcatacgaactcagaaattaaaattgggaattaaatgctcgctagccgaatgcagtggcttacagttctactatagaaaaattcaacgaaatgagacaccttacg

SEQ ID NO: 215695 - DNA, 384 bp, Glycine max
  unsure (1)..(384): unsure at all n locations
agctttgaacaaaggaaatggtttttgctacaaaatgtgaaacaccacaaaatgcctgcattacctttcacttacccttggctgatttttggtgtggtattgacaatcactcaaaatgactttttattcatcctccgatccacaggatgacaagatgtaaatgcatgcatgcttatgattcgaatgtttatctgcaacaattaaacatatgttattgtgttcaattntactgaaacgcttacgacaccccgttgattgagccagatggctccagattcacgatcgagagtgaattatctaaagaaataaaagacacaacacaataagtgtaagatgcagatcattaatccaatatttattaatctcgtgatcatggtttacaaa

SEQ ID NO: 215696 - DNA, 432 bp, Glycine max
  unsure (1)..(432): unsure at all n locations
agcttagacaagtacatattcttcttctttgatataactaatacaaaataatttgtttcatggtttacccaatgaagacccttatgctcacttggccacctatatagagatatgcaatactattaggttggcgggtgtgcctgtgggtgtaatcacgttgagtctgatctcattttctttacctggagaagctaagaggtggcttcattcttttaaaggaaatagtctgaagtcatgggatgaagtggtagaaaagttcttaaaaaagtactttcctgaatcaaagactgtagaaggcaaagctgccatctcttcctttcaccagtttctagatgaatngttgagtgaggcacttgaaagattcaaaggttattgcggaagactaccactcatgggntttcagaaccaatacaactcaacatattcatagat

SEQ ID NO: 215697 - DNA, 463 bp, Glycine max
  unsure (1)..(463): unsure at all n locations
agctntaatgcaacttctcaatttatattgtggatgatgttgaaactagattntataatgatagcatcaatggtgaagctaaaagcattcgagagatatgtatttgtcatgatggtatgacatcttacatgattttacaaccatgattagacaaagttacttagcgatgcaagaaataatttaaactcaacattgatggtgtttttctactcttgattaaaggactaattttctaggacttgttctactacatcataattaagagtttttatttagaactttccctctccctgttttctatagtattaagcctatcatctaanactattacaaaatgggtttctctcactttataccgtgaataattatgctcaaattcttagttcanatatatagaannagctttgaacctggaatgaagaatgttgtgatctcataatgcttgcaatggcaactcatgagt

SEQ ID NO: 215698 - DNA, 467 bp, Glycine max
agcttgaacctttcgacatatctccaacgtcaacccaaagataaagcaacttaagacgaaggatggaggaagactgatgatatggttggcaagactctcaaactcagagagataattgttgattgtgccacattgtgtaagtttgaataaagcaccaatggggtcatcgtattgtgagggcgcaaaacgcgcctacaaagcctgaaggaaaacagaccaagaagcaagtttaccattgttggtcatccactgaagccacaccaacgtgggtccttccatatgaaaagaagcaatggtgaggcgctcttggtcaggggtagaatggtattcaaagaactacatgatcctaaagatctagcccaacgaattgaaaccatcaaaatgaggtacttcaagcttcgtgtggtaagggtggggagggggagaaagtgtttgtggtatcccatacaacgaagttggggactgtg

SEQ ID NO: 215699 - DNA, 456 bp, Glycine max
  unsure (1)..(456): unsure at all n locations
agctnnttgttgtcacatcggatcattcattcttataattccacgtcgcgtcttgtcttgcctggcatagcatcccatgttccaaaaccttccccctgtgcatataacactttgcctaatcattcaattgatttggtttgggtctacaacataccaaatttaacacttccctatagctgaatttatgctttattaggtagtaaatgaaatggaggaaagatgatgagaaagaaataaaggaaaaataagatgatgagttttatgtgagtttcataatttttgaattctattttaatttaaatggctcacttatattttatttttttaacaaacagttcatacgaaagacaaaataaggaacagtaaaagtatttgcaagtataagtcatgcaaatctaatctaattcaaataatttagattggaatttttatgtttgaataaaatcaatcaatcat

SEQ ID NO: 215700 - DNA, 458 bp, Glycine max
  unsure (1)..(458): unsure at all n locations
gccacctgcagctgcagcttgatgattggcttcacttctatttgatcgacgagggnctaacaagaggcatatttagtcattctgcttggacgaatgagaaaactggggcaaatgaagagggtgaggatgaatgagaagcccgtgctgtgactgccattccaatacagccaagtttcccaccaacacatcaatgtcattactcaggcgataacaaaccttctccttacccaccgcccagttatccacaaaggccatccctaatatcaaccacaaagcctacctaccgcacttccaatgacaaacaccacctttagcgtagaccataacaccaaccaagaaatgaatgtggcagtgagaaagcctgagaattcaccccaattccagtgtcctatgctgacttgctaccatatctacttaataattcaatggtagccataaccctaaccaatggtcatcaa

SEQ ID NO: 215701 - DNA, 462 bp, Glycine max
  unsure (1)..(462): unsure at all n locations
agcttgggcagatcagatcactcctactttttatctctatcangcatnnntntctctatccactcctcacgtttggatttctagggaaaaacaccataactaaacgcgccacaaggcattcctatcgcaccagatccaaatctagaacgatgggtgatcaagaggagacacaggaacagatgaaagccgacatgtcggctctgaaagaacaaatggcctccatgatggaggccatgttaagtatgaagcagctcatatagaagaacgcggccaccgctgccgctgtcagttcggctgccgaagcagacccgactctcttggtaactgcgcaccatcctccctcatacatagtaagacggggaagggacacactgtggcacgatggcagtcctcacctgggatacaaccgagcggattcccttatggattgtcgccaactacttaccacccgtcttgctagaa

SEQ ID NO: 215702 - DNA, 325 bp, Glycine max
  unsure (1)..(325): unsure at all n locations
agccaggcatacaagaggagacatatgttttcctcgtcatccncacctctntaagaatatgataacacactccatgcgcgcagcacgcggctgaatcccaagatgacccccaaccccgtgcttatgagaacaaatgactacatggatgaaattaaagaacctcgtgctaaaagaggtcgagacacaatgctccgaacagatatcacactaagacatggagctctatactaatagcatgaaacataggacatgcagttttatcatcttacttcacaagctgaggcattaggtcattcatcgcagtcaaccctattgtgtgtggaag

SEQ ID NO: 215703 - DNA, 459 bp, Glycine max
  unsure (1)..(459): unsure at all n locations
agcttattagtgtgaaagataattttcnctttcttaagttattgaggtcgctggtccaacatttgcaatatctaattctactnttaagttaagtaaaatgtagttttcaatacgtgagattatntgttttgtttgatgcaggctgatgataatggagatggaaagttgacactccaagagatgcttgatcatgagtttactttctacaacacagttcatgcagatggtcaccaagaaagtgatgatgatcatgatgagctttgatgtatgaacctagttaccagaatagtctaacgttaacatataaatgaagtagtgatctagntgttttgcttaattaatcttggtttgtaaaatatagaagtcaaacaaattctaatatagaagtcatacatttaactaacactatacttggatcaggcaatttgtagttttattatattagtgtacatctttaat

SEQ ID NO: 215704 - DNA, 289 bp, Glycine max
acatgaccactttatctcagacatggagccggtctggccttccttaacttgaatcctaccttccacacatctgatgtcacatcaaacaaagccaagttaatctatggcatcattatgaagaaggatatgaatgtggggtacctcatctcccaccagatccctattactgcatagcacgattcctctatacttggattcacagccttgatcacagctcttcgcaaggctagaggagtccaatcagattctagatccctggagagcctgatccctgccattaacttggcat

SEQ ID NO: 215705 - DNA, 400 bp, Glycine max
  unsure (1)..(400): unsure at all n locations
agcttggccctagncactgctgatgtgtcttggcttcagactcttttgactgaacttgcagttccacacaagctgtcagtcatccattgtgacaacactagcactgtgtcacttgctcctaacccagtccttcatgctcgcaccaaacacatggacttaaaccctngtttttgttcgggaaaaggttctgaacaaactgctttagagatgacacagttcattgtaatgtggcttattctttcagatcaatgataaaatctacttacattttctctcaaattctatcaagaatcaacttctatgtcctgtgttgctggtgttacatctccaaagcttcttcatgattgcgtgggtcatcataatatgtcaaaattaaagcatatggatgaataatgaagtg

SEQ ID NO: 215706 - DNA, 457 bp, Glycine max
  unsure (1)..(457): unsure at all n locations
agcttcttggcaaagaaaaagtaatgggttatggttatattatgattgaaaagattttttacaagatatgtgggttagattattgtttaaaatgcgtgccaaggtcttatatttatagaaccttgataccttttgagaaaacgatgttaagagttataactcttaactttttcttcaaaactattcactggtaatcgattaccataatggtgtaatcgattactcaatgtattttatgaaaagttgtgactcttcacaattggatttgaattctaacgttttgattcacttgtaattgattactaatatagtgtaatcgattacacaatttgaaaatcattttggaacgttgcaaatcatttgaaaaatattntgaaaaccaatatggtcactggtaatcgattagtgccaactggtaatttgataccagagagtaatcactctagtaacttataaa

SEQ ID NO: 215707 - DNA, 160 bp, Glycine max
aaaacgcgagaccacacgaggggaatttaagaaaaccgaaggacccaagcgaaccacacgggacaaaaggaaacgacccggaagaaaacaagaagaacaaagcacaaacagaacacaccagaaacgaaaggaaaacaaaacgaacggggagaaaaacagg

SEQ ID NO: 215708 - DNA, 468 bp, Glycine max
  unsure (1)..(468): unsure at all n locations
ctgagctgcaacttactgaatgacaagacaggattttatgtgttatgtnngatgctaattaaacacctactaaggttaactctaacattaactcttacacattttaaatggatttcattataacatattatatttattttataatttaagtaacttggggggtacaaacaacttaaattctttttactaactgagtctcaaaaataatctcacattcttacagggtgggtattaacttttatttcattactctaaccttcttttagtgcgtatgtaccttcatcgcacacacaaagtggccagcatcaatacttaattaaagaaggactcggtgcttgataagaactcactccaatggtggggtcttaagaggaggaacccattgtaacgacccgaatgaaggcggtctaagagacgcgtacattatcttttaaatgtcgttactctactccccctgatactgcaata

SEQ ID NO: 215709 - DNA, 446 bp, Glycine max
  unsure (1)..(446): unsure at all n locations
tttgaatgctctattaatggagntgtctataatatcttcagactgatcaacacatgtacagtggccaaggatgcttgggagatcctaaaaatcactcatgaaggaacctccaaagtgaagatgtccagattgcaactattggccacaaaaggggaaaatctgaagatgaaggaggaagaatgcattcatgacttccacatgaacattcttgaaagggccgatgcttgcactgccttgggagagaagatgacagatgaaaagctggtgagaaagatcctcagatccttgcctaagagatttgacatgaaagtcactgcaatagaggaggcccaaaacatttgcaacatgagagtggatgaactcattggttccctttcaaccttttgactangactctcggatagggcttgaaagagagcaagaatctggcgttcgtgtcatatgat

SEQ ID NO: 215710 - DNA, 452 bp, Glycine max
  unsure (1)..(452): unsure at all n locations
agctnnttttatttatgttgagtcttattttcttgtgtttcttttaattgtaattcttcttctaagtgtgtgtttctttaattatggtttctataagcttaaagtgaaaaggactaaaagagaaaaaaaatctctttttttttaattggtaatattttaaataagaaaaatcttttcttgattcaagaacatctttttggaaataattatatttttctttttaagaaaaatacttgagtataaattatttttcttttataatttgctattggtaggttataaatgattgtataattgcaatcaaatgtcatgattggtctttcaattatagttgcataattgaattttgattctataccttctgcgccctcctatcttataaactttgatctttggaagctgttgaaaccttgtgatctcgagtttgttgaaggttacttcatgctactata

SEQ ID NO: 215711 - DNA, 459 bp, Glycine max
  unsure (1)..(459): unsure at all n locations
agctttcaacaaatgtcgttacgttttattatcacacagcaganaactaacaaaactacccctcatatctcccaaaaccccatacccacgaaatgtaagagagaaagaagtccacccaaacctggattntcgaagtcccactcgtagccacgcacttcacgaccccgaaaatgccctcctttcgcgatgtggagcagaaatgagcaccaaaggttggagctttgttggggtttcaatggagaatggaggagaaggaaaaagcaacgtgaggaagagggagagcttctgaattttctgttttggctgagtgaggagagagaaaagctttttggtcttaaataaaagggtttcctctttttctatttatttattcaagctctgccacatgtccctatttgattggagcaaaaagggcccactttctctntttgactgtgacccatactcagtcacaaaagt

SEQ ID NO: 215712 - DNA, 443 bp, Glycine max
agcttcgtactattgcttggcttgattttgttcatttgtatgcactgattgtacacatggaaaccctcttgtattatttattgataatatatcatgaatattgtttctctatttcttttgtgtgtctttgtgggtatttaatatttagttttattaattatatatctttcaatctaaatatgacaacatataggtcacggtgtattaataaaaacataagatacataattacaagtataaacatgaaacgataaatacataatgctattttttaataaagaaaattctgcatcattattaaaatcaatgtagtagatgaaacttttaacattggttatgttaataattgatgttggacgtgacttgattcatttcacaatctaataaaaaaaaacttttttcactctttgttttttttttctttttaatctataatgaatgga

SEQ ID NO: 215713 - DNA, 397 bp, Glycine max
  unsure (1)..(397): unsure at all n locations
anctttgatagcgctggtctgggagacattggtctttgttcncnatatgccaagatgatgttcccaatactttggatttggtacgaccatgccctcctgatttccggctgggaaattggcgagtggaaaaacgcccctacatttacgcggcgagcataatgtaaacctttacagttttaaaagctctatagttgggcctaggctttataggggggcgggtgttaacgctttgtgtcttttgattttgaatttataagacaaggatctttcttcatctgttcctggtctctacccattctcattcatttgcatgtggacttcgttttctgaaacggctgatccgatgacgagtcccgcgaaggtactaatacctgggacccgcctattgactctcagc

SEQ ID NO: 215714 - DNA, 487 bp, Glycine max
atccttaagtcacctgaggcatgcagcttcatcgaaataataggatataatatattgcatactcataaaaggaaaagattaaaaaaaacttcttgtctcccataatttggttgctatatattgtgtagatgccaaccccaaaaactcaaaactcgagagttcaaaatacacggcacagaatttgagtgttaacaccctcttatcctatcctttatttttctgaaaagagaatatggcgggtgcagaaacaagcacaaagagctctcagcacaatcgatgaaacagcttgccctccgcacctaacccactcatatcacaatgtgaggagcatctgcaaagattgcaggactctgaagccatttcttcaatatcatttcactaagcctcaaacttgacgaaatgttggatttgcatgactgcacttataagttgcttcaagtgccaacgaaacaacaagccttggcacgagaatgcagtcacaaatgcc

SEQ ID NO: 215715 - DNA, 432 bp, Glycine max
  unsure (1)..(432): unsure at all n locations
agctntgatggtgccatattgtttggattaactntgcttcagtcaagtctccttcacagtgcaacaactaatgttttcttgacagtataagtgttattagagctgccccgccatgcccatccatccaattttcctttgtttggttttttactctcaatatcctcccatagttgtctcactaattcatgctcccacaaaaatggattctcaaaatgaaaaaggaaggaaaatctattaaaacaaacttttacggcttgacaacaataattaagaatgtggtaccaaccattctgatttagcttgcagtggatcaagtggtagacgatgcccagccaaatttcgaactgtgaaagcctcaatggtactctgatcaaacaacctcaggcacttggaacatatatctctaacagcaggaccacctgcaatgcacac

SEQ ID NO: 215716 - DNA, 440 bp, Glycine max
  unsure (1)..(440): unsure at all n locations
atatagagtgtttatgaatgcagntttgnttcttttaattcttataatcattaagcgactttgtttgcaatgtaagcggggggtttatatatatatataaactanaaattagttgctactttatactaaaatcaaataaacatttcanaatataaatgatttgattgctttcttggtcttatttaattttaataaaatttgatataaacaattttagtaataatattttcttaaaatttatcattaaattaaaagttctttcacataaattatatataaaatttcatattaattcaaaattattggtatctcattcatatatnataaaattgacgtaatatannatatttaaaatatactacaatataaattatttaattacattctttgtatntaatnttgacaaatttaacacaactantttaataatatgtatatat

SEQ ID NO: 215717 - DNA, 423 bp, Glycine max
  unsure (1)..(423): unsure at all n locations
agcttcccacgttttgcttaattattaacntctaacncaaaggccatccctgtccaatgtccattgtgaaatttggaagagaagatcgtcggtaatcattatcaataacaatattgtagtcatttgtgtacgtgtcggtatattgggactaatttaattaattcgtgtgaatattttactagtttagattatatcttaatatctaagtggggggaggtgtctcaattatcttatacataatagtagataattgactgaaggaatttgttgtcactattacgaaactcatttttatttattctttgtcactcatgagaagaaatattttggtattataaatattacaaaaatttatgagtagtaatgagtaaatagcaccatatgccattccatactctttctaaatggttacttataatgaac

SEQ ID NO: 215718 - DNA, 464 bp, Glycine max
  unsure (1)..(464): unsure at all n locations
agcttcttatccaaggcttatcttggaggtgaatctccttcttccatggcttattctctagtggatggcgcctcctttcacctctnttcctttgtcttctgctgcatctccatggtggaaaatcaccattaaaggacctcattaaagctcaaagatccagcctccatagaagccccacaagcaagcttccatcactactggctggatggacagaactcggacatttttatggattcgttgcaaatcatcaagtgaccatgactcattttggacagagtattttcttcctcaccatcttcaaaagtagctctgaaccaaaagcttatcctanatggcactccttgcactgcacagtactaactcaatcactcttaaagtcctcctgagtgaatagaaagtaacttgcngtgttttgagagtaactaaaccatctcctgctgtcaaatataaaatcatatacatat

SEQ ID NO: 215719 - DNA, 466 bp, Glycine max
  unsure (1)..(466): unsure at all n locations
agctttaatattattacgccgcaactctattgctattgtcaaccattgataatattntaaacaactatgagtagtctttcacaatatctctcataaacaagcatttcaattccatgaatttagaatccttataagtcttatggttctttgtatataacactacaacacttgcattatcatataaaatcctcaatggcttatgaatagagtccagaatgtgaggtcccattactaaactcctcaactaaacaacatgagtagcaaaaacaaagaaattaatgaactttgcttgcatagtagaggacgcaacaagagtttgtttcttgctcttacaagatatcatctatcattatacaaacaacgccctgaatggcctacgtatcacgctgtggtgcaatgtaatctctgcctaaaaatgtcacatcatgcttcagtgcgtctcaataaataatatataataaataaa

SEQ ID NO: 215720 - DNA, 467 bp, Glycine max
  unsure (1)..(467): unsure at all n locations
acctgangcatgcaagcttnccacangcacatcaatagatattgtttattactgcaaataaacaaaataaatgtcgcacgaattccaaggaaaaaaattaacatgctacccacaagttgcaattgtttatcttcctcagctccttcactttcacccaggttagccaagaaaatggagcataataattgaataacatccttccgaacctcctggtgcaagcttactgaggaaggtagatgaacactggctgcagcaagccgtgatctgcaaaaaaatagtagcatgcttgaaagggttttcacaaatggcttacttggcattgaattttattagtcccaccattggattggaaatacacatttaagttaatcaagtttacacaattgtaggtgacttaaaaattagttgatatatcattagtcaacttcatttttatggacattatactgttattacataatgtttaa

SEQ ID NO: 215721 - DNA, 438 bp, Glycine max
  unsure (1)..(438): unsure at all n locations
agcgtggaattccttttagtagggaatcttttctttctaagatggagccaaacccagtccccctcattaagaactagctcctttcttcctctattgcccttaggtgaatacacctttgtttggttctctatttgggtcttaaccctctcatgcaacttctttacaaactctgacctagaattcccttctttatgtataaaagaagtgtcatgtgggatgggaatgaggtctaatggtgttaatggattgaacccataaacaacctcataaggggattgcttggtggttctatgaacccccctattgtangcaaactctacatgaggaagatactcatcccaagacttaaggttgccttttagaagagcccttaatagagtggataaagacctattcactacctcttgttgcccatcagtttgtggatgacaagtggta

SEQ ID NO: 215722 - DNA, 476 bp, Glycine max
  unsure (1)..(476): unsure at all n locations
gatccttaagtcacctgcggcatgcaagcttcagcgatacatcggtcctttttgtatttcgncctctgccatttacttcagttcagataaacaccatccaaatgaaaaaggcgcgaaacgaatgagggtgttttatcttaaaaaacgaaaaataagaataccattggactccgataaaaccaaggaccgatttttttattcagtattatcagaagcatggatgtctcttatccattgggtagactaatctcactcccaatatacacctgttgctcaaagaaattctacaaacaataaaaatttaatacaaatttttctattaaataaattattttcactcataaacataagtccaacgagatattataaaatgtaataatataacatcacttattatttattttttcttttttaaacacatcctattatacctatcacacaatacatactattatttntactcacaagaaatatta

SEQ ID NO: 215723 - DNA, 458 bp, Glycine max
  unsure (1)..(458): unsure at all n locations
agcttgtagcanatacgaacgacaatatcatttcactcggaagtccgattgagtcccgtaatatatcgaaacgctcaaaatttaaaaccgaaggtcgcagcaaattttaacgacaataacatttcactcggaagtccgattgagtcccgtaatatatcgagacgctcgaaatttaaaaccaaagctcgttgcaaattcgaacgacaataacatttcactcggaagttcgattgagtcccgtaatatatcgagacgctcgaaatttaaaaccgaagctcgcagcaaatgcttacgacaataacatttcactcggaagtccgattgagtcccgtaatatatcgagaacgctcgaaattaaaaccgaagctcgtagcaaattcgaacgacaataacatttcactcggatgttcgattgagttccgtaatatatcgagacgctcaaaattaaaccgaagctc

SEQ ID NO: 215724 - DNA, 460 bp, Glycine max
  unsure (1)..(460): unsure at all n locations
agctntagctctgttggaagagatttattttattggtgatctgggacaaactcgtgtcattattgagcttgattgtaaacaagtggtggatgtaatccataaacctatcatcgatgctcctgagtttggggttattacttcaattgcaaaagactcattcataatttccaaattggcttcgtaaggagataggcaaatctagttactcgttcataattgtattaaattataaagtaattgatttgttttaaaaaaaatcataatgaaaatccatagaatcattaaggcacatctacgaattaaaataatgtgtccaactaaaaaacaaagaattgtatattttnttaaatgagaaggggcattagccctgcaatcacgatatatttaaaacccatgagtgaaagtcatacaattagaatcacccatgaaggggagcacaagaaagctatgaacattcata

SEQ ID NO: 215725 - DNA, 434 bp, Glycine max
  unsure (1)..(434): unsure at all n locations
agcttaagagaacgattaatgtctttttcttcttaactatgnnnctccatctttaaaataatttgtttctcatctcatcccttttgcctcctttgagatttgattttgttctattgattcttagcttcttctgtgctgccaaactttacagatatgcaatgactgggcagttgactcaaataagtgatgtctatagttttggtgtggttcttcttgagcttcttactggcagaaaacctgttgaccataccatgcctagaggacagcatagtcttgtcacatgggtcagtgtgctgcttaaactcatacctcatcgctgctgttttcaatctttaccactggttgtcaccatagatatcttcgtgatattgatattctttgacgctactccaagataagtgaagatatagtgaacagtgcgttgacccataact

SEQ ID NO: 215726 - DNA, 439 bp, Glycine max
  unsure (1)..(439): unsure at all n locations
gattcttaagcaccgcggctgcagctgagcattaaagaaatggcttgtgattgttagtatgatggaaaatgttagtcaatttctcagattgattgtgaaggaatgcattaactgtatcccgatgagagtgtgatccttaaattttgagagaaacgacaatcatttagtactaatttttgcgagaatctctaaagtatggactatatgcatgaaattgaggatgatgaacgccatgttagattgtgatagccacttacccaaanaactgaccgtgtgcttgaatgaatcatcccttgtacccaatttgagctgaatgaattattaattgattgaaccctgagcctatacagtgttatctcctgctaccttgacttacgttgtaagagagcatcatctactggaagcgtggttcaaagcaaatttgtcccatatttgtggg

SEQ ID NO: 215727 - DNA, 374 bp, Glycine max
cccgcggctaaatctaatgctttttatgccaaccagccgactaaattaatgtcttcccaagagaaactttattgaatgtcaatgtgaattgcatagatctatggggatgaaaaaactagctaactagctatgatcagcttcctcctcttccttcattatgttatgcaagatgagtatcattttacattataactttgttttaaaatgttgcctatatttgattacatatctataaatattcaattcatctaaaactttagaagaatgatcattaccaaatgatattatatgaatcgacggggtaatctacactattcataatttatacaaagtattatggagaacagaatatacttatatatcattatatatat

SEQ ID NO: 215728 - DNA, 435 bp, Glycine max
agctagcaatgaaaggcttagaccccctatttcttccctgcactcccaaggcaaatgctcctcaatctgattttttttggaatacacttaattattatgccaacaattgaattaatcttgcatgcctcttttctgtgtgtttggtaaaactagcttataagctataagctaggaattgaaagccaaaagttataaactaactaattgacttgaaattgtttgcttagattagctaataagctaactgatagatataaaacgacataacagaacatatttagttatttgtggcaaaaagggatttcatataaattaatggagataaaaaggaaaaaaaaaaaaactaatagcttataaggtagcttattttataagctatcttaactagcttatgaaaattacttagaagctactaaaataagcttgcataccaaa

SEQ ID NO: 215729 - DNA, 439 bp, Glycine max
  unsure (1)..(439): unsure at all n locations
agcttgaagaagntntatcttttacatgttcaactctcttgagtgacatttgnattgattattatactgtgtgttgcatcttnagttttatctttttatatgtgcatcatgcatcatcatgtaggagtaagaagaaaagttctatagttagaaaatttcttcagtgtttaaaactctctattttaatcaattacagactaattgtaatcgagtacacaagtctttatagcttgcaaagaagtctctcatatcgatttaatcgattacagggtaatcgtaatcaattacacaattctttntgagacaatgattggtttttctggagtctctgctttaatcaattaccaggtgatataatctattatttctctcttaaagtgtttcanaagtgatcaataacactctaatcgactacatcaagaatctaatcgattacatt

SEQ ID NO: 215730 - DNA, 444 bp, Glycine max
  unsure (1)..(444): unsure at all n locations
agcanncataaacgggctgatgcgtagtgttgtttcatnctatgcanggcgaaagggggcattagaatggtcctaattcttgactatttagactattaaactagaccattagaaaaaaatatcgagacaactatgaattccattgagattcccttacttgatcaaacaaccaaaaattcagttatttcaactacattaaatgatctttcaaattggtcaagattatccagtttatggccgcttctctatgagactagttgttgcttcattgaatttgcttcattaatacgatcacgattcgactttgaccgtatggactagtaccacgatcgagtcctcggcaagccgacctaattttatctgccggcacagtcactatgaaaatggctccttccttagttcgattatatgaacaaacgcgccaaccctaatatgtattgctat

SEQ ID NO: 215731 - DNA, 460 bp, Glycine max
  unsure (1)..(460): unsure at all n locations
gtcacctgcggcatgcaagcttccatcagttctacaccttcatattatcacactttctatttgntatgggtacaactactatctttgccttggcgggaccaaaaagatttggaacctaatgaatttcctaaattagaacaacaaaacaattttaacacctaccttggaactttttgagatcatgctatgcaaggtttgttttaaaattaaagaaaaacatgaataagaagtggattgtgatctcaaaagcttgcaagtttggtttcatggtttgttgttcctttcatagaagtcctggagatagtagttttatgcaatgcaaagtagaggcatgatagatacgaaggtgcataactcttgtttgtacttactagaacatgaaggtcgatttacatgtgtatatcatgaagacagttaaggtgccaaccaggcactccatgaaagataagaacatgagtta

SEQ ID NO: 215732 - DNA, 468 bp, Glycine max
  unsure (1)..(468): unsure at all n locations
agctngtcttgatgctgaagaagtaattatcctttgcattgcaactganagctcttataacttgtattctgcatcacaccatatttttgtttatttttggttatggtggtcgagtcatactggagaatttcacttgatgcaacctaatacacatggtatgtagagtcagtttttccacaaaagaacggaactgggttgcaaccttgtatgcgtgattgcattagatatggaagggaaaccaatttgaataaaattaggtcttgcgatcaaatagcataaaaaaaaagtatcacgtatctgtaaagatttatgacaaagtttagtcagaatttcattagcgcaaataaattcaagtatatacttatccaacattntggaatactgaaccatgaaaaataaggggaaaataggcaacaaacaacacatgatgagtgcataattntatgtcatgtcaatgaacatatgtca

SEQ ID NO: 215733 - DNA, 367 bp, Glycine max
ttgaccacacagtggtacctgcagatatatcgcggtggtcatgaaaccttgcggacgtcatgtggggggtctttgcacaaaaccaagcttgaccaatcccaacccaacccgggcatagtcagtcagtgagaacctgtgacgcacctaaacaggtgagcttctggcagtctacctataaaagaacaaagacctctcatcacggatgcttgtgtggcggctggccagctatggatcatgagtgatatattgaataaggcctctggtaatcgagtaccaatggtgtgtaatcgatcacaaggcttaatactgataactggatgttaagatggtctctggtaatcgattaccactggtgtgtaatccttta

SEQ ID NO: 215734 - DNA, 433 bp, Glycine max
  unsure (1)..(433): unsure at all n locations
agctggtagcatatacgaacgacaatatcttttcactcggaagtccgattgagtcccgtaatatatcgaaacgctcaaaatttaaaaccgaaggtcgcagcanattttaacgacaataacatttcactcggaagtccgattgagtcccgtaatatatcgagacgctcgaaatttaaaaccaaagctcgttgcaaattcgaacgacaataacatttcactcggaagttcgattgagtcccgtaatatatcgagacgctcgaaatttaaaaccgaagctcgcagcaaatgcttacgacaataacatttcactcggaagtccgattgagtcccgtaatatatcgagacgctcgaaaattaaaaccgaagctcgtagcaaattctaacgaacataacatttcactcggaagtncgattgagttccgtaatatatcga

SEQ ID NO: 215735 - DNA, 435 bp, Glycine max
  unsure (1)..(435): unsure at all n locations
agcttgggaggattgatggtgaccctgttttgatatgaacgaggataaggggtacgtgggagtatgtgagctcagtgaaggtgggcagctggggatggtggctntatgtgtgatctgtggatgtggagagttgtcttgcaccatcgcccgaacgccacctagtaccacatgtgatgggtaccccataatcctgcaagcttgaaatgaggaagtgtggaagggtgagactttctacttttattcgttgaccacagagtggtacctggagatatgttgcgggggtcaggagaccttggggacgtcaggtggggtgctattgtccaaaaccaagcttgaccaatcccgacccaacccgggcatattcagtcagtgagaacctgtgatgtacctaaacaggcgagctcctggcagtctaccgattaaagaacaaagacc

SEQ ID NO: 215736 - DNA, 447 bp, Glycine max
  unsure (1)..(447): unsure at all n locations
agctngcttgtggagcggtatggttgctttatctncgagcttcaatgaggtcctttaatggtgattttccaccatggagatgcagcataagacaaaggagaagaggtaagaggcgacgccatccactaaggaataagccatggaagaaggagcttcaccaccaagatgagccttggataaaaagcttggagaggatgcttcaatggaggaaaagaaagagggagagaaagagagaggggggagcacgaaattgaaggaagaaaaagagagagaagttgaactttgagttgtgtctcacaagactctcattcatcaaagttacaacaagtggtacacatgcttctatttatagactacgtagcttccctgagaagctttcttgagaaaacttccttgagaagcttctttgagaaaacttccttgagaagtagagcttatctcgcacac

SEQ ID NO: 215737 - DNA, 416 bp, Glycine max
gcagcttctaatgtagacgaaggagttacattatttcatctaaaattaataggaacctcaacattcagctaaactaaaacaagagatacataaattaataaaagtaatcatctatttctaactcacatttagcatataagcagtccatcatccctttctccagatccaactacataaaaaaagccaaaaaattgtgagacacaaccaaagaaacttaaaacaaaatacttcaatattcttattctgtaatagagttaaagttagaattatcattccaatccttttgtgaaaacatcatgagcatcatatgcaagcaatctacatacagtcacaaacttatcagtcccatatcacatactggcaactttaacagagcattccatatcaagttatatatgtagaaccagaactatcat

SEQ ID NO: 215738 - DNA, 457 bp, Glycine max
  unsure (1)..(457): unsure at all n locations
agcttcatgatgatgaatcaagttgatttttgagntnngatgatgacaaaaatcccaaaagaatgatttcaagattgagtcaacaagttcaagatcaagattaatttcaagtttcatgagaagaaatcaagaagattcaagaatcaagagaagtttgatttcaagattcaagaaaagatgaattcgagattcaagagaagaaatcatgaagacttcacaagggaagtattgaaaagatttttcaaaaaacaaacatagcacaattttgtttttcaaaagagtttttctcaaaattttctaagttacccgagtttttactctctggtaatcgattgccaattacctgtaatcgattaccagtgacanaggttgatttcaaaagcttttaactgaatttgcaatgttccaattgatttctanatggtgtaattgantacaatatattggacatcgatta

SEQ ID NO: 215739 - DNA, 454 bp, Glycine max
  unsure (1)..(454): unsure at all n locations
caagctttagctcgtccttcaagatcatgctctttgacccatgatgattcctttcacctcttcggagcttgagctcactattgctgccctataaagcccctcaaaactttgctttggtcgtgttattcctttcgggccttcttggtttatcattccaaggcttcagcggtggccatattgacgtcccttagttcattatactcttttcagactttgatggctatggacttgaacttctcttcgactacccgggctctttcaagctctgcctttagggcttgtacctcatcactttcttccgaagctntaacctcatcatctctcacagtctttagatttgggagccaatccaatccttgtgttcggactctcaaccacttatgatagccgccgatgatcccattactgcttcccctaagctctctgtcttttcttcacgccgcatcccatgcct

SEQ ID NO: 215740 - DNA, 450 bp, Glycine max
  unsure (1)..(450): unsure at all n locations
tgccgcatgcaagcttgcatgccaatgatgaaagtgcttgataatcncttggctnagnaacaacgttagctactacttgaaaggatttcaagcaattagaaaaaggtatatatagcaagtcagattaaactntaactcgcaaaatggtactcaaatctataatatatgtagatctatagattcccaatgtaaatgattgatccaagaaaaatgaaatgcaattttgtttttgtagtttgggagacgactcagacgagtatattgttgtgttgactgaagccaataaaaaagataagttaaaataaagacggatcttaaccaatggatcaacgctgatcaatcaataattatatattgagtctacgagacagtctaactaaaagaaacacaaagttagtttgcttcagatcatttcaattcttcaactgttacctaataaaagtaatgtta

SEQ ID NO: 215741 - DNA, 462 bp, Glycine max
  unsure (1)..(462): unsure at all n locations
agctntattanggtcattcaacaatggatactgttctgactctaaagtccttgatagtacagggctaagttgtcgcactatcacgaggaatcggtaagttagttgtgtatgtgtgtcttaatgcggtcctgattgagtttagtcttacaagaagaatctacgaacaatgcttaatcaggattaggctaaactatcatgaggaatcgaggtttagtatctcaggagacaccataagaacacatgagcattgttagctagagaatatcttttcagcataaggcacctattaggaagaccaatgtgtttctacttgtttttacacatcattcctttcgcgtgattctttctttntgcacaaatagtttatacacctgttcatattcacacttatctttacacactagacacttatntgctganatagcttaccanataacacangttccccaagagttcaatact

SEQ ID NO: 215742 - DNA, 434 bp, Glycine max
  unsure (1)..(434): unsure at all n locations
agcttgatttatgagttgattgtagccatatttgtactntggntattagtcaattgatccaagaaaacttccaaagaaaaacgcccgattgattttttattattattttattcaaagatattttgattattttattattatttttctttttttggtttaaccgaggttacagcgtgaacaatcggttagattttattttaacagtgattaaacgagattacaacacaaatgatcggttgaaattctttttatcatttattaggtgagaaaacgacataaacgatcggttaaagctcgtaaaaaacgaatgaaaagataccgaaattgaacgaaataaagatgaaagccaaaaaaataacagtttggaaacttacccgttgaagaacgaagaatagatgaataacagtgaagaacggaggaaaatcttcacggat

SEQ ID NO: 215743 - DNA, 418 bp, Glycine max
  unsure (1)..(418): unsure at all n locations
tcctccagcaaaggttaacacaaaaggtgcaccgaagaaaccgatgaaaacaaacccaaggtcaacaaagcgtgatccatcttactaggagtatgtgaatgctttttattctcaacaaaatagcaattcgtcagtgaggcgtagttcatcatcttctgaccaacctaatccaagaaggatgatgcctatgttggatcaatttcagctatttatccacgacttcattgataatattgttgatgtcggagctgatggaaattgtggatatcgggcggttgccggtttattaggtatgggtgaagactctnggtcgttggtccgcacccatctgcttatagaacttgccaaatntgcagaagactatatcaagctctttggtggcatagaacaaattganggattaacgatgccactacat

SEQ ID NO: 215744 - DNA, 434 bp, Glycine max
  unsure (1)..(434): unsure at all n locations
ttaatcacctgcggcatcaagcttgncatatatactgtgagcttatttctatctatggngctcgcaagttatttgataaaacttggaaagaatcataaatgtctggattggattangttacatatgtgcttaaggattgtgttgtttcagagctaccagtctgctctctcaagaagggtaaggagactcatgccaacattctgtgaaatggctatgaagcaaattttcatgttatgctgtacaagctaagtttggcagggaatcatatgcaaattctgttctttgtgcaatgcctgacaataaaatagtctcttgagcattatgattgcaagttatatgaaaaatgatatgcctatgaaagcactggaactgtttcagttaatgatgcttgaggcatgtgattcacttccaaaatcagtagcaatgggtagtgt

SEQ ID NO: 215745 - DNA, 266 bp, Glycine max
gctcgagcgcgcaacttttgtatgcatcgctgcctctcgataatgccaacaatgacagaaactgatgccaggaaaacaatctccagcaacagcaacaacggataccgagctctcatcaaaatataatacaatgtagtattgttgattgcacggaatattgcttatgtcattactcttctcgatcgatgatgaaacaacaaagagccgtattaggggtatacatagctatagctacacacacggagcgagataggaactaccatggc

SEQ ID NO: 215746 - DNA, 229 bp, Glycine max
gtatcccatgacacatgggaggatgaaactcgttaagctaacttcatgatgatgaatcaactatgatacaattagttttgacgatgaccaaaagcccaatagaataatgtcaagactgaatcatctagttgaagatcaagattaaagaaaagacatctcgaagaatctagatctcagtgaataaaccaaaaagcaaccagtctagacttcacacaggaagctttgtaaa

SEQ ID NO: 215747 - DNA, 449 bp, Glycine max
  unsure (1)..(449): unsure at all n locations
agcttcacaaccatattctaactgcactttgttgtnaacgagcgatgtgcttctagaactctataataaggtgtgtttggatactggaaacaaagataaagctggagctcgtaatagcacctttactaattatgtatgctcaaataaacaatatatcccacattggaaggtgaagccctaaatcttcttaattgcatcaatatcctatcttgcatctaacattctgatagaaagttcattaactgagcacagtctgtgattttccaacgaacaattcgctacagatgtaacctctgtctcagggtaaaatacaggaacctttggctctggcattaatttatcgccatgctacaataataccactgaagacatgtgtgcgctatcttttaaactcttgtgacacataataggctatttgttagcatctatgactcagaggtggcattgtc

SEQ ID NO: 215748 - DNA, 364 bp, Glycine max
gagccggtggcttttaaacccacgaaacagaaagtgaaaatgaggatgctggggaaagcaacggaagtgaaaatgatgagataatcaaagaactgaagaagctgaagaggccgaacttcgtgactcattgtcttctttcggcgatgaatgatctcactgtggcttggcaactatcggagggttctcttattttgaaagtcaaagatggaataagccacccttttagatcatttggaaatatgctcaaagggatggtgaatgaccctaacatgaatggccaggaagctgatgacaaagaacacccaactgaatcttcatccattccttcaatgaacattccaaatatgtctcaaaatggaaacta

SEQ ID NO: 215749 - DNA, 245 bp, Glycine max
gggcatgaccagggttcttatagagagagcaagcatgcgtgatacaaagtgatgcaaccctatatgaacgaccgtagcaagctacttggagatgctctataagcccataggaccgcttactgctcacctctggggatgtatccctataaagtggcttttggtaaggtatgccaccttctggtggaaattgatcatcgagcttattgtgcggcgaatgggtgacacatgacttttgatgaagccag

SEQ ID NO: 215750 - DNA, 475 bp, Glycine max
aagtcacctgcggcatgcaagcttctcaaggaagctaccgagtctatatattttagcatgtgtaacactttttgtaactttgatgaatgagagtcttgtgagacacaactcaaagttaaacttctctcccccttttcctccttcaatttcgtgctcccccctctctctatctctctctctttcttttcctccattgaagcatcctctacaagcttcttatgcaaggcacattcttggtggtgaagctccttcttccatggcttattccctagtggatgacgcctcctttcaccccttctcctttgtcttccgctgcatctccatggtggaaaataaccattgaaggacctcattgaagctcaaagatccagcctccatagaagctccacaagctagcttccatctagtggtatcagagcatcttcatctaggtgatgttcttttgttcctctatccttatgtcggagaattctct

SEQ ID NO: 215751 - DNA, 394 bp, Glycine max
  unsure (1)..(394): unsure at all n locations
tgcacagcttggaacctgcaataagtgtagaggtantttgagactctataacgtaagtcccacacattaacctgtagatgcactgctattatacatagggggcatgctacaaataatctttatctcaacttcaattaaatagtgggaacgcaaaagtacagaatcaacctctccgatacgccgagaatcagcataatgaatattacggacaatgatgattctccataatccaactctgctgctgatactcacaatactggcattcttcatatacatttctgtttctgcatcaataaacatatataaaggaatgtttttctctgcttctaaactgatagttctgggctgctgaacacattcatatcttcctggaatacaagaaagggagctatgc

SEQ ID NO: 215752 - DNA, 438 bp, Glycine max
  unsure (1)..(438): unsure at all n locations
agctntatagtatttggtgagatgcctttttctctatatatatatgcacacaattgtatgtttttaaggataaggatgttttatgcttttggtttttattaatgagttaccatatctatcaggttcgatagcaagagattttgcagagattgtagaagatatgttattcgagaattcaaggaactaaaagaactgaggcgcataaacacatgtcttttcaagaaatcctaaatgataaggagacacaaatagagagttgaagccattagttaagacacacatgagcaagagcttgagagttgagataccatcaaacactaacaataacaatcgattattatatntaactaaagtagctaatttctcctcacataaacaaaaccctacaaaggtagcttttatatcgctgaagcactgatacacggtatccttggtcct

SEQ ID NO: 215753 - DNA, 408 bp, Glycine max
  unsure (1)..(408): unsure at all n locations
agctataacctcatcgtttctttatgttttagatttgggagccaatccaatccttgtgttcggactctcaaccacttatgatagccgccaatgatcccattactgcttcccctaagctctctgtcctttcttcacaccgcatcacatgccttgtgaactccttatagtaccctcacattggggtcactgaaaccccgtgtgatgaaaggcgtgatgctttcatctgatggcactcctctcatggggtagccaagctgtcttatggcgaggatgggattataattaatacaaccccttgttcccatcaagggaacatctggacatccttcgcatgaagatagaatcctgattcttcttccttctagnagggaaccaattaacagacgcccctccatgctatccaagagt

SEQ ID NO: 215754 - DNA, 463 bp, Glycine max
  unsure (1)..(463): unsure at all n locations
agcttgctagtggagcttctatggatgcttgatcttngagcttcaatggagtcctttaatggtgattttccaccatggagatgcagcggaaaacaaaggaaaagaggtgagaggaggcgccatccattaagaaataagccatggaagaaggagcttcaccaccaagatgagccttggataagaagctcggagaggatgcttcaatggaggaaaagaaagagggagagaaagagagaggggggagcacgaaattgaaggaagaaaaagggagagaagttgaactttgagttgtgtctcacaagactctcattcatcaaagttacaacaagtgttacacatgcttctatttatagactaggtagcttncttgagaagctntcttgagaaaacttccttgagaagcctctttgagacaacttccttgagaagctagagcttatctacacacacccctctcataact

SEQ ID NO: 215755 - DNA, 453 bp, Glycine max
  unsure (1)..(453): unsure at all n locations
agctngcttgtggagcttctatagaggctttatctttgatcttcaaagaagtccttcaatggtgattttccaccatggagatgcagcgaaaggcaaaggagaagaggagaggggagacaccatccactatggaataagccatggaagaacgaacttcaccaccaagaatgtgccttggataagaagcttgaagaggatgctntaatggaggaaaagaaagagagaaggggggagcatgaaattgaaggaataaaagagggagaaaagtggaactttgaagtgtgtctcataagactttcattcatcaaaggtacaaaaagtgttacacatgcttctatttatagcctaggtagcttccttgagaagctttcttgagaaacttccttgagaagcttctttgagaagcttccttgagaagctagagcttaactacacacacctctctaataacta

SEQ ID NO: 215756 - DNA, 465 bp, Glycine max
  unsure (1)..(465): unsure at all n locations
agctngngcattcaatatcttgatgatggttgtctatatgtnctcaagactggactaatacattngctgtccaagtttcatggtcttgtaggtgaagatcctcataaacatcttaaggagttccatattgtttggtccaccatgaagccccctgacgtccaagaagaccatgtctttctaaaggcttttcctcattctctggagggagtaacaaaagattggctatactaccttgcccccaggtccattttcagctgggatgaccttaagagtgtgttcttggagaaattcttccctgcatctaggaccactgccatcagaaaagacatttcaggcatcagacaactctatcgagaaagcttgtatgagtactgtgacagattcaagagattgtgtgcaagcttgcctcaccaccagaattctgagcaactcctttctcaatatttctatgagggacttagtaac

SEQ ID NO: 215757 - DNA, 453 bp, Glycine max
  unsure (1)..(453): unsure at all n locations
agctngctcataactaacagaagttattttgttatatngcatcattacaagccaatctagctgaactggaatcacatcatagcaataattatattgaggaagagatacattcttgtaattacttgttttcttgtcctttacaaggttgagatgttatctatattcatctcgatttttaatttataacacaaagcacataaatatgttgacatcatgtggcgctcaagtagtaaaaaagttatctaaaaagttacctcccatacaagaagcaccaaagagttatactccatatatcaagtacaccaaacttcaatttaaggtatggaaacagctaagattcgagaactttgattctttcatctatatacaactcttacatgctctcatcgagattcgtatttaacantattcatacacaaaacatacgttatttctaattccatagtaaatata

SEQ ID NO: 215758 - DNA, 386 bp, Glycine max
  unsure (1)..(386): unsure at all n locations
agcttagaatgagatgaattgattcatctttatattgggngaacaaacatcttggtggcactgaaatctaagttcttcacatcctctgctaagaacaaaagcttaagagagaaaataacatttcaaggacttgagtaacacacttgtagtgttcaaaattttagaatttgatattaattttgtttaagacaatatgtatctaaaatatttaaataaactcaacatgaagcaactacgacaaaaagttataaatatctgcaaaatgttatcaaacttaaaatttgacgacctttaagactaaatcatataaaaattagtatcgatgaatagaaacaaaattagaagttgaagaccaatctattaatttcaatagaggaattcttgaa

SEQ ID NO: 215759 - DNA, 405 bp, Glycine max
  unsure (1)..(405): unsure at all n locations
taagttaggagctgggtttcctaatctaagttctttttaggttttgtcgaggtccagtgcaaaattttcttcaaccaaatatgaggcgaagaactggtcgtctttgtggttcttttgaagatgagattaagaaacttcatgctgaagcgtctgatgtaaaaaatgaagccaatggctgtaaaaatattaaaagaaaggcagagatcaagcttgaggagcttgacaagaatatgaattctatcaaggtaaaatattgcttaaattgttatataattgaaatgtttttttaaataccttctgaaataaatntagcaatgttgtactgcttgaagaanagaatcattgacttttatttattaccacaagatnaaactatgtttcatgcttgaagaaatccatagaact

SEQ ID NO: 215760 - DNA, 454 bp, Glycine max
  unsure (1)..(454): unsure at all n locations
agcttatgctgcanatatttacaatagttcttctcaacctcagcagcaaaatcaaccacagcagaacaattatgacctctccaacaacagatacaaccctggatggaggaatcaccctaacctcagatggtccagccctcaacaacaacaacagcagcctactccttccttccaaaatgctgctggcccaagcagaccatacattcctccaccaatccaacaacaacaacaaccccagaaacaaccaacagttgaggcccctccacaaccttccctcgaagaacttgtgaggcaaatgactatgcaaaacatgcagtttcagcaagagaccagagcctccattcaaagcttaaccaatcagatgggacaattggctacccaattgaatcaacaacagtcccagaattctgacaagctgccttctcaagctatccaaaatcccaaaaatgtcagt

SEQ ID NO: 215761 - DNA, 421 bp, Glycine max
cctgtctgctgccttttatttctcttacttttgtttctattaattcttttatttagcctaactttaactttagttagtgatcttactcttgtttttattggttctttaattttaatttagtccaactttatctttaattattgattagtgatgctcacacggagtttgttcttttcaatttttcttttcgttttaccatatatacttccacgtaacaactttcgttttcacattgcagttttcgtcctttcacatctaaattttgaaattctaatattaattaagccactgtgatcagtaaatgtttataaaatttcaaaagattactttgtcaaagaaggaacattacacgcaattttttttataaaagtgtatgttttaaagatcaactttagaaagaatattacatgtaataaaactt

SEQ ID NO: 215762 - DNA, 402 bp, Glycine max
actctgcatccaactcttcatgtaactctctgattcaaattgcgattgtccacatctttgaatggactgtggctcaaagaatccatacacatcagaattccccgctcacatacttgtctcagttagatgcctattgttgttaagacaaaattaattatgtatgaatttaaaacaataacttaggtaattaacaataatctaaattgacttacataatccacaactgtataacagatatgttgagacattgaccatcgtgtgcaatttcagaaagatgttcgtgctttatgtacaatgagaagtcttgattaaacaccccgaacacggtagcatcccatataatttagttacagtgaacaaatcaattgaaaaaaagaagcatataatcagagtaaaatacct

SEQ ID NO: 215763 - DNA, 451 bp, Glycine max
agcttcaacatcagaccacttccagggtgctggaactacttcacatggacttgatggggcctatgcaagttgaaagccttggaggaaagaggtatgcctatgttgttgtggatgattcttccagatttacctgtgtcaactttatcagagagaaatcacacacctttgaagtattcaaggaggtgagtctaagacttcaaagagaaaaagactgtgtcatcaagagaatcaggagtgaccatggcagagagtttgaaaacagcaagtttactgaattctgcacatctgaaggcatcactcatgagttctctgcagccattacaccacaacaaaatggcatatttgaaaggaaaaacaggactttgcaagaagctgctagggtcatgcttcatgccaaagaacttccctataatctctgggctgaagccatgaacacagcatgctacatcct

SEQ ID NO: 215764 - DNA, 419 bp, Glycine max
tagccttattttcactttagttattagtcaattcgattaagaatgagaaatcccaaagagaaaaccgccgaatgagtctccgctttattatactaaaaaaaagatggtttcgattattatattattttttatctctttttgttttccaacggggttacggcacgactgaacggtcggaattcattctaaccgaagttaacggataatacaattcaaacgatcgggggaaatttattttatttttaagttaagcgagaaatgacttaggtaaaatggcttaagcacgtcaaaagggggtataaaaagtaaatggaatgagaataaaaatacacaaaacacaatgtggaccaccatgggtacatataatgaatcgaaaaggttggttcgaggtacatacccgttgaaaatcgaagaacgat

SEQ ID NO: 215765 - DNA, 447 bp, Glycine max
gtcacctgcagcagcagctttgacgaattacttggtagaacttttgtcatagtttcgggtagaattgagacttgtgaatgtaaagcaatttctgtaatgatattgataagtagggcctattatagtaggaaggccattatagcatgtttgcccgagtaccaatatattgagttattttctctaaccaacatgtattatgcattttgttaggatggacccaaagaggtccaaaagaaggatgtttaagtggctcaaagattataaaagataatgtgttttatttataaattatagttttttatttaatttatattaaaataacatgatcgtgagacttggataattattattcattgaataaatgtcccttaaaatatatatgaatattcactcttacctattatcatttattaatgaaatatcaagtttatcttattctcttataac

SEQ ID NO: 215766 - DNA, 470 bp, Glycine max
tcgatttgatccgtgaaattgcgcctaccccaagcatgcatttcggtagtacaatttactttggataagcgaactcctaagagtgctttgtcccatattgtccaacaacatcaataagatcaggctccaataaccaagtatttttgaatctcacaagtctatgaaaaaaatgtgtgtcgaactgcatcaagcactaaatcattgaaatcaccaaagatacaacaaggaagggtagtatctgctgccagagaatgaaaaagactttatgactctcttcttctatatctatcagattatgtgtagaaaccagttaatctccagggtgggtggtcacgatgaagaacctatacatcaatgaaattggaagagaagctaagaatatggaaattaatatgctgtctcctgagaagtgcctagccaccacttctgtcattaacctcaactgataagcaagaatcatagcgaagatg

SEQ ID NO: 215767 - DNA, 444 bp, Glycine max
agctggcctaattaacctgaaattgagaattaatgattattaaacacacaaaatgaaagtactaagtatttattacctatacttagcagaaaatacttataacactacaaaataaccataaattggaagagtttgatacaatttacacaagttttatacataaaagttagtcgttttcaccgactaacactgccaggtctcttcacctttgggtgtattttttgaaagattcgtgcccctttttgcatatgttctgtagttgcatcctatctggatgatatcaaaattgtactgatactgcctaaggaaggcaaccattaggtccttccaagaatggactcgggaaggttccaagttagtgtaccaggtaacagctaccccataaagactttcttggaagaaattgtatcagagttcctcatcttttgtgtatgcccccatctt

SEQ ID NO: 215768 - DNA, 441 bp, Glycine max
  unsure (1)..(441): unsure at all n locations
agctnngaacnctggacaattgcgtttaaactagtcacttaaaaagntatgaattttgaaagaatattcagaaacaagtcactcgaagaattgtgactttcggaaatgtatttttcgaaatcagtcattggttatcgaataccattaaggtgcaatcgattacacatcaacaaatgtgactcttcattntgagatttgaaaatcttaacattttaaaacactggtaatcgattacatgattatggtaatcgattacagctnttgaaatcagtttgaaaaacaatgctggctactggtaatcgattaccaaaagaaaaactctttggtataagattttgtgaaaacttcatgtgctactcaatgttttgaaaaacattttagaacttatcttgattgagtattctcttgattcttgaatcttgagtcttgaatcttgaaact

SEQ ID NO: 215769 - DNA, 371 bp, Glycine max
agcacctatcaagccaagaagagactgtgtcctattggtatggagcatcatacaatacatgcttgccctaattgatgcatactgtacaaacatgattttgaagaaatgtccaaatgccctaggggtggggcgtcacggtacaaggtgaaagatgatgaggagtgctactctgattaacactcatagaaaggccctccaacgaaggtgtagtggtatcttcccatcatcccaaggtttacaccgcctttttgctaataaagaagacccaaaagaccttacctggcatgcaaatgggagaaacttataatggaatgatctgtcatccggctgattgcacctagtggaagacgattgatggttcgtatctggat

SEQ ID NO: 215770 - DNA, 393 bp, Glycine max
aagcaccgcagcatgcagctaattgagagggccggttaaataaattatgtctttacaaatacacattacctagcagcgcaaagctacaacggagaggacttcccattacctggatgatatataatcaacaaaataaaccacgaccaggagaattatccaaaaataaacataaaccaatggtaccctatattgaaacattccttagaaccagccaatccagacatgaactgtgaagtttttcaaataagcttaggaagaccatcgcaatacatggtacggttaaacttagcactatctaagacaattatgtgaaacaggcttagaatgtcatgaagcgaaaatcttgtaaataacacaacgtattgctggatcgagtgaccccagaataattaa

SEQ ID NO: 215771 - DNA, 443 bp, Glycine max
  unsure (1)..(443): unsure at all n locations
caagctgctctaaatttacattgatgtttgtatttatgggaggaggttgtatgtcatttttgttttaagagtagtgtcccactggtaaaactaactttccaaatgtttgccttcgcaggaaatggccccgaggaagcttgcctcaaagaggtccaggaaggacaaggcagccgaaggaactatttccgctccggagtatgatagtcaccgctttaggagtgctgtacaccagcagcgcttcgaggccatcaagggatggtcgtttctccgggagcgtcgcgtccagctcagggacgacgagtatactgatttccaggaggaaatagggcgccggcggngggcatcactggttactcccatggccaagtttgatccagaaataagccttgagttttatgccaatgcttggccaacagaggagggcgtgcgtgacatgagatcct

SEQ ID NO: 215772 - DNA, 380 bp, Glycine max
  unsure (1)..(380): unsure at all n locations
atggcatgggcatccccttcctttctttttggcccagntgctttgatccttctattgtttgtgccgacgggggagacataatcaaacttttctctcttcaagcctacttcaatcctctcacctgtgaacactaaatccgcgaagctagagggcatctaacccaccaacttttcatggtagaacactggcagagtgtctactatcatagtaatcatatccctttcaaccatgggaggtgccacttgagccgccaaatccctccacctttaggcgtactccttgaaggattcgtgttcctggttgctcatgtnttgtattgagtcctatcgngagccatatcagtattatattgatattgccgaatgaagtcaggaatcaat

SEQ ID NO: 215773 - DNA, 433 bp, Glycine max
agcttcatgcttaagtatgtatggcaaaacttcattactgctgttcaacacatacaagtgagcttgtaacaaatgttctaaacttggagttatcacatgcagtcctcttgaacccttaccacccaccctgttatcatgccgagactcaagaaggccaacaggtttatccttctcaatgtattctgaacaaaattcaatggcttcttttgcaacatacctctcaacaatagatgcttctagacgatatagattctttgtatacccttttaagatcttcatgtatcgttcaaccgggtacatccaccgtagataaacaggaccacaacatttgatttctctgaacagatgcacaatcaagtgaatcatgatgtcaaagaaagcaaggggaaaatacatctccaactggcacagtataattgcggcctcattttcc

SEQ ID NO: 215774 - DNA, 266 bp, Glycine max
tcaatggcgctaaacatatttgcatatgcacaaattacgtatatacccacgatccgctgttgcccaccttcaactgagctcacgtacttccacgtatcccttatcctcgttcctctcaacaccgggacctcattcaatgcatccaaacttcctcatgatccaggtaattgcacattcaatcataatggactcacagaacctagcaaaacagggcgaacgcggaaaactctggcccaacacaactcaaaatcacaagttgtacatac

SEQ ID NO: 215775 - DNA, 446 bp, Glycine max
  unsure (1)..(446): unsure at all n locations
gcttaacatcagaccacttgcagggtgctggatctactncacatggacttgatggggcctatgcaagttgaaagccttggaggaaagaggtatgcctatgttgttgtggatgatttctctaaatttacctgggtcaactttatcagagagaaatcagacacctttgaagtattcaaggagttgagtctaagacttcaaagagaaaaagactgtgtcatcaagagaatcaggagtgaccatggcagagagtttgaaaatagcaagtttactgaattctgcacatctgaaggcatcactcatgagttctctgcagccattacaccacaacaaaatggcatagttgaaaggaaaaacaggactntgcaagaagctgctagggtcatgcttcatgccaaagaacttccctataatctctgggctgaagccatgaacacagcatgctacat

SEQ ID NO: 215776 - DNA, 486 bp, Glycine max
  unsure (1)..(486): unsure at all n locations
tgtaggattatggggtatccatcaaatgtggtactaggtggcggtcgggcgatggtgcaaaacaattctccatatccacaaattacgtataaacccaccatccgctgttgcccacctccaactgagctcacgtactcccacgtagcccttatcctcgttcctctcaacaccgggtccccattcaatcctcccaagcttccacaacatccaggtaattccacatccaatcatcatggactcacaaaaccaagcaaaacagggcaaaggcagaaaactctgcccaaaacacaactcataatcacagcttttcacatacaaataccccagtaacgtttccttcgttccaattcgttaaccgttggatcgactcgaanaatttactggcagtctctagtaccataagtctacatttgaccgttgggatctgctagcanatgttcagaacccgatatgtactacccntttcacaaccagccatacacaagc

SEQ ID NO: 215777 - DNA, 405 bp, Glycine max
gcccctatgaaagcccatccatgtcccaagttccaagcaaacacagccattccccaccaccacacctgctctccaaagtaatttggatgccgagaataataccacaaccctttgtcaagaatagggacctccttgttctttctactcacaaagttgtaaagctgagtatcagcaatgtatgccgtgacaatgccagatacacacacaactatggctaccaagtcccacatgctcagaggctggttcaccgagtggatgacatagaacggaagagacaatccaatcagaaacacctgcaaggttgtcttgatgtaaattaaaagtaaaagcaagggaaaatgatgactaaaagtaaccttaattacctgctgagggacgtagatggcgaagaaagaagcccaccac

SEQ ID NO: 215778 - DNA, 445 bp, Glycine max
agtctttactaaatttgcaacgttccaattgttttttatatggtgtaatcgattacaatatattggtaatcgaataccagtgtatctgaacgttgaaattcaaattcaatgtgtgaagagtcacatctttttcataaaatgctttgtgtaatcgattacatggttttggtaatcgattaccagcgacaagttttgaataaaaatcaagagatgtaactcttccaatggttttctcaagaatttctcaaggttataactcttccaatggttttcttgaccagacataaagagtctataaaagcaagaccttgacttgcattttatgcacttgatataactttttacacaactttttgaacatcttcttgaacttcttcttcttttgccaaaagctttctaagtttttcggtttccaaaccttgttctttcacagaaaacaaaagtg

SEQ ID NO: 215779 - DNA, 357 bp, Glycine max
  unsure (1)..(357): unsure at all n locations
ngctgaagccttctcttacctagagacatacagagccactgttattgttgttatacatccaatcccttgaatcaaataatatggataggctacttttccgcgtgactagtaaacttcacattctgcgcacaacagagtttagataaatacttaacaaaatatactgaacttcatttttacatttcttagtactttagagttctccattacatttcacctagtttgaaagcaaaacattcttaaatatgaaccgtaaaagagagctcttcttatataccgggatagagtgtgtcgtctacttattcagataatttgaaaacagcatcatgctctctggatttgtaggatatatcactc

SEQ ID NO: 215780 - DNA, 424 bp, Glycine max
acctctacctttattgggtgggccagccttctctggggttgtcgaactggcctatagtcttcttccatcattatcttgtgcatgcagtagacagggctaatacctttgagatctgatatatgccacccaattacttccttgtgtttcttcagaatttctactaacctattttcttctttggatgtgagtgcattgctgatcaccacaggcttagcctcatcttcttccaggaaaacatactttagatggttggataatatctttaattcttccttcttcttctcagatggagtcttgctctttagttcctcaaaactggtttcctcctcagggatgctatcttatcaatccaagttttctaagcaagccttgagatcttcttcttcttcactgggtaggcaatctaccgcattcaccatggctc

SEQ ID NO: 215781 - DNA, 411 bp, Glycine max
  unsure (1)..(411): unsure at all n locations
ggtacctcaattggtgccaggcaccagccgcactatctgaggacctattcggttcaaaaacaaaatatagntgtggttttcaattataattacaaaatatttcactttattttcagtttttcattccaattcctatttccaaacattcatgaaaaaaattgcaccagccacctccgataaactttaaacaaaaaaaaaaactatattcgcgtataataataaaataaattcaatataagtttacacgatcattcactgagtctccgacaacaagcattaccgaaattcaacaattaccttccataggttgaggaccttctggcaagtcagagcgaggaaccagcatctcatcgtgctcctgctgctgctgttgctgctgcacacaacacaacaaaatcgaacatcaaaaac

SEQ ID NO: 215782 - DNA, 441 bp, Glycine max
tctctctaaatttatattataaatgcatcgttaaaattgaaatatatattttaattagctacatatacatgattatttaaaaaatcatttgtatttatcttttaattataactttaaatatgattcggtgacttatatttatcattcttatttctcataataacaaaaatttcacttaatagatagataaataaatatagagatataaattgatataatcaaaataatgtgggagaaaaaataaaaatgatactagaattttgggatgtaaaattcctgaagttcatacatattgttgataaaattcaaagaaatatattccactcaagatgggcttgatgcatctctacttattttaaattcacacataatttataattgtcttttcagaacttggtgatactaaatttttacttgtgagaataatattattgatattat

SEQ ID NO: 215783 - DNA, 358 bp, Glycine max
gtgaagcgaaaaagggttctggcccttaggcacttctctctctttcgaatttgcttggaaaaattgtttccgagaagaaaatccaagtcgaggcgcttccgaaactgttccgtaacgttttcgtgaggaatttcgcgaagggttcgaccgttctttgacgttcttcatcgttcttcgatcttcaatgggtaagtaccttgaaccaagcttttcgattcattctatgtacctcgggtggtccacattgtgtagcatgtatttttattctcgtttcatttactttttatacccctttttgacgtgcttaagccattttatttaagtcatttctcgcttaacctaaaaacaaaatacctct

SEQ ID NO: 215784 - DNA, 319 bp, Glycine max
agagggtgctcatcggtggaggacaaggtgtctgttatgcgatagtgcacaacacatcattgtatgcacaaataaggtgagaacccgaccattcagtgttgtcctcctacaacttaactcatctaagttccgcaagtgttacacacgcttctatctatagactatgcagcttccttgataagctgtcttcacaacactcactgtggtacccattccgtcatcactgactcgcgaagctcaaccttacctgccacggccattacatacgtagctcacctccttgaaagcttccttgagaatcagatcttagctaacgcac

SEQ ID NO: 215785 - DNA, 407 bp, Glycine max
  unsure (1)..(407): unsure at all n locations
agctggggcatccaataccctgaggaggatgtcccatatgttcttaaaactagactggtccatttgcttccaaagtgtcatggccttgcaggtgaagacccgcacaaacatctaaaagaattccatattgtctgctccaccatgaaaccaccagatgtccaggaggatcacatatttctgaaggcctttccttattctttagagggagtggcaaaagactggctatattaccttgctccaaggtccatcacgagcttggatgacctcaagagagtattattagaaaaaattttccctacttccaggaccacggccatcagaaaggatatttcaggcattaggcaactaagtggagagagcctatatgaatactgggagaaatttanaaaactatgcgccagtttccc

SEQ ID NO: 215786 - DNA, 424 bp, Glycine max
  unsure (1)..(424): unsure at all n locations
ttgaacttgntgtaagntctctgttttgttcgcaatatatatataagagaatgttttgaagcacaaatgctgtgaaaaattatgatatgaatttataactcgtttgataaagactgaaattggaggagtaatcatcgtttttattgaggctttagtcaactgttggtcttcacaggatttcgagggtgatgctatgtgcacccaacattttaagtgaatgggcgaaaatgcccttcactcaagttgatccgtatgagccatacggatcaagttcgtccgtacaaatcatacggatcaacttgatttgtatttgacttggatgtttaaattatacttacggatcaagttattccgacaaaccatacgaatcaaccacgaactcgcataccttctgcgtaagagaaagttgaaattaacataaaat

SEQ ID NO: 215787 - DNA, 394 bp, Glycine max
cctcaacatcttacactactattaagatggtactaaacatcagctgttgatctacactatggaacgtgcatggcatttcaatgcgccttttgataccaatgattctaaggaaatttttcacaaaatcaaacattttataattatcttaagtcaatttgattaaagcatattgtcagtataaataattaccaatcaattagttaattccttctaactatacaatcatatgctcgtataatctatggactcctctcattggagtgtattttaattcatatggaaaaaaagaaaaacctccaatggaaaatattttttaagtcggatttaaaaatgaaataaataggacagagcctgctccatagggtttataaaggagatacacagctatccagtt

SEQ ID NO: 215788 - DNA, 444 bp, Glycine max
catcatatctgagagatacctgcgaaggattttattcttacctgatagcattaatgaggttcatattattttgcaagaataatgagtcatatgcttcagttattctctcgctaaatactattttaggagttcctgtgagaatggcgacaagtataggaaaaaatactactagttgggtcctctgcatctaactatgcctggaagtaagcacctttgaatatagtaaaactttaacaactttggattcaaaaaagtttgcgtaggctcaactttgatctcaaaaagataaacatttaccaaaataaataaacaacaacaacgacgacatcaacaacaacaataataataataataataataataataataataataattataataactataataataatcaacgaggtgacaagttcatgaaagagagctgcggaatatataaaa

SEQ ID NO: 215789 - DNA, 345 bp, Glycine max
tcacactcattacactctttgtgtttcacggtagggaagtataaacgcttttattgtcaccttaatcagtatagtagagacggtaatttttacgttactgagcggtctttgcctccaaatgtacacgcatgcctttgatgttaagaatcacacagtgaaactttttgccttagccttattcttttcaaaactgaatagatattgctaatagcgcccattttaccaaacctttaagcacgactgacgttataataatgaagagtgttaaacttgcaactagatcggagtgcattgcctatttttatgttacactactattctaatacagggaccgcctcctaaata

SEQ ID NO: 215790 - DNA, 425 bp, Glycine max
  unsure (1)..(425): unsure at all n locations
agctngacaatntgtcaaatctcaatatattttgccaagngtgagtatggatcttcatttggtaaaccatgaaacagatatctaaaggcgttgggtcctcctactgagtaagttgatgcaattaaagatgtttttctaattaaagatgttcttgtgttctatgctgaggacaaaaataccaaacactgattcctcgagagtttggactaatttaaatcaaactttgttcacagatccctcttgttgaacttagcctaatttaaacaacattatactcacaacataataaacaaaactaaaaccctgcacattatccttagtgtcgcaacaagcccttttgtaggcgtgcgaggcgaggctcacgggtgcgcttttcaaaggaagaaagatgcgcggagtctccatcaacgtttaattgtggaaaa

SEQ ID NO: 215791 - DNA, 328 bp, Glycine max
tcatgatgatgattcaagcatgaatccgagagtctgtgttgcacaaggcctcaaagaatgacttcaagatcgagtcaacacgttcaagatcaagattactttcacgtttcatgagaagaaatcaagaagattctagattcaagagaagtttgatttcaagatttctgagaagatatatgcaagattcacgagaagaaattatgatcacttcctacgggaagtattcacatgattttcaacaaccaaacatatcactaatcttgtttctcaaaagagcttttctcaacatgttctaagttaccaaagtatttactctctggtaatcgat

SEQ ID NO: 215792 - DNA, 432 bp, Glycine max
agcttcatgcttaagtatgtatggcaaaacttcattactgctgggcaagacatacaagtgagcttgtaacaaatgttatgcacttggagtgatcacatgcagtcctcttgaacccttaccacccactctgtcatcatgccgagactcaggaaggccaacaggttttagccttctcaatgcattttgaacaaaattcaatggcttcttctacaatgtacctctcaacaatatatgcttctggacgatataaattctttgtataccctattaagatcttcatgtatcgctcaaccgggtacatccaccgtatataaataggacctcaacatttgatttctctgactagatgcacaatcaagtgaatcatgatgtcaaaaaaagcagggggaaaataaatttcatactagcacagtataattgcggcctcatttt

SEQ ID NO: 215793 - DNA, 397 bp, Glycine max
  unsure (1)..(397): unsure at all n locations
agtagacttccatgataataataaacactaaccgataatgtgagataatgatgaagacggtacttcaccgtctgcataggaaagatagggagattattgtttggccccaaactcttcagcataaattgtgattggtacttgctttgatgtactctttagaaaccccaagaacaggagagatacaagcagcagtcaatacaaattctccattgtatatctaagtatattattgggtttaagtgcgtaaatttcttgctcagtggagaatgacttccaagcttagactaaccatattctcaaattatgaggaacttgaatggagattctcgtatcctcattaaaaaatctgactgaacataaagaaagttgtgaagantaaatctttaaacagtgataa

SEQ ID NO: 215794 - DNA, 408 bp, Glycine max
agcttaacaaaaggcatgcgaagtatgtggaattcctagagaaattcccttatgttatcaaacataaaaagggaaaaggtaatattgtagccgatgctctttctcggcgtcatgcattactttctatgcttgaaacaaaattgattggtcttgaatgtttgaaaagcatgtatgaaaatgatgaaacttttggagaaatttttaaaaattgtgataatttttcagaaaatggtttctttagacatgaaggctttcttttcaaagaaaacaagttgtgtgtgcctaaatgttctactagaaattttctttgttgtgaagcacatgaaagaggtttaatggtggcatttggggtccaaaagactctagaaacattacaagaacatttttattggcctcatatgaaaaaag

SEQ ID NO: 215795 - DNA, 459 bp, Glycine max
  unsure (1)..(459): unsure at all n locations
tcaagttgctcattgactctaaatagctgcanagaaggacttatatctgtatagtgatctgcagaagaacatagaccacagactcttgcaacagctgcaaatttatgattcatggcaagctgagttactaggttgaccaaggcatcaagttttcccttaagctttttattttcagtagatggagatgaattcgtggccacctcatggactcctctaaggacaatagcatcatttcttgcactgaattgttgggagttggaagccatcttctcaatcaaattcctagcctcagcaaaggtcatatcaccaagagctccaccactggcaacatcaatcatactcctctccatgttgctaagtccctcatagaaatattgaagaaggagttgctcagaaatctggtggtgaggacagctngcacacaatttcttgaatctttcccagtactcatacaagctc

SEQ ID NO: 215796 - DNA, 447 bp, Glycine max
  unsure (1)..(447): unsure at all n locations
agcttaacaagctttnttataggttgagcttggctcttttatctaaagaggctttttaaaaagttgagcttgacctttgtagtaaacaagccgagccgagttgagccttacataggccgagccaaaggcccttgacaagctgctcggctcatttcaacccctagatacaataggtcggttgaagctcgttcttccctttcttgaagccttagagtaaatgtcatcttatgtcaaattcatgaaggaattgctcaccaaaaagaagtactttgataaaggtaccatcatactcaaagtgcattgtagtgttatacttcaaataactttacctccaaagaccaaagatctaggaagtactaccatcatgtgtaccattgggaatctaactattgggaataccattttccatggcagcaaaaattggggatttggagatcaaacctacaa

SEQ ID NO: 215797 - DNA, 495 bp, Glycine max
  unsure (1)..(495): unsure at all n locations
tattacgcattgatgattataacacatatatatgtatatgaattgttaaaataaattaggaattaatagttcaaataataaaattaaattaaaagaaattaatatattaatattggacgataaatactttcaatgcattttttgtttaattatttattaattctttttagttgaaaataatatagttttatttaacatatacatgttttgtgccatgcaaatattaatatcgtgtgatgtttatatgattcatgaggtgtgagaacatgttgcgttgggattataatattgtgattgagattgagtataagtgtttggttaatacttgatgtgatattatttgtgttgtgaattgtgaattatacaataactcgactggagtgtaccttgagaaaagtgtntatgcgcgaggattacctaagataaggattacctatattagaatttaaatgatatagtcacatatctcgaaagctgatgccgatttttactatt

SEQ ID NO: 215798 - DNA, 389 bp, Glycine max
gggaggaaggacatttctacggtttcaattaaaaccatctggaaattctgcccttgctactgataaaaataattctctcttcgcttgggtttcaatagactgtgatgctagattttctttcagacaacaacggtgctagttccttatcagtgcaaaacaaagatatttatgcagaacttttgaagaaagcaaaaaagttgaacaaactgaaagaaaaggtggttttcttgtgtcttatggtataatggtggttttctctatttaaattttattctgttagatggagaggtttattgttccacaaattcatatggatggatacccatttattagattaatacttcttttgaacaattatgccatgctagtgccctttttttccttattat

SEQ ID NO: 215799 - DNA, 456 bp, Glycine max
  unsure (1)..(456): unsure at all n locations
tggaagcgttgcttccacaatctcgccatttgtgatgatgtctattcagaaatcaagagaatacatgcaagatttgttctatcgttcactcatctctntctccccctttctttttgaattcatgcttaattgtaaaagagaacttagtaaatataatatctttatttctaaaatacccatttttctctccccctttggcaacatcaaaaggccaaagtgcattaaaaaataaaatcatacataaataattttaaaacatacataaatcataatttgaataacacattcataagtttcagtcatagtcatatataatcaaaataatcaagcttaaacacataacatacaacaactaagtgcaaataagtaaataatataaccaagttcagtcataattaactacgtaccaaatacgtaaacaaagtaaccaatgtgtagagaataaacaactaacat

SEQ ID NO: 215800 - DNA, 442 bp, Glycine max
  unsure (1)..(442): unsure at all n locations
agctngttgaaaaatngtacaaataagaggtaattgttgagacatgctataactagatttgtcacttcttatctaaccttggaaaggctctacaaagagaaaggtaatattagaaagatgtttattttttatgaatggatcttaaacaagttatctaaggagcctaaggggaaagatactgcaaaggtagtgctcatgccttctttttggaatagtgtggtttacactcttaaagtcatgactccacttgtcaaagtgcttcgtcttgtggatgatgaaaggaaaccaaccatgggctatatttatgaagcaatggacaaggcaaaagaaacaattatcaagtctttcaacaacatcgaaagcaagtacaaagatatgtttgcaatcattgataaaagatggaattgtcagtttcataggccattgcatgcaactacccact

SEQ ID NO: 215801 - DNA, 469 bp, Glycine max
  unsure (1)..(469): unsure at all n locations
ntgatgttgtttcctagcttcggtatcctctcatcatcatttgatggatccacttgatgaacttcgagtatgttaccaatcttcagattgttgctgaaatttcttccttctangttgtccttgtgtagtcttgacatatttactgctataatttcttgttctggtttacctttttcatttgattactgacttttactgtcattgtagccaacttttattgaagaaagagggaaattgaacatgatgaaggaatacgatgaaaagacaatttggacaagtgatcaggttccagttatggcatcctataataaaggtttctttcattgaagttcttgcaatcagttcctggttgcctttcaaatagcttgttgtcttggtaatatttgtgatagtgtcactctgaattcaggaaacatgcagcactcattgtgggtcgcagaaatctgtcactctaacattgatgacgatc

SEQ ID NO: 215802 - DNA, 377 bp, Glycine max
aatcaatcgggtcaaaatatatacccccatatgaagtatatccaaggcccaacaacgtcattaatatattttatgtcgtagagagatttataaagtgagagcaaaactctaactccagtgaaactaaagatgattatcgtgaagatttctcacccggatgccaatcctactatgcctgcggtgcaatatttataggatttccaggggattcatcaataatgagaaattagccattctgaatccagaagtatgcaacctactttgaatttccctcttcattagaaaagactctccgatgaaggtgagaaatcgaattccgacattacatcttaattcccatttggacagaacggaatcacaggagcgaacatatactt

SEQ ID NO: 215803 - DNA, 476 bp, Glycine max
  unsure (1)..(476): unsure at all n locations
ttaagtcacctgcggcatgcaagcttgcttctctcaaaaccacataaactatctttctctcaaaacctctgangactatatgttttgtgccatgtgtctgtacgtgtgaaattcatatttactccggaacacatgccattacgtaccctccatagaaacaccaatgaaacagtagtaaaatcgctgtcatcccctcttaaccgaatcaaagccaccaggtcttcaaaaattcagtctcgcagaaataagtaacacctccatatatatataacagccacaaaaaagaacagattatttatacatggagaaagcatcttgctgggttggtagaacactgcataaaggaataattaaaaccacgaccaagtggtaaagataaatcctgttcaagcttgcttctctgaaaatcctgatttttgaagataggtggcattcctgatgttccacacacctcgtgactgcacaccacaaaatcg

SEQ ID NO: 215804 - DNA, 334 bp, Glycine max
cccattccgcccatacccacaatagaaagtattgataacttactgtggttgccagagtcagaagagagccaattaattatcatttccttgtcattatctctgccataaataacactttcaaccaccaaagatgttgatggtgatttctgtgacacttcactaccgaatccagatccaacaccactagcattgttcaaacctagatcacccatttggctcgagagagaatctaggctgccaatgagttgttccatccttgatttaacttccttgttaaaggaactaagaggagaagatttgaagaacattggtaccttgcaagtacaggtttgag

SEQ ID NO: 215805 - DNA, 384 bp, Glycine max
actctactctagagccattctaagtttctctttgagtcctagcttgcttctatgtccttttttcattgctttaattgttgagtaatccttaaaaaattgtcttgttaaaactccattggtttagctttcatttcattttttttggtctttggccattgcttgactctttgtttccttgtttgcgggttgccatatagggaattggaaggaggattggtgccatcccttgaagaatttgagtcaagaagcaaggggccaaccaccttaagagctattggactaagacgcactccaaattgagtgaatcaccaaagagagaacatccgccccaattgaagaccgtcttctgattatgccatttgcaatttacttacctttattgct

SEQ ID NO: 215806 - DNA, 477 bp, Glycine max
  unsure (1)..(477): unsure at all n locations
atgcttctacnatctccacctttatgatgatgacatctcttgtaatcaaaaacacacacacacactttgttctagtcgatcactcacataagattccatactccccctttgtttttgagtttatgcttcatttgaaattaagttaattacttatgtgagatcttaatttattccctatttctctccccctttggcatccacaaaaagcccaagtacgtaataagtataagacaaacatatactattaatcattcacaacgcatacattgaagaatataaaccaatcatgaagcangacacatgaatagatcaaatatattaaaaccacagtcatataacataattcataattgttcaatcataccatgcaaataaaggaaatgctaatttgttcacatgtcatantaatatagccaaatacacgagattagagagcatcaacangatatattaaccattcatacactagaatataat

SEQ ID NO: 215807 - DNA, 352 bp, Glycine max
  unsure (1)..(352): unsure at all n locations
agctngggtgatgttgcgcgtactgatggtttctatgaggngtttgctggggtttgacccacgcgggtgttgaagagacggcatgggcatctccttccttcctttttgcccctgttgccccgattcttttggcattcacgtttgtggaggaaacgtaatcaaactttcctcttttcaatccaacctcgattctttccccggcaaacaccagatccgcaaagctggacggcatgtaacccactagcttctcatagtagaacactggcagagtgtctaccatcatggtgatcatctctctctcaaccatgggaggagctacttgtgccgccaaatccctccatcgctgcgcata

SEQ ID NO: 215808 - DNA, 370 bp, Glycine max
  unsure (1)..(370): unsure at all n locations
tgttgaaattgccatgtttggatgagttaaacatacccattctgttntanggtttttgtgatgatgtttgtgatgtttatatgctgaaattgctgatggaaatctgttatagacgaagggtataactaacctatggttagaaagtgagaatgtgatgttatgagtggaaaaagagtgagactttgagagttggaaggctaagtctgaattctgtggtaaatggagggtaaagtgagttaatactagcttgaaatgtcatttangacttgggagaaagcttggactgtgctagagagaagaacaaatgatcaaaatgaacaaagagctatttctatggcaaaattgggtgttgaggagtcaaattttgatt

SEQ ID NO: 215809 - DNA, 489 bp, Glycine max
  unsure (1)..(489): unsure at all n locations
aggcttttcattcaaaacaaaaaccaatacttatagtgtatctgaacaaaaagataaaaatagacataggccttctaaatagttcgggcccaaattaccataaatataaaatttataactaaataaaactatttacacttgggcccttcaacattagatactgggcgccttcacgcacacagatataaataagttcnttagagtaagnntggtctcttgccgtcgtggagcccttatatacacttactgccacattagtggcaccttctatcactatctccgacttcgggtggcgtatatcacttctccactatgggcgctatagcgctgtattagaccaggttcaggattctcatcattccctccttcttggaaaacatttgccctcaaatgtccaagatcatcatcgggttcaagtaccacttccttccttatcttgttggctagcttgagatagctttcattcttctctgcaattagcacattcac

SEQ ID NO: 215810 - DNA, 456 bp, Glycine max
  unsure (1)..(456): unsure at all n locations
tagcttaccttaccttggactagggggctaactattgttccacctcangcaccgcaaagtccggaaccactagaacatgcgcaaattgcatatgaggtaactgacaaaaggtaccatgaaagggtgctacatggacaactggtagtatgcgaaactcttcatgacttggaaggataattggtgggggtggaaacctaatagagacaaaaatatctttgttggattgatggcatatacacatttgacactgaagataagtaagtagtagtgatgacgcttgtgtaccgatgcatcttggcagcatcctctctaatccatacgtcgggcatgaccattcgatgatcacattataggagaacggaatgtccttcatctttcagagtaatccacaaacatacgtatatacctacaacataaacatacaattgactagactttatcggggatcctactgtt

SEQ ID NO: 215811 - DNA, 446 bp, Glycine max
agcttggtaaactcaaggtccacccttagtgattctctctgttgccaaattttgcattcgctcaaatctaaggtacgcaaggtctgtccttgtacgtttccctattattaagttttatctgtgcaagaatacaagtctacaagaacactagaaacccaagtccatccttggtacacactcgtacaaaaatccaaggcacgcccttggtaagctcactcctttagaactatgatgaatatagccaatggtccaacttccataaggcaaaatgaattaccaccacattggtcagcaagaccttaaaccaggtggaaatcatactaagtcctcatcggcctcaggtgagaagctccacaaagcgaaaggaagcatcaccagatgagtgacaagacctttaaccatgttcaaatcaaacctaagatgatttcatgtcatctatttctcta

SEQ ID NO: 215812 - DNA, 453 bp, Glycine max
tctatatttataggtcttcttcaacaagtgtttgttgtctctaaattgatagatttcttcacttgagctcgtgtatgaagaatctggttgctggaacatttaatgcttccaataaatgcatgtactcccatgctgaaaaaccacttttgtgagctttcgtgttgatcacttcagcagaaaaccacttgctttaagttagagtaggtctatctcgaccaatgcacgtcttttggtgttgtttggaaacttccagatcttgagcttcatttgcttttttataggattcatagatcctaggagaatgtcttttcaaagctaatctcatacacaaaccaaaaaataagttcttaaaagctatcgatttaatgttatatgagatcatgacatgactcttctatcgtttgtaacacagacacagatgtataaggcatggtctaatatttgataagatat

SEQ ID NO: 215813 - DNA, 434 bp, Glycine max
  unsure (1)..(434): unsure at all n locations
gctgggattgtgaggctcggcctcaattgtgaatattggagatttagctctaaggggcttgaggctaaacctgnggtttgtgaggcttggtctgagaggtgtaaattggagaattagctctaaggagcttgaggctaagcttgggatttgtaaggcctatactaaggagtacaaatttaaggttttggtttcagaggtgctaggctaagtgtgggacctacataatgggatttgaagctatgtgagaggttgtgtagagcttatgtatgtctactatgttacttatgtatgacatttgaattattgttggaatgttaaatcggtacataattataaggttgtgattattctatgacttttacttattgatgagaacattatatcatagtgttattgagaggtttatacttggatatattattattattaaggtt

SEQ ID NO: 215814 - DNA, 459 bp, Glycine max
  unsure (1)..(459): unsure at all n locations
ggtcgagaagtctganatggtaaggattctatgaaaactcttttgttttaatgtcaacgcctctgtttaattaattggataactatgcccatataatattgctatatatgcaagttgaattaagtcaaaaactagcaactagcttaaatagctatgagctatgcattatagggtctagtaaatgaaaacaaagggaggggaaaacaacgatagattaagaaccagcatagagtgtgaaagctttgaaaggagccaatttaactatacaatatgcttgaatgcttgaggatgttaattatcattgagtaaattaatttgaacactgcatcttactttcacactctcacaattagaaaaatagatttttacaatataagactaaacttataatattatgtaataactttctttctatcgactatttgtagacatatttgagaagactnngtnttttttttt

SEQ ID NO: 215815 - DNA, 437 bp, Glycine max
  unsure (1)..(437): unsure at all n locations
agctnggagatagaaataagattgtatttttttatttggaacataaagaacatcatgtataatgaagtgtggcgataactggacagttcctgaaatatgagcagcaatgacagaacaattgggtaagtggatacgcataggttgtatttttgagaagcttaaaaaatcattaaaggaacatgtaatgtggtctgtggccccagagtcaataatccaaaagggtacaattaattgtgtgagtgataggagcagtgtgtgcattagacaaagaacatgggtcaatggtggtgcaaaagacaaaatgggtaccaatatacattttaggagagtcattagaattggatttggacacttgagaaatattggcacgtttaggctgagaagaagtcgttgatgggctagcatcaaaatttggtttttgttgccgtaggagacct

SEQ ID NO: 215816 - DNA, 465 bp, Glycine max
  unsure (1)..(465): unsure at all n locations
ntatattntgntcttcgtattcttaatagagtcccttataataaacaaatctaaataaaaatctttataagctatggagaagaagagaaccaaatctgaaatatcttaaagtgtgggggtgtctagtaaaggtcaatatccctattaataacaaaagaaaaattgaaaaaaaatgttaattgtattttgttggatattttctacataatactacttatagattcttagttgttaattcagaagtgactaaaatttataatgttactattatgtaatctagagatatcactctctttgaaaatctttttccttaaaaaagaaattgttaaatctttatatggtttgaaacaagccccacagcaatgacacacaagtttgatcaaattattctttcgtatgattttcaaattaatgatagggataaatgtgtgtatgtgaaaattttttatgatcaccgatgtgtca

SEQ ID NO: 215817 - DNA, 442 bp, Glycine max
agcttttgtttcaatattgagcgtgtatttatattacgtcaagaattattaaatgactcaatcggacatccgagttaaaagttattgtcgtttgaatttgcttagagttactgttctcaatttcgggcgtctcgatatactacaggactcaatcggactttccagcaaaaagttattgtcatttgaatttgttgagagcttctatattcaatttcgagcgtcttgaattattaagggagtaaattcgacatccgagtcaaaattttttattgtttcaatttgctgagagctggtgtattcaatttcgagcgtctcgaattattaaatgggtcaatcggatatcaaagtcaaaagctattgtcgtttgaatttgcttagagcttctgttttcaatctcgagcgtctcgatatattaccggactcaatcagacatccgagttta

SEQ ID NO: 215818 - DNA, 405 bp, Glycine max
  unsure (1)..(405): unsure at all n locations
ttaagcanattcanatgacaataactcttgactctgatgttctattgagntcatttataatttgagacgctcaaaattgaatgcangagctcttaccaaattcaaatgccaataagcttttactcggatgtccgattgagtcccgtaatatatctagatgctcaaaattgaaaacagaagctctgagcaaattcaaacgacaatagctattgactcggatatccgattgagtcatttaataattcgagccgctcaaaattgaatacagaagctctaagcaaattcaaatgacaataactttcgactcgaatgtccgattgagtcattttataatttgagacgctcacaaatgaatgcaggagctcttaccaaattaaatgacaataactgtttactcagaagtct

SEQ ID NO: 215819 - DNA, 408 bp, Glycine max
  unsure (1)..(408): unsure at all n locations
tcttttttttggttcgangattacaatgtcaaacaagttttatagatgtgacatctgtatcgattggtttagtgtaggcatgatgatagatatggtttaagtttttcttatatccatgctcagtatgaatcaaagatgttagaaaaatggattgatctctaagtttcgtaagagcaatgagttcaacacagtataatcggttaagaggtgttgtaatcagttacaaagtgttaaaacgcagcaacataagtctcttctgcttgaaattnggcaacaagtaatgaactaattgattaccaatttctataatcaatggcaaagccagtctcaaaagaaggaggacttngtagcttgagataatcgattaccacgtatcgtaatgattggactacgtttagaaacttaagg

SEQ ID NO: 215820 - DNA, 414 bp, Glycine max
  unsure (1)..(414): unsure at all n locations
ttgctgatttagtttcacttacgaaaggatcgaaatgggtctgaaaagaagaaaatttaatcatcttgcttggacgaatgagaaaactggggcgaatgaaaaggatgagagtgaaggagaaacccatgctgtgactgtcattcctatacggccaagtttcccaccaacccaacaatgtcattactcagccaataacaaaccctctctttacccaccacccagttatccacgaaggccatccctaaatcaaccacaaagcctgtctaccgcacttccaatgacgaacaccacctttagcacaaaccaaaacaccaaccaagaaatgaattttgcagcgaanaagcttgtaggattcaccccanattccggtgtcatatgctaacttgctcccatatctactcgacaattcaatgg

SEQ ID NO: 215821 - DNA, 357 bp, Glycine max
  unsure (1)..(357): unsure at all n locations
atgcccatctctagcagngatatctatggtgttagnnggtgnggtggtggtaataatgctagtgacaatgatatcctaatgatagnggtgatgataatgtcgataacaatggtagcgataacaatacggtggtggtggtggtgacaatgacaggtggtattcgtggtggtgtccatggtaacatcaattgcaacaaaaaatatcattgccaaatgtgacaaatatgtgttattatacaacttaaaaccatttcacaaaatatttttcatgatttgaaaatgaatgaaaattatttccaaataatttacaaattatttcagtccctttttgttaatatttnttgtttaaaaaattctt

SEQ ID NO: 215822 - DNA, 450 bp, Glycine max
tctctgtctcctccacaatctcactgtgctagctgatcccgtaactgatgaagtctacgctcagatcactcttcagccagtcccttctgtaacaatccattcttctcttcctccctccctccctccattcatcatctttgcttctaatcacattcctttccctttcttttcagtttgacaaggatgctctcttgcgatctgatctcgccctcaagtcctccaagccacaacccgacttcttctgcaaacaactcaccgtcagcgatactagcactcacggtggtttctccgtccctcgccgtgccgccgataagattattccttctctcgtaactccgttcctccggttccaaatttcccttttccatccacttctctctttctttcttctaatactttcattccatctactccaggaatattctatgcaacctcctgctcaagaactcg

SEQ ID NO: 215823 - DNA, 365 bp, Glycine max
gatgaattaatatttaaacctatattttatcttaatatttagattaagaataaaatatgtattttaccctttccattgtgttatttttttttgttcaagttcccataaattatttttatttttttccctagttcctctattgatgacatgagactctttgcatatatgacatgtactaatcatcttgttaatgatgtgacatgataatatcatcatgaggtaattaaagtgataacaaggcataatatcaatatcatttttattagacgagttaaaaatttgaaggatgaaagatctctttttttttggcgttggactaaaatacctaaaatttaccttacatggacaaaaaatatttgtctttt

SEQ ID NO: 215824 - DNA, 356 bp, Glycine max
  unsure (1)..(356): unsure at all n locations
tgcccagcgagtcattngncacttctcgcactcagcgtgcttagctcgctaatctcaaattcactaactcgcgcttagtgagccaatcttgctaagcgagccgtcacaatccgaaacatcaaggagcctttaaaacactaaagttggcgtaaaacaagatatgagtcaaaaaacagagctaggggagaagctagagcgacagaaacaaagccttcaagaaagcttatgttagaggagtgagattagagttctataggttggaggagacatcctcaaccattcttagccatttttttccctcaaaatctatcctttctgctgaacctttgatgtaacacttttactatctatttaat

SEQ ID NO: 215825 - DNA, 452 bp, Glycine max
agcttgtgtacaattcattgtgacagtcaaagtgccattcacttagcaaatcaccaaatgtaccatgagaggacaaagcacatagatgtgaaactacacttcatcagagatgtgattgaatctgagaaggtgaaggtagagaaggtttcaacagaagaaaacccgactaatatgttcacaaagtccctctctagtgtcaagttcaagcactgcttggacttgataaattttgaagatgcctaaagcagattggtagaagtgcagccttgaatcacaaggtagacacttgctgatttagagtcaaggtggagatttgtggtgtgtgactcaaaatcacaaatgacacaagtgagaagactttaaagtaatgatgtcataactgttttcagttattataactgaattggttttggcaccaaagcatagctagagtgtacatatatattcttgat

SEQ ID NO: 215826 - DNA, 403 bp, Glycine max
  unsure (1)..(403): unsure at all n locations
taagacaactggtgtaatcgattatgataaggatttaatctattttacaaagagtttttccttttgaagaacttttataacttcagaaaatttcttctcactcactcatgatgatgcatgatgcacaaaagatatgatattgactaagatgcaacatttaatagagcatccaatacaaatgccactcaaaggagttgggcatgtaaaagaaaaaacatcttcaagctttagtcttcatattgcttatgttgctccctatatctctaacacctttctcaaagtacggtgtggtttgaggacgaaccaaatggaagttggtaggagtgtgttagaccctgatttcatccgggtataatggttttatcaatcagatatgatggtgngatctcctcccttctatcat

SEQ ID NO: 215827 - DNA, 384 bp, Glycine max
tgcttttattcgctgaccacagagtggtacctgtagatatgtcgcgggggtcaggagaccttggggacgtcaggtggggtgctattgcccaaaaccaagcttgaccaatcccgacccaacccgggcatagtcggtcagtgagaacctgtgatgtacctaaacaggcgagctcctgtcagtcaacagctaaatggaacaaagaccaccaaccaaggaggcttgtggtggctggccacctgtgaaatttgtcgatatgtggattatggcctctggtaatcgattaccaagggtgggtaatcgattacaaggcttaaaaatgaagacaggaggctaaaatggtctctggtaatcgaataccacggggtgtaatctattaccaggctt

SEQ ID NO: 215828 - DNA, 226 bp, Glycine max
actgagcgataaggctcgggtcattaaaagactacgcatcttttaaagcataaagcgaggatcgaaacaacgaatcaccaatcccacattctttataagattgcgacgaaaaatatacagaggacaggaatccctaatggaaaccacaaaaaataaaacatgcagtgactttcttaactgccgcaagtcttaagcgtagtatcgcttgacgaagtcatagattacc

SEQ ID NO: 215829 - DNA, 433 bp, Glycine max
  unsure (1)..(433): unsure at all n locations
ggcagcaagcttgagggttaaagtctcacgattgtcacttgctcatgcaacaattgttagccgtggttatacgagacatcttgccaaacaaagtcaggttcacgataactcgcctgtgcttnttcttccatgctatatgtagcaaagtcattgatccactaatgtttgatgagttggaaaatgaggccgcaattatactgtgccagttggagatgtattttccccctgctttctttgacatcatgattcacttgattgtgcatctggtcaaagaaatcaaatgttgtggtcctgtttatctgtggcggatgtacccggttgagcgatacatgaagatcttaaaagggtatacanagaatctatatcatccagaagcatctattgttgagaggtacattgcagaagaagccattgaattttgttcagaatactt

SEQ ID NO: 215830 - DNA, 428 bp, Glycine max
  unsure (1)..(428): unsure at all n locations
actataagctttacaaccggaaggtttacattatgctcgttgcgtaaatgccggggcggtcctccattcgccaatttcccagctggaaatcaagaaggcatggtcgtaccaaatccaatgtactcggaacatcatcttcgcatatcgcgaccacttgacctttgtcttccagacccctgcttataaagcttctacttatgtggcagggcgggcttccctcactttcttgtctccaacgcgagctttgaccactgctcttccttcccacgatgcttcttttcatatccgcctgagtgggcttatagcctaaaccatacttcccacgatttcctttggcaattatcaggctagttatgccgcccgtgcctttgcctaaacccatctcgggttcataaccgttccccaacataactctngccatcattact

SEQ ID NO: 215831 - DNA, 437 bp, Glycine max
agcttagtttatattatgccaaactcactatacatcagtgttggcatttttgtcctcagcatataacacaagaataatttcatatagaaaaaaaccctatttgtatcaagtatctcggtggaaggacccaacgcttttacttatttgttttcgcactcaattgttcacgtttactgtttctttgattgcaatagaatatacctttgttttcaattcatgacacttaattctttttacaaacagttgtattttgaatgacgtttttccaagaaaaacaggtttcctgagttcggtactcggatcattccgttttaattattttcttgacgatccgatgcacttgccagtagatttcacacccacacaaacagtagtattcctaggggcgaagacaactacgcagaatctaaatcctgttagatggagaaaatgagggt

SEQ ID NO: 215832 - DNA, 401 bp, Glycine max
  unsure (1)..(401): unsure at all n locations
ctgcctctntggggacttatagctacaatggcatgtttgcattgtatccctacatcaaagttgtaaaatcagcacacatgtatgttacaaatgaaaaaaagataaaatatacagaacacaacctgttagatgccaaactctacaagtgcatgtccattcagctaaattgacctcaacttgttccccccacatgtggacctcatatctcacgcccatgttatcactacaccaaattggagtccattgattagcaaaatgaatctccttttctagtcttttgtattgaactggacataatggaccaggttttccataaagattaaccttgtgggcagccatggttctctggatgtaacatctaatttggtcaagcatggtgagaatatgcttgctcctatact

SEQ ID NO: 215833 - DNA, 451 bp, Glycine max
  unsure (1)..(451): unsure at all n locations
gggaccttaattacctgcggctgcagcttttatgtctataagacattgtttttatacaagttatgtccattataagcgaatcttattttctcgttggagattcaatacaatgattaatacaaataatttggattaatcgctgtattgaatcttaaattgtcatttcgaacagtttgggaagaatcattttttatactagattcatacctatgggttaaggtaattgtattaaatttgataaaattttggtataatgcattcttctttgatctcctggcgcatacttgattgagatgagaataatgtcattgctntcatgctgtgaatttgaagatcaatgtaaaatgctgctgaaatttcgttcaaattaagaaaatatacttaacctatgcgtgtgaatcaagattaaaaaagtcttctctaatgggatagggccacacctttaatgaaa

SEQ ID NO: 215834 - DNA, 390 bp, Glycine max
  unsure (1)..(390): unsure at all n locations
tatatcttcattgaattnaactgaacacgtggtcttcctatatatcacgtacnctacaatattcttaactgatgcttcttttctttgcgtgatctctatgcaccgctggttcattcgctgctctattaagcgtgcgggagaacggtgaaccccgtgaacagcgccgtgggacttctctggaccgggaactggcacgtttgccaggccgcggtggagacagtgctccgcggnggcacgctgaggcccatgccggagctcatgggccttgacgctcccgccgccgcggccaccgatgaagcatcggatgccgaagcggcctgcaccgacacgtggaggatccgaaacccgaaccccaatngcctggtcacaaactcacggtcctccggctgc

SEQ ID NO: 215835 - DNA, 407 bp, Glycine max
  unsure (1)..(407): unsure at all n locations
agcttcacctnttggtcctcctcatagttgttgcatgagaaaacatgctctattttcatctcccactccaagtaggccttcgaatcattctttcctttaaagggaggaatgttgagtttaataccatcaatttggttttgtctaggaacaccatcaaaggaaatgatgatcctagaatcggagctctgataaccaaatgatatgaaccctcatggcacaagggctgacttaggattgtctaggactaaaccttgttggaaaattcaaaaaattgattaagaaaaggatgggaaattggcaacattccagggttggcagtggctaatttcctaggacttaataaggtgaatcttgacataaaatagaggaatgagatggtaaaaacgaaggttaagtggtgactggac

SEQ ID NO: 215836 - DNA, 411 bp, Glycine max
  unsure (1)..(411): unsure at all n locations
tccactctcttcttcagcgattccatttccatggcttcctccctcgacgacaacttcaaccttctctctcctgaacaggttctctctctctctctctttggaatttcaaccaacgcttcgggattctgattttgattttgattcggtgactctctcagcaagagctggtgaaggtgctactggataacggccaagagcacctgtttcgcgattggccagctcccggcgtcgatgataaccacaagaaagcgttctttgaccaggttttgttttattcattcaattcactcaattaaaatacatagatccgttccttccttccttatattcctaaacgacgntgcgtttntcattagttgactcaactcgattcgagtaccctggtggtctggatcatacttaaaaacgcta

SEQ ID NO: 215837 - DNA, 438 bp, Glycine max
  unsure (1)..(438): unsure at all n locations
agctntataagtgcgggtctgggagacgaattgtaagtgttcgcgatatgcgaagatgatgttccaagtactttggatttggtacgaccatgctctcctgatttccagctgggaaattggcgagtggaggaacgccccggcatttacgcaacaagcataatgtaaacctttacggttttaaagagctctatagttgggcctaggctttagagttttcattttgttaaggctttgtgtcttttgtttttgaatttataatacaaggatctttcttcatctgttcctggtctctacccattctcattcatttgcatgtttacttctttttctaaaacggcagattcgatgacgagtcccccgaaggtactaatacctgggacccgtctatcaactttgagcaagaaatgaatcaaacggaagatgaaggagatgaggatg

SEQ ID NO: 215838 - DNA, 433 bp, Glycine max
  unsure (1)..(433): unsure at all n locations
ctctctttatctctcaatngatcttcattcttctcccctctttcacttatgttcctccttttttcttgcacacaatttgtggctcttctactggtgatgatcatggaaggctaaacacaatcaatccaatgatccactccaagcaaggctgaatttaagttctagattaatatttcaattctgngtgaatggttatctttttcttcaatcctatttccaattttcatgattatgaataggcttangattgaaaactaattaggttatggattcatttcctaatatcaaacattaatcacaagctgtttggatgacattccaactaatttgtgatctcaaagaatttacggattaattcgattgaactaactctaatgacattgattgaactctcataacataatcatcctctgcagaactatgataatttgtt

SEQ ID NO: 215839 - DNA, 444 bp, Glycine max
agcttatgaccatgttaatttctcgggagtttccattgggcaataaccaatggctcgatatattatgcacctgaatcggaaatccaagtgaaaagttatgaccatttgaatttctcgagggattttgttgttcaattttcagggtctccatatatggtgcgcctgaatcggacctccgtgtgataacttatgaccatttgaattttttgagagatttcgttgttcaatttcaagcgtctcgattaatgatgcgcctgaatcggacatccaagtgaaaagttatgaccatttgaatttctcggcagcttccgttgttcaatctcgagcatctcgacatgtgatgtgcctgaatcggacctccgtgtgtaatgttatcaccattttaatatctcgagtgcttctgtttgtcaattttgagcgtctccatatattatgcgcctgaat

SEQ ID NO: 215840 - DNA, 410 bp, Glycine max
  unsure (1)..(410): unsure at all n locations
ttataagcgcgggttcgggagacaaaggtcaagcgttcgctatatgcgaagatgatattccgagtactttggatttggtacgaccatgccctcctgantttcagctgggaaattggcgagtggaggaacgccccggcatttacgcaacaagcataatgtaaacctttacggttttaaaagctctatagatgggcctaggctatagagtttttccttttgttaaggctttgcgtcttttgtttttgaatttataatacaaggatctttcttcatctgttcctggtctctacccattctcattcatttgcatgtttacttctttttctgaaacggaagatccgatgacgagtcccccgaaggtactaatacctgtgacccgtctatcgacttcgagcaagatatgaatcaaa

SEQ ID NO: 215841 - DNA, 444 bp, Glycine max
agcttgtgcattcaatatgctgatgagggtgctcctttgttctcaagactggactaatacatttgctgcccaagtttcacggtcttgcaggtgaagatcctcataagcatcttaaagagttccatattgtttgttccaccatgaagccccctgatgtccaggaagatcatatctttctaaaggcttttccttattctttagagggagtggcaaaagattggctgtactaccttgctcctaggttcatttccagttgggatgaccttaagagggtgttcttggagaaattcttccctgcatctaggaccactgccatcagataagacatttcaggcatcaggcaacttagtggagagaacttgtatgagtattgagaaagattcaagaaattgtatgcaagctgtcctcaccaccagatttctgagcaactccttcaatatttct

SEQ ID NO: 215842 - DNA, 409 bp, Glycine max
  unsure (1)..(409): unsure at all n locations
actaagctntgggtcanagaagaagaagaagttcaaagagatncacagcttgtcaaggatcgtaagagattgattgagaaagtattccagattgaatgaatggattaaatttaaaatgcaaaacaaagccttgcttttatagactcttcatgtctggtcaagaagaccatctagaagagctataacttatagaaaaacttaaaaccaatttgaaaaagtcaaaacctttttgaagagttatatcttttgatttattcacaaacaatcactagtaatcgattaccaaataagtgtaatcgattacacaaagcttctatgtgaaaggatgtgactcttcacatttgaatttgaatntcaacgttcacagacactggtaatcgattaccanaacattgtaattgattacagc

SEQ ID NO: 215843 - DNA, 419 bp, Glycine max
  unsure (1)..(419): unsure at all n locations
cagcttgtatactgaattgagtatggagcacacattgctcgnctgatatgcatnttacaggcttgaaaagtgctacaaatcgacctgtgttttctggaaaacacgatgaacttcctaagcgagcatgctgcgctaagcgagttcatcaatactcattgtatgtaatgcttatctaaagaactcgctaagcgcactttccgggctaagcgagttcattctttgaggatgaacactcatcctctcgttgaactacctatggctaagcaaggttgaatcgctaagcccaagtaacttaaccaattttgtttgtgaatacctcgcactaagccaagtctactcgtgctatacgcattttgtcacaacaacttatttggctaaaccaagcttggctcttactaaaccgatatgttatgtttttt

SEQ ID NO: 215844 - DNA, 418 bp, Glycine max
  unsure (1)..(418): unsure at all n locations
ttacgcgatccttagacactcaagctngcctccttcttcatactatgtgccaatatgtgcgaccgatgtttattatcctttgtctccatgtgtgcgcatatatatgagaagagatcaaatatacaccggtataactttgacaactattataccattctataatgtctcaactgattaatgtgttcttaaaacttaccattggatcgaaagttcattttacataaattacataagcaaatatcatattaattcaaaattatttgttaccttattcatatagattaaaatcgacgtaataaaactcttcaaaatatattaaaatatggatcatttgattactttcttgttggtggtcaattttgacaaaatttgacaagatggtttctaagtgaagtgaaatttacaagcagctgaaact

SEQ ID NO: 215845 - DNA, 380 bp, Glycine max
  unsure (1)..(380): unsure at all n locations
cttgttagacaagtggcctcagatatcttaagaaggggggggttgaattaagatattcgaaactttttcccctaattaaaaatctatcttactttttactntaagtatgaattcccttaatgacaatcttcttaaatattaattccaatgaagcaactcgaatatgaatataaagcaataataaataaaggagattaagggaagagaaaatgcaaactcagttttatactggttcggccacacccttgtgcctacgtccagtccccaagcaacccgcttgagagttccactaacttgtaaattccttttacaagttctaaacacacaaggacaaccctttcttttgtgtatagattcttacaaacagagactcacagtct

SEQ ID NO: 215846 - DNA, 338 bp, Glycine max
  unsure (1)..(338): unsure at all n locations
tacaccacggnnggtttttggggaaagtgggcggatatcttgcaactttaagatatgtaaaggctgatctgtgttatggatataccaacactggagggtgcccaagatggcaagatttaccaaagtgtaagaatcctggcgatatgtttgtgaaaaagactcttgtccccgattatgacagtgtaagttacgaaacaaatccggcttttggctacagtgattgtgaggccagttgctggagcaattgtagttgcgatggattcagagcattctggaggaatgaaactggatgtaaattctatcattggaattcatcgaaaaattatattgttgacact

SEQ ID NO: 215847 - DNA, 328 bp, Glycine max
  unsure (1)..(328): unsure at all n locations
agcttgcctcaaagatgtccaggaaggactatgttttttaaggaactagttccgctccggagtatgataaacaccgctntatgagcgcggtacaccagctgcgctttgaagccattatggggtggtcgtttcttcgggagcgacgcgttcagctcatggacaacaagtttactgatttccaagaggaaatatggcgccggcggagggcaccactggttactcccatggccaagtttgatccaaaaatactccttgagttttatgccaatgcttggccaacagaagagggcgcgcgtgacatgaaatcctgggttatgggtcaatggat

SEQ ID NO: 215848 - DNA, 450 bp, Glycine max
tagtggtgctctgagcctatcctgctgaggagaggtggtctatgtcttcgagctaagcgccagcttgctgcgcttagcgcctgagtaaaatttcataaggcgcgctaagctcaacctgctgcgctaaattcccagtcaaaatttcaggtttatttctatgtttttgtgaaaataacctgtgctaatctcttatgtttgtcttatattttacagatgtcatctaagaagaggaaagctccttctacacctacccaagccagtattgatagatccagattcacatccatagaggcttgggagagatacactgacattgtggtgcctcgacagctactaccacagaggaatgtggtagtctattacacagagtttgacgagttcaacgaggaactcgagagaatagattgcgatgagaagttgactgatatttctgacagtatcatagacatt

SEQ ID NO: 215849 - DNA, 477 bp, Glycine max
  unsure (1)..(477): unsure at all n locations
ctcgacccgngaccttaagtcacctgcggcatgcaagcttgcagcgacatcggaactcgatgtactataagtctccatgtgggtgttggatcaagtggcctcagaataattaagaaggggggttgaattaattattaatgtaccttgactaattaaaaaatatccttcttaatgttactagattcaattaggcttttactactaagttaagaaagtaaagaatagaaaaagaaacttaaccaaaagtaaaagcgataattaaagtgcatagcggaaattaaagagtgtagggaagaagacaaacacaagaattttatactgattcggcaacaactcgtgcctacatccagtccccaagcaacctgcggtccttgagatttcttttcaaccttgtcaaaacctttacaagcaaagatccacaagggatgtaccctcccttgttctctttgaacaaccaagtgggtgtacactccactt

SEQ ID NO: 215850 - DNA, 401 bp, Glycine max
atacgaagatgacgttctaagtacactggatttggtacgaccatgccctcctgatttccagctgggaaattggcgagtggaggaacgccccggcatttacgcaacgagcatgatgtaaacctttacggttttaaaagctctatagttgggcctaggctctagagcttttcctttcgttaaggctctgtgtcttttgttcttgaatttataatacaaggatctttcttcatctgttcctacgtctctacccattctcattcatttgcatgtttacttctttatttctgaaatggaagatccaatgacgagtcccccgaaggtactaatacctgggacccgcttatcaacttcgagcaagatacgaatcatacggcagatgaatggaacgaggatgtgggact

SEQ ID NO: 215851 - DNA, 326 bp, Glycine max
tcttcacaaagcccacagctctgtggaatatagaccacaatcgcgaaacaaatagcagtcacatgaagggcaacatccctcaaaatccgagaagaacccaaactaggaatgacaaacccagagacctcaaaaaagtaaggatatggcactggagcacgaacgagccaaaattgtgaggaataagtctgaccagagtgataccaaaaaaatataggcctctgagaggtttgcaatcgatatgccaaaccaatgccccaataattagaggaaacaagaaaaagctgtcatcaagaccaacatatattgccaggcccggtgcccaaccc

SEQ ID NO: 215852 - DNA, 342 bp, Glycine max
  unsure (1)..(342): unsure at all n locations
agctngggttagatgagtatggattgcattatatgtgcagagctctaatatacatggcacttgccatggatggcatgtactacagacgtaatggcgtgctcttgcataacacgcctcgtgtatagtggcacgtactataggcatggtggcgctaattattgggactcattaagggccgaccttgggttttgcctgcccttcgaagtatgaaccatcaaatattttatatcgggttttgggcaccgtgctcttgcatacatgcctctcaggatagatgggtcatgatgagcatatgctctcgcatgtatgtcactcactggggttggcttacactacagtcat

SEQ ID NO: 215853 - DNA, 422 bp, Glycine max
  unsure (1)..(422): unsure at all n locations
ctgaaccgttatacattcattgangtttcttctgcacaagcncacagattgaagacatttatttcttatcatattcacaaattattggaaaaatngagaagaggaaagaatcaaagaaattcaatggattggaattgtactgcctattttaccttctgatttgcactgtgcatctctcgttgggctcttccaaggtcctctgacagagtactatgtgacctcttcatgtcaagcctagcttctctctctttaacaagagattccgctgcagccttgtatatacaatgataatacaaagattagaaatcattcgtataacatttcctatcaccatttttgttttcattcaattgaactaaaattctttcttaccgacatttctgttcttcctttataaatttcttgaaggagaggcattcttc

SEQ ID NO: 215854 - DNA, 362 bp, Glycine max
agctatagtggcacacatcatggagatgtcatttgttatagaataagataagacaacatgacgcctgaataggtaataaatactaaactaaggattacgtaaaaattacattgtggcctgtgtctttaataataattaattattcaaatatattatttcagttcttgtggatccatatctccactttttgaaggttattgagtcgataactttcgaagactcctccagatggttagcctgcaccacattaattttgttttcaataacacaatgacaacaagcggatagagttaaacttcaatttctgctataacaagggatactaaatccccctaaaaacattgacaaacttaacaaaatca

SEQ ID NO: 215855 - DNA, 433 bp, Glycine max
tctatgagaatgatgggggttgcgctcatgcgaagaaagcaatatttcttgctcaaagaaaatccaagttgccactaagacgagatagaccttttcaatctcttgaaaagataaatgacaatgtttacaagctagacttgcccagaaaatatggcaacactaatactacctttaatgtggctaatctatctttctttgatgtaggcgacgaatcaaatttaatgacgaatacttatgaagaatgagagaatgatgaacgtgctacaagttcgcttaatgatcctttacatgggattggaggtactgcgacacggttcaagactaagaggatgaaacaagatttgcgaggcctaattctaattatcatagagaaagaaaacccctgtgaactaagggctgctcctacatgagcactatcttacaaattgatgaa

SEQ ID NO: 215856 - DNA, 424 bp, Glycine max
agcttgattactcatcagaatcaaagcactagttttctgctgcaaagatgagcaacaatatggggggtgatactttctcttctttcagaaatgggaatttcatgccacatgatgttggtggaggttcttatggagggttggtaggggatggagttttaaccaatggagggtcatgtacactcactgtgaatgacagaggaatcaagaggggaaggaaaagcatgaagggttggaggtggattttcagataccattcaaattggggaagctcaaggaaaagagatgaagactttatgttcaaagcatgatatagtagtaatagtagcatcatcaaatcaaatacatctgagaaaaaaaaaaaaatcttcttaggtagcttcattagggtagagttttattctggggtttaaaatgcctctagttt

SEQ ID NO: 215857 - DNA, 344 bp, Glycine max
  unsure (1)..(344): unsure at all n locations
cttgccgncatggagttttccgactatgctcttgtgtggtggtagaagctaccaaaggagagagcaagaaatgaagagccaatggttgatacatgggcggagatgaaaaggatcatgacgaagcggtatgtgccggctagttactcaagggatttgaaattcaagctccaaaaactaacccaaggcaacaagggggttgaggagtatttcaaggaaatggatgtgctcatgattcaagcacagattgaagaagatgaggaggtaactatggctcgatttcttaatggttcgactaatgatattcgtgatattgttgagctgcacgagtttgttgaaatggatga

SEQ ID NO: 215858 - DNA, 457 bp, Glycine max
  unsure (1)..(457): unsure at all n locations
ttatgaaatataaaatagtaactttccattattattacacgtttngaacaataaagcattcacttagtttttataattcaactttttagaatttcacttgcnaaataatgatttggaatggaaacaataaatggcatccattcccataatgggaaaggcttttcttattgttctagtctgccaacccatagctntacagatcttaattacattccatttaattacgttacttcacctctatgatttagacttgtataaatctataatttcctttatcttcttggatccaaaggagatctaaaacctgttgcggggaggctatatggagagagcaagccacaatggtgcaaggtgatctatgcacaaactactcacatttttagaacttggcatataattcacgaaggaaatgaccaatggattgacgatntatagatggaaggggtgcatcataaca

SEQ ID NO: 215859 - DNA, 457 bp, Glycine max
atccttaagcaccgcggctgcaactgggtgataaacaagaaaaacttttatcttgcattgaacttacctcttcatctcttttatgttaaagttgttgacattgtgcatggcacaataaacaaggaaataattgctgcctgctcgtacaaagatgctgcttccaaggattctgcatacgattttgtgatgtcctcaccacaaactggtagacatgaatttttagcatgctaaaaattgtcctaccccaccccagcaactgcaagatttaagttctattggaacagtaaatacagggctgaaaactgtaaataagactgataaacttctgcaccctatgaagattttagtttctaacattctgttcaatactaaatttcatataccaaaagttaggtttgactaatctttctggattctatatggtgaggatgaccaagtaactgttaaatcaatcagc

SEQ ID NO: 215860 - DNA, 458 bp, Glycine max
  unsure (1)..(458): unsure at all n locations
actcagctngaagtatttcgtggataatttgcctgttccattaggcttttaatgtctctagaggttacttcctcgctgacatcttttgtcttgaatggaattgccatgacaggtttgttgttactgtctttgatatttggtagttgatattgtgttgtgggaggtaattccgactggattaactcaccatccttcacttgccaatntgttatgacatttgttgttggattacctatgatgtcttgtttccaagggtagtctatatcctttctgatggcataagcatgaaaccaatcaaagaaaaggacattaattttgactctttcgacaaattcgtagaacttgtcttggaattgtcttctgtttgtacccttgtaatgttggaaaaaccatctcctttgagctcattcccggagaatagaattttcctaaggtttcttataatactaagtgcaata

SEQ ID NO: 215861 - DNA, 184 bp, Glycine max
catcatctgccacattagtccattaaaagctcttgactatacaaatagtccaaccctacattgcatcaaataccatcttgcgggaagcaaactacaaaacccatttacttacatcctttgtcattattacacaataaagcatcgactcatcatcttcctaacaaattcgcctctcctggtaacc

SEQ ID NO: 215862 - DNA, 412 bp, Glycine max
taagcactttggccactagtaatcgattacagccactggttatcgattaccagagagtaaagatctcttttaaaagcttttgagaaaaacctctggccataacttatgcatcatcaatttggagactaacttcatcatttatcttggatttcttggagtcttattttggatcaaactcgagaagcgcattttttaggcatctataaaacaatgtgagagaatcttgtttgaagatttgaaatgtgttctccattcttcaatcgaaatgcatcatattgggatatgaaagtgctctttcttgttcttctcatatttgttgcgccttcattagtgacgtccagcatattccaaatttcttattcactttgtcaacttcgcggatgaaagaattcatcataagatataccagaag

SEQ ID NO: 215863 - DNA, 77 bp, Glycine max
actcaagcttctaaactttatacaataatgacactctgataccgactcgtggactattggcctcacataactcaaga

SEQ ID NO: 215864 - DNA, 477 bp, Glycine max
  unsure (1)..(477): unsure at all n locations
gacccgcgaccttaagtcacctgaggcatgaagctttattntcccaatacacggataagcaaatctgtagtcggtgatagggctttcttgatctaaagcgcgtaatacttttccttccaaactcaactacttatatatatatatatatatccatcttggagcaatctcaaatctgaaccaaaccacaaacacttaatttctcatctcatcatttctaattctacctcttttctcttgcactaacaatccaagatgaataccaacaacgacaccgaaaaaaaccaatcatttccagaagcacaaggagcatcatcatcatcatcttctccacccaatgttgggactgagaattggggaactcacataatgggcacccctgctgttccaagcagccacccagataacaaaaaagcagctttacaaagtggacaacctcaaccagttcaatactaccatgaccaacatcaacatccctac

SEQ ID NO: 215865 - DNA, 426 bp, Glycine max
  unsure (1)..(426): unsure at all n locations
tagtgcagaagaaatagntatcaccttgagtttgagtcttttgtgtttgacccttagcagcttcattcttgggctcctcagttctttatctttttcccttgtctttagaggtactcacaacatgagcactttcagtccttccttgcttcagtctctactcttcttgcacacagtatgaaatgagctcattaaaagaccatttctccttttgacagttacaagagatcttaaactgactaaactgtgaaagtagagaaattaacactaaatgaataagcaagtcttctgatagctcaagctttagtgtctttaattctgaagcaatatttgacattcccataatgtattccatgacatttcctttaacctgatatttcatggaaatcaaagtctgaaggagagtacttgtttccgtcctattgcttt

SEQ ID NO: 215866 - DNA, 349 bp, Glycine max
gatctcatattcaaattctttctgtaaattcttgtgaagcttggaatagctctcacaacactttgtatattcgtttgtaagatgattgaaagttggtcagtgtgcaataaaacaaataaatcttctaatttgtattagagtcaatagtgacttggtaggacaaacaatactagttgtaataagcatggtgtagtgtcataccctaatttcgtccggggaccattgtttgttggcatgtgacctctgtttgaccacttcaaaatgtttaatacccattgccatggaatccataaagttccgggatgtttcggaaagaaaacaatcataaatacaaaagcggggggggggg

SEQ ID NO: 215867 - DNA, 371 bp, Glycine max
tccatcaagtggtaatcagagcacaagagcttcaagtaggtgcttcttaaacctccattaatattttgctgtaccttctctatcattgttgctactttatttttctccatgtatctcctcacatgtcttgtgctaaatgttgttaacatgattctttatagtttccaccaattaaacttgctatagaagctcgatttgattttctatggtttaaatatcttgttctttttcctgaaccatgaattgtgttgagtttacgttcctttgagctttgtctctgtatttttctgggctgaaacctaaaccataaaactctcacaaaaatattaaagtagaagataacctcataatctatagtgacttgttcacct

SEQ ID NO: 215868 - DNA, 444 bp, Glycine max
  unsure (1)..(444): unsure at all n locations
agctngcacaaacatccattagtccagcatactttctacaagtaggcatcatccactcataattccaatcaatcatgctcagtatgatgcatgcacctgacctcaactctcaaattcaatgtggtaccattcatcaaggaaatagcctaagcgtatccacacgacactctcacttagggaaactaggcagtaagtgtcgaggtcaccttatcatgcataggcaactcccccatggtgatcaacctgagtctcaagggagttccaaaccgagtggcatgccaccaagtacaagtattccccctcatgagagactacaagtacttactgacaaagtttatactatttgcatgaaatatgaaatatgaaacatgggcaccatcaatgccttgaaccgggataattaaagattctaagccatccccctccggagattcttaaaactct

SEQ ID NO: 215869 - DNA, 466 bp, Glycine max
  unsure (1)..(466): unsure at all n locations
tttcaaatgtttgccacagcccttggggcatttgcatttatgcagcctacanaccacaagatcaagttttcagacatcacaaccttgtaagtaagacctaaacacatagttaaacctcatcagacttaaaattctgcagaacttatcttcagccccctcccaaaattattttttaaaaaatttgtagattagaaatgctccaaaagataagtagcgagctttctggtgtaaacaaaatactaaaacaaatggcactagacctcccttggtggattacttcattgcgcttcacactcttatgcatttcccttctcaaatttcccatcagcaatatttaagaatggttatatatgataaatgaataatataaccatcaaacttttcaatagttaacagctgagcaaacattcacatatcagaggagaacagtgaaagaatatacctatcgttactagactgtccatcg

SEQ ID NO: 215870 - DNA, 466 bp, Glycine max
ggatcttaagtcaccgcggctgcagcttttgcaaggatgaagaagaatattatattccagaagatgttcaaagagaatcaaaggttgttaaagaatatgtacaaaagttgtttgaaaggttgtcgaagattgtaagtgttcttcaaatgcaaatcaaggtattgcttttatagacttgaagagtctggtcaagaaaaccatgggaagagttataacctttagaaaaacctgaaaatcattggaagagttacatcttttgatttttattcaaaacttgtcactggtaatcgattaccaaatccttgtaatcgattacacaaagctttttatgaaaggatgtgactcctcacaattgaattggaattccaacgttcaaatgcactggtaatcaattacaaatatcttgtaatcgattacaccattttgaaatcaattggaacgttgccaaatcatttgaaaacttttg

SEQ ID NO: 215871 - DNA, 414 bp, Glycine max
  unsure (1)..(414): unsure at all n locations
tcacctttggtcctcctcatagttggtgcatgagataacattctctattttcatctcccactccaagtaggccttcggatcattgtttcctttaaatggaggaatgttgagtttaataccatcaattcggttttgtctaagaacaccatcattccctcttctcctcctttcttcttcaatatgatctctattctccatttgatccaacctctcatggagcgcatcatctncgtgtttcattaacctctccaaatgttgcatcaaagtttgcatttggaattgcgaaagccccactccatcattatgattagtacctgacatctcaaacaaacaaatcaaacgcaacaagacaatatagttgctatttgaatacctcacccactcaagtgtatcacacaattatggcttttctct

SEQ ID NO: 215872 - DNA, 391 bp, Glycine max
  unsure (1)..(391): unsure at all n locations
agctttactttggcatacaaccaaagtgatatgacttacagaagcccagtgaagataggactctgttttctgtatccccaaatacttgtctgccaaaaaattaactctgtattttcgcctccagctgatggttgaattagtaatcttaattctcaactcttcttttgaagccttatacaatacaagccatacacaggtgatcacatggttctcaaaaatccacgaacttgaactaggaagctattgagatttttcctaaatctctggtaattaattctatcaagggaggaagaaagctgatttgcacttgttagtgtgtgcaatgcatntgccagcctacatttgagtgttgcatttggttgtctctctatcaattcattccccaatctct

SEQ ID NO: 215873 - DNA, 411 bp, Glycine max
  unsure (1)..(411): unsure at all n locations
ntattggtggatattttccaggagaggaaacatatgtatgtgctgttataacaattgtgtttaactataggttaatttttaaacaaaatggataatctttattactagcatagataatccttgttttttcaagaaaataatcagtataaaaaaataattactcatcttaattaagctctgttaaatatcagaaactttaattgcaataaaactttttggtagttttcactggttttgtaccgtagtcaacaacccatgtaaaaatatgttattgataaatctctcgtatttactgctgtgcagtgatgacagcgacgacagtcacgaagatatatcaagtagctcaagttgtctcggtgttgtgtccttccctttcttctctggtcagaatacaaaattctcgttgataac

SEQ ID NO: 215874 - DNA, 424 bp, Glycine max
  unsure (1)..(424): unsure at all n locations
acctgcggcatgcaagcttggattgattcagactaactggggttctattgttantaatttacgctacatcatagaacacaaaagcatgattaattagagaaacatctttatatacatcacctggtttgttagaaagacccaacacctttacctactgctgtcaatcttacttacttgcatttttactatgtttagcctagacttagattaattttgttctaaatcatcaattatcaatgtttctttcgagaatgccttatttttgaatttaaccctatctaagactagttccctgagttcgatattcggattcatccgttttaattataaatacttgacgatccggtgcgctttccggcaaaccagatttcccttgaacatatttgtataaagaaaaagtggaccacaaagtaactgcagggga

SEQ ID NO: 215875 - DNA, 382 bp, Glycine max
  unsure (1)..(382): unsure at all n locations
tgaaccaacaaccggtgagagtgtgaccttaaacttttattttacgactagctgngagcaataatacttgcatgaatctctgaactttagaatgaaatgtataaataaggacatgatgaaggccatgattgtacatacacaaaccttgtgaccaacaagcttaccttgaatgataattgcatcctttgctccttgtataggctgaatgatattgtcatgaattgaaccctgaacttaaataattatctcctgataccttgtttagattctaggagagcatatggttcaaggcaaatttactctacatttgggggagaaaagttgaaaagaatgaaaagaataaggctaagcatcaacatatacaacacataagttgtatgta

SEQ ID NO: 215876 - DNA, 439 bp, Glycine max
  unsure (1)..(439): unsure at all n locations
agctngctctaaattacattgatgtttgtatttatgggaggagggtgtatgtcatttttgttataagagtagtgtcccactggtaaaactaactttccaaatgtttgccttcgcaggaaatggccccgaggaagcttgcctcaaagaggtccaggaaggacaaggcagccgaaggaactagttccgctccggagtatgatagtcaccgctttaggagtgctgtacaccagcagcgcttcgaggccatcaagggatggtcgtttctccgggagcgacgcgtccagctcagggacgacgagtatgctgatttccaggaggaaatagggcgccggcggtgggcatcactggttactcccatggccaagtttgatccagaaatagtccttgagttntatgccaatgcttggccaacagaggagggcgtgcgtgacatgagatc

SEQ ID NO: 215877 - DNA, 436 bp, Glycine max
tgtcgctcgagctgacccatcaactaccctaactctttcatactaacgactcctatactcttgaccttgacttgatagaacctctttttaagcgaaggcgtctgactcaatcccatgttttactaaagtgaaacaaaacccagtgcgaatcaagactccaacatttatcatgggtggaatggatgaatgcatgaagaaatgtgtatggcacagatgcattttatgaatatgggagcccgggagattgtccccttcttagatacaacattcgggcagcatggtgcccgatgtatgcatttaagaaggcgacacggaccctccatcagttcgtgacaaagtgatgggatcaagacgcaactcgtgcatgatgcagatgcaaaaaagggcacaacacggggatgtacatagtatgacaatatccacaaataatcataca

SEQ ID NO: 215878 - DNA, 412 bp, Glycine max
  unsure (1)..(412): unsure at all n locations
agcnttcatatgtgaaatcaggtgctgtcatttcccttagagacctctcatggggtggaggttgtgccatgtcctcaaaatgttcaaaattattatgctcaaaatcaccaataacagaatgctcaggatgctcaaaaggtactaaatgatgtttaactaatctataaaatgtcctatctatctcacgatcaaagggttgtaagtcagatggatttcctctagtcatacactaaattcaacatgcataattagttgccttcttatgcaagtaacagtgtaggtttgaactacagctaccatcaaatgatgtccaaatgacttgaaattttgtgagaaaccttataaaatgatgagaagatagcccataaaatttcaaacaacaattcaaagtctaactatagaagctaaaatt

SEQ ID NO: 215879 - DNA, 462 bp, Glycine max
  unsure (1)..(462): unsure at all n locations
gacctataaaactaagctgccatagcttgtatgaagtatacggttatttttatttattggcatngcttataacttgtccaagagttcttcctctttaattacctgttttatattcttttgattctatagtttcaagcatggaattaaattctatatacaggatcaatttgacactatgcgtaaaactttaacacttgcatcacttaataatttacacgaaattaactaattccaccattgattaagtttaaacaattccatacaaaacaaaaactaattgatacttaatcaatatgctctattttgatagataatatattatgtcttttatgtgaaataagtaaaatatttagttagatgaaatttcacgaatatgtttaaattatgtgaaatttgattacatgataaaaaaagtaatttagattatttgcttatcttttaaaaaaaatgattttggatgct

SEQ ID NO: 215880 - DNA, 401 bp, Glycine max
  unsure (1)..(401): unsure at all n locations
ccaattggatggattttcaaggcttgagaagtgaaattgaaaatggggtaaatntggagcaaactctcaccttacacaagtctataacatcaatttaaacttgttcaaactggattacacctaaaattttaccgaaccaaaatttgactcctcaacacccaattttaccctaaaaatggctctttgctcactctggtcatttgtttttctctctaacacaacccaaactttctcataagtcctaaatgacatttcaagctaggattaacttactttaacctccaaataccactaaatccatatttggcctttcaactctcaaaacctcactctgtttccactcataacaccatattctcactttctaaccctaggttaactctaccctccatctctaacag

SEQ ID NO: 215881 - DNA, 437 bp, Glycine max
tatccttatggcctgcctccggacttcaccccccgtgccatcccggaagatttaagccaagcccctacttttgaggggcaactcccaccttatgaagactatcctgtgcaagacgatggggaaggagatacccatcttggccccctactccacctcaaagatccatccccgcatgaattaccccagccgaacatagtccgccatatcccggcctcacccgcacccgtaaaagaatctattccctttgcggaagataagggaaagaatgaagcacttgaagagaggttaatagcagtcgagggcctcggtaattacccattctcagatttggcaaatttatgtcttgtgcccaacatcgtcatccctcccaaattcagagtaccagacttttgataagtcaaagggacgacatgtccaaaagggcatctccggatgta

SEQ ID NO: 215882 - DNA, 206 bp, Glycine max
caatatgcgtgggtgccatatcaccatgccatatccaagggagataattgctattatttacagcgcacaacaaaagcttccttattgacagcacaatatgtggtacaccatcctatatatatatgcttggacgctattttgacccatcttcatgcgaacaatctctttatagcgcatatgagaaaacctgcttgacagccttctca

SEQ ID NO: 215883 - DNA, 280 bp, Glycine max
acctattaagccttaactcgcggataataccacggaaactagtcttatacatgagttgtgactctatgaaaggcatcctatagaacatacctgtggacctctaagctttgatgtgagattaactccctgtacccactgctacacaatatgctgtggttgcacaattctgacattgagaagctctggtcaatgagtgcgagcatggtgaaggcacttacatctggtgagagaactctgccactgccttacgcccgcaataacgattgatcatatgggtctt

SEQ ID NO: 215884 - DNA, 419 bp, Glycine max
  unsure (1)..(419): unsure at all n locations
ctgcaggctgcaagcttgccacacaaacctgaccttatcaggagtattatagccttaaatncaaacaatgatcttgtttaggtgcggctgcataataataaccattcaaaagttcttaaaataaataaattatgcatgcccaatcatatgttccgttgtctttcatacaaaaaaataatgttaatgggcacacataactgtatacacaaggggacaaccatttaagcttgatgccaagcaaataatcatggcttcaaccccccgatgggtcatgggagcaaccctactgtctcaagtctctacaaacatctgcgcagaaattgttcaattcattgcatttataatcggaatagctgtatctctttatctaaagaagtatttcgaatttaaagcttactttatttggtattcattaagaa

SEQ ID NO: 215885 - DNA, 367 bp, Glycine max
  unsure (1)..(367): unsure at all n locations
tcacaaatcacatcacgtgactacatacaatttgtgatataaagttctttggcgaaaatttgtgacatcaattaatttgagggtgagttcaatcgttattattagtacaaaagattttatattttcttggaaaaaatcatatatttaattaattatctcaaatatagttctaagataattacattacttttaaaaaagatagttattataaaaattaattatggctctattatatgttgtaatttataacttatgattaaatgatagatatgttcatattagttaatctctcttatttttaaaanatatttttaacaaaaataacatatcattggccttgtcttttatactcgctcccacattcttg

SEQ ID NO: 215886 - DNA, 458 bp, Glycine max
gcaagctttcacaacatccaagtgaaacaacattcatacagcacaagctatcacagccaagcaaaagcagagcaaaggcagaaaactctgctcaaacaccaatcaaaatcacaacttttctcacttgaagaccacagtaacaagtccttcgatccaattcgttaaccgttggatcgactccaaaattttactggaagtctatagtgcataagcctacattttgaccgttgggatctactagaaaacatcaagaactcattctgtactactctttccacagccaaccacacacaagcattttctgcaccaagctaaaatcctgctgcacctattttgacagcaaaattctgcataagtgcagatttcgaaaatcacacttcccctcatccaatcttgcccaaatcaaatcctacgagtcccaaatcatgtatcaaacatgtctaaaccaaagctaagct

SEQ ID NO: 215887 - DNA, 371 bp, Glycine max
acacattttttggtgaatcttcaatccttctgccatcatttcaagaatctcacatgccattttcctcacagaagacatgtaactgttcaacaaacacctgcaaaatagcaacatggaggaaaaaaaataatcattttttcttatcataactttgttaatttatttatatgatgtataagttagtttagattggttcagtttttgttctattttgaaatggtacctaaatttctcagcgtttttgccatatacagagaagttgtgttcttgattggcgttgagaagaaagtactcaacccaaccaacatccccattgtgttcaattttcttgctaccatacccatatggtttgggagggcctactttttcct

SEQ ID NO: 215888 - DNA, 474 bp, Glycine max
  unsure (1)..(474): unsure at all n locations
tcttaagtcacctgcggcatgaagcttattaagaggcttctagcacactccagatttcttctcatagatcccaacggtcagatcatggacaagtgtcttgtgaagttgcagaccaatttcgagaagatccaacggttaacgaaggctgggcagcgtttttaccgaggcagcttcatgtagctttctctagaagcttcattaagaggcttcctccagaagcttcctcgtggcttctttgagaagctttctcaagaggcttctttgagaagctagatccttatttatccacatccctcttttaactaaattaaccttcttaaaaataattatggatgaaaataacgcaacaaataattcaacatcaaatataattactaataatatataatatatatatcagggggttacatttgatgtctggggtatagactntatggggcctttccctgtctcttttggcgttgttatatactc

SEQ ID NO: 215889 - DNA, 455 bp, Glycine max
  unsure (1)..(455): unsure at all n locations
acacccanaaatccttcaactcatttctcagtgttatgttttccgatattggggtggccctctctacccttctcagcttgagttcattactattgtttgacaaagctccttggtacctttttttgttcgtctcttcccctttagcccttcttatttctcgctccaatgtttcagttgttgacatgttgacatcccttactctattgcattgtttccttaccctgataactactccctttaacttttctttcgtccccatggatttctgcaattctgctttcaattctctgacctcctccaccttaataggtacatctatctcgaccctctcaccatttgtcttcttagacaacttgacttctcgcactctattctncaaccactgtggatagctgtctacaaaaccctcatctttctttcttaactccttgtccctcatatatggtgagtctcac

SEQ ID NO: 215890 - DNA, 438 bp, Glycine max
agcttctggtgggacatcttgacttgctttctaatctgacattcaccacagattctgccttcttctattttcagattgggaatgcctctaacagcacctttgtcaatgattttcttcatgcctcttaagtgcagatgtccaaatctttgatgccatattctgacttcatcttctttggaggatagacatgtggaggagtaactggtttcttgaggtgtccataggtagcagctgtcctttgatctgctgcccttcattagaacttcactcttctcatttgtcaccaagcattctgactttgtgaagtttacattgaatccttcatcacacagctgactgatgctgatcaagtttgcattcaaacccttcaccatctgtactttgtccagactaggaagtccatcatggactagctttcccattccagtgatctttcct

SEQ ID NO: 215891 - DNA, 486 bp, Glycine max
  unsure (1)..(486): unsure at all n locations
cgcgaactataaatactctagcgttataggtgaaatcaagagcagacaatgtccttatagtcttctcacgatgtggaggctgtgccatgttctcacaatgtgcaaaatcagaatgctcagaatcagaatgctcacaattataatgctcaacatcaggatgttcaaaatcacctataacagaatgcacagattcaccagctatggaatgctcacaatgatcaaaaggtataaaatgatgcctaactaatctatgaaatgtcctatctatctcacgatcaaagggttgtaagtcagatggattgcctctattcatacactacattcagcatgcacacaactagttgccttgtcatgcaaataaaggtgttngtttgaactacagctaccctcaaatgatatccagatgacttgaaattttgtgagcaaccttatataatgatgagaatatagcacaacaaactccagacataaattcaagtctaacta

SEQ ID NO: 215892 - DNA, 476 bp, Glycine max
  unsure (1)..(476): unsure at all n locations
cgaccgggatccttnagtcacctgcggcatgcaagctttgaaatcctgaaaactcatacctctttttatcggtcctttccaaattctgaaaagagttggtcctatggcataccaaattgcattacccctgtctttttctaacctcaaaaatgtctttcatgtgtctcaactctgtaaatatatccatgatccatctcatgtggtcaaattggatgacattcaagtgaaggagaacttgacgtatgaaacattgcctttgaggatcaaggataaacgaacaaagcacttaagagggaaaaagattttgttggtcaaggtgatctgaagaggtgcattcgaagaggacgcaatgtgggaactagagagtcaaatgcgagaatcctatacatccttgtttaagtcaggtaaatttcggggacgaaatttcaaaaagggtgggagagttgtaacgcccaaaaatnttgataactaaaaat

SEQ ID NO: 215893 - DNA, 474 bp, Glycine max
accttaaaactaagctttttggagtgaaaatgggaccactcatttatttcataaagtcttatctagtcaaggtctgagagaccatacaagtttcctagcaatttctaatcatgtgggccattaagtctatcatatgctgacaatagccgagaagcctatgaatttcttcgggggcggagtaggtgtccgccatcgccttggccttggccaacaatcggggaagttcttgactcccgttcaaggtaagagcaaaccgatccatccacatggtcgcctcttggtgtaaagagtcgatcacccttcctctagcctctttttccgcgtatacttgggcatactcgtccgcgaccctatgctcgtgggtcgtggctaggcctaactcttcttggtacttggcgatgatagctagcactgtggtcttcgtctcgcattaacgctgagacaagctctctttggaccttgaacaggcaactt

SEQ ID NO: 215894 - DNA, 469 bp, Glycine max
atccttaatcacctgcagcagcaagcttgtggacaatgactcaagacactatatgcacgcttggaagaagaagaaaaactgtgcctctatccctcaatgttgaactcgtgaaaatggtgaatgagggcttcaattgatttttttacaaagaatgaggacctcttatcttaattccctatgttattgtgctaatctccctaggaatacacccaaagtaaatctcatagagagttaaattacactgtcgctcagtgcgtgatgcaattttgtgctgtagatggaagttttttgttctagcagtttccgaatttcaaccaactagctaaataattatttacactaaaataaatataactaacatgaaacttatacaattaatattatacatataataaattaaatcgcacaaatatataattaaattacacagcgtataattccaattgtctagtccttaacaggacaattt

SEQ ID NO: 215895 - DNA, 390 bp, Glycine max
  unsure (1)..(390): unsure at all n locations
actaagctacaaatgtttaatccaacccatgaataattaaatttatttctagataagagaagatgagataagatctagattaaataatatctagatgagatcaaatctaaataatatctagataagataaagataagataagatctaattttgtagaataaaatagtctgccctcttcaagtccaagcccaattctggattcaagccaaatgcttcattaattcctgaaattaaattaaaaacatcaaattagctgaatgagcccaaataataaaactgcctaattaatttgacaattaacattaatcagtacttaaaatggtgcacaaaggggtaagaaataggagaaaataatggcacatcaataagactaanagaagatatgagtct

SEQ ID NO: 215896 - DNA, 409 bp, Glycine max
agcttacagcagatttagtaatgacccacttacctagaattaaaataacttattactcctcatcttctcatattgatcatttaaaatcaagtcagttacactcaaccattaaggctttttttttaattccctacgttaatggatgaggtcaaaaggttgtttcgtgctaaacagccactctatatcttgttttgcaaaaatcatattttgaccactaacactttcgatgattttgaagtgccttctaatgttaaaactcttttgcaggattttcaagacatgtttccaccaaaggtgccaagtggactaccacctttgaggggaattgagcattaaattgatctcattccacgagcttttttgcccattaggccagcctataaaatgaatccacacgacaccaagagat

SEQ ID NO: 215897 - DNA, 472 bp, Glycine max
  unsure (1)..(472): unsure at all n locations
ntgtgaagctcctggtttagctttacccgatgttactcatctcattgaagttgaatgtgatgctagtggagttggcattgaggctgttttgatacaaaacaaaaggcctatagcttatttctcggagaaattgggaggagccagattgaactattgcacctatgacaaagagttctatgccattgtgagagctcttgatcattggaatcattatttgcgttctaatcactttatattgcattcagatcatgagtcattgaagtatatcaatgggcagcacaagttgagtccaaggcatgctaaatgggttgaatttcttcaatcttttaatttctcttcaaaatacaaggatggtaagagtaatgtggtggctgatgcactctcaaggagggtatgctttattcaattcttggactcgttacttgttctgagacttgaagattattttagaaatagggattttgtgaatata

SEQ ID NO: 215898 - DNA, 445 bp, Glycine max
agctttacttcaatattttccatatcatcaagaatcttggtgaaatcagccaattgttcagtggctattcttgactctgtcatcttgaaggtgtacagttgttgcttcaagcatagtcgatttgcaagggactttgtcatatacaatgactccagtttcaaccacattgaggctgctgtcttttctcttgcaacttctcttaaagctttatctccaaggcatagaatgattgcacttctggctctatcaatcatctttgatttctcttttgagcttagagattcaaacatcctttcttctcctttaagagcttctgcacaaccatgttgaatcaagattgcttccatcttgattctccataacccgaagtcattttcccctgaaaacttctcaatatcgtactttgttgttcccatctttcttgatcttgatcttgtccccacag

SEQ ID NO: 215899 - DNA, 436 bp, Glycine max
tgagaataattcattctctgtgttatatgcctacgtcaaactgtttgattattgatgtttctatcacaatcaagtgattagtgacgtctccatatgtgtgtacaccatggtcatgttttcgttcctagaattcatttggaatatttgttgttgattctgaatgagtgatccttcttggtttaaaaattattgtctcctaatcaatcgagtgttcatcttatcatgggttgctcatcttccaatcatgtcttgttaaactgcttgataacatgtcatgttgctacttctgttatgaatagagagagatttcacccttgccaatcacgttaaggtggttcgagaggaaatacttgagtaggcatgatccttgttacctgtagacgaaagtcaaacttagtaagtcatgtacttgtgttccttgaagactggttattta

SEQ ID NO: 215900 - DNA, 472 bp, Glycine max
  unsure (1)..(472): unsure at all n locations
ctcgaccgggatccttaagtcacctgcggcagcaagctgatgttcaaaaattatgaatatataattattacaattataatatatatcggaatcataaaaaaatgactcatgctatttggtaagaaaatgacattcttataatataaagaaataaaattgtgatacatttttctcgttcaaaacaagggcattttagacaattcatttttagctattttattctatttatttgctaaattatattaattattgagacatttaatagaatgtaacttttaaatgcaaaattattattttttattgtaagacaaatttaaacactctttcaagttagaagcataaagataaataaatatatgagtatatgggttagaatgagaatgatacctgngttttgatcatctttcttttatataggaagaattagatatacaaatcttaatttttcatgataataaaatatttttatctt

SEQ ID NO: 215901 - DNA, 463 bp, Glycine max
  unsure (1)..(463): unsure at all n locations
tcacagcatatntggcaagactagtctaacaagaaacaactttgctatgagacttggatcttagctatcaagtatttaaccctatacactgtagaagcacttgctatcctgatagaatgacatttaatacacaatcacataacttaaagcaaacagtaatatgtaaaaaatgtttcaagtgatgaatgtttagtaatacagtataatatcttattttcaagtcttataatacagaaatccaggaaggcaaaacaaatcacagatgtcaatacaaattttggaaaccccacacataaaaatgtttcttacccgcaacaccagatacagctacttcaacttcccctcggccaccaggacctttcatgtaaatcctgtctgttttgcctgaagaatggcccacggataaaaggctccanatcgagcctaccagctgcatgaagcaaaagggagtaatatattgaac

SEQ ID NO: 215902 - DNA, 431 bp, Glycine max
ggggttcacatctacaagtcaagagatcaatatataatactcaatacatcttgataataacatcttatcctcgtgtagaagcaaagcttcatggtgaatcaaaggtgattcgaaggtgttctgatgataacaaaagatgatgacaaaggagatgacaaaacgttcaaagatcaatcaaagaacaactcaagtgaatcaagaacaatttaagagttcaagataagaatcaagcagaattcaagactcgagaagaaagtttagagtcaagaatcaagattcaaggttcaagatctcaagaatcatgatcaagaatcaagaatcaagagaaggcttaattcagataagtatgaaaagcttttctcaaaaattgagtagcacattgattttctcaacacatgtttaccaaagaagttttactctctggtaatcga

SEQ ID NO: 215903 - DNA, 441 bp, Glycine max
  unsure (1)..(441): unsure at all n locations
agctatccctaggttgcccattacatgacaaatttaaatctgccacgctcaatgccccctagtaattctttgcacattctttgcaattcggatgatgtggccaccaaactgtatcaaaccctttatgcttttttccttcttagttcttcatatgtacatagttccctaatctatatatcccacattaaagagactttaatttcaaaacatgcgggttaacacatttagcgatcatatttgtggatctaaacgcatgtatagtattccacaatagaacaaataaaacaaatttaattactgacatttagtatcttgtaaaattacttcacagaactaaaagacataatgagactgacagagttgaatctttcctagttnggtcacaatataacaatatatgtggcacataaactatggaacacaagcacatgatcatgatgt

SEQ ID NO: 215904 - DNA, 487 bp, Glycine max
  unsure (1)..(487): unsure at all n locations
tgtggtccattcttttatctatttatttattattattattattattattattattattattattaaattgactacactttgtgcattgcagtgtggtgcagaagaacatataataatttagagaatattattgaggcagactcatcacttatcaaaatgtcaatgtgtcacgtactttaggttcttttatcatttttntaagtcgggtgcatatttctaacttctacagctttacggttttggcttttggtttcataatgtctgtggcttttgatatttggaatgctccaacaataacaagtaagacctaacctttaccatcctttnttntattataagttagagaatattactagtcgtgttagatcatgccaattttcttttggctataattcgtagcacacttcttcgtacgtgtncatactangcatataattaattactttactaactatggtattgtactatgatatgggctaatatttaa

SEQ ID NO: 215905 - DNA, 402 bp, Glycine max
tttaacctcattgtctctcacagtctttagatttgggagccaatccaatccttgtgtccggactctcaaccacttatgatagccgccgatgatcccattactgcttcccctaagctctctgtcctttcttcacgccgcatcccatgccttgcgaactccttggagtaccctagcattgtggtcactgaaacctcgtgcgatgaaaggcgtgatgctttcgtctgatggtactcctctcatgggacatccttcgcatgaagatagaatcctgattcttccttccttctagcgagggaaccatttaacagacgcccctccatgctagccaagagttggtcccaattcgtctttcttttttcgacgcacgagcggagaccttgtagcggataaacgggcctacct

SEQ ID NO: 215906 - DNA, 426 bp, Glycine max
gagtgctatgcttcttttacttatgccaggctcttcatttttgttgagacattgaagatccatctcatgttcctgcaatttgccaaacaaggtggcaagagacatataggaaagatctttactttcagaaatagcagttgccttgggctgccattcccaacttaaatatcttaaaactctattaattaaatcttcattaaggaagatattcctaaggaggccagatggttgactatgtgtgtgaatcttttatgcatactttggatgttctcattacagctcatcctaaatatattcatattcatgtgcaagggtgttgactctagatcttttacattaaaggtgccttcatgtgtaagctggagagtatctcacatcttctttgctccgaacagtttgagctctaaatattcatcaatatctagg

SEQ ID NO: 215907 - DNA, 270 bp, Glycine max
gattatagacattgagtggaagaccgggtgagtttctggtaactgacttttgacgctgatcaaatgttgctgaaatgactggatttccaacacctagctcatgatgaagtgaagtctgcacgagtgatgactaatatggttttgggttaactgaaaggattatccgctgtggtgatacaacaggaatggcctgaaatactatgttgctaacggaagtatgctaacttgggttgatgagacccttgtttttcaaaaagtttttaaagggaa

SEQ ID NO: 215908 - DNA, 312 bp, Glycine max
  unsure (1)..(312): unsure at all n locations
tgaaggtgtnaaacttgcggagcaacaacatatcaggttcttttcctatttctatctcgaactcgataaatcttgagagactggacatttcaagaaatcacacatttgcgaaccatccccttcaagtctaggtcagttgttgaaactactatggcttgaagtatccataaacggattaacagggcacataccacgtagctcgtcacagataactgggcttaagcatgcacacttcatggcaaacaagctgtgtggtgaaataccacaaagcagaccattcaacatttttcgaccagttgcttacatccacaa

SEQ ID NO: 215909 - DNA, 409 bp, Glycine max
ttcagagtttcaacaacatcaatgaaagcgacccgaagagcttcttttttaaaatcatgaataatttgggtaaaatgatgcaactatagacttgagcattcaataactaaaaaaatacatgaaggttgattcatattattattgaacccacctttgcataagtaaagcaatatcagcagcctcgggcttttgctcttctttctgcttaccataaatttgacatgtcaaaacataagtgaacttatgatctgcctgggcacgtgcctcaggggataattcaaagccatgtgtatcagttacttcctcacaacctattgcagcctccaaatctatattatgggaagaaagaaattacaaacattttcacatactaacgctagggaaaccatggaggtatttgtccctacct

SEQ ID NO: 215910 - DNA, 426 bp, Glycine max
tcttaagacgcctgaacatgacatcactaaagctactgtttctttctttatttggagggcacacacggttaaaaagagccttatctgactgtggtgactcatggaaaaatccggtatcaattgcagcagctcgaagattgtttgctgcacctattgcatgaatatctcctgttagatgaacattgaattcatccatgggaataactcggctatagccaccaccagctgcgcctcctttaattccaaaagtatcgccttgcgatggttgaccaacgcacgtaactacctaacataaagagatatgatgggattatgtatccaacataactttgaccagcgattgaaacgtatagttttacatttatatctcgaacccacatatcctgtgaatacccaaatgaacgaacattcctacatcctgtcatt

SEQ ID NO: 215911 - DNA, 448 bp, Glycine max
  unsure (1)..(448): unsure at all n locations
agctntggagggacagattcagaatgttcttacgaaggaaaaactacctctagactcaagtatgcttattcagaaagcatgcttcactttgtattgctctatggagagatgctgctcaagtttttctctctctatatactaactcccttgtcatttaactcctttcaaatgtttctgggcaaacttagcaaaatactagtatataatactgggttctttcctttcccactcatatctaccgcactattggcttctacttttattttattggcagccttcctagcatggataagctaaactatacggcaactcctttagttggggcatatatagncttttttttttcttccccttctgttgttcaaccatagtaacgtgttttgaaactaatcaaaataaatccttgaaacaagtgcccctaaaaagatgttaatntacgattaataat

SEQ ID NO: 215912 - DNA, 412 bp, Glycine max
  unsure (1)..(412): unsure at all n locations
tcacacaaatgtgttgtttcttctttcttgaaaaaacaccgcaacgaaatcaagataccattgtggttgaatttttaatcacaacagaactacgatttcgctgtgataaanaatattatgcacaataaaatcacgatttcattatatatgaatacaacaaaatcacgattccattgtgaataagggagggcggacgaatactgatgcgtaacagaatcacaatttcattgtgcattttgtacatggaatcgtgattccatggtgagagtgtttttggaataaaaaagtcgtagtcccttaataggaaccaagagcaattatcatgggagcaatagtaactcctttaaaacccanacaaacctatcttcatcctggcaaaaataaaaattgggttatttgctcgatgcttaaa

SEQ ID NO: 215913 - DNA, 445 bp, Glycine max
agcttttaagagaccaatagcttcatcttccacaaatctaaaaatttatctgttccattcagttttagcttttaaatgaaattcccacttttatcatgaacacacgctctaactagtagtattttcttgacaccatgttgttgcaccaacgttacactttatgtaaccttcttggggaggcctccatgtggtttcaacattaatggattttctactactaaagatatccagctgttttgtatttttttttccttcagatagaaacaacaaagcacaatcaaccaagacttgagcattcaaatttgatcattatccactaattccttagttaatattttggaagcagattttacatagtagataccattattttctaagcttcatatatttttatcctcctgagcataataaaaaagaagtgtttgcacaatattggttacatgtt

SEQ ID NO: 215914 - DNA, 493 bp, Glycine max
actcaagctgatgagtacattctccccctttctcaagcaaattcttcttgacatcatcaaaatcttcatgatttatagataaaactttgtaagacataaaagattttcataaaaataatttcagaagatgaaaacagatattgctaatcaaacaaagtttttaaataaaatcaaattcaaaccctatgtcagttgaaaatagaagagagatgaaagtagtaagacacatagatttatagtaggtttgtctcaaccactaagactacgtccatttcttagttaaccattaagttccattaactttaataagttacaagtattaatcactaccacttctagctctacaactcaagctctaccccaagcttgatacaacttagtattatttattctaccaagtcattgctggctctatacaaatcaaatagatttgttgtgtgttgtgcaatgactaatttcacattgtcttgcagacgaatatacaatctcaaca

SEQ ID NO: 215915 - DNA, 416 bp, Glycine max
tgttcttgtagaaagtgagagttaactggaattctatgcactcacttaataacatgcatgtggatcaatggggtcgaaccaatcaaatctgaataccaaagttgaacaccaataaactcttttttcattaacataaccactcggcaattacaatgtgtagactaaaaaaaaccaacttatcatcattactttcatcctaaactattacataatcaaaacaccaacaagcaaattaccaccatgaaatcatattcccctgctgcataataaaaacaccaataagcaaacactgacccaagaaaaaaccaatccaatgctgaaaattttcccttcatattcatgtcactgatcttgctttgcaaacccttttccttgaccatcaattcatcaatcttcttcatcaatactatagtgat

SEQ ID NO: 215916 - DNA, 481 bp, Glycine max
  unsure (1)..(481): unsure at all n locations
ntgatggtgtcgagaagaaatcacatgtttgtaatcatcattaatgcggagaatgtgaatgtatgtatacttcggaaattcaaattcaaaagtcataacccttcaaattataactgtgtaatcgattacacaaacattgtaatcgattaccagtggaaagttttcagaaaatctgccagcagtcacatcttttcattagatttgtgaatggccatcaaaggcctataaataggtgacttgggcacgaattttataaagagagttttgcttggcaaaaatgtcttatcctctcataagacaatgagagagattctaaaagaacttcattgtcaaatgctctctcacaagagatccttgaccaaacacttgcaaaatctataaggattcctacatgatctttattgtaatattcttctcttgaagaaagaattcttcttccattcttcttattcaatgagattggtcagagactgtgagtctc

SEQ ID NO: 215917 - DNA, 435 bp, Glycine max
  unsure (1)..(435): unsure at all n locations
agcttgagggatatatgactcaagaactctttatcatgctcggaagaagaagaaaaactggacctctatccctcaatgttgaactcgtgaaaatggtgaatgagggcttcactcgactttttctcaaagaatgaggaccccctatcttaatgccctatgtaattgngctaatctccctaggaatgcacccaaagtaaacctcatagagagtgaaataacactgtcgctcaacgcgtgaagcaattntgtgctaaaatggaaatgtttcgttccagcagtttccgaattcaaccaactagctaaataattatttacactaaaataaatataactaacatgagacttatactattatattatacatcaataaattgaacccccaacttataattaatttaccacggtatatctcaactgctactcttaaacgacaat

SEQ ID NO: 215918 - DNA, 319 bp, Glycine max
  unsure (1)..(319): unsure at all n locations
gaccttaaaactcagcttcanaatgtggtaatccaacccgtaagtaattttttctttctagatcagcttagaccagatgcgatctctatggaattatatgctagatgagatcagagctctatactatctagatcagataaagatacgataagacctactcttgtagaataaaatagactgtcctcttgcagtccaagcccaaatctggattcaagccacaagcttcattaattcctgaaatagattaacaacatcatattagctgaatgagcccaaataatataactgcctattaatgtgacgataaaactaatctgac

SEQ ID NO: 215919 - DNA, 442 bp, Glycine max
  unsure (1)..(442): unsure at all n locations
agcttcctctaccgtaaaaaaatattatcttttatcgtttgtaacaaaaattgcgcaatgtcggctgaaaaatatcagtcgtggctttacaacggccgatgtcgnctattgtaatttgtattcaatccctgaataatattcggatgatgtctattaaaaaatgttcgatccgcgtaatccggtgatgtttctttcttaaacctcgatcggtaatctttccttgccgacatcggctatcattttttccaatcagtatcggcgaaccctgcatgtgcttttgccgaggttggctaatgttttccttgcccagcaaatgaaaacatgtcggtgtcggccgaaacacaacttgtgttgagctcgaacgaataaacctactcgacccttttggtaaatttacggcaacaccgaacaaaaaccttcctctaccgtaaaaatattattg

SEQ ID NO: 215920 - DNA, 467 bp, Glycine max
  unsure (1)..(467): unsure at all n locations
ttcactcgcatgtccgattcaggcgcatagcgtatctagactctatatatctaacaaaggaggctctcgagaaattcaaatggtcataacttttcactcgcatgtccgattcaagcgcataacatatcgagacgcttgaaattgaacaactgattttctcgagaaattcaaatggtcataacttttaactcgcatgtccgattcaggcgcataacatatcgagacgctcgaaattgaacaacggatgttctcgagaaattcaaatggtcataactgttcactctcatgtgcgattcaggcgaataacttatcgagacgctcgaaattgaacaacggaagctctcgagatattcaaatagtcataacttttcactcggatgctcaattcacgcgcatagcgtatcgagacgctaganattgacaacggaatttctcagaaattcaatggtataactttcactccatgc

SEQ ID NO: 215921 - DNA, 447 bp, Glycine max
  unsure (1)..(447): unsure at all n locations
agcttccctcctttgtgagagttggctttttaaagatgtacttaaccgggtccatcttggatatcaaccaggtagtatggctcagcatgtactgccttaggcgatgggatgcccatactaaagcacaacacgttctttcgagcaaggagtaattcatctcacaggtggtgaacttcttacttaggtagtaaacagcgcgctctttcttcccggattcgtcgtgttgccccagcatacaccccattgactcgtccaagattgtcatgtataaaatgagaggccttctaggtactggtggcataagcacgggaggattcataaagcacttcttgattcttccaaaagcttcttggcaatcctcattccagctatcagtttgngttttgcgtaagagcttgaacaacggctcacaaatggcggtgagctgcgatatgaatctggcaatat

SEQ ID NO: 215922 - DNA, 479 bp, Glycine max
  unsure (1)..(479): unsure at all n locations
ngatgtacgttaagcctcgcatttcatgctaagcacatgttgcgggaagatttttggtgttgcagaaagcgctaagcgccaatgctgcgctaagccccaaatgcttactggaagttacaacttcaagttgggcttagcgcgaggataggctaagcgccagtgttttaaactcaaacgtcacgttggcacgctaagcgcgccatacgaatttcagttnttgaaaagtagaggcagaggcacttgggttgctaccttggcacccaaacctttgcactctctcatctctgagcatatttctgtttctactgtgtgcttaccagcccctctgcatcccttgcttcttcacactctgcattacacaantccaagaagtctcttgatttctttggctcttgatttcattcttcacaccttgggatagaggatttatgctttgatagttagcattgtgtaggtcaagttacttaatagggtaggta

SEQ ID NO: 215923 - DNA, 434 bp, Glycine max
  unsure (1)..(434): unsure at all n locations
agctntgaatgctgttaagaacaccatactataaatctttctaatcggtgtctttgggtatgatccttgcttgagtaccttccaaattaatcagacatagttttatctaggagtagttatgaacttaagacctcagatccatcacattaattttaggagtgagatctatgtttctttttttttttatggaatctagtaacatgactagaaaaactattatttttttactgtagaaaaaaagttatcagtatttcatagatgttcaattagtcacatttgtcgtttggcttctagcgtaagcagtggtattttttgcggcagcacttgaagagaaagaagttgcagatattgcaagtgagaaaatcaatagtgttttttggactaatcttctcttattataatatagntttaagttaggtagttgacacaatgat

SEQ ID NO: 215924 - DNA, 451 bp, Glycine max
tcttatacaaggcaattcttggtggagaagctccttcttctttggcttattccctagaggatggtgcctaccctctcctcttattctttgccttacgctgcatctccatggtgtgaaattaccattgaaagacctcattgaagctcaaagatccaccctccattgaagccctacaagcaagcttccatcaccagttgtgcgctgagcctatctgaagacaattgatgcgcttagcatactgatctcgtgcttaacgcgcggccttgatattgatgctctgccaaattcttctgtcgcgctaaacacgctgaagctgctcttagtggtggatgcgtgcttagcccactgatgagctatgctcaactgtcacttttagcacttcatcacttagcctcttttcacctgagattggcaaatttcatcttaaatccatggaaatattctaaagaca

SEQ ID NO: 215925 - DNA, 387 bp, Glycine max
  unsure (1)..(387): unsure at all n locations
ggatactcattttaattgtcagnctccatacgggnnttcaagaatctgagaatttgtggtgactgtcacaatgccattaaatacgtttctaacgttgttggtgcgacaatcattgttagagactccttgaggtttcatcacttcaaaaatggaaattgttcttgtcaagacttgtggtgattatttgaaccacatattgggattaagtggtgacaaaagtcctatccgagtctgtcttttcaaaatntcagtacacttataaatacaattgtaaagtacaattcatgtgtttgttgtgaaattggagacattatctatgacattatttgataagatatttttaaaaaatgcgtccacctgcggtttgatcagccaatgtaccaatgt

SEQ ID NO: 215926 - DNA, 408 bp, Glycine max
  unsure (1)..(408): unsure at all n locations
agcgtnaatctcatcgtctgtgacagtgtttagtatttttatccaatccaanacctgtgtccagactctcagtcacttatgatagccgtcgatgatcccattactgcttcccctaagctctctgtcctttcttcacacggcatcacatgccttgcgaactccttggagtacctttgcattggggtcactgaaaccttgtgtaatgaaaggcgagatgctttccgctaatggcgctcctctcatggtgtagtcaagctgtcttatggtgaggataggattataatttatacactcccttgttcctattaaaggaacatttggacatccttcgcatgaacatagaatcctgattcttccttccttctagcgagggaacaaattaacatacgcccctccatgctagccaag

SEQ ID NO: 215927 - DNA, 308 bp, Glycine max
ttcatgggataatttcttcatttccgttttgatgaaaatcccatggatcaatgcatataccacaaggtcagtaagagtaaaatatgttttcttggtttatatgtagatgatattttacttgcaaccaatgattggggtttgctacataaggtgaaaaaatttctctctaagaattttgacatgaaagatatgggtgatgcatcttatgtcatcggtattaatattcatagagatagatctcaaggtattttgggtctatcacaggaaacctatattaacacaaatgtaaagagattttggatgaaata

SEQ ID NO: 215928 - DNA, 284 bp, Glycine max
atcttgctagtgacatggcgttccatcttcaccataccaaaatcccttgtttgatatgaccagaaacattcttcatgacgagtcacatggaaagatgcttcagaagtcattatccatatacaatcatcagatgcaatatttaaataattttcattatcgataagaaaaatattatcatcggttgatgccacagccagagtgggtccaccttcattcttcttctttgggtcaatttgataacatgtacaagtccaccttctgatctctcttcagaatctgcactc

SEQ ID NO: 215929 - DNA, 285 bp, Glycine max
caattcaattaagaaagagaaatcccaaagtgaaacatccgattgattctttcgctttattttactaaaagaatatttttaattatattattattctatctctctttaggttccaacgtggttacggtacgacggaacggtcggatttcattctagcataaattaatggatattacaaatcaaacgatcggtggaaacttattctattttttgattaggagagaaaatgacttaagtaaatgactgaagcacgtcaaaaggggtaccaaaagtaaatgaaacgag

SEQ ID NO: 215930 - DNA, 445 bp, Glycine max
  unsure (1)..(445): unsure at all n locations
agcttggagggtgcagatgttgttattattcctgctggcgcgcccagaaagcctggaatgactcgtgatgatctntttaacatcaatgctggcattgttaagacactgtgtactgctattgctaagtactgccctcatgtgagtgtctgtttccttgagttgcctttcatttgttctgtgtttgtcagttgatgttgcttgctgctgtcactgttgttntgctctgactntgtatgtggaaagcatatactggcttgggccttacaggaaatgaaaattgcattttgattggttttggatgatcaatgcattttcttttatttagttactctgaacacacttttaacactggctgttatatatttgctcaaatcacactgattttaaaatttgattaccgcgtgatagtagtaaatgactgacatgagttctttttccatccact

SEQ ID NO: 215931 - DNA, 406 bp, Glycine max
  unsure (1)..(406): unsure at all n locations
agctntaaaccatatgggccatgtgatttgttggaatccatttgaaaaagagcattttgaacttatcagtagtaaaagaagaaaggagggagtttttatcagcatacgtcaagaggaacatgatttattactacatcaatttcaattggctcaccacaacacacattgtcaaaataggttttggcaatgttacaaagttcaatattttatgttacaacataccgntatcacgagttagagaaacaatgttattcatcttctttctcgcgaaggaaactttgacttgacgtccctaagagttcatgtaagaggaaaacctctcaagcttagagatcagattatcggttaaagcattctcccatccttctttgattatngatggaaaaaagggttctaagagccatgt

SEQ ID NO: 215932 - DNA, 359 bp, Glycine max
taaattccaacactaatgttaagcaaacccatggtcccataactcaatccacattgagtcaaaatttcaataaagtcaacaatggaaaaaatgaagtaaaacacacacaagtcactccattgccaataaatatgtgttggccacaataacaatatgatgagagcgatctttgagtttgaatgcagccataattccaacacaatcacgctttattctgacacgagggtcattgagatctccacgatcttctgaattcgatttagattctggttcacgaattcagttaatgaagaaatagcacactctaatctgtacacgcattcatgtaaccgcaatttctacatgttaaaacaatgaat

SEQ ID NO: 215933 - DNA, 481 bp, Glycine max
  unsure (1)..(481): unsure at all n locations
atccttnagtcacctgaggcatgcaagcttgccgctggagctgtcacattaactttcctanctcttttaaactggcgatccctaggctcttgaccttgacttgatacaacctctctttaagcaaaagtgtttgaattgatccatgttttactaaagtgaaacaaaatcgatgcgaatcaaaactccaacatctatcatgggtggaatggatgaatgcatgaagaaatgcatatgatatagaggcaatttatgaacacgggagcctgggaaattgtctcctccttagatataacttcttggggtagcaaagcgcccgacgtatgtatttaagaaggtgacacggaccctctcgtggtttgccatagagaggtgatcaagacagaacccgtgcgtgatgcatatgtgaaaggcataacacggggatgtacatagtacgacaatattcacaaaatataagccaaaggcgtacatgacacttatg

SEQ ID NO: 215934 - DNA, 448 bp, Glycine max
taagcaccgccgctgcagcttaaagcaccttgggagagtggtgtagatgattcatgcatcacccaccaagtttttggatctaatgcccatctattctcaattgaatcaaatgaaccaaagtcacccgcacaagatgagaatttagagaattctctataaacttttgtcctaacattaacatgtggaaaatatctcttaagacatttattcctttggctagaaagttcatcatctttatgaggaggaaccctatttggaacctcattaagccaattatcactatagtacctataaaaaaatatatgtatacattttagtcatactatgattgagaaagagctaagctaatccatacacattattgaacaattgatataaaaatattaccttggatttagagaatgagctaagcaatgaagtggatacaactcttactccacctacgaat

SEQ ID NO: 215935 - DNA, 359 bp, Glycine max
ccgtatcaaattatggaaatcatggtatgatattgtaagtggcatccttggccagagtgaatttgaatgggatgacactaagcacatgatcgcagttgagaatgaaaatgccttggaatgaatattgcactataagtattctttaatatgttactgtacggcttccggcaagtgcaccggatcgcacaagtagtataaaacgggtagaacccgagtattgaacactcgaggaacttgtgttatttggtaagctatttcagcaaataggtgtctggtgtgtgtaaatgtaagtgtgaatatgaacaggtatatatactatctatgcacaaagaataaacatcacgcaagagaaatgatgt

SEQ ID NO: 215936 - DNA, 350 bp, Glycine max
  unsure (1)..(350): unsure at all n locations
agctagacaggaagacatgttggtttttatgtngaanctgcgcggcctggcgcggagatgatggtacagngggtgaaccacaagcggaagtttcttttggtgaggtagccatggaaaagcagagcgtttggaatgatttcgtacatttcagaaggctattgggaaatgctggtaaaaacacgaatgccaagcagatataaatttgaatgaggaatgtanagggtcgtgtgaagcaacggtcgaattttccttggttcagtagtgaacgtgctattaatgttaagtgattcgtttgggcacgttcagattgctgtagttgctataattcctctagcacacanatgctcagc

SEQ ID NO: 215937 - DNA, 412 bp, Glycine max
  unsure (1)..(412): unsure at all n locations
agcttgcaacaaacataatgtctggtctttttgctgacaganacaacaaactaccaattatacttctataaacaaaatcatctgctttatcaataccatcgttcattgataacttttcattcacaacaattggagtggcaacaagcttgcattgctccatgcaaaacttcaatatcaccaaagcatatntcttttgtgaaatgaagatcccgtcattaaattgagaaatctccattctaagaaaatacttaatttcacccaagtcaatcatttcaaattctttttccatgtcctttatttcacctaagtcagtcanttttccacttcttcacgtacaaggtggcttcattntcacttcttctaaagccccttttcaaaagataactgtcaatcctgctataccaagctcttg

SEQ ID NO: 215938 - DNA, 448 bp, Glycine max
  unsure (1)..(448): unsure at all n locations
agcttcagactaaagcaacacataatctatgtatccaaaacccctcaatttaatggatgttcaaggtttgagaagtgaaattgagaatgaggtaaatttggagcaaactctcacctcacacaagtctataacatcaatttaaacttgttcaaactggatttacacctaaaattccaccgaaccaaaatttgactcctcaacacccaattttaccctagaaatggctctttgttcactttggtcatttgtttttctctctagcacagcccaaactctctcataagtcctaaatgacatttcaagctaggattaactcactttaacctccaaataccactaaatccagattttgtgctttcaactctcataacctcactctttttccactcataacaccatattctcactctctaaccctaggntaactctactcttcatctctaacaat

SEQ ID NO: 215939 - DNA, 425 bp, Glycine max
  unsure (1)..(425): unsure at all n locations
agcttatcatctgttctgagtgctcatgatatccttgagnttatttcacttgttgctctttaccaaaaaaaattatgaatacacttaagcaacctcatccataggcataaacttagaaggcttatcatttgtgttcataaggtttttcaaaattaaaatacacagggttttggacttaatagataccaaaccagacattataaccattgtgtttagggtttataagaggtagaatcccatcaccacacccatattttccacgaaccacttggacccacaatttataattctcagaacataatcccaacccaaccttacttaggaacacatcattcacatgtcttgccattctaagacctaacccaccaaaaggctaaggttggcagagatagtcccaagcaagaagaatcagatgcctattctga

SEQ ID NO: 215940 - DNA, 367 bp, Glycine max
  unsure (1)..(367): unsure at all n locations
agcttcttgagatgtgaacctggatctgtcatatctggcctgggtaggtgtagaaggtgccttccttttcttagatgccatctgtaaaatataagacaaaacacaagagattagcacagtttattttcacaaaaacataaaaataaaactgaaattttgactgggcacttagcacagcaggctgagcttagcatgcctcatggaaatttactcaggcgctaagcgcaacagactggcgcttagcctgaagatacagaaaatattnttttctacagaataggcttagcgcacagctgagcttagcctaagtctacaattttcaaaactgaagagagttggagcttagtgcagcatggcgcgcttagct

SEQ ID NO: 215941 - DNA, 236 bp, Glycine max
ccctcacacacttgattgactgggcacatacatgacccactcaagtgtgggtgcagggtcatctgcttaaatttgatgaagacactctgaataatttcttgaacacccagggattgtacaagagggggacaatctatgtgcttatttgagatttgcactcctaccgcctgatccttaggagttagctgctaagctctacatcccagggaggggattcgagcttaatgaacatggcc

SEQ ID NO: 215942 - DNA, 318 bp, Glycine max
agcttgtaggattatggtgtacccatcacatgtggcactacgtggcggacaggcgatggtgcacaacaagttttccacatgcacaatgcgcacataaacccaccatacactgttggccacctccaactgagctcacgtactggcacgtagcccatatactctgttctattaacaccgggatcccataaattcttccaagcttttccaacatacaagcgtaacaacattcaaacagcgcagattatcacagcccatcaatacatggcacaggcagaaaactcttgccagaacaccaaccagaatcacagcttttcttac

SEQ ID NO: 215943 - DNA, 402 bp, Glycine max
  unsure (1)..(402): unsure at all n locations
aaacgtttggggtgcagaaagcactangcgcagcttgccgcactaagccccagatgcttacgggactttacaacttcatgttgggtttagcacgaggctatgctaagcgcttgggttttaaactcaaacgtcacgttggcacgctaagcgcagctgtgcgctaagtgcgccatacgaatttcagttttttaaaaatcaaaggcagaggcactntatgtgttacccttgcacccaaacctctgcactttcctaaccttgagcatttgtgtactttctactgcgtgtgtactgcttgcctgcatcttcattgcttcacttcaagaacaatccacgtaagttagcacatttctattttttatttntcattcttcaaaccttangatagatgacttcttgtttctt

SEQ ID NO: 215944 - DNA, 404 bp, Glycine max
  unsure (1)..(404): unsure at all n locations
agcttctggaggaagcctcttaatgaagcttctanataaaactacatgaagcttcctcggtaaaaatgctgtcctgccttcgttaactgttggatcttctccaaattttgtttgtaacttcacaagacacttttccatgatctaaccgttgggatctttgagaagatgtctggagtgtgctagaagcttccgttcccgagagcatctcttatttaagcatttctgcctttgctttcgtgtagcttaagaaaaacgtcatttcttcttctttctttcttccaaagtcatttctaaagttccaagaactttctccatcatccacagccaccattagccaccacanaccatcattgttctccattgaaaacccacaccgagaggaatccttcaaccgaagccgaatc

SEQ ID NO: 215945 - DNA, 453 bp, Glycine max
  unsure (1)..(453): unsure at all n locations
agcttcctagcggnttctaattatataggccattaaatctatcatatgtngacaatagccgagaagtccgtggatctcctcgggggtggagtaggtgtccgccattgctttggccttggctagcaatcggggaagttcttgactcccgttcaaggtaagagcaaatcagtccatccacattgttgcctcttggtgtaacgagtcaatcacccttcctctagcctccttttccgcgtacacttgggcatactcgtccgccactctatgctcgtgggtcgtggctagacttagttcctcttggtacttgctgatgatggctaacatgttggtctctatctcgcataaacgctgagacaaacttctcttgaacctcgagcaagccttcaactcatccttcaagatcaaactgtctactcgcgattggtccctttccttcctccggagtttaagctc

SEQ ID NO: 215946 - DNA, 412 bp, Glycine max
  unsure (1)..(412): unsure at all n locations
aactaccaaactacaatggtggaaatcagtacgttagcgctggcattggccgtggtggcggtggcggttggaatattaatcgtggcggttgcaatggtggctgtggcagaggtcgatctgctcatttccagtgtcaaatctgtcataaatatggtcatgaggcttcttattgtcatcatacgcacaatgatgactatgttcctactcagcctatggattatcccagccagtatcctgatcaaaatcagtctcagatctctactaaccccaatcagaaccagtaccaaagtcagagtcagaaccttaatttctatcanacacagcagtctaatcagtctcagttcaatcaatactcagcattctcctcaagcctatctgatgagtgttccttagcctcttctctcagttgata

SEQ ID NO: 215947 - DNA, 423 bp, Glycine max
  unsure (1)..(423): unsure at all n locations
agctngaaggtaactagatgccttggttaacctggtaacccaactggccatgaatcaaaaatatgcacgtgtcgctagactctgtggtttaggctcctctgccgaccaccacacagacctttgcccttctgtgcaacaatctgaagcaattgaacagcctgaagcttatgttgcaaacatctacaacagacctcctcaacctcaacagcaaaatcagccacaacaaaataattatgacctctccagcaacaggtacaatcccggatggaggaatcatcccattcttagatggtcgaatccttcacaacaacaacaacaacaacaacagacttattttcaaaattctactggcccaagcagaccatacgttccttcaccaatccagcaacaacaacaatagcaacagccccagaaacagcaaac

SEQ ID NO: 215948 - DNA, 440 bp, Glycine max
  unsure (1)..(440): unsure at all n locations
agcttcatgatgatgaaccaagctantttgatgatgctcaaaagcccaagtgcttgattcaatattgattcaagacttcaagatcaagcatcaagaatccaatccaagattcaagagaagaaatcaagaagcaacaagtcaagacttcatataggataaatattaaaagaatttttcaaaaaccaaatagcacagttttgttttacaaaagaattttctcanattttctaggttaccagagtgattactctctggtaatcgattaccaattggcattaatcgattaccagtgaccagtttggttntcaaaatgttttcaaatgatttataattctccaaaatgaatttcaaatagtgtaatcgattactatattagtaatcgattacaagtgaatctgaacgttggaatcaaatccattgtgaagagtcacaactttcat

SEQ ID NO: 215949 - DNA, 442 bp, Glycine max
  unsure (1)..(442): unsure at all n locations
agctggtaggattatggcgtacccatcatatgtggtactaggtggcgatcaggcgatggtgcaagtcgactttccacatccacaaatcacacataaatccaccatccccagttgcccaccttcaattgagctcacgtactcccatgtagcccttatcctcgttcctctcaacaccgggtccccatcaatccctccaagcttccacaacatccaaacatcatgaactatcaaaaccaagcaaaaacagggcagaggtagaaatctctgcccaaaacataaaccaataccacagtttttcttactcaaataccccaagaacattcgcttcgttccaattcgttcaccgttggatcgactcgaanattttactggagggccctagtacataagtctacattttgaccgctgcgatctgctaggaaacgtctagaacccaatatat

SEQ ID NO: 215950 - DNA, 377 bp, Glycine max
  unsure (1)..(377): unsure at all n locations
agctntgacgatgaatgagatgttcatatttttgaagagggcactgcaaacatcgagaagggagggtgaaaaaaatcgtacgagagctagacaacatggagttcagtggggccatcttggtattttgtttcctctatctgcattagttgcttatgctaattgttgcttctttatgttttctttggtcttgtaaggccaacttctccaaggtgttgaccgcgcagaacaagggtntctccttgattctttcttgttattctattcttgacttgaatttgctcgtttcgtcagattgttaactgctaatttgtgtatttgaatcgatgatgatctgatagatatgttgggtgaaatcttgaatgtgacaccaatgtttc

SEQ ID NO: 215951 - DNA, 432 bp, Glycine max
  unsure (1)..(432): unsure at all n locations
agcttccataatatcccagcaattcaatttcaactatcatgaactaccctaaaccaagagaacagggcagaggcagaaaactctgcccaaaacacattcacatattatagctntccttactcaaataccccagtaacattctcttcgttctgattcgttaaccgttggatcgacttgaaacttttactagaggttcctagtacataattctacattntgaccgttgggatctcttagaaattgtccagaacccaataagtactacctttcccataaccagcaatgcacaagcattntctgcacatgttgaaaaattctactgcacaattcaacaacaattttctgcataatagggcagaattcgaaatccatcttgcccacatncaatcttgctcanattggatcctatatgtcctacatcatgtataaatc

SEQ ID NO: 215952 - DNA, 355 bp, Glycine max
  unsure (1)..(355): unsure at all n locations
cacagcaagtatcgatcgataagaactggatgatagacttcattcctttgattattagctgatagaaaaaatgttaaagctatttgcaaagtacacctctattggtgtgctgaacacccttatacactgggtggtttttggtgtttgtatctatgtcgcgcatacaaaccaagctcttgcaaacttcgcaggtttcgttgtggctgtgagctttagcttcttcgcgaatgcaaaattcacattcaaggcatcgactacaacgatgcgctacatgctatatgttgggttcatggngacactgagtgctactgttggatgggctgctgatagatgcgcacttcccccgatgataact

SEQ ID NO: 215953 - DNA, 390 bp, Glycine max
  unsure (1)..(390): unsure at all n locations
aaaaccactgaatntctatgcttccaaatattcatggatagagctatccaaagcacttcccatctcttgtctatatagctcttgctgttccaatgagagaattgtatgaaatgatttttagggccaatggggaaagggcccactctattaacccagctcaaaacctcccaccaaagactcctagttcttgtgcaagagaacatgacgtggccaacactttcctcctcaacatcacataaagggcatctataagaaggtagatccacctgcctccttctcagatntgtcttagtaggcaatctatttttgaaaattctccaagagaaggcacttgctcttggaggaattttcagattccaaataatcctggaagcactgtcttcattatca

SEQ ID NO: 215954 - DNA, 454 bp, Glycine max
  unsure (1)..(454): unsure at all n locations
agcttgatagactcatctaatggctctggttcaatgatgcatancagntcatcaggttctcagagctttaagaaccaggatcagtccaaagtcaaatcaaccattgttgatagtaggtcgaaactaattgtcaaagctacctatagagaagacaccattcgtttcaagtttgatccatgtgcaggttgtttcagtctatatgaagaagttgcggcaagattcaaactacaaaatgggttattccagctcaaatatctagatgatgaagaggaatgggtgatgttggtgaataatgctgatttgcaagagtgtatagaaatattggatgatattggcacacgtagcgtcaggtttcttgttcgtgatatgccttccgtnttaggcagctctggcagtagcaatagctacttgcgaggcagctcatagcatatgggatgtggtggacaacatcatt

SEQ ID NO: 215955 - DNA, 116 bp, Glycine max
  unsure (1)..(116): unsure at all n locations
agcttcanaaggagccataccaatactgtcttggttactattggttgaagtaaactcaatcaacgacaaacaatccatccagctaccttgttgctctataatacacgccctaagta

SEQ ID NO: 215956 - DNA, 405 bp, Glycine max
  unsure (1)..(405): unsure at all n locations
tttccacgaagcactactacatcaaagttgtatgacatcacttatggaatgcatactacatcaattttagaactcatgttgttcaacacaatgttaaatatatgcatatatttaacatcgatatgattttcaatcaatggagaaccctaataacatttaacattggttccccttgattttgatgtacgaagtgacacgccctgcatgagtcaagtcacatcttacatcatttattgacataaccgatgttgaaagtttcgcttactacattgattntagcaaaaaccaatgcaaaatgtanttgttttaataaaaaaagtagcattttgatatgtattcattgctccatggtntatattngngatatgcatcttatatattaatacanctatacctatatgctat

SEQ ID NO: 215957 - DNA, 375 bp, Glycine max
  unsure (1)..(375): unsure at all n locations
aagacaccacaagagtagctctcgctgctctcttactaaataagggatatatttctatttatttntgctttgtagatactttcaatctttgagtttaagtgctctgtttgaactaaggcaaaacataatagggatagtcttatcttttttattatctccttcagaattcctgagaaaacaatttagtgcaatttaggagaggggaaggtaaatcaacattgtataaattttcttgttctgcagattgaaaaatagttaagagtttatttagtcatacatgacatgatgaagtaggatatagtataaaatttaataatatttagacaatggttctatcgccatgtataaaatactatactatgcattatataatat

SEQ ID NO: 215958 - DNA, 440 bp, Glycine max
  unsure (1)..(440): unsure at all n locations
agcttgtccttctccatacatatatttcaattctctcacgagacaatagtaatcgtagtttaataattacttgattagctntccagaagcttatatcttttttcttgaaatggtacaactgatcactattaataattgactgcgccatttgttcttatatgcaatgcaacagcgaaatgcaaaaatcaaaagtctcacacggtacccacatgtccttccaatctaaaaaattcaaagaattgaagatattgaaatctattatattattttagtatttatactagctntattggtcaataattntcattaaggtgtctaatatctgaaagttttgtacgcaaattgcggcatccatataccgactatatatatgtcaaggatgaaaaaagggtatntgatgagcaaaagtagaaaggcacatgaaagcactccaatgcaca

SEQ ID NO: 215959 - DNA, 436 bp, Glycine max
agcttgttaatggaaaaggtcttacattctatgcatgcaagctttcaactcaatacaatttcatccaactacaggatctcaatatgtaatagacatctctatagattaaaataattttaaatgtttaatgtgtatccaattaattatatggatgtgtatctcaatatgtggtaaacattagaatgaattttaatataatacataagttatttttatttgtcaaacctatctgtcatataatgaaaaagacaaaaaaaaatgtacaataacaaattaaattctatttattttctataaattttctatatcttttctatatatagaatatagaattcctatatatagaatatagaattcttttattctttaaccttttttagttaataagggtaaagaataaaagaaaaaaaaatagaagcgtccattgctaatggat

SEQ ID NO: 215960 - DNA, 326 bp, Glycine max
  unsure (1)..(326): unsure at all n locations
cacgcgaagtgcgtttccctaaagggaaagaaaatttctgcgctgttctcaaacggtacaagcaaaggttatctaacaagcccattggcactaatggaggaacaggttcacgtaagatccccacattagcaccatacaaccaatagcattttgcgttaacaaaatcagcgttaattgggctgttttgtaatttattttcattagcagcttcatactgncaaagaatgttgtctccgcgtatcatattccattccctgctgacattgtaccaaattntatccacgtaaggcaacatgcaataatgtatacttttttgttagttcttg

SEQ ID NO: 215961 - DNA, 420 bp, Glycine max
  unsure (1)..(420): unsure at all n locations
agctntataagcgcgggtctgggatacatatgtcaagtggtcgcgatatacgaagatgatgttccgagtacattggatttggtacgaccatgccctcctgatttccagctgggaaattggcgagtggaggaacgccccggcatttacacaacgagcataatgtaaacctttacgggtttaaaagctctatagttgggcctaggctttagagttttaccttttgttaaggctttgtgtcttttgtttttgaatctataatacaaggatctttcttcatctattcctacgtctctacccattctcattcatttgcatgtttacttctttttctgaaacggcagatccgataacaagtcccccgaaggtactaatacctgggacccgcctatcgacttcgagcaagaaatgaatcaaacggaa

SEQ ID NO: 215962 - DNA, 363 bp, Glycine max
  unsure (1)..(363): unsure at all n locations
aactttgataagcttttacatgaaacttattgaaataagttgaaaagaacttataggaaggtcttaagcccctttcataagttcaaattcaaatttatgccttgctagacattctcttaanaaataatataactataacaattctagaaagttttcaatcacctaacctcaaacatgagattgtactttccatcacggtttctcattctcaaatatgattgacaagcttcggggtcttcctcagggggtagaagaaatatgtcatatgtctcctctttagtttcagcatgctctgcagcaataactgcctctatttgatcaactgtcacagttcttgctgactaaaatggtagaaacaatcaa

SEQ ID NO: 215963 - DNA, 411 bp, Glycine max
  unsure (1)..(411): unsure at all n locations
atacccattctggtttagggtttttatgaggatgcttgtgatgttcatgtactgaaattgcttatggaaaactgttagagatgaatggtagaattaacctacggttagaaagtgaaaatgtggtgttatgagtggaaaaagagtgaatttttgagggctggaaggccaactctggaattggtagtatttagaggttagagtgagttaatcttagcttgaaatgccatttangacttatgagaaaggttaggctgtgctagagagaaaaaaacaaatgaccaaagtgaaccaagagccatttctagggcaaacttgagtgttgaggagtcaaattttgattcagtggaatttatgtgtaaattcagttgagcaagtttagattgatggtatggacttgtgtgaggtgagagt

SEQ ID NO: 215964 - DNA, 371 bp, Glycine max
ttattctaaccaaaatatgtaggcttttatttctctttctattgcaaattatggggatgcaatctttgttctgtagtgccataagcccacttgtatgttcttcagaacaagttggatttctacttttttcaaaattttcgtagagaaagtctactatttcttccatttggtttaatctgattttcaaagcggaaatccgattgttcataattttgtttccagaatcattttccttcttatgattaggaaattctgttctcaaaatcatttgtatgcaagttttgcaaaagttacctgtacatatatagatgatgtactcgtcttctcaaaaacaaagaagaacttatctacatctaaacaagtcttcttta

SEQ ID NO: 215965 - DNA, 320 bp, Glycine max
  unsure (1)..(320): unsure at all n locations
cccccccagacaacataagggaagtaagggtcgtaacaaacaaaccgcagacgaaaatggaaactgacaattgggacaggccatgcacacaactatacactacagagttatattattgatgccataaattatataagatctttcatataaaaaanaagnatctttccttcacatcaataaactgatncgacagctcggctaactgtgtgtgggggggtaaaaagatacaccactgtgtgcacaaaattcacatacaaatacagtgtcgagctctttaaaacataacaggaggacaaattaaaaaataatgagcaaaattt

SEQ ID NO: 215966 - DNA, 467 bp, Glycine max
  unsure (1)..(467): unsure at all n locations
agctnttggtacanagaagaagttcagagagattcaaggcttgtaaaggattgtaatgaattgattgaattgttagaaagattttttaaaatgcaaaacaaagccttgcttttatagactcttcatgtctagtcaagaggaccatttagaagagttataacttttagaaaaacttaaaaccaatttgaaaaagtcaaaaaccatttgaagagttacatcttttgatttaattcagaaacaatcactggtaatcgattaccaaattagtgtaatcgattacacaaagctttttatgtgaaaggatgtgactcttcacttttgaatttgaatttcaacgttcaaaggcactggtaattgattaccaaaacattgtaatcgattacagttttttgaaattaattggaacgttgtaaattcaatttgaaaactttttcaaaacacatttgctactgggtaatcgatacaac

SEQ ID NO: 215967 - DNA, 413 bp, Glycine max
  unsure (1)..(413): unsure at all n locations
gcttgagatgaggaagtgtttattggttatacttcctgctnttattggtgaccacagagtggtacctggagatatgtcgcgggggtcaggagaccttggggacgtcaggtggggtgctattgcccaaaaccaagcttgaccaatcccgacccaacccgggcatagtcggtcagtgaaaacctgtgatgtacctaaacaggcgagctcctggcagtcaacagataaaaggaacaaagaccacaaagcaaggaggcttgtggtggctggccagctgtgaaactcgattgatatgtgagatatggtctctggtaatcgattaccaagggtgggtaatcgattacaacgcttaaaaatgaagacagggggctaagatggtctctgggtaatcgataccaaggggtgtaatcgattac

SEQ ID NO: 215968 - DNA, 376 bp, Glycine max
ggctacttcatgcactcctctaatgacaatagcattattcttggcttcagcacgggtcatgtctccaagggttccaccactggcagcatctatcatacttctctccatgttattgagtccttcataaaaatattggaggagaagttgctctgaaatctggtggtgagggcaactggcacatagtttcttaaatctcttccagtattcatataagctctctccattgagttgtctaatgcctgaaatatcctttctgatggtcatggtcctggaagcagggaaactcttttctaagaatactctcttgaggcatcccaactcgtgatggaccgtggagcaaggtaataaagccagtcctttgccacttcctctaaag

SEQ ID NO: 215969 - DNA, 272 bp, Glycine max
  unsure (1)..(272): unsure at all n locations
gggggggaatanattgtcaccccgccgggggggatagagaaaaaaccccccccccgccngaagaaaaaaaggaagagaaggaaaggggagagaagaagggggaaaagaagaagaagaaggggaagggagggagaaacggaagaaaaaaaaaaggaagggggggaagaggggaagaaaaaagggagtgaagggaggagaggaaggagaaaaggagaagaaaagaaggaagggggaaaaaggaaaagaaaaaagaggaaaggggagaaggaaag

SEQ ID NO: 215970 - DNA, 154 bp, Glycine max
  unsure (1)..(154): unsure at all n locations
cagcgggagcggacatcgaggaagaggaaccaacagatttgaggccaaatactcttcaaggggaagggaaagatgcaaccctccctacgaagggactagacactagaaccaagagcaaaaggggncaagaggagagggctagagctgccgaaga

SEQ ID NO: 215971 - DNA, 442 bp, Glycine max
  unsure (1)..(442): unsure at all n locations
agcttattatgtatggttgttactgnggttatcagnancanggtgatgttaatgttcttgacatggatacgatgagttggtcaagggtatggnttttttttctcttgctgcttctatagtttgtttgtctgtatgcaactgaaacaccaaggatcatgttttcaagttttcgcctgcatgggacttaaacaatcaatggctttccttgcaatttgatgacagttgagaattcaaggttcttccccaggagtcagggcatgccatgcggctgtgaatattggaaccaaggcaagttcttttcagatgcaacattntttttctttttctgttatgacgatcttcaatttctttgcaacttggttnttacttaatatatggtactatttgaaacttaacctcgaatgcnnagtctggacgttctaatttctacggttaagaattg

SEQ ID NO: 215972 - DNA, 268 bp, Glycine max
cccacgacccccggtgaagcattcaaacaatcatgagaacaaacaagtcatggtcgaactcaatttgaatcctatggaaaaccacaactaccttttataatcgaaatatgccaatgaccacataaacaagagaaaaagatcataattcattcaacattgctgacaacactaacatttcccgaatttttaatgctcaaaaaaaattatagaatacaattcacctcactaaaacaaagcataatgtacacagagtacaactacaaaacag

SEQ ID NO: 215973 - DNA, 351 bp, Glycine max
  unsure (1)..(351): unsure at all n locations
accccagnncaangggctgcagagattccttgatttcttgaatctctgagtcatagttcaacctgaatagcatggcattcaagcgcttgaaagccgagggaacagctntaaggatgctataaaagaatgattcaactgctgcaagtcttgctgggtctcctttgtattgaaggataagagattgctcttcttctgttggggaaactctagcaagcttttcaagggtatctgcattgaggcccttaccatcaatgagtgtatcaagaatttcgccttgtgagactgcaagagaattcaaaacaatagcaatgttctgtgattttctatggtcaagaagaaatgtttttgctg

SEQ ID NO: 215974 - DNA, 449 bp, Glycine max
  unsure (1)..(449): unsure at all n locations
agcttgcctgtccgatgcagcagtaatgatggcccgagttatgttggggaacggttacgaacccggaatgggtttatgcaaagacaacggcggcataactagcttgataaatgccaaaggaaatcgtgggaagtatggtttaggctataaacccactcaggcagatataaagagaagcatcgcgggaagaaagagtggtggtcaaagctcgcagttgagacaagaaagtgaaggaagtccgccctgccacataagtagaagctttataagcgcgggtctgggagacgaaggtcaagtggtcgcgatatacgaagatgatgttccgagtacattggatttagtacgaccatgccctcctgatttccagctaggaaattggctagtggaggaacgccctggcatttacgcaacgagcataatgtannaccttacgggtttaaaagctctat

SEQ ID NO: 215975 - DNA, 386 bp, Glycine max
  unsure (1)..(386): unsure at all n locations
agcttcaaccaaggggagatggaccatttttgtgctttaaagaatcaatgacaatgcttacaaagttgagctgcccggtgagtataatgttagttccaccttcaatgtctctgatttatctctttttgatgcagaaggagaatccgatttgaggacaaatccttctcaagagggagagaatgatgaggacatgaccaatagcaagggcaaggatccacttgaaggacttggaggacctatgagaagggctagagcaaggaaatccaaggaagctcttcaacaagtgctgtccatactgtttgaatacaagcccaagtttcaaggagaaaagtccaagggtgtgagtngtatcatggcccacatggaggaggactatatgacaccac

SEQ ID NO: 215976 - DNA, 416 bp, Glycine max
  unsure (1)..(416): unsure at all n locations
agctntgagccaaaatgctaactcaccatataccttgtacccaggggagaatgtcaatccttaccctcggaagcaaaaaagaagagaaggaaaatttccgatcaaagaaaaaaaagagaaggaaaatttccaatcaaagagaaagcacaaaaaaagagagaaggaaaatttccaatcaaaggaaaaaatagaggaaaggaaattcccaatcaaagagtgggagaaagcgaaaagaaaagaaagaaaattcccaaccaaagagtgggagaaagtaaaaggaaggaaagaaagctcctgatcaaggatcgaaagaaatcagaagaaatgtgcagaaaggtctttggaccggacaatatatgtacaatacagaattgtcaccaaatgaacaanaaaaagggaaaggaaaccacgatctg

SEQ ID NO: 215977 - DNA, 387 bp, Glycine max
  unsure (1)..(387): unsure at all n locations
tccaagngggtctgaaaagaggcaaatttaatcaacttgcttggacaaatgaaaaaactggggccaatgaagagggtgaggatgaaggagaaacccatgttgtgactgccattactatacggccaagtttcccaccaacccaacaatgtcattgctcaacctttctccttacctaccacccagttatccacaaaggccatccctaaatcaaccacaaaacccacctaccacacaatcaatgctaaacaccaccattagcacgaaccaaaacaccaaccaaggaaggaatcttgcagcaaaaagcctatagaattcaccctaattctggtgtcctatgctgactcgctcccatantcactcgataattgcaatggtgccataacccct

SEQ ID NO: 215978 - DNA, 373 bp, Glycine max
  unsure (1)..(373): unsure at all n locations
tatatttaatacgaagggaagtccaattgaagtagcaaaaggggtggcccagaaaattaaattaaaagggctttttcaagaaaattactctattgtaatcgattaccagaggatgtaatcgattaccagtggccaaaactgaattataacagctattaaaatttgaattcaaaatttgcaccgtgtaatcgattacacatatatggtaatcgattagcagcagtttctaaacgttttaattcaaattttaaagctcgtaattgattacacacatactgtaatcgattaccagaggaagttttcagaaaacattctccacagtcacatctttntaatttgttcttaaatggccatcacaggcctatatatatgt

SEQ ID NO: 215979 - DNA, 452 bp, Glycine max
  unsure (1)..(452): unsure at all n locations
agcttaaatcatcttatgcacatcacttttgaagaagctatatgatagaatttctacgaaaattaagtgtataagttgattataggagaatctcaattcattttactttcatattttcttctcttacaagtgcttattgaaaagtttatccaaacaaaacctaattcaataagcacttaattaagctaattaccaaaatgcatccttaacattttacaagtagtttctgtgttcccagcagctcaatccacaaaccaggcctatacctggacgtggacccacatgccacacaatccctcaaacaaagaaacacattacacacattcaattaaaaataataattaaaaaataaagagccaacgcagcaacgcttaatcataggagacctctngtctactctattctgaatatatagctatctatccgtactaccagcttcaaacacaacacgt

SEQ ID NO: 215980 - DNA, 419 bp, Glycine max
agctcggaagatataaagtatctgtgaattttatatacctctcaagaacaccacgctgtgcaagttcctgttgaatcattctggtgccaagccaatgataggatattgaaggacatttgacagcagaagattgttccattagtagcctagctctccattcctacgcattgagcaacatatataccaaaaccataagaactcaatcgactcatagtcaagctagaaggctcaatcatattacatgagaatataggcgtagcacgaaacaatattacggtagtaaattatccatagaatagaaataacgaggtagataagagaataagtaaattggactgttattttagacaaaaaaaaaaactaatacataaaaatgtaaacgatagagtcttacatagtgatttcatgagaatcatata

SEQ ID NO: 215981 - DNA, 401 bp, Glycine max
agcttattgaaattaaataagctaataatttcttatgaatataccaaaaaatattttcattagctcctccaaccacttacaagtgtttatatcataaaataagttgtaaatagactctactagagagacttttggtatcattctatatataaaggcttattctatcatgcagagctagatataagttctttgaattatatagataaacattaccatacactttgctaatactatgggtgtagaaaatcgaattaaaccattctaaattgataaaaaatttaaaaatagattaatttagctaacaactcacattttattgagttgtgatttgattactagttttttttataaaaaaaataaaccaaatcacagtgagtcgcacattgtatatactttatgtg

SEQ ID NO: 215982 - DNA, 414 bp, Glycine max
  unsure (1)..(414): unsure at all n locations
agcttggttggcagntgagaaatgaatgttcttgtctttggtgcccagtcatgaaaggtaagtatatcaggaatgtctctatggannnttctttgattgaaaaaaattatgattctgccctttggaaggctttggctaatctttggccagatttggaggaaggtgaattctangttattggttgaggggagactgtgaatgtttggaggactaaatgggtggatagagacatagaattgatgaacatggttccgcatgttcctgatcaattnnnanntgaaaatcaatcagttgcttaaagaggatggtaggtgggattctgattttattagaactgctatgcctgaagttattgcttgggaggatatttgctattatgccctcctgatctcaagctgattctgatacacgggt

SEQ ID NO: 215983 - DNA, 332 bp, Glycine max
ggtcttcaccgacgaatagatcttagtgggtatgggaaaaggccaatctgatcatcctgcattgatgaataccaaaattggggcaaatgaaaaggatgagaatgacggagaaacctttgctatgactgccattcctacacagtcaaatttcctgtcagcccaacaatgtcattactcagccaataacagttcctctcacccaataatccacaaaggccatccccaatcatccacaaagcctgcccgctgcacatacagtgccaaaacaccaaccaaaaaggaattgtgtagcataaagcctgtaggattcaccccaaattctagtgtcatat

SEQ ID NO: 215984 - DNA, 393 bp, Glycine max
accttcaatggcgacacccttctgaaaagcacatgctccccctacatgctatgctgctacgttcagcctgtgaccctacatgcgtgccatgtaagccctatctcgctagcaccaatggcaagacgcgttcttcactttgtttgccagtcccaacagtgaaacatgctccatataagctcgtcggacctactgctatatcgccagtcaaagaggcgaagtccaaccaagttggttttgccaacagctctatcggaacccaccacgtgtcactacaagccgtgtatcgcagcatgaatgggatatacgttaaaaaagggacccctcacaaattgttccgaacagacccaaatggaaattagttgtaaactaacccctgggtcatttgctgacatc

SEQ ID NO: 215985 - DNA, 343 bp, Glycine max
  unsure (1)..(343): unsure at all n locations
agctgnatcttttatgatgaagcagccatgaagtatttttcactangngaggctagctgcataaatcaaaagacaccattggtttctatcttcaactaaaccctttgccagtccatttagataaaatataaacataaaaaaaatccaggttttcatgcctactctaatcatgatgatgaggttttgggtaatgaaacacaaataactgttaaattttttgagagaactaaataagaaaaatcctaacaataaggggaaaaaagtaattaagaaaatcaagagatgtacacattacagatgtacaagaaagaatgataatgagacccctatatcaacccaaaaa

SEQ ID NO: 215986 - DNA, 313 bp, Glycine max
  unsure (1)..(313): unsure at all n locations
tcttagaaacatatgatatatgccagcctgaaaaagaattagaaaaggagggaaaacaaatgaacctgtaatttcgaggtcatattccaanaggagtccactggatgcagtaacgatgccaaggatgaatactgagagcgttatcttgccaacgaagccaattccaatcggtgatgcatccacaagaaccaccccaccggccattttgaanatgaacttctcagctgtgttgtggatatttctgatagctgctcagcttctaactctgctatatgngnattatttctctctgtgcaataccactctttatata

SEQ ID NO: 215987 - DNA, 295 bp, Glycine max
  unsure (1)..(295): unsure at all n locations
agctctgccaagagctcttccttttgnttgaccaaggcttcttcagatctttcaatgttttccattggtccttgtattgacataatattctctttggcttttggaaatccttcttgagcttgaatgagtttagtcccatcatgctctgttgaagattcaattttagtaatgttagtagcatgttggtcaaagttggtggccctcacaagcattgttgaagacattggggaataattccatttcctcacacagctcatcgactactagatcgtgaaatttaaacaccttatctatt

SEQ ID NO: 215988 - DNA, 452 bp, Glycine max
  unsure (1)..(452): unsure at all n locations
agcttgccgctggagctgacccattaactgccccaactcctttagactggtggtccctacgctcttgaccttgacttgatagaacctccttttaagtgaaggcatttgacttgatcccatgttntactaaagtgaacaaaaatcggtctgaatcaaaagtccgacatctatcatgggtggaatggatgaatgcatgaagaaatgcatatgacacagatgcaatttatgaatacgggagcccaggaaattgtctccttcttagatacaacgtcttgnggtagcaaagtgctcgacgtatatatttaagaaggtggcacggaccctccgttggttntccaaagagaggggatcaaaacagaatccgtgcgtgatgcacatgcgataggcgcaacacgggagtgtacagtatgacaatattcacaaaatataagcanaagggtatatgacactta

SEQ ID NO: 215989 - DNA, 342 bp, Glycine max
  unsure (1)..(342): unsure at all n locations
agcttcgtgtgtgcatttgttgaactgtgtaaaatgtaaataactgttgtctattntgcattctttacactgcattctaagcacccacgggattgagtaaaaaaggggccctatactcgggttcatgggaatttaaggagtggaggtgaatctatcatcatgctaggtctccgacttgcttgataatagtgaaacctcgtctagagctttctctctttataatgtgttgtcgttggtattccataccgccacaatattattatcttgagcgatgatacctctagaaaacagccgtgtgagttatgaattngtggggaatagttattagagacccctagatat

SEQ ID NO: 215990 - DNA, 408 bp, Glycine max
  unsure (1)..(408): unsure at all n locations
tgcagcttgcctacttcttaagatgtgagttgagcaccctaacttttatagnctatatccttcaaaactaggaaataatattggttgacagtccaatccaaaggctcctcccgcccttcattctctaagaaaagttgctggtaaaagttgttaacatgccttttgatgtcgtcttcattntccatatatccaactaccttgactatcccaattcaaataaatatgggtcctgatccttctattgattgctttgagatgacagtacctagtatttctatcaccatccaccaaccacttagttctagaatttttaaaccaatttcacacannacaacattcaaatcacatgtaatgattgctctaatctcaacagaaaagtattaccctaccctttataaatctttcact

SEQ ID NO: 215991 - DNA, 439 bp, Glycine max
  unsure (1)..(439): unsure at all n locations
agcttagttacacacacctctctaatagttaagctcacccccatgccaaaagacatgaaaatacaaaaaagtccctactacaaatactactcctaatgccctgaaatacaagggtaaaaccctatactactagaatggccaaaatacaaggctaaaaaaaaggaaaacctattctaatatttacaaagaagagtggatccaacctaggcccatgggctcagaaatctaccctaagattcatcagaaccctagggccttctttagccactctagctcaatgctcttggagtcttctatccaatgtggaagcaatgccttccaaggttattttgatgatgccaaagaatcaagagttaagcaaagtttcaagtaatgattcaagaatcaagttcaagntctagaatcaagaatcaagaatcaagattcaagaatcaagttc

SEQ ID NO: 215992 - DNA, 400 bp, Glycine max
atacacagatctttgccattggtcaacattcagtaactggtttttcatttactattggatcgactatccccaacgtttgaatcattgaatgtgggttggagggaaacaaaaatctacgggttggtttccccaatttacgcaccatttaataatcgttagcgtgttaataactgctgtccaaagttaatgctgtccaaagtttcttttgctcaactaaaaacgtaatacgtaaaagtgcataaacacacattataagtccatactataatattaaaactaatcatgttaaaaaattgtaattttattattttacttatttgacaaatagtttagtctattacttattggcttatatcttttcctctgctcttatgtacattccgacttatcttttcatcat

SEQ ID NO: 215993 - DNA, 405 bp, Glycine max
  unsure (1)..(405): unsure at all n locations
gagaaagagagaggggggagcacgaaattgaaggaagaaaaagggagagaagttgaactttgtgttgtgtctcacaagaatctcattcatcaaagntaccacaagtggtacacatgcttttatttatagactaggtagctttcttgagaagctttcttgagaaaacttccttgagaagcttctttgagaaaacttccttgagaagctagagcttagctacacacacccctctcataactaagctcacctccttgagaagcttctttaagaagattcctaaagaagctagagcttagctacacatacctctctaatagctaagctcacctccttgagatgagaagctagagcttagctacacacncnctataatagctaagctcacccccatgacanannaacatg

SEQ ID NO: 215994 - DNA, 454 bp, Glycine max
  unsure (1)..(454): unsure at all n locations
agctngcttgnggagcttctatggaggctatatctttgagcttcaatgagggccttcaatggtgattnttcaccatggagatgcagcggaaggcaaaggagaagaggataggggaggcaccatccactatggaataagccaaggaagaaggagcttcaccaccaagaattgccttggataagaagcttgaagaggatgctttaatggaggaaaagaaagagagaagggggggagcacgaaattgaaggaataaaagagggaaagaagtggaactctgaagtgtatctcataagactttcattcatcanagttacaacaagtgttacacatgcttctatntatagactangtagcttccttgagaagctttcttaagaaaacttccttgagaagctttcttaagaaaacttncttgagaagcttctttgagaaacttncttgagaagctagagtt

SEQ ID NO: 215995 - DNA, 460 bp, Glycine max
  unsure (1)..(460): unsure at all n locations
agcttgtctcagcgtttatgcgagacggataccaacatgctagctatcatcgccaagtaccaagaagagttaggtctagccacggcccacgagcataggatcgcggtcgagtatgcccaagtatacgcggaaaaagaggctagaggaagggtgatcgactctttacaccaagaggcaaccatgtggatggatcggttcgctcttaccttgaacgggagtcaggaacttgcccaattgttagccaaggccaaggagatggcagacacctactccgcccctgaagaaattcatgggcttctcggctattgtcagcatatgatagacttaatggcccacataattagaaatcgctaggaaacttgtatggtctctcagaccttgactagataccactntttgaaataaaatgaagtggcccatgtttctactccaaaagcttgtganatanaatcactctaca

SEQ ID NO: 215996 - DNA, 418 bp, Glycine max
  unsure (1)..(418): unsure at all n locations
agctttaccaatttctttctgtcttccatactagcctngaacttactatccatatcggtgtacctatttaatggcaaatagtagtagtagacctataaaggaaaacttcagtagaatccaaactattgtcggccccaacatagtccatcatctccgagtcaacctttgtaagcaatttgttagtaagagtgaacttggatttgttgatgtcagcattccacaacgagggaagatcatgagtaagagtgacatgattattcctacgtaggggaccgggatattggataagtatacctccacatcgattntcaaatgaagtgttctgaggaacactcttttcaccaaaacataattctctattttaaaacatgtagtgtataaaaatatatatttaaagtnnatatggtaaaatgaaata

SEQ ID NO: 215997 - DNA, 406 bp, Glycine max
  unsure (1)..(406): unsure at all n locations
cattttttgttgtttagctccttcctccatggcttattccctagtggatggcgcctcctctcacctcttctcctttgtcttctgctgcatctccatggtggaaaattaccattgaaggacctcattgatgctcaaagatccagcctccacagaagcttcacaagcaagcttccattatgtggcttagccaggaagtagccttcttcttctagagggggtgaggcctccgcagcccaagagcctatgccagatgcagaggatgagtctgttccttctgagccatttatctctgagactgatccagtcgctcaggaggaagcagcaactcaggagcctacttctccagttcctatctcttcagcacncatttctgaggacaccatgccatcaccaccagtcatggagc

SEQ ID NO: 215998 - DNA, 448 bp, Glycine max
  unsure (1)..(448): unsure at all n locations
gcttgtagaatggctagacatgatacatgtcanggcttggtttggttcaaggataaaagggatgccccacattatttccatgacacaaatgcaaaaatgatgatttggaaacttcatgcaaaacttgtcatgcatgcatctatgcggacactcaaatgtcaaatttttatggtcatgtgatgctagggctcaggattcatttcctctatttttaatcaacccaatgtttccaaaatatgttcttttatcaatttgtgcattcatccgagtccatttcgggcgtccgggaaatttcacagcattcacccttcaggcgtagacacatttcccaaaaattggttatggtcaatgaattttttcaaagaaaagttggaaatcgtctcttttcanaagcatgtcatttntagctagacaacntaatttctttttttctccctctttctttttt

SEQ ID NO: 215999 - DNA, 412 bp, Glycine max
  unsure (1)..(412): unsure at all n locations
cagtgacctgcngcatgccgctgctagaggcgacgctatactttcagattanaangcattctctggacgaggagaaaacgacattcatcactaaagatgccatctttcgctacgaggtcatgccattcngnctcaaaaacacaggcgcgacctaccaactactaatggaccgagtctctaaacaacaaattgattgaaacgtcaaggtatatgtggatgacatggtttttaagtctgaaagcatacccccaacatatgatggacctggaagaagtatttgcggaactacgaaaataccacatgcgcctcaaccttgaaaaatgtactttcggggtatgtggcggcaagtacatcaactttatgaccatgtacgaaaggaactatgccacactccacaaatgcactggcatac

SEQ ID NO: 216000 - DNA, 425 bp, Glycine max
  unsure (1)..(425): unsure at all n locations
agcttacattaatattgaatggtgcaactagagtacctcaattaaatacttatttaaatacattaataaaggctatgatcgtatcactatagtgattgatccttcaagtgaaagcacatcaaattcagttcataatgttgatgagattcaacactaccttgactacaggtatatatcaccatgtgaagcttactggaggattttcgcatttccaattcatggtagaaatctagcagttgaaaggctatttttccatcttccaggttagcaaccaatctacttccatgatgatgcaatgttcaagatgtgctctctaaaccaagtgtcagttaatcgatgtttacttcatggatggaagcaaaaaannattaccctaaggcaagtgatctcacttatagccaattcataactagaatttgttatgt

SEQ ID NO: 216001 - DNA, 342 bp, Glycine max
  unsure (1)..(342): unsure at all n locations
agcttcttagcattgctgacanatgttagtttgcttggttctaattcttccaactcaagaatagttgagaaaatactagtgattgctcctaaaagatttgaggcgactattacatccttggaaaatactaaagatctgtcaaaacttaccttgacaaaactttgtaattctttacaagcccagaagcaaagaaaaagaaaaataagggttgagggttctgtggaaggagcattgaaagctaaattgccaactaaccaaggagagaacaacaagtgaaagaaatacaagaagaatacttccagcaccccagaagcaacagctaacactagcaacaataatgga

SEQ ID NO: 216002 - DNA, 424 bp, Glycine max
  unsure (1)..(424): unsure at all n locations
gcttgtagagcatagatttgattctgcttgcttcatcatgtggctcatgatgatgacaatctaatgatcctttgctaccctgcaatgagacacacacagattcacaaactctcgcacatatagacaaacacatgctgacacaaacacaaacacacacacacacatagagatacacacactcacgcacagagttacgcacacataatgacaaagacaaagacgcaaacacactatgccacaaacacacacagagaccctcacaccaagacacacacgctgagtcatatacacacacatacacaaacacactcgcacacatggactgacacacacacgtgtagagacgaacgcactctctcacacacacaaatggagagactaccnttaatacacacactcactcttacgcacacacacacacaca

SEQ ID NO: 216003 - DNA, 450 bp, Glycine max
  unsure (1)..(450): unsure at all n locations
agctggtaaatatatatatatatatactccctatntatttcttatatatgtctttccagatccatatcattttttcttataatatatatgcttatggctgatttttctttgtgtaaaatatgttatgagaaggtgtcctttataactttctagttatatttaaataaaataaatttattttatttcatcttgaaaatggaagtgaataatgaatactaaatatcttcgttataggtttttcctatcaaagctgaattgctgaagccacatgaggaaatggaaagacacatacctgatctcattaaaaaaggtatttataatggtcttccctcnattatttttatgaattcagttgctaatctattagcgtttacatttagtaatgtaagcagggctgatgtatgttgtgataattaaatgcagagttagaagatgctatcgcataaaatt

SEQ ID NO: 216004 - DNA, 428 bp, Glycine max
agcttatacccactacgttggcttctgtttcttctatccatttatgctgcttataaatggcaatggtgagaatattcgacacaaattatatttaacatcaagtatgctgattaattgcaagagggattaaaaagaattgaagacagattataataggaattcaacttaaattgattaatgaacattgtgaactagctctgattaatagtacatatatgtgtacacgtgcggtttaggtttgggggcttcgtggcatttctcatttatatgatcacaaccttcagcctctacgttccagattggagtttcgtggatcactttaacggcgatgaaccaaagagatacacggtgcatactctctctctctctaatcactgggttgtgcataccttaatttggtctatcttcagaattctaacttgacacta

SEQ ID NO: 216005 - DNA, 449 bp, Glycine max
  unsure (1)..(449): unsure at all n locations
agctntacaacagattgtagtaatgacttactaacctagaattaaaataacttatttccattaacctagggaattaaaaaaaaacttaatggctgagtgtaactgaaattgtggcaaccaaaagtcacccccaacagccaacaagtcagccaccatttggtctcccaaaaggctgatgcctaggttgccaattgggcccttattacaacttgaactaaacctaactaaagcccttttagttgattaacccaaaacatatttttggtcagccaactttacaaggattgggccattatttagacaaactaaacactctaaaattgaaacaaagtggtgtcatttagtcctcctccatttgggccatgatacaactcacaaccttggacttttctccttgaaacttgngcttgtattcaaatagtatggacagcactttgtgaagagcttct

SEQ ID NO: 216006 - DNA, 456 bp, Glycine max
agtcacctgctgcatcaagctttgaggtgcgtagccaccatttttatagtagaatactggtaatgggtctactatcattgtcatcgttttctcttttatgtcattgaggtgccactttgagctgccaggttctccacctttgggcaaagaagcatgtctgaggtttcctgtggcgtttgaactacattgccagattcatatcacagctcaccattatctgtgagccgctgtttaagctcttacgcaagaaccaatccatccactataacgaggactgtcaagaggcgttcggaaggatcaaacagtgcctcatgaaccctcccgtgcttatgctgccggtgcctgaaagacctctcatcttgtataagaaaatacatgttgagccataccacctatctgatatccaaaatggacccggtcaagtacatctttgagaacctactttacagggggatc

SEQ ID NO: 216007 - DNA, 450 bp, Glycine max
  unsure (1)..(450): unsure at all n locations
agcttccatcagagagacttgttattctctttcaagacctcgntatncgacattattggattactttccttcactaaaccttcatggagaagtatgtatggcaaaactttattactgttattcaacacataaaaattagctggttgcaaatcttatacacttggagtgataacatgcagtcctcttgaacccttacctcccactcttttgtcatgccaagactctggaagcccaacaagttttgctttttcaatgtactctgaacaaaattcaatggcttcttctgcaatgtacctttccacaatagatgtttctgaacggcgcaaattcttggtataccctttcaagatcttcatgtaccgctcaaccgggtacatccactgcatataaataggaccacaacacttgatttctctgactagatgaacaattaagtgaaccatgatgtct

SEQ ID NO: 216008 - DNA, 343 bp, Glycine max
  unsure (1)..(343): unsure at all n locations
ggcaaacccccaatgatatgagatggaggcccaactctcacaaaggtaaactcatcacgttcaaatgagctttcaaactatctgacatgagaggagaatcaggaattcagtcacaaaatgtcaagaacctcttattttcaaaacaattacccatttcttgaacatatcctataattcaaagaaaaacatgcaaagtcgtacatgcacacaaaagngacccataatattatactagatatccgacgaaactaacaacattaacacattaacacaactaacaaattaactaaaccaacaaaactagcataaccaaagaacactccccccccgccccccccatact

SEQ ID NO: 216009 - DNA, 463 bp, Glycine max
  unsure (1)..(463): unsure at all n locations
agcttccttggggccatttcctgcgagaacaaacatttgggaagttagttntacaagataatgcttatcttaacataaaaatgacatgctaatccctcttatgttagaacgaactcatgtaatctatttatgcacacacgtatgtgtagaatatcctactatttatgccaacatacaaggacttccgacacattctaattgtcacacatacatatgcattttgaaaagaacatacacttttacgctcaaggcattgcgtcaaaatttacacttaattacatcctaaacatttgctatcacaaactacctacacatatttgaaatatatatcatacaaacttttattgtttcactcacacttatgcatattggcaagctatttacattatgcacacacttgcattcaaaagggaattccatgctatcatacattcatttaggaagcgacctcaatattcattca

SEQ ID NO: 216010 - DNA, 457 bp, Glycine max
  unsure (1)..(457): unsure at all n locations
agcttcttagtttcagatgaggcagatgagtttgtagctacctcatgcactcctctaatgactatagcatcatttttggcactaaactgttcggagttggaagccatcttctcaattaaattcctggcttcaacaaggctcatgtctccaagggctgcaccactggaagcatctaccatgcttctctccatgttactgagtccttcataaaaatattggagaagaagctgctccgaaatctagtggtgaggcaattagcacatagtgttttaaatctctctcagtattcatataggctctctccattgagttgcctaatgcctgaaatatcctttctgatggtcgtggtcctggaagtanggaaattnttttctaagaatactctcttgatgtcatcccaactcatgatggaccgtggagaaaggtaataaagtcagtcctttgtcacttcttctaa

SEQ ID NO: 216011 - DNA, 448 bp, Glycine max
  unsure (1)..(448): unsure at all n locations
agcttgatattcatcctgacagggattttggttntgtaatttaggctacagcatagaacacatgagcacgattgattagagaaatatatttctatgcatcagcttgtttgttagaaagacccaacatatctacctactacagtcattntatttaccttgcatttgatagttcttagtatacaagtttagtttaaattttgtttgaatttatcagttatacatgttctctcatcaatgcttcgattctgaacttaattcaggctaacattagttccctgtgttcgatactcggattcatccgttttaactttaaatacctgacgacccggtgcactttcctgtgagaaaactcctcattgaanatttccttgagacataaatgcgcataaagtgactgcaatggggaggcatcaaagtatntatggcaccatcgctgcggaactaaact

SEQ ID NO: 216012 - DNA, 357 bp, Glycine max
  unsure (1)..(357): unsure at all n locations
agctngctatatagtgattaattcccattgttgtttcatctatatttcaaatgttgctagagatatcataccctntgatatcaaacattgtggcggctgggactaccatcgacaatgtatcatcaaagagaaaaactctagatgagggtttactattatcaagcaagtcggagacttagtatgaccacaaattcatctccactgtctatgttcccatggacccatgtgtatggcccttaacaactcacagtgtgtgtaaagagtgtatgtgttgtgtgtgcaccaaatgaatatatatttatcaatgcatatattatataaaccattacactaataaccatcgtagagttctatgca

SEQ ID NO: 216013 - DNA, 480 bp, Glycine max
  unsure (1)..(480): unsure at all n locations
cacccggattcttaagtcacctgcggcatgcaagctggactttgagattctttttattagtcacttaaaaagttgtgacttttgaaaaaatcttcagaaacaagtcacttgttgaatcgtgacttttggaaatgtagtttttgaaatcactcactggtaatcgattaccactaaggtgtaatcaattacacatcaacagatgtgactattcattatgaattttgaaaattaaaacgtttagaagctctggtaatcgattacaagtattgtgtaatcgattacacaagtttaaaatactttaaaactatttaaacataagttataactctcgaaatttaaaatcttaacgttttagaacactggtaatcaattactaccttctggtaatcgattactagagagtataactctttggtaatgattntgtgaaaacttcttgtgctactcaatgatttggagactttttagtacttatttgat

SEQ ID NO: 216014 - DNA, 451 bp, Glycine max
  unsure (1)..(451): unsure at all n locations
agcttcttatccaatgctcatcttggtggtgaagctcttttttccatggcttattccttaatggatggcgcctcctctcacctcttctcctatgtcttccgctgcatctccatggtgaaaaatcaccattgaaggacctcattgaagctcaaagatccagcctccatagaagctccacaagcaagcttccatcactattacagtctcccttgctttctaaggacaatcaagttcgttggcatgcagagacaaattatggtcatctacccctttccgaagacttcaatgtctttcgatcgagactattaaagtcttcattgccttccagagacatgcgagtctgttggcatgcagagacaaattanggtcatccgcttttgttattntcaagactattacagtcttccttgtctttcagagacaatcaagtcctgtggcacgcagagacaaa

SEQ ID NO: 216015 - DNA, 354 bp, Glycine max
  unsure (1)..(354): unsure at all n locations
tgccgcatgcaagcttgcnaacacatataggagtctttttattgtcccatgngnacctttccctaaatagagaaccctgttggatggtccatataaacatcttcctctaaatcttcattaagaaagataggttatcacaatagatctgagtgtagctccaagtcctaacgggctactaatgtcatgataggcatgaaagaatccattcgtgagaccggcgaaaacgcgacttttaatcaatggcattattctgagtaaatcccttagctacaagtctagccttgtaacattcaagggtgctatgagagtcatatttagtcgtgaagacccactttcgaccaactctcttacaat

SEQ ID NO: 216016 - DNA, 357 bp, Glycine max
  unsure (1)..(357): unsure at all n locations
agctancaggaatggtgcgaataatgtcttatgctcacacttcttataatctattcggcttgtatagtcatggactaccgtgcaatacatgtgttgatgagaaggaggctactctcttacaaactcttatcatatggtgaagaggacctctgcggaacttgttgtgacatgtcgtgcgaaagctactgctgtaactgaccacgccttaagagcattaatacattactatgatcatgtatagacaatcgcttgtgacttgattgatatcgcacactactactatgaatacaacttgattcacatgtccctaatactgagttatacttattgccttataagaaaatatttgatattcta

SEQ ID NO: 216017 - DNA, 456 bp, Glycine max
  unsure (1)..(456): unsure at all n locations
agcttaataaatctatatatggnttttattcttactcccgtcagtggtaccttaagtttcatgggataatatcttcatttggttttgatgaanatcccatggatcaatgcatataccacaaggttagtgagagtaaaatatgttttcttgttttatatgcaaatgatattttaattacatgaggtgaaacaatttctttttaagaatattgacatgaaggatatgggtgatgcatcttatgtcatcggcattaagattcatagagatagacctcgaggtattntaggtctatcacaggaaacctatattaacaaaattttgagagattgtggatgacagattattcaccaagtgttgctcccattgtagagggtgaatagtgttaatttaaccaatgcccaaagaatgactttataagggaacanatgaaaaacattcattatgcttcagttgttg

SEQ ID NO: 216018 - DNA, 425 bp, Glycine max
agcttaactcatacaaacatggcatgttctatatgctttcaacaagagtcttcacaaataactatcatgaagcagaaaactaacaaaactacccatcatatctcccaaaaccccatacccacgaaaatcaagagagaaagcagtccacccaaacctgaaatttcgaagtcccactcgtagagacgcgcttcacgactccgaaaatgccctcctttcgcgaattggagcagaaatgatggccaaaggttggagctttgttgggcaacaatggtggaggaagaagaaggagaagaacgctgcgtgagagagagggagtagcttctgaattttctctcttggctgagtgatgagagagaacagcatttttcgttctaaatacagggtggtatctgtttctattattctatataagctatgccacatgt

SEQ ID NO: 216019 - DNA, 432 bp, Glycine max
  unsure (1)..(432): unsure at all n locations
ngcttcccatgtgctagcatcacaccttctatgctnngggcatctaaagggaatatgctaagatgcctttggcatattctcggaatatttctttcagattcacatgagatgaagtgaatttcatttagttagtgaccaaggctataagtagaaacatgtgtaacacttgtcacaactttgatgaatgaaaaacttgtgagacacacttcagagtttagcttctctccttatgctccttcaatttccatgccactctctctctctctctcattctcttcctccattgaagcttcctctctaagcttctaatccaaggcactctcttggtggtgaagcttcttcttccatggcttattctctagtggatggaacctcctctcacctcttctgctttatcttccgctgcaactccatggctgagaatcaccattg

SEQ ID NO: 216020 - DNA, 53 bp, Glycine max
ttttttttccccccccccaggggcgtttgatcagcccccccccccccccccgc

SEQ ID NO: 216021 - DNA, 389 bp, Glycine max
  unsure (1)..(389): unsure at all n locations
ctcgcccaggcgagctcagctcgcccaggcgagccaggttgcttcctccagaagcaacagccttctggaggaatcttctggaaggcccaagtgggcctggttgctatttacacccccattnttactaaatgcaccccccttttctattnttttgtaattctttttccgtaacgttacgaaactttacgaatttcataacgatacttattttttcttccgcaaggttacgaacccatacgaattacgtatttactcttttttagctttcgaagaagttacggaaacttacggattgcgcanaaacatctcttttcgacttccgccacattacggaatttcacggatcgcgcangccttgcttctttagaattctgagacgtctcgggact

SEQ ID NO: 216022 - DNA, 422 bp, Glycine max
agaaagagatgagtgaacgatagaacaaatctagtatgcattctcttgatttcaggaatgtcatcatcataaagggggagattgtggaaacaatgccttccaagattatattgatgatgccaaagaatcaagagtcatgcatgtttaagaatcaagataaagattcaagattcaagaataatcaagatacagattcaagattcaagtaaagaatcaagactcaagattcataaatcaagagaagactctatcaagataagtattaaaagagttttttcaaaaactactgaataacacaattctgttcaaaagacaaattgtaccaaagattgttactctctggtaattgattaccataatgcagaaatcgattaccagtagccaacattgttttcaaattgagttataaagctgtaatcgat

SEQ ID NO: 216023 - DNA, 452 bp, Glycine max
  unsure (1)..(452): unsure at all n locations
gcagctttgaatgctctattcaatggagttgacaagaatatcttcagactgatcaacacatgtacagtagccaaggatgcttgggagatcctgaanaccactcatgaaggaacctccaaagtgaagatgtccagattgcaactattggccacaaaattcaaaaatctgaagatgaaggaggaagaatgtattcatgacttccacatgaacattcttgaaattgccaatgcttgcactgccttgggagagaggatgacagatgaaaagctggtgagaaagatcctcagatccttgcctaagagatttgacatgaaagtcactgcaatagaggaggcccaagacatttgcaatatgagagtggatgaactcattggttcccttcaaacctttgagctangactctcggatagggctgaaaaaagagcaagaatctggcgttcgtgtccaatgat

SEQ ID NO: 216024 - DNA, 458 bp, Glycine max
agcttataaagcctatgtgactctatgttattagttcaatttgtactataatgcttggtagttgtcataaaaatgtttgttagtaatcactactagctagttcatcgaactacataatagttccagaattaactgatttgttaggaatcttataaacgactatttttcttcattgaagattcactttattaaatgtctcatatttgtagtaaatagtaatcacacaattctaagttttcccttacttttctctcattatcttgtattacttgatactataaataattaagaaatgttagtagttcaaaaaatgaataccgaacaatttaatttttctcaattgctatgaatgttacaagataaactgtactataggtgcaatctctcattctagacaaaattcatcactcgtagcaattgtctttgggcaacggagatgaccacatcactataattag

SEQ ID NO: 216025 - DNA, 448 bp, Glycine max
  unsure (1)..(448): unsure at all n locations
agcttgctaagtactgttgtgactttgatttttttatcaacgtngtccatgcaggatgatatatttccaacaaccaatgggtggagtggaagtgtaaaactctttatattatttatataatttaaattattttagaataattattttaaaaattaataaattttatcatatattataaattatgattcaataattatgtgaaactttttatattatcacatttttattgatatcatacattatataatcatttttctcaaatgaataatgatatcctgtatcagtatacgtcattaaaaataaaaaataattattaaaatgcatttagttaaatatttgaaaacattttcaatataaatattctttgaaacgaatcaaaaattgagagttcattttaactcatttgagtaaataaaacacgataatataactttaataaatctaaata

SEQ ID NO: 216026 - DNA, 433 bp, Glycine max
  unsure (1)..(433): unsure at all n locations
agctnganaagctctatgtgaaatgattatttcaattaccatgantcttgaaattcataacaggagggatttgaatgaattaatcgattaccacgattgataatcgattaaatcaattctatttattaaaattatagatactttcacttgttctttctaattagtgactcttgattcgatcttactatttgaaaacacttttcngtgttcatctaagggaaccactctacatttcaataggaggttcatgttgatcaagattaattcaatctttatcatggtttgataatcaaaggaagatcttgaagatgttgtgatctacacatcaaggtgtattctatctaattctgaattctttacagaatttgaccttgattagggttatcaatggtgtgtgtgagtagatagggcttcaactcttaatccttctctt

SEQ ID NO: 216027 - DNA, 454 bp, Glycine max
agcttattatggattgttattctaggtttttcacctgttatgtcctatcctgtgtttgatagccgtccaacaaccaaaattctaagaaacaatttatatccctcgataggtcctatatcaagaactgcagcctaataacataacatttatataccttaaaccattaataattaacatcatgcatctacttaattaaatttcagaagagaatggcaccattgtagcaggaatcataagtagtgtttctccaaccagataatgaaggtacacttaagtcatgtctgccaaaatttgtttaagcttattaaatagtggtgaaaggaactaagccaagtttgtttattctcagcaaactctttggctttaccccaaagcacaacatataaaccagcaataactacaacaacacctaccaaactgaatatgaataagtgaaatcccacccatagggtac

SEQ ID NO: 216028 - DNA, 459 bp, Glycine max
agcttgtgctttatgtttgagtggatgctttatgccctaaaaattctctcaactttcaaagaaatgaactttgaaagaaaggggtttgttaggtgcacccaacattttaagtaaagtggtaaaattgtccttcacttaaaattttaaaaaagtcttcctctcctctccctctctgtacatgctgtcgtatgtgccttcaataatgccttgccattagtccctgtcactgtcatcccgttcgccttcaccataagtccctcttttccacttgttcattgaaaatgggattgtgtagccataatacggattgagaatccgtataatgcatatggattgacaatctgtataattcacaaggattgctaatccgtatccattatatggtggattccaacctgtataattatttttaaaaatttatcaattaataaaataataattaaacaaattattgttatt

SEQ ID NO: 216029 - DNA, 446 bp, Glycine max
  unsure (1)..(446): unsure at all n locations
agcttacccaaagccattaatctaagtgtttattcagatgttgntccccctacctacaacaccttgggaaaatagctgtaacggttatagaatccctttgtccctagcattatggagttaactcttccctccaattagaagaacttaactattgacaagtgtgatggcactacagaccttgatgagcacctggatgtctacattacctaggtgagcttgtacaccacaaaggacacgatcctttgccaggtattcccaacatcaataaataggcttacctagagatggtttatacgactaccccctaactcagtggactcgtttgacaccttagcaaccctctttaggtcacnaattgtaacaagtccaacacaccatctaacatcagtggccctcgtcaacatacggcaggagaagaaggagctgttatggactttcatgaagca

SEQ ID NO: 216030 - DNA, 430 bp, Glycine max
  unsure (1)..(430): unsure at all n locations
aatcaccgcagcatgcaactgngagatgcaagctctaactacttgctacgangaggggagaagttatcttcacaactcctccccactttataaacctccttccccaaaatttcatgagtagggcgggagagctgcaaggtactatgctaatgcatctaggtcacttcgctattgtactactcggcttccttgatggcatcctctccatcttgattgtgtgacctttagtcatcctcagttgatctcatatggattttgcgagaccatgaactattatatatggttcggcccttcttagaaacatagcttagactctcttatcttttctcatgagatacataacaagaaaggagattatattggtattgctggagagtatatggagtgtctctttcttcttcatgaaatccattaaaaaccacaatgtaat

SEQ ID NO: 216031 - DNA, 452 bp, Glycine max
  unsure (1)..(452): unsure at all n locations
agcttgccacccagctcgtccaggcgagctatgttgcttcctccanaagcaaccgtcttctggagggaatttctggaaggcccaagggggcctgattgctatttgcacccccgtttttactaaatacacccccttgctatttttttggtgattatttccgtaacgttacaaaactttacgaatgtcgtaacgatgtttgttttctttctgtaatgttacaaaaccttacgaattacgtaatcatgcattttttgccttccggaacgttacgaaactttacggattgcgcactaacacttcctttaatttccggcatgtcacggaacttcacgggttgtgctacaatgctatcttttgacttccggcatgtcacggaacttcatgaattgcctatcgatgggtgccaagtacctcgaagtggtcaaacgagggtcgcatcccaactacggatg

SEQ ID NO: 216032 - DNA, 389 bp, Glycine max
  unsure (1)..(389): unsure at all n locations
accgcggctgcaagctttaaaagttgtattgaactttttggttgtaancgaccaccacctttgtgtgattgattaccactaacgaatctttctgaaactcgtactgtaaagacatgactcctcaatctattaactgtgttatcaattaccaaagatctgtaattgattactagtgaggaaatgtcaaaaataactctgaaaattcacatcctttcatgagttgttgaaaagccaccaaaggcctataaatatgtgacttgtgctcgaaaatctttagagcttttcagaacttcattgttgtattctctcaaaagcaaacctttggccaaacacttgcatttggattctcttaagctcttcaagttgtattattcttctcttaacgagag

SEQ ID NO: 216033 - DNA, 437 bp, Glycine max
  unsure (1)..(437): unsure at all n locations
agcttgcctcanagaggtccaggaatgtctatgttgccgaaggaactagttccgccccggagtacgacagtcaccgctttaggagcattgtgcaccagcagcgcttcgaagccatcaagggatggtcgtttctccgggagcgacgcgtccagctcagggacggcgagtatactgatttccaggaggaaatagggcgccggcggcgggcaccactggttactcccatggccaagtttgatccaaaaatagtccttgagttttatgccaatgcttggccaacagaggagggcgtgcgtgacatgagatcctgggttaggggtcagtggatcccgttcgatgccgacgctatcatccagcttctgagatatccgatggtattggaaagggccacgaatgcgagtatggccatacgaagaaccggtctgatgggttcgatg

SEQ ID NO: 216034 - DNA, 281 bp, Glycine max
agcgcgcatagacccaccaaacactggagcccaccagcaactgagcacacgtactcccacgtagaccataatcctcgaatcccacaacaaccgagcgcccaataaaacctgaccaaacattcacaacatccaagcaaaacaacatgcaacccgcacaagctatcacagccaaacaaaacagagcataggcagagactctgccaaaacaccaaccacaacacagcaggtcccactaaaagaccccaggaacaaaatcgtcgaaccaataagcaaccgtcgga

SEQ ID NO: 216035 - DNA, 415 bp, Glycine max
agcttactagcgtgtatctgtccatattgccccttggaacttgtatcagccccaatcttattttcgggccctcattcgtttcttgctctaatgcttcaatcgaggccatgttgacatccctcagctcggcacactctttcctgaccctggtggctgtcatcttgaacattcccttgaccactcgcgttctttcaagttacaaggcttgcacttattcgctctcctcagggacttcaacttcttccccacttgaaatctttagcttcgagagccaagttatcccttgcttccgagccttcaaccatttatgatagccgccgataacacctgttttgcttcctctaagctacttatctattcttttcaccgcattctccgctgattgaactctgaagcattgttgcatttcctacac

SEQ ID NO: 216036 - DNA, 180 bp, Glycine max
gctcttctttctctctcgaaatatctgaggaaaattaattccgtgaagaaaatccaagccgaggcgcttgtgtaacgtttccgtaacgattttgtgagtgatttcgtgaaggtgtgtgaccgttctccgacgctcttcattcattcttcatcgggcttcagacttcatcgggtgaaggcc

SEQ ID NO: 216037 - DNA, 460 bp, Glycine max
  unsure (1)..(460): unsure at all n locations
agctngagatgaggaagtgttgaagggtgtttcttcctgcttttattgttgaccacagagtggtacctggagatatgtcgtgggggtcaggagaccttggggacgtcaggtggggtgctattgcccaaaaccaagcttgaccaatcccgacccaacccgggcatagtcggtcagtgagaacctgtgatgtacctaaacaggcgagctcctggcagtcaacagataaaaggaacaaagaccacaaagcaaggaggcttgtggtggctggccagctgtgaattttgtgtaatatgtggattatggcctctggtaatcgattaccaagggtgggtaatcgattacaaggcttaaaatcgaagacaggaggctaagatggtctctggtaatcgattaccaaggggtgtaatcgattaccaggcttaaaaacgaagtcaggaaacttatggagcctcttgtaatc

SEQ ID NO: 216038 - DNA, 452 bp, Glycine max
  unsure (1)..(452): unsure at all n locations
agctttaaaatctttctataaggagctgttttatatgnggcgcgcttgaaatntttcagtcatgtacaagacaatggcgaaactgatccaaaatctcatgaggactggaccataaccaagttaattacatcaaaataactcatattgtaccatctaacaggcatttcttgtgtgtgtgtatgtgtgaataattttaacaaatgatcaaattatttctttggtatcgatggtgaacatttttatttattctttatggaatctaaaactgataatgacttatcataagcttaattactattttaatctttaaatttagggtgtgattattctaatctctaaaatttaagaatattctttatagttcctggattttgacaaattatttctttaattcctaacataatatattaatactcttatgtcaattgttagcattttgtggagatttcttt

SEQ ID NO: 216039 - DNA, 454 bp, Glycine max
  unsure (1)..(454): unsure at all n locations
agctttgcagtaatgtcattcccagccatatccaaaatttccagtgatggtgcagattccttgagggcattancaagggcttctgcaccatcatcctccaggttcaaataactgaggtatatctctgtaagatctgtaaatgcaggtataactttacttaaagcaactccagcttcttctccaaacatgttgtcacgcaagtcaagcttcctcaaatgtttacaagccccaagtgcttcagcaagggcaactccaccatcagagcctactctggttgatgagcaccgaatatcttccaaagctggggaatgtttcacaatttcagcaatagcaattgccccttcatccncagtcatgttgttatggaaatgaagaaccctaagcttctcagtggaaggaagcaattcagaaactcgctttgcagcttcctctgatataccatcattcatcaaat

SEQ ID NO: 216040 - DNA, 427 bp, Glycine max
  unsure (1)..(427): unsure at all n locations
agctntatactgtgagtcgagagattgtttctcacctggagacagcgatggcactcgctgtgattcgtgcgctgtctctaactgagacatatggtgtatgagctcattgaacttggaagacatggaagactatagtctcgcaaatgcctcttcccagcgatcaacacttgcctttgatcgagtagcttcaaccatggtgtgagcaatgaaagcaccaataatagtgtttggtattcgaggtccaaactatcctcctgaaactggatatatatatatatatatatagagagagagagagcttgagatgatagagagaagatattttccttttttttactaaagcttgttcgtacatttatgtcactcgtagcggtacaacataaaactaacttcctagcagatgtcctacctattgatgattctccta

SEQ ID NO: 216041 - DNA, 445 bp, Glycine max
  unsure (1)..(445): unsure at all n locations
agctntacaaaagaggagagaatattttttctttgctcaactcaatagaacaaagaagaatctcatattttccccttttatacattgtttccccaacaatcatggggtttcaaaaatgttgaagcacaaataaaatgaataaatgaacttacatcgagtataaacaaaagtgccatatatggaggagctgcatatccaatcccttccaaaatggcatctaacgatagatggaaaccacccagagagtcaattcccgtgattgaacatataaaactccccgcaacagccatggcaccatatatccctgaaacaaagcaattccatcgcatagttcaactcacagtaaacaaaattaagattcccattttcccaagtggaaaattcattgatctgattgaagagagtagtgttttttcaaacactcttacttcttgtgctacacaac

SEQ ID NO: 216042 - DNA, 420 bp, Glycine max
  unsure (1)..(420): unsure at all n locations
agctntagctgtgaagaaaaaaaatcatattttcattctattaagtaaagacaatactatatttcctcaatcatggtgaactcccttattctaagttatcgtatctattcgcagaattatcatatttgtttacgtgactatataattcctcaataaaagatactactataagaactattaaaaaggagaaagttataaaaagaaaacttatggataaaatgaacaaacttggaaaaaattacgaagccatgacaagggatatatgtatcctttattaacaagagtgctgaacaataataattaataaaattgaacatcttaaacaatgtattgctatgactaaatctttggagcaagagtttaatcgcgtgttgaactataagttatgaaagatattgtaagacgtccacgcttagggat

SEQ ID NO: 216043 - DNA, 450 bp, Glycine max
  unsure (1)..(450): unsure at all n locations
agctatcttgcttatatcttgntgatgttacttctgtctctgggtttctgtaccccgtaacatgaaagactgctggaagaaactaaagggtacagaacacatttttcacccttgaatctcttataagcctctgcatccctttcaaattcccaacagttggcaaatagcccctttcatccaaaattggctcaaatctctaagggtgtgtttggtttgcattttcattttctgttttcatgaaaactattttcattttcaaaagattagaattctgaaaatatgtttggtttgacttcttggtttctgttntcatgaaataaaaatactgaagatttatgatatattgacttctcgtctttctgcatatttagattcgcttaatattacattcattgtcaccacaatttcattntacccgaaatgaagtttctgttctcaactgaaaacact

SEQ ID NO: 216044 - DNA, 372 bp, Glycine max
cctatatcatcacaatatagcaaaataaatcatcaatcataaatacaaaacgtgacctccaaccgcattcccttatgcttcagctaccatctctgctacaaagattaccgggcaaaacatgagacagttgatactaccactcgatgcatcagtaccatcattaacacaacagatcgtgatccagtcttgctaggacatgatgcccctcacgcaatctcatagcataaatgtcattaactcgagactcaaataactactaccctgaccactataagacacccacccctcccccactctctttataacattaaaaacaacctaatatcccaaagaaccctaactagaaacacgctctctatcactcattcctcc

SEQ ID NO: 216045 - DNA, 370 bp, Glycine max
ataaccactttatatggctaacgaaggtattggtacaaacaacccctgccagaagcggtgactaatcttggtcgaggactatgagcatacaacgcatgagcgaacgtattcccctaccacatgattcatgatacccaaggactaaccatgattcaaaccatgaatcatatgattaaccgacacaagtcgctaccacttgtggcaaccgctggtggtatcatataccacatttataaacttaactagacaccttctcactccatgtaatagattattctgaatataactttttatgaatatgtgggtgggaaaataactcaattcggcagccgcgttatcttataaccaacaagtgatatgctctaggcga

SEQ ID NO: 216046 - DNA, 439 bp, Glycine max
  unsure (1)..(439): unsure at all n locations
agcttccatnttcaattaggagcctctcgtatattacgggactctattggacatccgagaaaaaagttattgtcgtttgaatttggttcgagcttccgttttcaatttggagcatctcgatatattacgagactcattcggatatccgagttaaaagttaatctcgtctgaatttgatacgagcttccatttttaatttggagcctcttgatatattacgggactctattggacatccgcgtaaaaagttattgtcgtttgaatctgatacgagcttccgttttcaatttggagcatctctatatattacgggactcaatcggatatccgaattaatagtaaatctcgtctgaatttgatacgagcttacattntcaatttggagcctctcgatatattacgggactctatnggacatccgagaaaaaagtattggcgt

SEQ ID NO: 216047 - DNA, 446 bp, Glycine max
tgcttcagttatatattgtacactttatttatttccgtcaacacaacactactgatatcatacgagaccaatgagatacactcaccagagatcctagccagtattcacatattataccccagatcagtgaatcgcatgggcttgagaagttttgggttggattattaatggattacatatctcgacgagccgttttaatgactgtgctgtgtattttctttcctctgcatacattattcttaaatttcatacatctaacatgcgtcagatgtgatccaatcttgtgaatgctcaagatacaaatacaatgtatactgctgagtacaaaactaattatcgtaattttcaatgggcccaaatctcagtctcaggttaatacatattcaaccaaactttagaaacctgagtcaactaaatatattactgtgaaagctcatgattagtct

SEQ ID NO: 216048 - DNA, 443 bp, Glycine max
  unsure (1)..(443): unsure at all n locations
agcttcgtgaatatattagacttgccatgttggaacagacaatttcagtttcgttgattaatattatttttaaccgaacattgaccatttggtttctcgtatcaaattttaataatgatggctggtagggcggtctctattattcagtccatttttctgtacatagaaataaaattatcaaacttaaaatctaagcatatatatgatggaacgcactggtagagcaccaaacgcaccactcaaaatgaagtttccatttgattgtgatacttgatcttatcttgattcatagaaacgtataatagcacgcaagaaaacataaaaacatagtcagtcgatagacataactatgttacttatggttcgatatgtatatataatgactntattagaagaagttaaatttatttntcccttatataaaaaaatggtggtttcattaa

SEQ ID NO: 216049 - DNA, 58 bp, Glycine max
ccccccccccgggggataaaaaccccccccccccccgaaccacacgcccacacacccc

SEQ ID NO: 216050 - DNA, 459 bp, Glycine max
  unsure (1)..(459): unsure at all n locations
agcttgcttctacaaagacattgtcgtcttttgacaaaagacattgaagtctttgaaatgtaaatgaagacattgtcatcttttgtaatgtaaatgaagaaattgaagtcttttgaaacataaatgaatacattgtcatcttttgacaaaagacatggaaatgcaaagaagacgttgatagtcttgacaaaagactctgatagtctttgatatgtaaaaaagactttgataatcttggcaaaagactctgatagtctttgatatgtaaaaaagactttgatatgtaaagtgtagaagcaaggcttcatggtgaatgtgattcataggtgttttgatgataacaatgatgacaacaaaagatgatgacaaaggtgatgaacataaagctcaaagatcatagaacaactcangtgaatcaaagaacatctcaagtgaatcaagaaaaagtcaagagttcaa

SEQ ID NO: 216051 - DNA, 413 bp, Glycine max
agcttagttcagcttatcatcctcaaacttatgttcagactgaacaaaccattcagactctataggatatacttcgggcgtgtattgtagagcaacaaggtagctggatggattgtttgccattgattgagtttacttacaacaatagctaccaagccagtattggtatggctcttttcgaagctttatatggacgaaagtgcaaaactcctatttgttggtatgatgatggagaagcagtacttcttggacctgaaatgctacaacagattaacgaacaagtgaagttgattcgagagaagataaaagcatctcatgataggcagaagagctattacgatagaaggaggaaaccactagattttcaggaaggagaacatgtgtttttgaaggtttctcccgttaccggagtc

SEQ ID NO: 216052 - DNA, 448 bp, Glycine max
  unsure (1)..(448): unsure at all n locations
ccgggattcttaagtcaccgcngctgcagctgataatttaacagaatatatttttttgaagaaaaatcgaaaacgcagntgctttataatccactttaaactattaaaaaacaccgattctgttagtttctgctcattccgatcaaaacttactccgataaaaggagttatccaaattttaggagcaaaaaaatattccagctaaacgtacaaacaccaaatctgaaacgtggacagattttgatttaagtacaaaaatcaatgttaacggagaatcggaaccctaatttgagatgaactaaccttgagatcgatgagagaggagtatgattggcctcnaacaatcttgaatgcgctgaggagtatgccaatgccgactctgacgccgtacgagaggaggaaggtctggcagaggttgccaatggcgtgagccacgcatgactcgtcc

SEQ ID NO: 216053 - DNA, 437 bp, Glycine max
  unsure (1)..(437): unsure at all n locations
agcttctacggagaccaggttgatatntggtgttggcatcatatgcattggaggctggcatctatcaggatcgacaaatctaaacaaatttaagccatcttttcatgtgcatctacttacaactaggtcaaaacagattaactaaagatcttataagcctatatgatcaacttaagaatacaattctcataaaatctagattgagagaatgcttttgctcctcacatcatatggacagaaatgaatgaataaattaaaaaacacaaagtcctgtcgcacgtacaactttccacaacatcaattcaaattttgcatagtgtgaacactttcaagggttagagactcaaagaaattgaaaactactatagccgtgaccttttgacagatgcaatgtgactgttattacaggactaaatataacttggaacacgaagcca

SEQ ID NO: 216054 - DNA, 316 bp, Glycine max
  unsure (1)..(316): unsure at all n locations
agcttctatgagaaaacttacttgatattcttgagcttanctacacacaccccgctcgtaactaagctcaccccccacagaagattccttaagaagctagagcttagctacacatacctctctaatagctaagctcacctccttgagatgagaagctagagcttagctacacaccccctataatagctaagctcacccccatgaataaatacatgaagaaacaaaaaagtccctactactaagactactcaaaatgccttgaaatacaaggcctatacgaaggagaaacctattctaatatttacaaagataagtg

SEQ ID NO: 216055 - DNA, 371 bp, Glycine max
  unsure (1)..(371): unsure at all n locations
tgaacaatcagacagtagcggctggggcggcagtaatgagcgccaccaccgatcatctcanatggctaaacataactgagatcagattgcagagaacgttgcacaatctgacctgaaaggaatcctcaaggaatgcgcacaggctgtgtccgatgatgaaggtccaacaccaagaagctggacggataacgtatcggggaaaatggtaccaatctctggagaaccaatccaaaagctgggtgcttacttattggaggggcttagagcaagggtggaatcatcacggaatctcatctaccaatccgtgaatagtgaacaaccaacacgccaagaactaatgaggtacatgcacagtatgaccaaagacgccc

SEQ ID NO: 216056 - DNA, 246 bp, Glycine max
tattggctactatgttttcaactttcttatccctcagctatgtgtagctgtataatatactataattgacatgcatatctttcacactttgtcatcatggcccgatgtgctgcaattattttagatactaccgagatctgaatgaaatgtgaacatttcctacatagttgatttgagatataaatctctcgattggagccatagaatataatattatcgtcgttcgtggtcatatacaacccttac

SEQ ID NO: 216057 - DNA, 420 bp, Glycine max
  unsure (1)..(420): unsure at all n locations
agctnnttggagatgggaagtatgatgagtctttatcgcaatatgaacttgctttacaagtagcaccaaacatgccttcatctgtcaaaatacgttcaatatgccattcaaacagtggtgtgtgctttctgaaactggtatggtcttctttatcctgttaatgagattagcatttgtcatcacattcctgtgttatgctcttccacacagtctaccagatgaactattaatctcaaaatgattttgcttgatggcttatgcacagtgatcttgcttggtccttgacctttctatgtttttgctttcatttcagagttcagatttatatgttgaaattcgaagttggttctgttttctgttgcatgctgctcttgaagatgtgagcattattatgactcaatcataaccaatgtcacatgt

SEQ ID NO: 216058 - DNA, 458 bp, Glycine max
  unsure (1)..(458): unsure at all n locations
agctnttctttcttaatcaacctgtctattgactaacaatgctaattgcaagttcgcattcttgttctttctttgtctaacatacatacttgctcaaactcatgaaaagaaacacaaactccatcacaatcatgcattcaatccaaaatcaattcataacaccaattttcacaaaaagataaaagtttttcactgcaatatcatcaaagttaagttaaactgttccatatgcttcaaaacaagcatactagctaactacatacaaaaacagcagtgtatataaacattgacgaaaatcactaaaaaccaatgtactgaaactataatcaatataataataatccaaaaagcatcaccaggaatttagaattcctgtgactggtcctgagtatcctgtgtctgaacatcctcctcatctgtcagatgaagtactggagtagctggaggagaagtgttca

SEQ ID NO: 216059 - DNA, 456 bp, Glycine max
  unsure (1)..(456): unsure at all n locations
agcttaactaatacataaatataagatccttatgttgatataacttaattgtcattntgttcaatattctcctaaactcctgatggtaccaagagatccaaagcaaaacatgtgtgagctagataaaaggtaacacttcacacattttgaaagattaaagcttgagactttccttttttgtttttgaggcatcatttcgaggcccactgacttcactgtcaaagttattggacagtttttctctctgtattcacagatttggatagaatcttgtcacatttatccggctacttgagtttggtgatgctgattttccatatttcttagaagggcagcaaggttggattctttcttatttccaaaatccttcagctcctgcaagattatagcaccaaggtgtactcttactctcttagactcanacttgcaacaacaatacaaagaatagcataaagc

SEQ ID NO: 216060 - DNA, 450 bp, Glycine max
  unsure (1)..(450): unsure at all n locations
agctgcctctaatcacctccatattggacgagctactccagcgaatgaccaccctggaaaccactcaacaacaacagcaatccccaccacactcttctccaccttcttcttcatctgtgaaccagtcccattcctcatcacatcttctgcgagtgaagttggaagttccacgatttgatggaacgaacccctctggctagattttcaagattactcaattttttgagtaccatgccacaccagaccacgagcgtctcactattgcctccttctatatggaggaccctgccttggcgtggttccaattgatgacccggaatggccaaatctcttcatggccaggattcctttaggcccttgaggcttgttttgccccgtcccactatgatgatcccatcggaaccctcttcaagctntctcagcgcggaacagttagtgagtatctttctc

SEQ ID NO: 216061 - DNA, 456 bp, Glycine max
  unsure (1)..(456): unsure at all n locations
agcttctcaaggaagctacctattctatatttagaagcatgtgtaacacttgttgtggctttgatgaatgaaagtcttatgagatacacttcaaagttccacttctttccttcttttattccttcaatttcgtgctcccccccttctctctttcttttcctccattaaagcatcctcttcaagcttcttatccaaggcaattcttggtggtgaagctccgtcttccttggcttattccctagtggatggtgcctcccctatcctcttctcctttgccttccgctacatctccatggtgaaaaatcaccattgaaggacctcattgaagctcatagatccagcctncatagaagctccacaagcaagcttccatcagttttcttcacatttattcatattggcaagctatgtacatgatgcacgcacttgcagttcaaaagggcattcacactatcg

SEQ ID NO: 216062 - DNA, 451 bp, Glycine max
  unsure (1)..(451): unsure at all n locations
tttagtcgtccatagacctcctcattgttacggnccagcanacgttgcatctgtgcattcatcgcatccagtaacagacgttgagctccgtccaactgatgatactcgtcaccaccaccacctgctccagccataattcaacaggaaaaaaaatgtgcaataaaaattattaaggtttcaggacctcacaacactctactcacgtgtttaactcttagatggtagtacactcgtgtttaatgctctcaataggcttttgtgtaatgtattccctcttgccttttaccactcgtgtttcctcttaagttcctggatggaccaaattagacacacaaggtaatataaaataaaaggaaagacaatataatgatcacaaacagtattgatttgagataacaactttggacttgattggataataatatattagattggattcggataacagatg

SEQ ID NO: 216063 - DNA, 230 bp, Glycine max
ctcaagtgacaaaagagtggccaatcaaaaagaaatggtgtttggttcatcaaggatatcaaccatatgaactaaatatcatggaatgcttaaatcaatcacttctaacaagcatgcagcttttcaaaaataggatcacaagtattagagtcatagctgaaataagctagtaagcatgacaaaaatcaaggaaggatcatcaaccaaaacctcacagtcattgtttcact

SEQ ID NO: 216064 - DNA, 481 bp, Glycine max
  unsure (1)..(481): unsure at all n locations
agcttgcaacataagccactttatgccttgttatacaagattagatnttgcaaattgcaacaattatcatctaggaaaacaaggaaacaggttatcataactgcttatgagttcaaagaaataatacattacaaacaacatacattgagaataggcgaataattctacaatattccatgcaatttcattgggttaaaatggtagtagattcacttcattttgagacatgagacatcatatcaagcaccatccttttgtcaacctagctgtgaggatctaagacctggccaatcatggccaactgaactaaatgttactattgctaaaacagggaagaaacaagtatgcattcccaacatgctggaatcaatatcatgtngaatattntacatcagtaaacaagatatcgtatttaaagagggtgaaagatctatataaaagacgaaagtgatgacactgatgaaacaaacacgatatagga

SEQ ID NO: 216065 - DNA, 399 bp, Glycine max
gtatacaattaatatagaacctatatcctaatgtcacattctatcagagcgttgtgttcccgtgtcctctatcatgagattcttcatagtcatccacctattttctgctcccccgaacacaagtttaagatcatcacaagatccaaacacaaccacacacagggagtgagttatcacattcatagcttatagagaaacaagacaattaaatatacatgttatataaatgagataccacttgtttaaacatagctcacgtaacttcaccacttcgtcattcaaaattcacttttcaatcatcaatcacattacacaagaatctcacactctgatcaagatatagttacacatcaattagcaagcatatgcaacagttatgctaagactcaatcctatatg

SEQ ID NO: 216066 - DNA, 399 bp, Glycine max
  unsure (1)..(399): unsure at all n locations
gtataaaacatagnttggagaaaatgatgcatattangatttgttgtatgtaattggctccagtaactaagagatgtttgttttacaaacgatatggaaatctgatccgtgcaccaagatgtaagtagctaaaataaaccttgctggtggtggaagttcaagtcattgaaaagatcgtgcatttttgtataggatttagtaatttatttgagatatatgaatcttctaagtgtgataaatgtcaatttttcaggtgaaattgacaatggttactgcataagtatggagctaaaagattgtgtttaccatattaaaggtacactgtgtcatatgatgcatagacttgaccttgcaatataaataccaaatttgaagctaccgttagcattgacatttgac

SEQ ID NO: 216067 - DNA, 420 bp, Glycine max
ttaagcacctgcggctcaacttaaaactaattggttaatctttgcctgtcaatggaccttagtttatgggatacattcttcattagcgttatataaaaccccatggatcaatgcatataccacacggtttacgagagtaaaatatgttttcttgtttatatgtaaatgatattttacttgcagccaatgatcggagtttgctacatgaggtgaaacaatttctctctaaaaattttgacatgatgggcatgggtgatgcattgtatgtcattggtatttaaatccatatagatagacctcaaagtatcttacgctcatcataggaaacctatattaacaaaattttagagagatctgccatgaatgattgttcctaagtggtcccccattgtgatggcgataggtttaataaaccaatac

SEQ ID NO: 216068 - DNA, 402 bp, Glycine max
ccaacaatcgcagaataattatgaccttgctagccacagatacaatccacattggaggattcatccaaatataaaacggacatgtgctccacatcaacaacatcctatccctactttccataatgttgctggtccaatcaagctatatgttcctcctacaatgcaacaacagcatgttgtagtcacaacaaagacaacatgcaactgagggtccttctcaaccttccttataagagttagtgatgcatatgacacacttcagaatatgcaatttcaacaagagactagagcctccattcagagtctgacatatcagatggggcagatggctactcagttgaactaagctttatcccgatattacgacaaattggcctaacaactgtgcagaatccgaaaaat

SEQ ID NO: 216069 - DNA, 346 bp, Glycine max
gcatatatcagtgcctctttttttctacttgctaagttcttttttaatcagcctactgaatactatctactgctccgatcttatttatcagaaataagttctaatcgattttaccgcataactcgtttcttatggtgaggatcaaatgtgttattacttatatatatatatatatttataaaagaagacagttagctggtatttaataggaataggtgctcttcatgaaaagtattacaatgaacactcccagaacaacctattaaaggtatgacatttatatgacgcaaccatgtatattcacataattatttggatacaagattaaaagcttcctttgttacag

SEQ ID NO: 216070 - DNA, 449 bp, Glycine max
  unsure (1)..(449): unsure at all n locations
agcttgtatgataattggttcactacaatgaccattatgcacacaacccatgctgatgtagtccttgccaacaacacatactcttcaaggccgaatctaaagtacaaagtttatcaattttatttcacaaacttactcacttgatgataccaacactntgtgtcaacagtctgtaggatctctcatcataaacatagcatgtgctatacaatttatgtgtgtcaaacaaagtacaggaaataacactaccaacatgttaatagataactcactttataagagaagtaaaatttctctgctgaaattcttgcaagctaatttgttcttctttagaatacttgcaccagagaatagtatataagtaactggtagttcgaaaacttgagacatcacagaccatgtagcagatgcataaaacaatgctcataatcatcatgagtatttgaaca

SEQ ID NO: 216071 - DNA, 423 bp, Glycine max
tgatgatatggtcttcaccgacgaaaggatcaaagtttgtctgaaaagaggcaaatctgatcatcttgctttgataaatgcaaaataaaaaaacaagctggggcaaataaagagggtgaggatgaaggagaagcccgtgctgtgactgccattcctatacagccaagtttcccaccaacccaacaatgtcattactcagccaataaccaaccttctccttacccaccgcccatttatccacaaaggccatccctaaaacaaccacaaagtctacctaccgcacttccaatgacaaacaccacctttagcataaaccaaaacaccaaccaagaaatgaattttgcagcgagaaagcctgtagaattcaccccaattccagtgtcctatgctgacttgttcctatatctacttgataattcaatg

SEQ ID NO: 216072 - DNA, 355 bp, Glycine max
  unsure (1)..(355): unsure at all n locations
agcttgagcagatgtacaaagtattccgtttttcttatgcatatggaataatntcatagcaaggtttgtaattacatactcttatgccgtgcttcttaaaaatcattcggcagctcatcaagacatcaacattctctagtctctctaggctagtcactttaccaacaacactacaaaaacatggaaagtatattattcattaattgttagcgtaagtatgttgaaaattcacgataagttatgaatagaaaagagatagcgatagagacatgccacttcccactagctagtactccacttaactgtgacactctatatgaaaatgggcattcaactcacgctagacaacgatatg

SEQ ID NO: 216073 - DNA, 440 bp, Glycine max
tttgatatcaaactgtgccactagtaatcgattacatgtaactagtaatcgattaccacagagtaaaaagtttggtaacttataaaatcttgagataaactcttttgaaaaacaaaactgtgctatgtttgtttgttgaaaaatcttttcaatacttcccttgtgaagtcttcttgatttcttctcttgaatcttgaaatcattatctcttgaatcttgaaatcaaacttctctttattcttgaatcttcttgatttcttctcatgaaacttgaaatttatcttgatcttgaactttttgactgaatcttgaaatcattctttggtttttgtcatcatctctgtcatcatcaaaattacttgaatcaacttgattcatcatcatcaagcttgcttctacattaactcgtactacacaagatatatcataatccaaatctc

SEQ ID NO: 216074 - DNA, 384 bp, Glycine max
agcttggataggggaactcaagctattgtttgttatgctcataatatgcttgcagaataatgcgcccaagctaaataaatctcaagattggggttgtttcaaatgcacaatcccttatgcatggcttccatcaacatatatataatgacaatatatacaaatattataaacaattcgatttaaagctcataaacttgcacctcatctgctcacaactaatcggattaggattcactaacaaatcacatttcctcttggcaactaatcttccagtgagattacctatcaaatacgaagcttcatctagacatgtttgtatatcgctgacgtcattggctttagcttgctcgatacgcctctccactcacacataacagaggcact

SEQ ID NO: 216075 - DNA, 418 bp, Glycine max
tcattggacatacagttatacaatgcctgtccatctctcttctcataatgctatcagaacactgctgttcacatgcaattatcttgaacgcacaagttgagtcgtgattcttcaaatgagctgcgcaaaatctggaattgcatccctcattttcgcagatcatagttctaaagttgcagctatcaacatgattggcaagctcttccgcagaattaaaactcatgttgcaatgatatgagttttcaaagtcaacattcttgagcaaagtttctgcaattatttctctcctgtcaagtgtccaaaacccattcatttccatctcttgaacaaaatcatctattttgtcctacctcttttgactcaacagccattctgtaactctgcttaacagactcacttttggactcacggagtcatc

SEQ ID NO: 216076 - DNA, 397 bp, Glycine max
agcttctgactagcagcgtcaaatgtgcttgtctggatttccacactgatcgacacaggcgagattgatccatgaaagctcaaatccatagagaagcgctctgtgcatctgagtgtatgaagaattatttgtatccaaaccccaccatgatgtgggagcaaccagttttacctcacaaccaacttcatagtcctttgctattaagtcaccagcaatagcgtatatgtacccttgggagtgccacttgatgcaaggatcagtttccacatacttctcattgtcaatcactgcatgcctacaatttaagaaaattatatgcttttggaaagcgcgctttcaaggataacaatcgagtttgaattctgtatcgatccaagtaaaaattttcactatcact

SEQ ID NO: 216077 - DNA, 389 bp, Glycine max
actaagcttttgaacgtcagctgaataccattgattactctgactctcacctgattgccacctcatgaccacaagtaccttctcataacaccataatcagctcaatgtacaaaacatgagaaacgcacaaaagatactcattcattcattcatgaacagtgcattgaaataacatgaaattgaagacctacccatattcaaacaacactgtgacgaagtgaatctgcacttttcgcggcttttgaagaaattgaaaccggcccagaattgaatttgaagagcgagattgatggcgaggctcaaaacatgatctttttatgcccccccaattggttgaacagaatttgaacggcttattcaagatcaaagagggaaaaagtgtttggaaa

SEQ ID NO: 216078 - DNA, 347 bp, Glycine max
ttaccagtgacagttttgaataaaatcaaagatgtactcttcaaggtttaggtttctcaaggcataactcttccaatggttctcttgactacacatgaagagtctataaaagcaagaccttgacttgcttacaataactttccaataactttagacatctctttgaacttctacttcttcttcttccattgccaaaagctttcaaagtttttttggttcctaaaccttgttctttcacagataacacaagggtgtaattcatctttttcattcctttctccctttgccaaaaagaattcccaaggactaaccgcctgaatttttttgtgctctctcctcctttccaa

SEQ ID NO: 216079 - DNA, 409 bp, Glycine max
tagcaggcttctcttccaatatagcaaggtcaagatccaaaacaccgagatgaaattgaacttgctcattccaatcagagaagttaagcccattaaaaattggtacagatgatacatgagaattcaatgagttgggaacaggtactgcataataaaacttcacataagcattttggtacatgaaacacaagtcatacatataatttactcagataaaaatcaatgtatattgatgttttcctttgggtgatacaccaacacacaacatacaaacatgatgatgctgataaaattttaacattatttgacaattaaatatgcaccaattagtagtatctatttcctttgggttataaataaaactaatgatacacacaaatcgcctacaataatattcattgattataag

SEQ ID NO: 216080 - DNA, 421 bp, Glycine max
agcttgcacaagctaaatatcttctatcctcgtagcaaaattacaacactgatatcagataggtatgaatgcatacctgatagtcatttggccggtgacttcaattctatgccaggagatatggtactagcattcctaaaatctcaactcccctatttcttatttttgactaaattataacgttcctgtgggatatgttcctatcttgcccaactcttgtcttgttatcttaagctaggtgctagattaagattgttgctccacagaaatcctgtgtgatgcattaatctgctagcaactcatggctattgattaaccttcaatctcaaaggaaaagagatgacctagaaatagtcgctgggatagggacatcgcaaaatggtgccagagatgttatagttgatggctcgacacttgacct

SEQ ID NO: 216081 - DNA, 407 bp, Glycine max
tgcagcttatggaggctggagggaaggggtgatggtgtcatactggaattactaagtctgggatcaaatctcaatccataatcaaaggacacaagtggtttataagtgttaagatactcggtccaacaatttttatttaattattaagtttaatagcaaactttgagtaataaaaaattgacaattattattaccattcattattaaccagattaagatatcacaaaattcaccaaaagaaagatttaaatatcacaatcatgtaactgttgggagagaaaattggattaagaacagaccaacacagatttgttgtggatagaaataagctggtggagaaaaaacaaaaaaaatcaactgtgcaattcaaaacgaaaaatgttacccctcctaatccgttttccctt

SEQ ID NO: 216082 - DNA, 397 bp, Glycine max
  unsure (1)..(397): unsure at all n locations
aaaattttcccttcttcatcataanataccatttaaacttgtatgtggtccaaattcgagtgagggcccggtctgatatatatttaaataaacatctgtatcaaatcaaaatgtatagaatgataaacaaaaaaattagatgaaattgggacaacgataaacttgttagtaacagtgggggacctctgtgtctccctctctcttgagtgacaagttcgttgactatacgtcaaaacactaaatttttcttctgtatttgtcagccacctacacctttggctaaccgctttatatctgagaaaattatttatgatgtgcagacaaaaatgttactaacacttcattgatgctaacgacaaaattgatgccgtattgaaaaaaattatgtgtgtgataa

SEQ ID NO: 216083 - DNA, 292 bp, Glycine max
gactttttaaaattgcagaccaacaaggaaactttatagaggcaacaagccactgggctgatataattattacctttgccttaaaaaaaaaaaagagcctctgtgcaaaagactcgaacctcaaaattcatttaaaaaagaatcaccaatcctgacaatttcttattacaacaatgtcatgcactgcatgtatcaattaaggaccaaggacagaaggtattaaagatgtataccataaggaagcagcaaagcgggctgttaagtaagtgggatactttggagacttgatgga

SEQ ID NO: 216084 - DNA, 397 bp, Glycine max
agcttgtgtaatcaattacaagctttatattttatattcaaaatttgcaaatttgtttcagaaatgaatttgaccactagtaatagattacgtcctctggtaatcgattaccagagagaaaataccatatatttgaaatcacaaaatgcttttgtaagatatcctttggccaaacttgtgcatcatcaattgaggaatgcattctaagttctagggactaagttcatcatttttcttgaatttctgagttcttgacttggattaaacttgagaagcgcttatctttggcatcatcaaaacttcatagcatatatgcttctacacttaggatgctccatgtatgggccaatgtggtgaggtccttccgtagaagattccacggagccccattggttat

SEQ ID NO: 216085 - DNA, 428 bp, Glycine max
  unsure (1)..(428): unsure at all n locations
tgatgcaacattnggagaagttaatgaaacaacgagttgatgcgctccatgagaagttggatcaaatggagaatagagatcataatgaagaagaaagaggagaagagggaatgatggtgttcctagacaaaaccgaattgatggtattaaaatcaacattcctccatttaaaggaaagaatgatccggaggcctacttggagtgggagatgaaaatagagcatgttttctcatgcaacaactatgatgaggaccaaaatgtgaagcttgccgccatggagtttttcgactatgctcttgtgtggtggaacaagctacaaaaggagagagcaagaaatgaagagccaatggttgatacatggacggagatgaaaaagatcatgaggaagcgacatgtgccggctagttactcaagggacttgaaattca

SEQ ID NO: 216086 - DNA, 511 bp, Glycine max
gggatccttaagtcacctgcggcatgcaagcttcaagaggaaaagataatggtcatgatcttgaaaagagggactcacctacacctcctagtaccttaggcttccatagtggtggaagagaaggaagaagaagcaaaagggctcccttctctctctcttggtcggcagctcaacaataaaggggtggggtttgcttctcttttatagaaggaagggttcagattaggtggggggcccatatgtgggtccccataggttttttcttctcttttcctattcaaactaactacacttagagacttaagctctcaattagtccttaattaattttatcttttaaactaattctagagtgataagttcatttattaatctcttatattagtctcaaataaaaataattaaagagaatgagaaattaattctctcttttccttaattatgtaaactaatagcttctcaaatctagacacatacatgttctaagcttccatcaatctgtccaaataat

SEQ ID NO: 216087 - DNA, 414 bp, Glycine max
tctagctgctcaattgctccacgttgctgcatggaatgtttaaagtctgtatgggggtcagatttctgattcaaggccagctgggttaccaagttaaccaatgcatccagtttgccttcaagcttcttagtttcagatgatacagatgggtttgtagctacctcatgcactcctctaatgactatggcatcatttctggcgctaaactgctgggaagtggaggccatcttttcaattaaatttctggcttcatcaagagtcatgtctccaagggctccaccactggcagcatctatcatacttctctccatattactgagtccttcataaaaatattggagaagaagctggtctgaaaattgacggtgggggcaactggcacatattttcttaaatctctcccaatacttatac

SEQ ID NO: 216088 - DNA, 478 bp, Glycine max
  unsure (1)..(478): unsure at all n locations
agcttggactcanagagaaacttagaatgactctatagtagagtaaaaaaaccaaactaaaaagactcaagaaacctctagttttggaacttttttttcacacgaattttcaattgaaatttcagaactaggattggtataaaataggcaccaattatagaacaaattttgagccaaaacaacaagcacacttccctttcacttttttttcctgtacactgatttttctgccaacttgtgtgatttttcttattttttcctttaatccaaatcgcttggttcttttttcataattttggtccagatgtctagaaaattaagtaaaaatttcagcttaaaacacgtagtgaccaattcccagtctaaaatttaattggattgggcttctaccaattcaattaaatntatttcccaacacacacatcaaatattcacttagtgcatgtgaaantacaaaaccacncctaatacaaaaact

SEQ ID NO: 216089 - DNA, 441 bp, Glycine max
tagaaattagaagctcagaaatcaagagatcataaattttttacatatggggagtatgggataagtgaacattctatcttgtatatattctatcttgtatcttgatttcataaattaaattgtcaacatcaaaaagggggagattgtagaagcaaagacattttaatgttttgatgatgccaaaggatcatgtgcttctcaagtttaattcaagacatgaatccaagaaattcaagatatatgatcaagataatctctatagatttaggaagggaattccaagttgaaacaacaagaggtttgaccaatgaatttaagctaaattgtttttacaagagatttactctctagtaatcaattaccaatggtcaaaatacttcttgaaatacttttaagatgtttttagatgttttttgaaaacatgtaatcgattactagtag

SEQ ID NO: 216090 - DNA, 447 bp, Glycine max
  unsure (1)..(447): unsure at all n locations
agcttctaacaacggattctctganaacttggtcttttttnctccaagnagnagaaaagcgacagatgcatgtgttcaatgggcttcactcccatcatctattgcaaagcttgggagggtaaatccctgaaaacactttttcttttacagtgttagctcttctgactctttgttgccaagtatatacgctgaatgctgaagatagttatatgcaatcttgtaatcctcattgacatgttttcaaatttagttgagggcgagccttggcatatcagtgaggttgctgccttatgacctgaaactaaaagtaatgggtttaactctcggaaacaaccttcttatatgcacggataaggctgtgtacatctaccctccccctctcccgagacccattatatgggagccttatacactagcgtgcctttatgtctatgaattctgctatat

SEQ ID NO: 216091 - DNA, 314 bp, Glycine max
aggaagagttaccttgtgtataattctctcctaagccgctcagatcctgccaaaggcttcgggatttgtgtcgatgcatattctcacttatgcaaacctcattgctaaacctggtaatccaatctgatgaggacaaattcaaatcaacatgaagattaattcccacatctgaccatacatagaactgaaaatacgatggaggaacttcagtagctgcttttattgaagaatgcaaatctttctcaactgaaggagcacctgcgactgctctgacaatattttggggacagattaacaatgtgctgtctctcatt

SEQ ID NO: 216092 - DNA, 391 bp, Glycine max
  unsure (1)..(391): unsure at all n locations
agcttagcctatagattcctctatatttccattctttgnacctgtcataccctaatttcgtccggggaccattatttgttggcatccgtaaagttccgcaacattctggaagtcaaaaagagcattgttgcgcaattcgtaaagtttcgcaacaatccagaaggaaaaacaagcattgttgcgtaatccgtaaggtttcgcaacattccgaaagaaaatgggtgtcgttacataatccgtaaagttccataacgtttcgcgtacttttattttcatttcgtttgttttccgtacccccttttaacgtgctttaaccgcttatctaagccgttttctcacctaataaatgataaaatgaatttaaacccgatcgttgcattgtaatctcatt

SEQ ID NO: 216093 - DNA, 360 bp, Glycine max
atctacatgcattgatgaccgcgttacacttctgtgcacgattgaacaatctgcacgatggggaccactctgtggattatacgtcccatgctaccaaccaacatacctgggaccttctgcgcaactactagaggccattgatcgagacagaaggcttatgctcgcaagcatcttcatcggtacccaccaatcgctaggcaaggaactcagccacaacataacatattgtgacctccaacaccatcatgtgcaatcaatggtggacgaatgatgacaaccctacatggtcgagtacttcacagcaacatcaacgactattgccttgttttccgaatgctgttggaccaagcagaccattcg

SEQ ID NO: 216094 - DNA, 398 bp, Glycine max
  unsure (1)..(398): unsure at all n locations
agcttgttacaaccagtattgtttgccctaccaagccattgttggctctaatagaaatcaaaagattttttgtttggctttcagactgactaacactccatcatcataaagatgaatatgcaatctcaacacttagtcttttctctcaaggtgctcaagatgttttgagagctgtacaagaacttataggaatatgcagagagatttttatagaaagaatttgaatatgagcgccttcaaaacttcttgtatatataggctttctttaacaaggattcgttatctctaaacagatagatctctttacttgagcttgaatatggagattatggccattggagcatttaatgctcgcattaaatgcacatatttcttcatgctgganaagcattctcttt

SEQ ID NO: 216095 - DNA, 453 bp, Glycine max
  unsure (1)..(453): unsure at all n locations
tcaagaanaagatggcctcagcaaattccttatttccttattggaattctatcaatagacctccaatctttaatggagagggttaccactactggaaaacccgaatgcaaatttttatcgaggcaatagatctaaatatctgggaagccattgaaatagggccttatatacccaccacagtagaaagagtttcaatagatggtagttcatcaagtgaaagcataaccatagaaaaacctagagatagatggtctgaagaggatagaaaacgagtacaatacaacctataagccataaacataataacatctgccctatgaatggatgaatatttcagagtttcaaattgcaagagtgctaatgaaatgtgggacaatcttcgattaacacatgaaggaactacagatgttaaaagatctacgataaatgcactaactcatgagtatgaattat

SEQ ID NO: 216096 - DNA, 382 bp, Glycine max
agctaggatatatatgttgagaggttctttatctgaaccatgacccattactaaccaacaagcgataataaatacttcttgttactacttattaaatgacaaatatactattggggtacatttattaattagggagagtgagtgtatttagcaattgccaaatggctaattaggtacaagttatggacccaaattttaccaattctaagtttctaacccaacctggttttagatcaaaatcaaataaatccatgtttagagtttaaaaacatgtctatgcttaagtagaacataggaatattatggctatttttacttgtcacattcactgagtttacgttaatactcatctgtgacaagatataatagaaatgtttgtgtg

SEQ ID NO: 216097 - DNA, 418 bp, Glycine max
taaagcatggtaggccgatgacgacgctgcacttgatttcttataaaaaccggcagatgagatatgtgcacgtgttgctggggaatgccctgtatatacgaatgggttagacacttgtttcaacacatttttatgtttgaatacatgagatatgaactgactaagtgaatacatttcatattgtggtacaatcacttgttatgatatatgataactttgttgacttttataataattatcttaaaagttatacttaccaagattttttattaggtgaccatgttaattttttatactaacatagcttacatgttaaactctttgtttattgtatgggatgctatattcccatttttatcatattctggtggcttgctcgctatgtataattatagaatagaaagatacttgtcttaac

SEQ ID NO: 216098 - DNA, 463 bp, Glycine max
  unsure (1)..(463): unsure at all n locations
agctngtaagctatgatggctaggtgcttctgtcccctacacatccgtaaatcatggtttacatggaccaattggggttagcagcccttgctatgtgcgtggtatcatgtcacaaacaatggcttggtgaatgagttttttgagaggtagcaccaggaggcatcttccttccagttgtccgttggagaaatgatcatcactctagatgatttgtcttgtctactgcacttgcctatgacacgtaggccccttgatcatatgccatcattctttgtcagagaggcagtgaagaccttgctaatgactcatctgggcattccaacagagacggaggctnttatggtggcaaacgcaagtgccatggtgaggttggcatggctagaagacctttatcaccgctacattgagtcangctcttatgctacaatgacttatctcatgcacttgatcaacaatatgatat

SEQ ID NO: 216099 - DNA, 390 bp, Glycine max
  unsure (1)..(390): unsure at all n locations
acactattaatactaacgctgtaaatacatgctcaccatttcattagctgttaatttactcctacccaccagagaattatattacttttcttataacagcattctcaaggatatgtatgagagacaacaagcaacgttgtccaacatgatacaagtttgatacaatttacctcaatcatttccaactcctcacgttgtangctgaaaaggagctttcttgatgactgagaatcctctatattagtactttggatttcaccagcaggcatcaacttttgaattgatgatctgattctcttgcgaatgcgtccctactcttctgtcaacttatttatgtttttggtgcgaagataaacatccatgactgttaatgagtcaacgaggggttaa

SEQ ID NO: 216100 - DNA, 128 bp, Glycine max
agataagtcccacctcacccgcattgaacctgccaaacgactcggtaggtggaatgaaacctattatcacttatgatgcccaaatgacacatctcacgcacccagtctgaagaggaccaacggagatc

SEQ ID NO: 216101 - DNA, 376 bp, Glycine max
  unsure (1)..(376): unsure at all n locations
agctntgaaaagagttgttttcttcttctcgctaagccaatctgttggcttagcgagtgtccgctaagcgcaacactcatgggctaagcacgaggaagactctggaagaagatgagttgtacaggtttgctaagtgcagcgcttcagtccatccgctaagcgagaaaggcacgcgctaagccaaaattcactaatgtgcgctaagcggtccataattgcgctaagcgcacgagcacaaacaaggccacctatttaagcctgaaatcagattttagagggggagtttggactgggattcaaagctttgcatgactagagattctagagagagaaaggtccaagttctagagagttttgagagattttgctgtgtgaa

SEQ ID NO: 216102 - DNA, 451 bp, Glycine max
ttgaagatcttggacgcaagatacgacaatgagattatgaatgatgcggctttcaaaagccaatgaaccgtgcagaagccttccggtcatattcgcttggttggtgcaaaccaaccggcgggcatcatgcaacagagaagtcaaatttccaatcatcattcagtgtaccttcaaatggtacaccttcactaaataattgggtcaagtcatagaatagggattggtcaatgaccatttttatcccataaacttcagaaatcaaagtgccttcttgaattttaagattagaatagaaggctttaactaattcataataaacaggcatatttaaagacatgaaaggaatgagattggagttctcaaatgcctgaatgcattcaaaactctcattggaaaagaaatccatgtcaatgaactttggatcaataatggaatgagaagagaaaatatt

SEQ ID NO: 216103 - DNA, 409 bp, Glycine max
  unsure (1)..(409): unsure at all n locations
agcttagaaacaatatactnggccttcgtttaattgtctttgggcttggcgaccacgatcaataaagtactttcggcacctactatatgttgacttgaccaacgctgttattggaatgttgcgacaatctttcaacaccttattcacacattctgataggttggttgtcatgtgaccatatctttgtcctgatgtatcgtaagccatgctccatttttcctttgaaatgcgatcaatccatgttgctatggctggactcaactgacgaaatttttctaagttttgatcaaacacatgcttgcaaggagtgtacactgcataaaatttgttaccatcaaaagttgtaggtagatatgaaactcaaattaacttcatgtataaaataaaccttacccaatntcttaaacat

SEQ ID NO: 216104 - DNA, 443 bp, Glycine max
  unsure (1)..(443): unsure at all n locations
ctcagctttacttatcatttaacccttaaaacttctcagccttcaatgtcatagataaagcaatattgatgttcaaaggacactttaaatccctttttaatcaaatgacctacacttagcaagttttggtcaatgttaggtacataaagaatatctgatattaatttggtacctgaacacgttgaaattgtaacagttccttttccttttacagaaatatagccacaatttccaattctgacctttgagacattagttggcttcaaatccttgaatagagtcttatcatatgtcatgtggttcgtacaaccactatcaatcaaccaacatttagaactactcctcatcgaataacatgttgcagaaaaaatataatctttttcctcttgctcaacaacttgggcatcgacttcttgctgttgaaattngtttttacaaattat

SEQ ID NO: 216105 - DNA, 479 bp, Glycine max
  unsure (1)..(479): unsure at all n locations
gtcacctgcggcatgcaagcttctggtgggacatcttgacttgctttcttatctgacattcaccacagattctgccttcttctattttcagattgggaatgcctctaacagcacctttgtcaatgattntcttcatgcctcttaagtgcagatgtccaaatctttgatgccatattttgacttcatcttctttggagaatagacatgtggaggagtaactggtttcttgaggtgtccataggtaacagttggcctttgatctgctgcccttcattagaacttcactcttctcatttgtcaccaagcattctgactttgtgaagtttacattgaatccttcatcacacaactgactgatgctgatcaagttcgcagtcagtcccttcaccagcagtactttgttcagactaggaagtccatcatggactagctntcccattccagtgatctttcctttagaagccatctccaatgtacat

SEQ ID NO: 216106 - DNA, 471 bp, Glycine max
gacacatataatactaagctgtctaagaggcttctttgataagctagatccttatcttttacactcctctattaactaaattaatgtccttaaaaataattacggatgaaaataacgcatcatataatcaaacatcaaacataattactaataatatatagatatatatatcaaggtgtgacacttattctttgaaactagacgcccgattttaccttatgacaacatgttatactattatgcataatagtggacacatactgaatatagcatgctagacgctagtttaatatagagcatactctctatagttgtggatgatatttaatgttgtaaattcctttaacataataatcatgtccacttgttgaaaactcattagaatatcaacaatttatactttctgttatacatcaaaatctaatgtggatgagacacatggtcatccagacttaacactaaggatatttt

SEQ ID NO: 216107 - DNA, 266 bp, Glycine max
  unsure (1)..(266): unsure at all n locations
agcttcagtcttcaatttcgagcgtctcttcttanttcgggactcaatcagacatccaagtaaaaagttattgtcgttggaatttgctcagagctttggtattcaatttcgagcgtctggatatattacgggtctcaatcagacatccgagtaaaaaagttattgtggttggaatttgcccacagcttcaacattcaatatcgagcgttccgatatattacgggactgaattatacattccaagaaaaagtatttgtcgttttaat

SEQ ID NO: 216108 - DNA, 433 bp, Glycine max
gggagctaatgcaaacgacaatgaaggatactcagattttctttgagtctcgtaatatatcgagaagctcgaaatggaataccaaagctctgagcaaattcgaacgacaataactttttactcggatgtcttattgagtcccataatctatcggaacgctcgtaatcgaataccgaagctttgatgcatattcaaacgacgataacctttttactcggaaatcggattgagtcccgttatatatccagacgctcgaaatggaatgttgaagctctgagcaaattcaaacgacaataacctttttactcaaatgtcggatagagtcccgctatatattgagacgctcgaaatggaataccgaagctgtgacaaatttaaacgacaatgaacttttacttggatgttcgattgtggcccggtttatatcgaaacg

SEQ ID NO: 216109 - DNA, 470 bp, Glycine max
  unsure (1)..(470): unsure at all n locations
agctttaataaaatacaacgtttgaatcactctttttcagcttaattaatgtcctgctaaataataaagcctcaaacgtcaatcgctatcccaaacaagacaatatgcatcatggtctcaactggttacaaccctttttgatatatatatttcgctcaaccatggcatatcgtgctttacttcaatcttgattcttgacaaaaggattctgcttatgcttatgcttctgcttcatgggcacaacatgggtgtgatataatatgacattaggctttacatcgaagtccctgataaaacgatccttcttccctgcagctgatgcttgtgaatcctcaacaaagtctataattgcttgtggcataagtcgctccttcatcacattcttccaataccatcccacgtctttccttgncagctcaatgtggcaatctattcacaatattcaaaggagcgtgttaacaattgttctc

SEQ ID NO: 216110 - DNA, 411 bp, Glycine max
  unsure (1)..(411): unsure at all n locations
ctatcttgtcatatggngatgcacatttgttctttgtctttctttatttttttctgcttctaaatagtatgccggacggattaaattttcacgacatttaaaattaatgcatggtggcgattatctatggcggcattaattatttaacatgtaatggaaatctaactaaatatggtatttaacaagcgaaaaattactacattaagaaaaaattaatagcagctattgggcctgattatctcacattttgttcaaactttgttagaattaaattacggtcattcagcacactcttaaattacggacaatgaaaaacatcaataagaccccctgcgatgaagcttgatgacgccattacaaatctgaatcgacttgccattttattgcccacatattatgccttatgctcac

SEQ ID NO: 216111 - DNA, 442 bp, Glycine max
  unsure (1)..(442): unsure at all n locations
tccttaagtcacctgcggcattgcagcttctatacactatactccaacacattaactttttattctaaccaaacaacccaaaatcatcataaaataagaaaagtgagtgagcttcccttatctacacaaacccaagattgactcttataagaaggaaggaaaatgagtgagctttgggttcgagagaggaactntcctctaatcccacaataaccaccgtacataagcatcaaccaaaccccaaagccaaccaaaaatagaatcaaaacctcttaaaatcaagctttttccttgaactttccatgggagctctataaaaacaaaaatgaagaatacgggaggaagaggataagctcaccacactaaggacaactatgaagttccaaccagaaggaagaagaatctcctttgaacaaatgcaccaaanactcaattgtaagga

SEQ ID NO: 216112 - DNA, 385 bp, Glycine max
atagtgtataacacatgcgttcaaatatgtattaaatcatattaccaatctgttttacatgtgtgttacgggtgaatcaacaatgtacactacatctatcccacatggcctataatcgtgcatgcgatacttatgcctccttataggctatatcatacatctcatctcagataaatatatatgctacttaagagtagctaaacctctaaatgtggacttgcaacactctcctgattaacttaacatgaataccattcatcatatacttacgataacattctcaatatttctacacataccatacttatttgtgacactctctcatatcttaattacgcatacacatgacccttggaaacattattcttaaaatgaacatgaaaat

SEQ ID NO: 216113 - DNA, 375 bp, Glycine max
  unsure (1)..(375): unsure at all n locations
agcttgtagggntaaagtctcacgattgtctcttgctcatgcaacaatggttagacgtggctatacgagacatcttgccaaacaaagtcaggttcacgataactcgcctgtgctttttcttccatgctatatgtagcaaagtgatttatccagtaatgtttgatgagttggaaaatgaggccgcaattatactgtgccagttggagatgtattttccccctgctttctttgacatcatgattcacttgattgtgcatctggtcagagaaatcaaatgttgtggtcctgtttatctacggtggatgtgcccggttgagcgatacatgaagatcttaaaagggtatacaaaaaatctatatcgtccggaagcatcta

SEQ ID NO: 216114 - DNA, 416 bp, Glycine max
actgtgtatcatattctcacagataagtctgtgtcgatttgaagtgtagagtgaagactatacgtattactgtgtttattttttctttttggtcatcagtattcagttatggaaagaactctaacctatgtgtgatagagagaaaacacgacgagggataaataaatttgagaattaaatcggaggttaaatagaccggaagagaatataaaatgaaatgattgcaacattatttggtaggataaaattaagagataaaataaatatgcatataaaataatataactatctctaaaataggatactccaatttgtgtatcacgcatcggcacattactttttatagatattgtattacttaaaacttttcttttgtgcaaattcacactttttttattttttttctttcacgttgg

SEQ ID NO: 216115 - DNA, 398 bp, Glycine max
  unsure (1)..(398): unsure at all n locations
atccttaagtcacctgcggcatgcaagctgtataaatgatcaactctcttantttatggttatttgtagtgttataagtattttttgttaagcataggtaataaatacttagtatttttcattttgtgtgtttaataatcattttctctcaatttcaggttaattaggcaagctttggaaagtgttgttttcaccttctcgctaagccaatcagttggcttagcgagcgtccactaagcgcaacactcctgggctaagcgcgaggaagaatccagaagaagatgagctgtacaggttcgctaagcgcacctgtcgcaacctacccttttgcgggtgagcgaggcaaggctcacgggtgcgtcttccatatgaggaaaatgcgcggagtcgccaccaac

SEQ ID NO: 216116 - DNA, 457 bp, Glycine max
ggacacttaaatactaagctgcttggggcttctatggagctgatcttgagcttatatgggtcctttaatggtgattttccaccatggagatgcagcggaagacaaaggaaaagaggtgagaggaggcgccatccattaaggaataagccatggaagaatgagcttcaccaccaatatgagccttggataagaagcttggagaggatgcttcaatggaggaaaagaaaaagggagagaaagagaggggggagcacgaaattgaaggaagaaaaagggagagaagttgaactttgagttgtgtctcacaagactttcattcatcaaagttacaacaagtgttacacatgcttctatttatagactaggtagcttccttgagaagctttcttgagaaaacttccttgagaagcttctttgagaaaacttccttgagaagctagagcttagatacacacac

SEQ ID NO: 216117 - DNA, 458 bp, Glycine max
  unsure (1)..(458): unsure at all n locations
tcgtcccggatccttnagtcacctgcggcatgcaagcttaagaaaggccaaactcctctcttaaaactgatttcaggcttaaataggtggctntgttcgtgcttgcgcgcttagcgcaactctggaccgcttagcgctcattagtggatttcggcttagcgcgtgcttttctcactcagcggatggactgaagtgatgcgcttcactggatgacccttcgctaagcgaacacgcacagctcatccttcttccagattcttcctcttgctcagttgaggagtgatgcgctcaacgcatggtttgctaagccagaagattggcttagcgagaggatgaaaatcagcacgtcacaaacttgcctaattaacctgaaattgagagaaaatgattattaaacgcacaaaatggacgtactaagtattattacctatctttaacaaaaattaattacaaaacta

SEQ ID NO: 216118 - DNA, 444 bp, Glycine max
tgatgttacgcgaagcctcacatctcatgctaagcgcattttgcataaaaaaatctgtgttgcagaaagcgctaatcgcatcctgtcacactaagccccatatgcttatgggactttacaacttcaagttgggcttagcgcaaagctatgctaagcgcttgggttttaaactcaaatgtcacgttggcacgctaagcgcaattgtgcgctaatcgtgccatacgattttcagtttttaaaaatcaaacgtagaggcactttgggtgttacctttgcacccaaacctctacaccttcctaaccttcaacacttgtgtattttctgcttcttgtgtactgtttctctgcatcttcattgcatcatttcaagaacaatccaagtaagttagtccatttctattgttatttttcattcttcaaaccttatgatagatgactctttttt

SEQ ID NO: 216119 - DNA, 468 bp, Glycine max
  unsure (1)..(468): unsure at all n locations
agctngcagcctgataaaatataagccatattttttctaatgcactgcanaaaactgaatattttctcttactcatacttttatgcaggcagattgaaatagacaacaaatttttggaagcacaacaaattatggactagcaatgcttgcagaggaaggtgcatctcttgtctcctttattgacttatgttattgctttttctagtacaacttataaacatgaactgatccgtttaaaaactttgttatgctaataatgatttggtagaccctctggaggatgaactgatcctatatttcttccctctctttattcctatatttctctttatttcatgaactaggaatacgcaaatctttagataatggaattgtagaatgtggaggagacacggtatatgtcaaatcattcacaattttcacattaaggccttctcttgaggatatatataaattttcttttcttta

SEQ ID NO: 216120 - DNA, 445 bp, Glycine max
tagtgattcccaataatcactatacttaactctgtggttttcaaaaccggtgtggatctctgattctttaaatggtctctaagctcatattcatgcaaggatgtcccattgtcttccccatcatagatgaaggtatccaaaatttcttctcgatcctatatgaaggtatctattattttatcccatcctagatggatatatctcatatctttttcctgttcaagatgaaagtatctcatgcatatttaattctcaaaataaaaatatacattatcaccacttcacagaagatgatgaccaattcacatataattacaaaacattattctacataactaccaaataaatactctaattccatacactctaataacttacaaagtcataccccatatcataatatcatgagtcaattaataattaactatgaaataaaacataaaca

SEQ ID NO: 216121 - DNA, 488 bp, Glycine max
gaccgggatccttaagcaccgcggctgcaagctgaagtacatgttgaccctttttatttgtagaacaaatcaaggtcttggaagtaggagtggaccaaagagagggagtgatgttgaagttctggtttatctttgttgggttcatcttcaaggcttaagtgaaaatcattatttcatgcctttcatttgaactgcttgatgatcaacaaagttaaagaaggtcttctgtttgagaggataacgtgttagctttagtttagtcacattactattgaagataaggttggtgtttttgtacttactaatccctttcaggggaagcgacattcactaatggctggcatgattttgttaggaataattcaaagttttaaaaagctgtaaactggtagttataagggttggttaagttggtttcttataaccaacaagcagttactattaacctgctatataagcaaggttcctactgtaatcaattgagaagt

SEQ ID NO: 216122 - DNA, 445 bp, Glycine max
  unsure (1)..(445): unsure at all n locations
tgcttaacacctttgaaatagaacatgtgggtctaacttcttctaagcgactttggaaatatttctaaagtcgtcttgccacatgaaccaaagctagcacaactttctctatgagttggtatttggtctcagtctcgtgttggactcaagttattaaataaattggtttttgaacttctccatgctcctaaacgacggccgcactcacaatttcattggagaccaagaggtatatgaccagcttctcctcgggatttgatttggctaagaatgatgttgtggctaatgttatctttgttagagatagggggagcaacataaacaacatgatgactaaagcttgaagcttggagaaaagcttgaagatgctttgtcttttacatgcacaactctcttanatggaaattgtattggttgttatattggatgttgcattttattccat

SEQ ID NO: 216123 - DNA, 408 bp, Glycine max
  unsure (1)..(408): unsure at all n locations
agctaggagcatatgattcagatgttcctccttgangaggagtgttaaaaagtttgtgtatttttgtatatcgtaactattgtagttcagctttattgacgggacaactgaattgcgttagtgtaaacagctgtcttcctcccttttgtaccctatatatatgtttaatagagagcaatgaaaagtgcggtgaaagtgtgaaattccacacaaaattcaaacttcatgtaacatctaacaacatatgaaatcaggaacacccaacaagcctgtgtggaagaattacagctgcagaacataaataatgttctgccaatttactccattgcctaaccaggtcatatagaagtaccattgcaagccttcttattccctttattcaaacaacttaaatatagtatcttcttt

SEQ ID NO: 216124 - DNA, 246 bp, Glycine max
aaataaaacgcgttgcagaaagcgctattcgcatgctgtcacactcatccacatatgcttatgggactatacaacttctagctgagcttaacgcaatatctatgctatgcgcttgcgtttttaactcaaactgaaccttggcactctaaactcaattgggcgctgaaacttcaaggctatatgtaaatttgatatacaaaaggttcaagcactttgtgagtgactttgcacccaaacctctattcc

SEQ ID NO: 216125 - DNA, 379 bp, Glycine max
tcttaaattctcacctatttatgcacatccctaaaactgggagttgtgacattttctcttcggcatgagaaatatccctcacatgtatctgtttctttaccgcatatcccaaaatctatcttatcgaaaaattgtttgcgcacttgttaaccgttggatcgtttaatcattcgaacaccgtgttgagaattcatatgcgcatatcttcaaccgcgggattagtcaaacttgaatatggagagagaaacgtccctcgcatagatacaaagaaatggagcctaatatcgattctgctactatctaatgcttggttacccttacggagcactccatgcacaagttggagactacatactcaacacctggagatgctactatt

SEQ ID NO: 216126 - DNA, 468 bp, Glycine max
  unsure (1)..(468): unsure at all n locations
ttaagtcacctgcggcatgcaagctngaagtgaggaagtgtggaagggtgaatcttcctacttttattcgttgaccacatagtggtacctggagatatgtcgcggggttcaggagacctcggggacgtcaggtggggtgctattgcccaaaatcaagcttgaccaatcccgacccaacccgggcatagtcagttagtgagaacctgtgatgtacctaaacaagcgagctcctggcagtcaaccgataaaagaactaagaccataaagcaaggaggcttgtgtggtgtctggccagctatggattttgagtgatatctggaatatggcctctgttaatcgattacaaaggatgtgtaatcgattacaaggcttaaaaatgaagacaggaagttaagatggcctctggtaactcgataccaggcctaanaataggatcaggaagtcgagatggcttctggtaatcgatta

SEQ ID NO: 216127 - DNA, 397 bp, Glycine max
tgacaacacagctttccttgtcatacataaagacatgcgttcttattttgagtgtatcaactatacaaaagttatcacattgctaaccttttttttaatgtgggccgtattaattttcttctgaaatttggacttgcttaatatttttttaatctttaaattctatataaatcctctaatttatgtggcttttgttatgccgactaccatttttagttgtaaaacatgttgcaattattttttgattgttatgttttcaatataaactttgtgagtatcaaaaagttattagatggatcgaagttgaatgaacgcaagtcacatgaacactgcatatgagatatgtgtgaaacaattcttgcaattcgcttcccgaaaaaagtcgactgaatgagga

SEQ ID NO: 216128 - DNA, 276 bp, Glycine max
acgcgctgcactttcagcctttgggggttctctctcggctacccaggagacctcttacttttctttctcgtgcttctggtgaaacccttgaagaccattactcaaattacctctaaactttaagcgcttctatatgggcagggggacaaaaagacagcaaggaaaaaagatcagttgtattgcaagtcagcaaacagatgtttacaggttctcacctcatgaactaataacttttcactactaggaatcccaggctagcgctttagacctggaaag

SEQ ID NO: 216129 - DNA, 366 bp, Glycine max
cggtggtcctgtctcgatagacaacatatctgtatacacctctcctgcatatgcgtaatgcagtccccatagagaaatatgtactcttcatggcacctttattgcttctgaatatatgaagaatacatcttcccttagtgcatgagatttagcagaaaaccactaatcattgttccattatccatatcgctttcacaaatttgataggctctgagagccctatctgatagttcagtatttcggctgttatggaaatgatgcctatggctgatattaagtgcatattcctgactttgtcgatcttttcttataagacattctttgggaggctacatatttgcctaccatatctgattgctactgcat

SEQ ID NO: 216130 - DNA, 462 bp, Glycine max
  unsure (1)..(462): unsure at all n locations
taagcacctgagctgcagcttggaaccagttgatctatgacatctctgattttaatgagnggaaaatgagtgggattgtttccaccattacaaaatggatgtgttagataattggtgcatgcatatgatgtctacacgacatatttatgaaatagtggatttgtttgaaatactactaatcgaaatccttttgaaaaaatatggaattggtggaatcaaaaaaggattntaattccactactttgtagtgtattggtctttcaacaaattgaagaatctctaaggccacgataaccaactttttatgtggcaagctaacctataatttaaagacaggatcactccatatatgaaatggaaataggaagagcacaatgatactacaaagctagcttggagtagtgttgctatttccctctaattactttctaaaaaccatctttatatattaaaacctaattt

SEQ ID NO: 216131 - DNA, 273 bp, Glycine max
ataaaattcacctgcttacacatgatgcagttgacgccgaatgccacatcgccgatgggccacttcccgagagtctcggaacacatgaaccttataatctccgacagcgtgtcgatcgactccaacagcgtagacggagcctgcgcctgccgccgagaaagccttctccggcgaaccgatctggttaatttcggcacctgtccgacgtgatcctttccatcgtcatcctgcttccgctccatgcaactgctatgcacgtaatagagcatcacc

SEQ ID NO: 216132 - DNA, 374 bp, Glycine max
caggtgggcacccgttgtcccttccctctcctccatgcccacgtataaaatcgttgtacgcgttttatacacgttcgatgcgacgcccgtaacgatcacttgattatcaccatctatgtcacatatatcactttctacctccaaatatattgttcgttacgaatggacgccagttcctgatcccgctacaagatcagttggcttgttcacaccgaaacctcccatccagcttgcatgaccatctacgtcatgatggatgtttttcctgctgatattaattgccctgttaatgggactgataccacgaagaaccgaaaaatttgggttccctgccgtgcgggtttgacattcaaacgagtgtgacttgcgtctgg

SEQ ID NO: 216133 - DNA, 470 bp, Glycine max
  unsure (1)..(470): unsure at all n locations
agcttctggtgggacatcttgacttgctttccaatctgacattcaccacaaattctgccttcttctattttcagattgggaatgcctctaacagcacctttgtcaatgattttcttcatgcctcttaagtgcagatgtccaaatctttgatgccatattttgacttcatcttctttggagaatagacatgtggaggagtaactggtttcttgaggtgtccataggtagcagttgtcctttgatctgctgcccttcattagaacttcactcttctcatttgtcaccaagcattctgactttgtgaagtttacattgaatccttcatcacacagctgactgatgctgatcaagtttgcagtcagtcccttcaccagcagtactttgtccagactaggaagtccatcatgagctagctttcccattccagtgatctttcctttagagccatctncaaatgtcacatagctagt

SEQ ID NO: 216134 - DNA, 397 bp, Glycine max
  unsure (1)..(397): unsure at all n locations
ctggatgcgttggtcaacttggtaacctttctggccttgaatcataaatctgtacctgtcgcaagggtntgtggtttgtgctcctctgctgaccaccatacagacctttgcccttccatgcagcaacctggagcaattgagcagcctgaagcttatgctgcaaatatttacaatagacctcctcaacctcagcaacataatcaaccacagcagaacaattatgacctttccagcaacagatacaaccctggatggaggaatcaccctaacctcatatggtccagccctcagcaacaacagcagcctgctccttccttccaaaatgctgctggcccaagcagaccatacattcctccaccattccaacaacagcaacaaccccagaaacaaccaacag

SEQ ID NO: 216135 - DNA, 387 bp, Glycine max
agtcttctattccctggacatcatgatggaaatcatttctgtactatatggtgatctggcgaaagacatagccatatctaagaatagcatctttaatttcggcattgagactagagaaatcgaaaataatagttacatttgcaattccattgttatattccaaagtgtaaccaaaagaaactaaagtcattagtcataacaaaaaacttgtactattgtccatgccaaatgtttatgtcgagaacaagctagacggcagaggcaaaaattcaaagcgtaatttcaatttctaatgtctaaacacaaaaccaagacctcacaaaaaggtaacaaaagcatctaacactggcctatagaggcttcaatatgatgcggttttatcaaact

SEQ ID NO: 216136 - DNA, 500 bp, Glycine max
  unsure (1)..(500): unsure at all n locations
gatccttaatcacctgcggcatgcaagctgcatatctgtctggttcatatgttgtactgacatcatnngngnncgctggaaccatccctaatgctagatgcattctttcttttgttattagtcatttgtcattttgaaatcaatgctaaccatatggagtttgatgctttatatcctcagtttaagttgatgtgacttcttaccagctaataaatactacctcttctcaaagtgtctaggtaattctataacaggttatatgcactaatactcaaagaacatgtattgtgcactgtcacattgtgcaattattcttccaatcaaagagcagcatttcacatttcatagaatcatccgtagtgtggagaaacacttctccctagcttagaatgtggcaccctaaataacaagcatgngtggattgtgtcctcggatgatataccctcttgtccttcatgctcatatgactatctttcctcaatacaacacaggttctgata

SEQ ID NO: 216137 - DNA, 407 bp, Glycine max
gacactatatataacttacacttgagatgtattacctatgggcaccatgacgattcccacttttataaaaacgatgaccttgccaacggtattcctgtttaaatgttaaacacactggagagcaaagcctgcaaatgttggtcggtggtacaactcattggaccatttattaacaggagataacgcaacgtatccgatatcggtacttgacttgaaatactgtcggcgctaatgagaccttaccagtcaagcgttaatcgcatgattctcaaactcgagagaaaaaatatatagggacaggttcctaagtgacacgtctacctcaaactatccgaacgttgctcctatggcctcgactgtgaacccaccttgaaacataccataacagtattacgtgttcaggaagc

SEQ ID NO: 216138 - DNA, 475 bp, Glycine max
agcttgcggattaggtcttcgtatgttaaggatcgaagcgggtctgaaaagaggcaactttgatcatcctgctttgatgaataagaaaactggggcaaatgaagaggatgagaatgacccatgttgtggctgccattcctacatggccaaacttcccaccagcccaacaatgtcatcgctcaaccaatatcggcccttctcattacccatcacccaatcatccacaaaagccatccccaaatcagccacatgcctgcttaccacacgcccaatgcccaaacaccacctatagcgcaaaccaaaaaggaattttgcagcaaaaagcctgtaggactcaccccaaattccggtgccatatgctaacttgctcccatatctacttgataatgcaatggtagccataacccctgccagggttcctcaacctccatttttccgaggatacgactcgaatgcaacatgtgcatatcatgga

SEQ ID NO: 216139 - DNA, 428 bp, Glycine max
ctataaacagggggagaagtgatgttgaaaagggttcagcccctttgacacttgtctctctttcgaatttgcttagaaaaattgtttccgtgaagaaaatccaagtcgaggcgcttccgtaacgtttccgtgagcgatttcgcgaaggtttttgaccgttcttcgacgttcttcattcattcttcatcaggagtggaggtgaatctgtgatcatgctaggtctctgacttgcttgattacagtgaaccctcatctagagcttttctctttgaaaacttattgttgctagtagtccctactgctgcaatatgttcttcaaaggggatgatacctctagagaccatcaagagagatatgaccaccttgggggttatcactaaaagcctagttagctctctcccttataggtcccttaaatatgggcacgg

SEQ ID NO: 216140 - DNA, 365 bp, Glycine max
  unsure (1)..(365): unsure at all n locations
caatgaactccacattgtccttgaatatctggaaacgtttttccttctctgcagcatccttatacattttancatattgtgccatccaattttcatgtctttctcgcaaggctgtttgatgcagcttgcggggcatcacttgggaaatcccacctgcaaggaaaaggaatagggctaacatgtgttgcttttggccagcgaaagccatttcttaattatcagcaatgatcagttttgtaagaaaaggcttagttggtatattgtgttaaagagagaaatgtgaattgttatgcattgaaatgaatgaatctggaggtctatataaagatcatagtaccttatgttatggaattattaacgtgaat

SEQ ID NO: 216141 - DNA, 389 bp, Glycine max
cactctgctacggttgcagacattgttgtattgtgacgggataggagcctctaggctactggctctgtgcgatgaacatttctttctctacgtacattattttgcaaatcccgatcgagggaatgtgagataatgaatcgcaaacgtttacacgaatttgagagataaagacgggagagacgtatcttaaaatgtaaaaaccgatctactatgtctctattgaaagttaggacactctcaacctattattaccctattgttcgttattatattattttataaaaagaaactttatttgactcgtttataattgaatgaatataacactcttttttattatctaaaaacagatatgtattctattgatcggaaaacaatattttaattaa

SEQ ID NO: 216142 - DNA, 380 bp, Glycine max
ctgagcagaatcaaacgacaataacgtgttactcggatgttcgaatgaatcccgcgatatatcgagacgctcgaatttgaaaatgaaagctctgagcaatttcaaacgacaataactttttactcggatgtccgattgtgtccagtaatatatcgagacgctcgaaattcagaatagaagctctgagcaaaatctaacgacaataactctttactcggatgtccaattgtgtcccgtaatatatcgagacgctcgaaattaagaattgaagctctgaccaaaatcatacggcaataactttttacccggatgtccgattgtgtcccgtagtatatcgagacgctcgatattcatatatgaagctctgagcacaatcaaac

SEQ ID NO: 216143 - DNA, 382 bp, Glycine max
caccccacctgacgttcccattgtctcctgacccccgcgacatatctgcaggtaccactctgtggtcaacagtaatagcaggaagtttcacccttcaacacttcctcatatcaagcttgtagaattatggggtacccatcacatgtggtactaagtggcggtcgggcgatggtgcacaacaaagtgttccacatccacaatgcgcgcataatcccaccatcccctgttgcccacctgcaactgagctcacgtactcccacgtatcccatatcctcgtttctctcaacaccgggtgcccatcaatcctcccaagcttccacaacatccaagcataacaacattcacacagctcaagctatcacaggcaagcaaaacatagcaa

SEQ ID NO: 216144 - DNA, 466 bp, Glycine max
  unsure (1)..(466): unsure at all n locations
gtgattattatactcccctgaggcatgcaagctttacccaaacaatanaattgttgtttactcacacaacaaaccttattgtgtgggaaaaacactttagaagctaacaaatcctctaactgctcttttgagttttcctacccaccaggttttgtaatagacaaactcaaattcacctttttttcacaaaggttccctacacttagggtgattaaatataatcttttagatggacacaagattggctctaatcctagagtgtttggcaaagaaagactctatttaaaaactagagtttcactcttaaaatgctcaattttttttaacctaattttcatttggtggtttctcttccttgcaatgttcttttgagaaggaagctctttttataagctttcaactagtcatttatgaatgtgggaggaacttaaatatatcaagtgctgatgagtatccttttactcat

SEQ ID NO: 216145 - DNA, 339 bp, Glycine max
cctatcaaaggcttttatataggcttgaaccagcctcttcataagtctggtctggccacggagcccttttaaaatacttcgtgcacaataaatatccaatattttatggagtaggaacccaatatgaaatgtgaagaaaaaggaaaaacaactcaaataatgaggaatataaaagggcacacgagacacacttaaattgcaactaaagtccttgagtataggaataaaagttatggagcagtaatgtgtaatcaaagtctgatagttcaaaaaataattaattgttccaaaacactatattatatagtgctccccaaaaatcatacatatctatatata

SEQ ID NO: 216146 - DNA, 454 bp, Glycine max
  unsure (1)..(454): unsure at all n locations
acctgaggcatgcaagcttctcggctcatactgggaacgcctctatttcaacatccctgcagcctaaggcacccacccagagggaaactccccaagttccaactccgaacacaactcaaccggccagtaattccaacacgacaaggaacttccctccgaggccatttccagaattcaccccactcccaatgacgtacgaagatcttttgccatccctcatcgccaatcatttggccgtggtaactcccggaagggtcctcgatccccctttcccgaagtggtatgaccctaacgcgacctgcaagtatcatgggggtgtcccagggcattccgttgaaaaatgcttggcccttaaatacaaggtccaacatttaatggatgctggatgactgactntccaagaggatcggcccaatgtgagaaccaacctgctcgccaatcatggagggggagc

SEQ ID NO: 216147 - DNA, 444 bp, Glycine max
gtcacttccgcagactttgactctaagaaatattccttcttatactttacaacaacttcttcccatgttttcagactgttacccttaaatgagtggagccaccttttggcttctcctaccaaggaatatgaatattgactaagtctaatggcttcatctggcacacctgcaatctgtatagtgttactgatatcaatgaatgttgccaaatgtgcataggggtctgttagtcgctttatacaactaactttggtatagaaatcattgtccaaagtttgtatagttccccaatttatggttattttgtagtgacttttgtaaataaatcttgttttatggttaatgttgactctagaacatgtccattgcatttaatgatgaaatttatgcattatcaggtgaaaaaagaggctaagtttataattgcataatgtagcaattggg

SEQ ID NO: 216148 - DNA, 422 bp, Glycine max
  unsure (1)..(422): unsure at all n locations
ttaagtcacctgaggcatgcaagctntctcgggccattcctgcgaaggcaatctttnggaaagnntagtttagtgggacattactcttaaagcaaaaatggcatataacctcctcccataaatacaaacatcaatgtaaatttagagcaagcttatgcgccttattccttacaaacgttctcttgcacaagacatttaaccgaaaaacatgcgcccatttacaatcaaggcagcttcgttacctagattatttacacgtacctccaaggtgtatttgttacttacatcacacacatctccttggctaaactcacatacatgcatactcaagcattgtggggcaccaaaaattgcacatgtgcacatcttggcattactaatacctacatacgcaaacctcatgaggaatcttgactatgtac

SEQ ID NO: 216149 - DNA, 300 bp, Glycine max
ggaggtgtgttctccatcgaactgcatcatgggtggagttctcgtgatggagtgaaacatagcatccatcttatgaatcataatgaactcaaaaggactccctcgatgtgcaagctgtggcggtgctatagcattaacatcttggtccatctgttccagaggccggactgctggctctccaatgatgcgacactcatggtgggcaaacctctttccatgctgcttgagaatcctatcagtgatctcactaatgctttggtgaaacgcactttgtgatggatacatcgacattgaattggc

SEQ ID NO: 216150 - DNA, 452 bp, Glycine max
  unsure (1)..(452): unsure at all n locations
tgaggcatcgcaagcttgcttccacaatctccagccttttgatgatgttttacctgaaatcaatagaatacatgcaagatttgttctatcgttcactcatctctttctccccctttctttttgaattcatgcttaattttaagttaagttaataattggatgaattcttgattnaaataaccccaaatgttttctccccttttggcatcaacaaaaaggccaaagtgcgttgtaacaaatggataaacatacaagaaatgtattcatactagaaaaaaggagaaacttataaaaatcaaacaagataataaattatccacaaatcataataaaagcatatgtatcaaataagtcataagttatcaaaacataaaacaaatcatttgtctaagtcactagcatctagaagtcctaattctcttctaatggtgtagaaagaatctttgggtaat

SEQ ID NO: 216151 - DNA, 407 bp, Glycine max
  unsure (1)..(407): unsure at all n locations
tcatgatgatgaatcaagtcgattcaagaaggtctgatgtttaccaagatgatgacncatagtccaaacgatgatttctagaatgagtcatcaagttcaagatcaagcttaatttcaagtttcatgagaagaaatcaagaagattcaagaatcaagagaagattgagttcaagattcaagaaaagaagaattcaagattcaagagaagaaatcaataagacttcacaagggaagtattgaaaagattgttcanaaaacaagcatatcacaattttgtttttaaaaagagattttctcaaaattttctaaagtaccaaagtttttactctctggtaatcgattaccagtttcctgtaatcgactaccagtggcaaagtttgatatcaaaagcgtttaactgaatttgc

SEQ ID NO: 216152 - DNA, 362 bp, Glycine max
tggtgaacatggaagaatgaattggcatatgctttgcatggtcaatcaccactagctcttggcatacggctcaacgtttacgcatcttttgacccttgtaagtctacttcggcagccgtgtggaacgatcaacctaacgccacccaaagggtaatgttgatgtcaccaaaagcataataaatggtatgtttctgtagactccaaaataagtatagatggcctctgctgtccgaacattactaggttacattcaccacgcacgctagttgggatttgtcataaaaatacgcgttcgtaaattgaacctcagacagtgttcagttactccattacttatagcactatgttactgtgccataaag

SEQ ID NO: 216153 - DNA, 381 bp, Glycine max
  unsure (1)..(381): unsure at all n locations
cctgaggcatgcaagctntgagaagcatgtgatcctttggttttnctatttattcaactagatcctttgtctacagtatctaagaagagatcctaggtcgtctctcagtgagcaatgataaaccaaacgttcataacatatgttaatcaaacagtaacgaagtgggggggttgcttttgtaaattaaacagcacgcaactggaataagaaaataacagaattaaaacatgttgtttccccttgattcacaagcaagtcttttatcctcggttacgaaaatttatccgtaatcaggtcaaccacttattccaacccgaaattaatttactaaggcaaaattaacataaggctatcattatgtgattaatcaacacatacacc

SEQ ID NO: 216154 - DNA, 166 bp, Glycine max
gacactttaatctaccctgtggctatgacgtgaagacgtgtgagccttagttttatgaagctttgaaggacaccactgtgaaaaattataatgagggatgaccatgagacgtatcatcaggaaacataaaccaatcattgctgcatgggattatattatcacactg

SEQ ID NO: 216155 - DNA, 477 bp, Glycine max
  unsure (1)..(477): unsure at all n locations
agctntgcgagattcttcacggaatactttacggaaacgtttcggaagcgcctcggcttatattntcttcacggaaacaatttttccaagcaaattcgaaagagagagaagtgcctaaggggctggaccccttccttcttgccttcctcccctatttatagcaaaataggggaggtggttgccgcccagctcgcccaggcgagcagggttgcttcctccagaagcaaccgccttctggaggaatcttctggagggcccaaatgggcctgggtgctatttgcacccccatttttactaagtacacccccctctgctgtnttttggtgattctttnttcgtaaagttacggaaacttacgaatttcgtaacgatacttgttttctttccgtaatgttacggaaccttgcggattacataatcatcctctttttgacttacggaatgttacggaacctcacttaattatgcaacgatgct

SEQ ID NO: 216156 - DNA, 412 bp, Glycine max
  unsure (1)..(412): unsure at all n locations
tacaccacggnggtcttttactagaagtgggcggttatcttgcaacgaaagatatgtaaaggcggatctgtgttatggatataacaacactggagggtgccaaagatggcatgatttaccaaagtgtaggaatcctggcgatttgtttgtgaaaaagactcttttccccgattatgaaaatgtaacttttgaaatgaatccggcttttggctacagtgattgtgaggccagttgctggagcaattgtagttgcgatggattcagtgcattatgggttaatgaaactggatgtacattctatcattggaattcatcgaaaaattctgttgacactagtgttgctggtgtatagctttacatgctggataacacatgcgacataaccccgcataacggtaagtcttatgtcaac

SEQ ID NO: 216157 - DNA, 359 bp, Glycine max
agcttgtctcagcgtttatgcgagacggttactttcatgctagctatcatcgccaagtaccaagaagagttaggtctagccatggcccacgagcataggatcgcggacgagtatgctcaagtatacgcagaaaaagaggctagaggaagggtgatcgactctttacactaagaggcaaccattgggatggatcggtttgctcttaccttgaacaggagtcaagaacttccccgcttgttagccaaggccaaggcgatggcggacacctactccgcccccgaagagattcatgggcttctcggctattgtcagcatatgatagacttaatggcccacataattaagaaatcgtaggaaac

SEQ ID NO: 216158 - DNA, 443 bp, Glycine max
  unsure (1)..(443): unsure at all n locations
tagaatgcaaaagaagaagaagaagcaatcaatntaactgtgttcttttaaatgcgtaagataaaattgattacaataaaataaatgagataagggaagagagaaatgcaaactcgatttatactggttcggccatttcccgtgcctgcgtcaagtcctcaagcaacccacttgagattntcactaactttgtaaaatcctatttacaacttttgaacacccgaggaatccctttcccttgtgttcaggaaacttcacaattcaagagacaaccaatctcttgattacaactgactttctgagatgaacagaatgatttctctcctttagagtggatgatacaaattgaagttcctaaatgaactctcaatagatttgtaagtgtttgccgaagatattttaaaagagcatatggcaatgaatatctcttagaatatctctct

SEQ ID NO: 216159 - DNA, 470 bp, Glycine max
  unsure (1)..(470): unsure at all n locations
agcttaagaaaacttcatatgcatacattattgattgtaaaattctgtcagttatttgttaaagtattgtcggaacgtaatgtgaaaaagaacattcaatgtgctcataatactatgatttattatctttgagaaatttaaaacttgataaatttgaatggccctgttcatcactcatcaagcaccagttcaccttccagggcattcattacccatgcaccaaataaacgcgttatactaaatagaaagctaacgtagtttttaattttttttttcacttagttgttttttctttttcttcatttaataaataataataaacttaagactaccaacgggaacgagaatattctaacttaactaatcatttcgaattaaaattttaggttatatttcacaggacattntgattactttntaatnntttttactaatngaaaaatttatttaagtatttgataaacaaaaac

SEQ ID NO: 216160 - DNA, 479 bp, Glycine max
gcaagcttgagccaaaatcccaactcaccatattctgtgacccagggtgagaatgtccatcctcgcccttggaagataacaaaacaaaagataaagaagttcccgatcaaagatcagaagaaaaaaaaagaaaaagaagttctcgatcaacgatcagaagagagctaaagaagaaaattcccaattgtcgcaacctacccttcggcgggaggacgacgcgagactcacgggtgcgtcttccaagaaaggaaaacgcgcagagtcgccaccaatgtttattcgaagaaaacgtcgaaaaaacagaaaaggcgtggtctatgaacttaagtgaaaggttcgagagttgtatttacgtacggtgaaggtattagcaccccacacgtccgtcacaaaggacgtcagcctttaaccaagtgtgcaaatatgacttcaattcatgttatcttccctttgtttacgttcttatgtcttttatgcct

SEQ ID NO: 216161 - DNA, 403 bp, Glycine max
tggaagaagaagataaactgaacctctctccctcaatgttgtacttgtgaaaatggaggaatgacggcttcaattttttttcttcacaatgaacaagaagatatggcatatgtttcaaggtgacaagacttattgacacttgaatgaccccttgcccagccatgttgaacatgccacttaatgccacaaaatgggtagttttgctttttgcacaactataaaaaatggaaggtataggagttgccaaaaatgggtatttttgttttttttttatcaaaactagtaaatcttatcttaattgcctacgttattgtgttaatttttctaagaatacgtgtacctagagtgaacctcacacggagttcaattacactatcactcaatgcacaatgtaattttgcta

SEQ ID NO: 216162 - DNA, 427 bp, Glycine max
agcttcttatccaaagctcatcttggtggtgaatctccttcttccatggcttattccctagtggatggcacctcctctcacctcttctcctttgtcttccgctgcatctccatggtggaaaatcaccattaaaggacatcattgaagctcaaagatccatcctccatagaagccccacaagcaagcttccatcaccagggattttcgacaatgacaaaagaacgttaaggagattggctactggtttctttgtgagtggtaccgtcttgtacaaacgaaaccatgacatgaccctcctgcgatgcgtatatgccaaaaaggcgaactacatgattgaggaagtccatgagggttcgttcggggcacatgccaatgggcatgctatgaccaggaagatccttagagcaggttattactggctcactat

SEQ ID NO: 216163 - DNA, 434 bp, Glycine max
ttgtatttggaggcctttcgtgacctcagccagatctttaggtacgcctgatgagtggctgctctagtgcatatgtacgaccagctgaacgatgcctctatcatcatcagtcgacagcttggcggttacatcacactgctgcaggaaacaaacatatttttctttcgttgaggttcaacaatgttcaactttaaattttattagactttcattattaatgtttatcattttgatgttacctctgcagtgctggatttacgagcactttccctcagtcacggagtccacttctgatcatgactacaatgatgattccccgcgtgtatgtatgtggattgcgacgaagaagactgtgaagagcatacgtacagtggcgtacaatgagcgcctggaccgactctggattccggatgtctgttggatcccgtatgggg

SEQ ID NO: 216164 - DNA, 387 bp, Glycine max
tgagatgaagaagtgtagaatggtggaacttcctgcttttattcgttgaccacagagtggtacctggagatatgtcgcgggggtcaagaaaccttgaggacatcacgtggggtgctattgcccaaaaccaagcttgaccatatccctacccaacccgggcatagtcagtcagtgagaacctatgatgtacctaagcacgcgagctcctggcagtcaacagataaaatgaacatagaccacaaagcaaggacgcttgtggtggctggacaactgtgaatcttgtatgatatatgggttatggcctctggtgtttgattaccaacggtgggtaatcgattacaaggctgaaaaacgaaggcaagaggctaagatggtctctggtaatcg

SEQ ID NO: 216165 - DNA, 463 bp, Glycine max
gcttgaattcattctatgcacccgtatgtggttatccttgctttgcatgtcttcatcttcatttttctaccatcggtgatctttttctttgttttaagccagctttgaccgatcatttaagccgtaatctcacttaatcactactaaaatgaatttcaaccgatcttttgtgttggaatctcgtttaatcatcgttaaaataaaattcaaccaatcgtttgtgttgtaaccttggttaatcattgaaaaataagtttcaactggtcatttactttgcaagtcctcttttaatgagttggaaaataaccaagtgaaaccaaagctaaaatcaactcataatcaagcttttatcaacaagaaaatcgcttgaatctgttcaaagggccaacgccttaatgaatctttttacttttataggttaaaacgaaccgtttagaagtctaaaatcaacactccccataac

SEQ ID NO: 216166 - DNA, 362 bp, Glycine max
acactggtaatcgattaccaaaatattgtaatcgattacaaaccttttgaaaatatttggaacgttgcaaattccgtttgaaaactttttcaaactcattttgctactggtaattgattacaacaatatggtaatcgattaccaaagagttaaaactctttggtaaaagttttgtcaaaaactcatgtgctattcaaagttttgaaaaaactttttaatacttatcttgattgaatcttttcttcactcttaaatcgtgagtcttgaatcttgatcctgattcttgagatcttgagtcatgattcttgattctaagctttcttcttgaagtctgaattctccttgattcttgaactcttggc

SEQ ID NO: 216167 - DNA, 441 bp, Glycine max
  unsure (1)..(441): unsure at all n locations
agcttctatggaggttggatctttaagcttcaatgatgttcttcaatggngattttccaccatggagatgcaacgaaagataaaggaaaagaggtgagaggaggcgtcatccactagggaataagccatggaaggagaagcttcacccccaagagaatgtcttggataagaagcttagagagaaaacttcattgaaggaagagaatgagagagagagagagagagagagaaagtgacatggaaaattgaaggaagaaagggagagaagttgaactttgaagtgtgtctcacaagactctcattcatcaaaattaccacaagtgttacacatgcttctatttatagcctaggtagcttccttgagaagttagagcttatctacacacacccctctaatagttaagctcaactctttgagaagctagagcttatctagacacc

SEQ ID NO: 216168 - DNA, 398 bp, Glycine max
  unsure (1)..(398): unsure at all n locations
ctctcccaagtgctatatgacatgttaagctagtatgttctcactntaacctccatttaccacagaatgcagacttagccttgcaactctcaaagcctcactctttntccactcataacatcacattctcactttctaaccctagggtagttctacccttcatctctaacagttttccatcagcaatttagcatgtatacatcaccaacatcatcacaaaaaccctagaacagaatgggtatgtttaactcattcaaacatggcaatttcaacaagctttcaacaaatgtcttcacaaatgatcatcacacagcagaaacctagctagactacccatcatatctgcccaaaccccatacccacgagaatcaaaggagaatgaagtccacccaaacctg

SEQ ID NO: 216169 - DNA, 449 bp, Glycine max
agctggttatgggagcagcatctgataagtactatttaggtaagaagccaaataaatccccaaccatattatggttctgttcatttctacaggaaaattgatgatgatattgcaagaaatattaaagatggtagtattttgtaagaaataggataaataaattactatatctgtggactcaacatgcaaaaagccatacttctgggcttgaaacttctcagcaaagcatgatataccttctctgttttcaataatgagttcagtgactttctagctggatctatatctctcccctttgattctattttcccctaaggatgttatagatgtatggagcaatcatgttccgttcccaatccatatccactgtgaacttagcagaaactgtttcttttatatgttctgatggtaactaattatatcttgagagtttgccaattgttatatcc

SEQ ID NO: 216170 - DNA, 357 bp, Glycine max
  unsure (1)..(357): unsure at all n locations
ngctgcggaatcaagagctgcatagagatcatgttcatttatgacctccttcatccagtctcttataaccatactcgtgtgaattgaacttaccgaattcctatagatgacaccagttatctgggtaagaactatgatgatgtgcccgagatggattgctaacaccaattatcagaaattactctggcgtgcctcaaatgaaccaaagtccaagatcttccaagttcgatcgatactccagtgtggttgaaacacaatgaaaaatgattaaacacatgtaaaaaccaccttgatgcgctcactttagtgtttacatgatacaatgacactagtgtataaggataaatatttgggaat

SEQ ID NO: 216171 - DNA, 336 bp, Glycine max
cgggttgaatgcctgcaaaattaggccaggaggtgaactgatcattgctggtcatccattggaaccacgcaagaactcgtccctccatataaaatgaggcaatgctgagtcggtcacgttccggagtgccatggtactcaaagtactgattaatcttgaagatccagtcatccaatttcaaggtcacagtgttcatggtgtcacccaggcggaggagaatatcctcaaggttacgggatgagttgtcatgggaatgagggtctgtcatggtagcacagacaacgagagcaccaacaatggtagagacagagtatcaaaaactagatttagaggtct

SEQ ID NO: 216172 - DNA, 450 bp, Glycine max
cctataaaactcacctattatatataatactaactgaagtgatctcatttttgttaaacgataatgacacacggaagcagcggtcttaatgcatcaaacgattataccgtatgcaaagatatcggttcattggaatgtataacaaaatattattcattcatactttacatgcttctcatgaattccacaccaaatattatctaatgcaagttcataaaccagtaccctataaactgattagcaagatcctatagttttcagaaaccattaattatctcttatttgttagccgctgaaatccttattctaaaattatcataaaatatcaacatattatacgggaaatgaaaaaaacgtagcaacgcttataatcttagaaactagaacacctatcaagacaacgaactttaacaatttaccagaaaatggaacaaccccttttgaggcggc

SEQ ID NO: 216173 - DNA, 444 bp, Glycine max
  unsure (1)..(444): unsure at all n locations
agcttgtaatttgtaatagatctaagataaatgtgggagattgcaatttcctgagtgaaaatcctcttgtgaggtgaaatctgtatctatgcagtcaaaaatacaaagacctttttgttgttggaagtccaatagtggcagacaaaggttgtaaccaatgttgttttttgtctagcggatgataggtgtgaagtctagtgggagtgcgaataggttgttgaaagctagtggttagttgtgttaatgaaattttatattgaagggtggggactggatgtagcctaatgtagcctaagatagaggtaaatcaatataaaaacattggacatcattctttgtttctctctctacattagatttgggggttgatctatttaatatttttggtaatcattaaaaaaacatttcacaaatacacttaaaattgnactttccactaaaata

SEQ ID NO: 216174 - DNA, 441 bp, Glycine max
tgtcgcccagctcgcccatgcgagcaatggtgcttcctttctagcaacagccttctggagggcccaagtgggcctggttgctatttgcacccttgtttactatatgcacccccctttctatttttttgtaattcttcttccgtaacgttacgaaactttacgaatttcgtaacgatacttattttccttccgcaaggttacgaatccttacggattatgtatttactcttttttagctttcgaagaagttacggaaactcacggattgcgcaaaaacacctcttttcgatttccgccacattacggaatttcacgaatcacgcaagcctgcttcctttcgatttctgagacctcttgggacctcatttattgcatgtcatcaagtaataatccctggacgaaattatggtatgacagttgaccctctttacttacctctca

SEQ ID NO: 216175 - DNA, 268 bp, Glycine max
tcttaagtcacctgcagctgcaactttcaaaattcttagctgattttcttctttggacagactggtctataatatcaaacaatgctgctccgagcatttccgctccgaaatagttaggaaactatcactgggagattacgtcatcttatgccacgtcctcctgtggactgaatcggacaaagattagcctgagctatccacaactcgatttgcagttaacttctggcccgaacagaatgcttagcccatgcaatgaacaaccagctgc

SEQ ID NO: 216176 - DNA, 354 bp, Glycine max
ctgcactaattttgaaatatatgtgatgaataacgaaataatgtggattaattcgaattttatagttgataccatatgcatgatggatatttctatcttcattcttaacggttgcttttatgaagagtatcgctatgtccatttcttgcaaggtgcatattttgttttggtactaatcaatcaaaaatgtcttgtttagtatctacatcatgttaggtctaaccttattctatgtacttgttaacttatttggcaagtgtattaattcgttttaagtagtaaaagactcgaaaatttaagcgttgaatccaaagaatctttgttatacttaaaatgatgcagatctgattatta

SEQ ID NO: 216177 - DNA, 136 bp, Glycine max
tgctttgttttcttactatttttatcccgaattctttacacccttgcgccctctgtttaaaattgttcagaaacctttgccttaacgcgttaaacattgccttgcggatttaaaaggagagcttgttttgtatatt

SEQ ID NO: 216178 - DNA, 331 bp, Glycine max
gagccaatccaatccttgtggtcggactctcagccacttatgatagccgccgatgatcccattacagcttcccctaagctctttgtcctttcttcacgccgcatcccatgccttgcgaactccttgaagtaccctcgcgttgggggcactgaaaccccgtgcgatgaaaggcgtgatggtttcggctgatggtgctcctctcatggggtagccaagatttcttatggcgaggaaaggattataattaatacaaccccttgttctcatcaagggaacatttggaaatccttcacatgaagatagaatcctgattcttccttccttctagcga

SEQ ID NO: 216179 - DNA, 327 bp, Glycine max
atcccaacttaccatataccttgaacattttgagaatatcaatccttgccctcggaagaattacacatttaagatagaaaatccccaatcaaagaaagggagaaagcaaaaagggaaagaaaattcccaattaaaagagggagagaaagcgcaaaaaaaaagaagaagaaagataatccccgatccaagatcgaaagaaaatagaagaaatatacagaaaggtctttggaccatataatacctgaacaatacagaattgtcaccaagaaaacattgctaaccaaaatactgtgcgtcggtgacttctggcttatagtcagtcatgct

SEQ ID NO: 216180 - DNA, 473 bp, Glycine max
agctttcggagcaagtagtttcttgggattctttatatattggacggttgatgtcagaaataccttttactcgacgaggaagtagtgatcctgattgggaaaatgagtaaaacagtctaaatctagttcatctagacaaagatcacatatgttacgtagttaaaagtaaggtaacagaaaataacctaatctagagtaaaaaggaaaataaaatcataaaataaaataaagactaaaatatttttattcattcattgcttgatttctctaaaaaaaaaatacatttatatagacttaattgatgctaactaatggatattatttatttatatgttaatatctcattatatataataaataacaataacacaaatatcaactgtagttcatatatataagtctttaatcatatttaatgttgagagcatatctagactaattctaacaaaatatctccactaacatcttatatt

SEQ ID NO: 216181 - DNA, 445 bp, Glycine max
tatctgtggtcatattcttacctatgcagcttcgtcttttacttgagatatttaattccacctttagatcagaggtgttgaatatcaagaaagtataagcttgtacaagtgtattagtagctaataatattagattagattttacctttactttcaatgtttgtaaatcaatcatgcctcggtgaaattcaaaggcaggacattgatgtaagtgatattagtaaaaactttataccattttattttaatgtttaaaaagggtacattccaactgcagggtcccatttaacatacgtgtggtgaaaatttatgcaagtcgcacatccaacagatgaaaggatccttctgtccttcatgaaattacttctataatattgttccctttggaaaactctcttgtctggctgaagagacaggcaatgattctccttatattattttttta

SEQ ID NO: 216182 - DNA, 496 bp, Glycine max
  unsure (1)..(496): unsure at all n locations
tcgaccgagatccttaagtcacctgaggcatgcaagctttcattnttattacctcgtaatgattattgtttcaatgtaatagcttaacaataatcatttgcttctcttcgaaataggttaatggataagtgcggtagaagcagaggtcgtggtttagtgtatggtttccttgagcctcagtctatacacaatgctaaggatagacatcaacaatgtgaacattacattcaaacatgggtcaaggagtcgcaacgacaactgtacttaggagcttacttgaatcagtaagttcaacttttgtagtagattaggaaattatttgcttgatgcggtggctaattataatngtcgactttaggtcacattggaaactatttgttctatgtccaaggaaaaacattnttgtttggttttgtctttgcaaagagcctgatataacatataagctcaattaacaggttctattcaaatntataaatgaatggctttggaattg

SEQ ID NO: 216183 - DNA, 422 bp, Glycine max
  unsure (1)..(422): unsure at all n locations
cgacacttataatactcacgctngatcctcgaatcttgattcttgactctggatatcatctcttctctgtaatctaaaagggtgatcgattctatcctgaactcattcttcgatttacctttgagctcgttgccatcacctttgtcatcatctttgttatcatcaaaacatccctgaatcaatcttgattcatcttgaagctttgcttcttttctcatacaaaaacatcccaaattgctgatgtcaagatggtacagataattttaaatctcatcataaatcaaaagtattaacatgtggaacaaataatattcataacgatcttcatctataacgaaatgttttcatttctctcctcaataattgtaatagataatctgtttatcggtgcataccaagcatgagacctgttgtttcattga

SEQ ID NO: 216184 - DNA, 462 bp, Glycine max
  unsure (1)..(462): unsure at all n locations
gcttacaactagtttctgtcttctctattttattcttgtttggttgctcaaattaaatgtattgttctaattntttaacattgctatgtttctttgtaggggaaaacacacccaactcaattttttttgcttttgatgtccaccccaacccaattatgtgtgcttaagctgtattagcagtgtgatttgttatattttgtgaaaactgggaatttcattctgtaattgtctgtttgtgtactgggctggctttattgtagaagcaaaggagacactcttgttttgtaactgccttttctctcactctggtgtcttatagatgaaaatgtatgtttctaccatttttctttgtttcaaaattaatacactaatttcaattgaacctttctctttatattggatatgattgatgttaatagctttgcacagcttagagggaatgctagtgactcacaaatttga

SEQ ID NO: 216185 - DNA, 435 bp, Glycine max
taaagatatacataaagggaaagctgtcctttaatgctaaatagtttgatgaaagggtaccacgtacatttcctgtaacagctattaaagtgtacttgatactatgtgtgccacgaatcaataacaaaaggcatttcatctcgtgatcagctattattgtaaaagctggtttcaaaatctgtacaacaagttaattaaatgtaatcaaataaaattaaaaagtattcatgtaaaagaagaaatgagtatatatatattgttaatgaaaaagtatccattttaaatataaaatgtttaaaatatgtatactaattaatctttttggcaaagaagtatccattgtatatatactgcgtcccatatatgaagtactgaagtagttaacttcattgaacttgaaggcctctgttttgtgtatagagatcttaatgacaa

SEQ ID NO: 216186 - DNA, 398 bp, Glycine max
  unsure (1)..(398): unsure at all n locations
agcttccacatagtgcgtaagttcttaatttttacaccttagacaccctaatcatgggaattgtatacgcttctctatagccttttccggcaacacaaagctaaccatgcatgaacaattattctgtaacctaatgtagaaaattattcccaactaaagacctacttaagtcatctgcagaattntgacatttcctgtggaatttgcagccactaaggtggatgactgaccgcgccaacaaacagaagtgatgaactgtgccgaatcatcctcttcattcccagaaagagggtcactactgtaaaatttgaaagataatgctggcatgggaaaagccttgtggtatatgaacacctaattaacatagagtaagaccttaattaatacaatgcaattca

SEQ ID NO: 216187 - DNA, 338 bp, Glycine max
  unsure (1)..(338): unsure at all n locations
cttcttatatttacttcttcctgacttgtcaattttgtagcttatagcacattccaagaagaatctcatggctacttatatatgtgccatgtgatattcgacaaaataaagtttcccattttgtacttttaagctaataatggaagacactcattgtgattgtcgttgcgctttatctcctttttgcctaaatactcatttgacccctatagntatagaaacgtttctctgtcagtccctatacttaaaaacatccacttttagtccctacacattgcatttctaattcctttcagtctgtacacatcagtttaatccctttatgccctatggtgagg

SEQ ID NO: 216188 - DNA, 460 bp, Glycine max
  unsure (1)..(460): unsure at all n locations
agcttgacaaagttagattgatcagtgtatttatattatcaagnggttgattcttgattttggaattcagtgtttgtgattggtttgaattgatcaattgtatgatatgagtgaattgaaatgtgtaaatcatatgctttgaatgagtatgcagtcattagaagagaaagaacatggaattaggattataactaaaaatgttagttggtttgtcaggttgattgtgaaggaacacgttagccacaacccggtgagagtgtgatctttaattgtgagagaacgactagtagtaagtaatggtttttgcatgaatctctggatatggaatgaatgcgtgagtttgaagataatgaaggtcaggttttaattgaaagtagctacttagccaaaaagcttaccttatgtatgaatatattatcccttgcacccangttgagctaaaagaatgattgtttgattg

SEQ ID NO: 216189 - DNA, 383 bp, Glycine max
atttcttgagctgcacttcagctttttacaatgttgaaacattaataccagcctccaaagcattcagcttcttctttaaattctagattttactaggcagtattacaacattggatgagttccactgccttatgcagcctttaatgagcttggtgaaattctccttctttgtttcctataggcatacaagatccactttatactttaaattaagatttctaatagcagcccacttaatccacttcatcttataacaatcaaagggtttgacagtttgctaatacaacatattcatcaacccatctaatttccttaatcacaaaataactaaaagaagaaaaaaagtttagcatgcataatccagcagtgcaacaaaggtttga

SEQ ID NO: 216190 - DNA, 474 bp, Glycine max
  unsure (1)..(474): unsure at all n locations
acctgcggcatgcaagctntagatccctccaccaaacagattcacccttccttctagttacctcatctaaatcccttcaaccttcatattntgactccaatactctagtccacagctccccctggctatgaaataaactccatttccacttacccagcagcgagaggttaaaatagttaatgtcttttattccgagccccccaacttccttgggcaagcatacagtatcccaattaacctaagctattttgacttgatcttggtgaccaccccataaaaatcttctctgaatcctcactagcttgtcttgcaccttcttagggaccctgaaaaaagagaaaaaataaatcggaatggacgttagcattgactttatgagagtcactctccccccaaatgacaagngtctttgcttcccatttgctaactntagctcacacttagttattatagggtcccacatgtggcaatatc

SEQ ID NO: 216191 - DNA, 440 bp, Glycine max
  unsure (1)..(440): unsure at all n locations
taactataatggtgctcatatatgttgatgatatcatctgntctggcaattctgcatcctttattactgctttaatcaagaatctgaatactgatttttccctcaaacagttgggtaagttggattattttcttggcatagaggtaacacacttgcctaatggctccctccttctctctcaagccaaatatctgacagatttacttgctaaaattaacatgctcaatgctaatggcatgcctactcctatggtgtccacaagcaaattgtctaaaattggttcgccagctgtttcagatcccactcaggtcagatctgttgtgggggctcttcaatatgccactctcaccagacctgaaatctcattttctgtcaataaggcttgccaatttttatctaatcccttggaagagcattggaaggaagttaaaaggatattg

SEQ ID NO: 216192 - DNA, 413 bp, Glycine max
agcttaaagataaactaagaataatgatagattatcttatcttatattatgataatatattctatcaaatacaaactgatttagtcaagctaagaatactgatagaatatcttatcatatattttatcacacctccgcagtcaaagcgagaggtcgacgaacacgaacactgagactgtctcgaattggacccaggaccaccgccactaatttttttttcagaattcttgtgatatccaaacgacttcccacgttgttgttggtctgaatgagagaaatttgagtcataaatggattgtgaggcagccaacattgccaatccggcttcctcaagtgtgagtatcgatcgagcctgataaaacgaaggttgatgatcactctgctaaattaacgtccctacaccttgatatgca

SEQ ID NO: 216193 - DNA, 428 bp, Glycine max
ggtatcatgcatcgtaatgcatgcatggtcactagttttgtctacggcttaggactgttattctgttatcccagctagttacaggccataacggtgcaataccattgtataaaagttgatcatattcatgaataaagcagagaaaacaattttctagtaatagtttaacgtaggtacttttctctttcctctcgctcatatcacattaccacaaaggcgaagacttaaaccatgaccaatagtgatagcaatagcattaagatccttctcgatcagataagctttatcaagggcatcttgcacaaccagtccataccaataatactctagaaagggatatatatatatatattttgagagagagagagagagagagagagaccataaaagtgtaagaagccatattagaaatctatttgagaatctgg

SEQ ID NO: 216194 - DNA, 377 bp, Glycine max
  unsure (1)..(377): unsure at all n locations
gtcacctgcggctgcaagctggggcctcggagggatgctttttataattatctaaccattggtgntatatatcctcaaaatcttttatctctagacactattaggttctcaacccttagaggatgagctctaataccaaactgtaaaagtgaatatcacaagaaggggtgttgaattgtgatatgagaaatttctcaaagccttctcaaagaaaacaaagttattttctaaagagaaacctttgaagacatataatagattttgagagaaaaacactttcaagctgtaacaccctgaggtatatatatatatatatatttatataattatcgttgattatatttggcggggtattttatatcccaatctattttaaa

SEQ ID NO: 216195 - DNA, 352 bp, Glycine max
tgacagaagcacctagattaggaatgatacgacgaatctcttttgtgacccaacactggtgataggcctagcataagggccaaggatccttgaatctgagcctcctacccctatatataggagagattaagatgcgcttgccgcccaaaagcttcttgaggaagatattttaccgcgacccatttatctaaggtcaccacctatattagggctgaacggaaaaggtatggaagcattacgggagagtatcggacttgaactctgcgtcttttatgattccttgcaccaatattaagtgaaatgtgccaacccaatgtctttggaaattttacgaaagcattacataagccct

SEQ ID NO: 216196 - DNA, 354 bp, Glycine max
  unsure (1)..(354): unsure at all n locations
agctngaccatcaatcctacagcaatctctcctatccaagttggngcatataattgggattgaagctcccacacaagtgcaagatcatgcaatcctacaaggaagatagcgatcttaacaacctttcccaatatagaaactagaaagaaagaaagaaatgaaaacaatcttgtccttttggatacagacttttattcatagcattgcatgggcatcttcactaggcaaacattaaaaactataaaatggatgaccagctcaaaaaattatggcagcagaggaatgtagaacatctagagatgaacacaagttgtctggtcaagtagaacctaatgaaatgatgcttccaatact

SEQ ID NO: 216197 - DNA, 321 bp, Glycine max
gctcatcgccttatatgaatatattataccaccggttagttctttgttgtgtgaacatggttagaatacttatttttaggaattattggtgttacctcggtacctcaagtttgctagatttggggatggtatctaatcgctctttgctcttattttaatgctactatcctgtgtaaaattcagtggttgatcctctcatcagtcttggaagaactagattgccttctttagagggtgtagctgaaccacttaccggcaatgcttctataatatttcttgatagaaaaactaaaacttcatacactcttcctttggatcttt

SEQ ID NO: 216198 - DNA, 401 bp, Glycine max
agcttgaaaagtgctgtgtttcactttctcgtttatccaatctgctggcttagcgagcgttcgctaagtgcaacacttagtggctaagcgcgaggaaggatctggaagaagatgagttgtataggttcgctgagtgcaccgcttcatcttatcaagcataccgcttcatcgcatccactgagcgagaaaagagcgctaagcgaaaattcactaatgtgcgctaagtggatcataatctcgctaagcgcgcaagcacgaacaaagccacctatttaagccagaaatcagattttgtgaagagagtttggactgggatacagagctttgcatgtctagagattctagagagagaaaggtccaagttccagagagttttgagagattttactgtgtgaggatct

SEQ ID NO: 216199 - DNA, 379 bp, Glycine max
  unsure (1)..(379): unsure at all n locations
agccactcatgacacatgtgcgtangcttttctcctttgtgagttattggtgcaatggcatgtcggcttggcatccctacatcaaagttgtaaaatcagcacacatgtacgttatgaatgaataataaactataaagaacacaacctgtttgttgccatactccacatgtgcatgtgcattcacctaaattgacctcaaccttattcccccacatgtgaacctcatatctcatgcccatgttatcaccacaccaaatgggagtccattgattagcaaaatggaattctttgtctagtcttttatactgcactggacataatggtccaggtgttacagaaagtttaaccttgcgagcagccatggatctcatgatataac

SEQ ID NO: 216200 - DNA, 391 bp, Glycine max
  unsure (1)..(391): unsure at all n locations
agctntataattacgtagtaaatcctagattatattcttgagataactncacaaagagaattgaatattaactaatcgcaatagaaagcataaggcatacaattaaagaacaaagtgtagagatactatgtcgccttctagaagcacttctttaatgtcttaagctggatgcatggctgtggacgaggcttcactatctcatccttcataattcatttcttcgattgtgagcaaatccgatcatggacttagtacctgttggcacatgctctattgccttgaaaaagaaaatgctaacatgcaaatgattaaaatgctatgaaatgctcgtatcgcctttactatactgccctatgtctactcgaggctcacgcatggtgcctatcacaac

SEQ ID NO: 216201 - DNA, 448 bp, Glycine max
gaccttagatactcagctagcttactggcgctccatatgtcgagatcatcctgtttgcttcttccgaacgaatttccttcaaagtgtcaagctgtttcaagcattctccaatttccttttcctcttcctcatcaagagtttcaaacacatctatgatggctttctcatgaggtgaagcattacataatttctccttggagtggattacaacttcatcgatgacatccttctatagacaagatttttcatcctttgggtgattcatggaccccaacacattgaatgtgatgtcttcatcattcacttgaagcttcatctgaccatcatgcacatttaccaaaatcttggtcatgtccatgaaagttcttcccagaatacagggcaattcgaagtcctgttcaatgtccatcactaccaagtcagcgggataaatgaatttatccacctt

SEQ ID NO: 216202 - DNA, 447 bp, Glycine max
  unsure (1)..(447): unsure at all n locations
agcttcttcgactgaacagagaagatactcatgttggacacatgggaccccccttttgggtacgtatcccatgtcatgacagttggatagctaattttcttgccataaaaatggtataaaaccactaaacgtttgtattgtaaataactttactcaattaactccactttgagctcttactaacttcaatgttgaagtctatgcagacaccccaatgccaccgtgcaatcccctcgctgtcgtcatgttctaccactagaatcaccatcgcagaccaattctagctcaagatctttcactaaactgaatctcctttagatgaatcgaataaatgcaatttttcttgtgtaaaataataataataattctgaatttcaatgagatcaaattaacccttattnttctctttcctaacttaatctattacaattaanaaagaagaagaat

SEQ ID NO: 216203 - DNA, 445 bp, Glycine max
  unsure (1)..(445): unsure at all n locations
ngcatagataaatgttgctaatgcatgtcttgcatcaattttcctgaatatatgataaaaaattggatataataatacaatacaattaggagaaatagaaaactagatcaactaaattgttcaagtaatagacaaacccgctccaaggtcaatgtcttggtaatggtatccttgctagcttggattctatgggtagataatacttccattagctcatgggaactgcaacccattagcaaagcaacatttgctacagtttccaatagaaaagaaaaaccaaagtcattttttagtaactgaaatttcaaatataccctttatgttattcatagacaatatgaaacaaggagggaggattgcccactcttgtatagattactttgaccatattcctaattgatgtggaacttattaacaattaccttcatcattcaccacctcaata

SEQ ID NO: 216204 - DNA, 378 bp, Glycine max
  unsure (1)..(378): unsure at all n locations
agctngcctcanagaggtccaggatggacaaggcagccgaaggaactatttccgctccggagtatgatagtcaccgctttaggagtgctgtactccagcagcgcttcgaggccatcaagggatggtcgtttctccgggagcgacgcgtccagctcagggacgacgagtatactgatttccaggaggaaatagggcgccggcggtgggcatcactggttactcccatggccaagtttgatccaaaaatagtccttgagttttatgccaatgcttggccaacagaggagggcgtgcgtgacatgagatcctgggtaaggggtcagtggatcccgtttgatgccgacgctatcggccaactcctaggatatccgttggtgt

SEQ ID NO: 216205 - DNA, 429 bp, Glycine max
tgcttgtggagcttctatggaggctagatctttgagcttcaatgatgattttccaccatggagatgcagcggaaggcaaaggagaagaggagaggggaggcaccatccactatggaataagccatggaagaagaagcttctccaccaagaacgtgccttggataagaagcttaaagaggatgctttaatggaggaaaagaaagagagaaggggggagcacgaaattaaaggaataaaagagggagagaagtggaactttgaagtgtgtctcataagactttcattcatcaaagttacaacaagtgttacacatgcttctatttatagactatgtagcttccttgagaagctttcttgagaaaacttccttgagaagcttctgtgagaaaacttgcttgagatgctagagcttatctacacacacccctc

SEQ ID NO: 216206 - DNA, 355 bp, Glycine max
agcttctgggagcacagatgtattgtggtatattccctaacacataagagtgggtgatggactgttataatgaggcaacccagcacagaagaattgctagcagacaagaaggagacaagcaggccacaccatttggacgaatttgtaactgattttgctcctaagcgctgagctgacaccttaacattggacaattagaatattctgtctactggaatatatctttctgttaggatatttccaaaatccgttattgctagcctccctcgtaggacctgtagaaggaactagaataagcatttgatgcctataaatggacaatcattgtaatagaaatgcaagccataacaatcag

SEQ ID NO: 216207 - DNA, 58 bp, Glycine max
tgcttgagaagctgttggatcaagtggcctagaaatattatcaagggggggggggggg

SEQ ID NO: 216208 - DNA, 434 bp, Glycine max
  unsure (1)..(434): unsure at all n locations
agctngtatcatcgagacagagtcttttttattggcttaattgcaaaaagtgtccccctatttttttcatttcactaaatcggcccccatattttttaattcatatcatgttatttttcaaaattcactagcttagaacattgaccgccacgtgtccgcatataattggtcatttaagaaatattcatgtgtttaggaaatatcattattagtaactaaagtgattaattatttaggttatctccaatttatcatcattactaattaggtcactaacaattatctcacaaataattaccccaacccaaaatgtaaacttcatccactcaaaatctttaaccttcctattaccaaaaattcttaattctcaaaatcagtaacacgaacccagactgagtaacgagaacctgagacgcgttaaacaagctaattat

SEQ ID NO: 216209 - DNA, 422 bp, Glycine max
ggacaatacagaatgttatggttgaaatcagaaagacttacattggaagtttagctactagataattacttgacctacatgagtcattcttactctaatcattctacgaagaagcttatctcagataaaccttcaacctctttttatgttctttcagcaacaactggtatatgaagataattaataattactgcctgtttgtgaggtttgctcataatgtgccttaccttaccatgatgtatttatgttactcttgcatgtaccccactacactcagactaatacacccttagcttagggtacaataaagtgaagaataaaatttcacatagtctacacttaaggtgtagtacttttcaaaaaaaataatcaatcaacaaagacctcataagcattcacaccacaaacagggaacatcacaa

SEQ ID NO: 216210 - DNA, 464 bp, Glycine max
  unsure (1)..(464): unsure at all n locations
agcttctgtcaaatctaactaatgtcattactgccaattcctatgtaatgtcgtgattgcaaattcctaagcaatggtaaatcatcctgcataatcataaagaaaatataaagagacaaaaaagtttgcatatcaaaaaacagcaagaaagttgtggaaaattaaaatccttacctatgcttgaattacggctgctttttggttttgcgaacgtcactacagggaaaaataattttagctgcaaacaaaaaggtgactgtgtaatgatgattctagtattacaggaaaaaaaaattcaagaaaactaagtaataaaagaagaccggggaactttcagggacagtgattttcctttactactttccaattattacgttgagtatttggcagaaaggataactgcttaacaatttcacaactacaactaanattntagattcagtcatgagtagggtcaaaatcac

SEQ ID NO: 216211 - DNA, 428 bp, Glycine max
  unsure (1)..(428): unsure at all n locations
catcttttagttntttttacattgaagtttgtgtctaaactaataactcaaagacattcttttacattgacatctccttaattgttttcaaattacacataatataacttttttctatttttatacaaattatttttttatgtttgaaaatatttcactaacacttcagatgttgatgatgagtaaaaataatatttgggaagcttcccaaaatcatgcatcaacacattgtcttaaatattgaggatttagtgaaattcgtgtgacatgatgtattgttcaatctttcatggcatcttcttccatgttgagcttctagtgaaaattaaagtgtatttgattttctgccggaatcatgtttaacaatatcttctcattttttaagacaagtaaaaataagtactttgtagttttagaataaaagctta

SEQ ID NO: 216212 - DNA, 420 bp, Glycine max
  unsure (1)..(420): unsure at all n locations
agcttcaagttgctgggacaacaacattatttgggccaacaaggcatcttgtgatggaagctccaataaactcttattggtaggaatataaactctatcatgcaaaattatgtggtcactggcactcatattttcaattaagtccatggcttcttcaagtgtcttcaacttaacttttcctcctacagaagcgccgagtaattgctttgactgcggccataacccatcaatgaagatgttcaactgtataggctctgaaaaaccatgagtggatttttccgcagcaagctacagaatcttgctaatgtctcactcanagattcatcaggaaactgatggaatgaagaaattacagcttttccctctgtagtttagactctgggaaatattntatagaaacttctaacaacctcatccatg

SEQ ID NO: 216213 - DNA, 430 bp, Glycine max
gcttaccaatagcactcctcttgattttcttgcattcaaaataagccttggttcctatgcctaaggtatcactctagtcctcatgaaaactgcctacatactccaaaatggcaaacattcgcataccaaattgttccatagattgttcttcaccaaaccatgcgcaaatgccattgagacatttcaacgagcacttggtgggcgcatgtttaggcatgaatagcaagggaacgggggcaatgttgcatgccaaaaattttcagaataagacttaagccaaaggccattgcccacaaccttccaactcaaccaaaataagcatcaattcatagataaagtgcctgacagttttgagcataaatgggcaaattaagcatcaaaatacaccaatggatagctagagagccaaagcatgaagtacttactttta

SEQ ID NO: 216214 - DNA, 295 bp, Glycine max
acatgccaaatgtgtttataacctattgcgcataactactttgacgcatgaacactcccttctggacttgattaaatactaatccaaggaaatgcgatagtattcctaaataatccatgtaaattcagccataagaactgcttgaagacctaaatctccttttcactactactagtcacaagtagatcatctacttatagacaaaccagcaacaaattggtgggagaattagcccttacatacacaccatgcttagtcttgcatttgctgaacctctgtttggctaaactccatc

SEQ ID NO: 216215 - DNA, 479 bp, Glycine max
  unsure (1)..(479): unsure at all n locations
cctgcggcatgcagcttgtngaaggaaggttctcatatacattctttgttgaactagttcagtagagaccaatgatgggtgtagagcagttcgttgagaaggtggcctggccaggagcccgaccttcttttgtgggggataatgaaagttctacagcccaggcacctcaacaacatgagccagaaccagaaaatgatcactcatctgaagccaccatctttggagctgttgattgtaaaaaaaaaaagattagagacgagatccaatgaggctgctcatcatggaccactgccagcgttagctgatgcaccatttccaagagcggatccatcttcacctcagcatgcaacagacttctccattccgatcttagagatacatgagggccagaccatactagttcttcctttgacacttctcctccattactccagtatggtatctaacagatgagaagaatgttccatacaggacaatca

SEQ ID NO: 216216 - DNA, 441 bp, Glycine max
tcaagaattatggcctcatcaaactacttgtttcccgtatgaaattctataaatagacctcccatctttaatggagtgggttaccactattggaaaacctgcatgcaaatctttatagaggcaatagatttaaatatttgggaagccatagaacaaggaccatatgttccctctatattggtcggaaatgcaacaatagataaatctagagccgattggactgaggaagaaagaagattatgacaatataatttaaaggccaataatattattacatctgccctacgaatagatgaatactttatggtttcaaattgtaaaagtgctaacgatatgtgggataccctacaagtgacacattaatgcacaacagatgttataagatctacgataaacacattaactcgtggatatgaacctgttaagatgaatggaaatgaa

SEQ ID NO: 216217 - DNA, 457 bp, Glycine max
cctgccgcatgcaagcttagcctacgagatagaacagttgtctgatttattatcatgagagaaaatgatggtcccattgtgatcgcaaagaccccccctcgcggaagctacagtaccattcgttgaaacaactccatctataaattaatctgcactcgaaggcccaagaaataaggccagtagtcgctgaatgactcttatgattatggagaggcaactacatattccaagactgttgaatattgattattattctacgaatacggctcaccaaactatcaacagttgatgagaaagacgagaaacctacatcatttatgttttgcacaaagcataagcaaccactccaagcaccacgtcccaatcttgcactcctagacaagatggaagtagaatatttccatgaaaccaaacacaaagttcattagagaaaaaacacgaacccactataccttga

SEQ ID NO: 216218 - DNA, 420 bp, Glycine max
tgccaacccatggaagctcctaatatctgccacactctttgttgtgggccattcttggatggccttgattttctcatggtccacttggaccccatttctaccaactacaaaccctatgaaaactatattatctacacaaaaagtacacttctctatatttgcatagagggtgtttttcctaaggactgaaagaacttgcctgagatgtcctaagtgatcatctatgctcctactgtacactaaaatatcatcaaaataaacaactacaaatctacctatgaaatcccttaagacatgatgcataagcctcataaaggtgcttggtgcattagtgagcccataatgcatcactagccattcatacaaaccaaacttgtgcttgatagcggtttgcactcatcaccctttttcatcctgatt

SEQ ID NO: 216219 - DNA, 454 bp, Glycine max
gttacctgcacgctgcaagcttgacaaaggtacaggttcaattcttctttgttttgggaatcacagggtggagatctcaaacgttggagcctgctctctccttcatgaacaaatacaagcaattcaagtgagataacagtaacagttgacaccctttctgtatttttatttttggttaaagccataaacttttatagatgaagaaattaataacttggataaacaagttaatttttttcatggcatattaataaatctcattccaacaacatagtgttcactagtttgcttcctcgttatagttgtctacggtcaggcaagaacatattctgtttgagaagcataaactagctggctacagaggataaaatcatgggcagatatcacagctattttaaaagatagttatagggattgatgatgggtggtataaaagatggaggactcctccacc

SEQ ID NO: 216220 - DNA, 367 bp, Glycine max
aaaagactaccggatttgaattattatgggagactgtgtctctacatggagttctaataatcaaggcattgtgacactttctacttgtgataccgtaaatgtaactgcaacttcttgcacatgttatgccatttggctaaaaaagattggtggaggaacttcagttgttgcaaaaggaaagcacaaagatctatgttgataatagatctgcacaagagcttgccaagaatccggtgttccatgaacgaagtaagcatatagatacaaggtatcatttcattatagagtgcattgccaacaaagaagtggaatcgactcatgggaatactcaagaccaagttgcagatattctcaccaagcctctcaa

SEQ ID NO: 216221 - DNA, 380 bp, Glycine max
gcttataatgcagcctactgcttctttttctctccatctcccttatcccgcacacaccatatacaacctctgtaaccacaatggcggaagaacctaaaaacaatccaccactgtttgaacctccaatcccctccgcaccggatgctgcggataaaactgcatctctggttttggcaacgacgttataaccaagtgccgaaatcgccgctcctctggtgctaactccgaagcggcaacgccttccgagtgttcacctaggggagatcggcgaccaacgcgcctctgtacacaaccactactcgcacatgcgttgcccgaacatgccaccatggagctggaaacttcgaaagaattcttcataacctcaaaggcgcgctcgg

SEQ ID NO: 216222 - DNA, 390 bp, Glycine max
  unsure (1)..(390): unsure at all n locations
agcttntactttcaggccaaattgcagtgtctaccataccaacaatgacatcttagccaaattcagacactggccacgccccttcattatggttgacgccaaggaactgcggtgagtgtgttgagtcacgcttggctggaagattcggcatgttacaaacgtaacccggggaggtttcgagggattcaagcttcttaggtgacatgtttgcactgaaaccgttgatggcattggtgtaagtgtaaattaacttagaagaactaacgcagtgaatattattggtggctttggaatcgcccaatgctgaggagagagtggaaagataccaactgtgttgggtggacaatgttccgggcatggctgatatgttcatatggatgatataattga

SEQ ID NO: 216223 - DNA, 374 bp, Glycine max
tacgtacattatgctcacactctgcatgatgtctcatctatctcaaattctgaccgaacaataatactaaatatattgatgaaactccataacatgtattgtgacgaaatcaattttcaaatcatgtgacggtcactgatcgctgtcgttaagcatgtaggaagagatatgttcgaaagtgtgacgcaacgagatgccaatttgatgacggagggtatgtattatattgcatgtataaactgtccttctttttaatatgtcatgtacatgcatgcgtgagttctactaatggattcacatcaattaaattcgctgaattaatcatatacgccctatggaatttgtacaatgtgtactttatgactggagtgatg

SEQ ID NO: 216224 - DNA, 396 bp, Glycine max
ttagacaagtggcctcagatatcttaagaagggggggttgaattaagatattccaaactgtttcccctaattaaaaatctatttcactttttactcaagttatgaattcccttaatgacaatcttcttaaatattaattcaaatgaagcaacttgaatatgaatataaagcaataataaataaaggagattaagggaagagaaaatgcaaactcagttttatactggttcggccacacccttgtgcctacgtccagtccccaagcaacccgcttgagagttccactatcttgtaaattccttttacaagttctaaacacacaaggacaatccttcctttgtgtttagagatcctttacaacaagagactcacagtctcttaatcccttagagaatg

SEQ ID NO: 216225 - DNA, 378 bp, Glycine max
  unsure (1)..(378): unsure at all n locations
tacctagaagagaatctgtaaggcacgacaactntcgatttggaaactccgtggcttgcacagtggcgcgacgtgacgagacgccggatgcgcgataatggactacgcccttcgtccgatgtcacgacaaggtcacaacatattgaaatttcacacaaacagggaagtgggagctctatctacggcgatgttggagtgttcatgaattaacacgcaaaagcttatagacctcaatgttaacgacggtgggtcaagaaaaacgtcattgacattcaaaatttctacgacgttgtttgtaaatacaccgtcttaaattacctgttgcgttacctacatagacgggttacccaatgaacatcgttgaatgtgtcacgcgcc

SEQ ID NO: 216226 - DNA, 369 bp, Glycine max
  unsure (1)..(369): unsure at all n locations
agctttatttatttaattatttattttttatctaggagataaagttagtgagaattgagaaaggaaactagaacaaggtgctttatttgaaacattgtacaaggtgggaatattatagaaaataccgaagttagatcggtttcttcactcacagtcttgtcttgccttctgcaatgcattttttattattatattttgnggtagtctgcttctgcctctctctcttgattatctctttctttctttgcgtgtctgcagtgcaatgttgtctagatatcaaattaaattaaaataaaatttcagaaattatatattttttaaattacgcaaggggtgtattaagtgttaactgttctttcctactaattc

SEQ ID NO: 216227 - DNA, 424 bp, Glycine max
tgacaacggataatgggtctttctaggttggacttacttttccatggacatggtctcttctattgactcaagtctggaataatctgacattgtcggttttcattcttatgcggcgatgcaaggtttcacgcataaaattttccagatgatgaagaacgagaagttgtttcaatctcatggtggtccaatcaatctctcttaggtatgcaattcctttcattgtatggcataattgaagaaatactaataaaaaggaacaagaagatgatctggaattcacgggctttcataccaatggaaccactactagaagagaaagtctcgatctttatttgtttctactctacctctcgtgttttatagattgagaatgagtaccgaccagagagttgaggagctgttggccgtgcatacgtatactggg

SEQ ID NO: 216228 - DNA, 429 bp, Glycine max
  unsure (1)..(429): unsure at all n locations
agcttggagctcaagaacggcacatgtttatatagaagcttatttaaacacattgaaaatgataatcttcgattgctgcagaaattcaggaaaagaattgacaagtaatcatttctcttttagattcgctctctttctctttccctttgtagcataaaagaatagactaacattctgtaaatattcgatgctcaagagtggtatagttaggtaatttaatgaggagacataaggttggtcaaaaggaaggagaggtaacttggtttagatcttttcttatatttctcatgtggaatccttngggcctaaatacatgaattagattcatgtaatgctcatttacttcgttctgtcagaaaaccaaataaactaaaaaataagccgaagcaatccttatggtcattccctgaaccataatgaaaaatatct

SEQ ID NO: 216229 - DNA, 436 bp, Glycine max
gacacttaaaactaagcttacatatgtaattgtagtgtcaaacacgggtctcatcttatatggtaattgaattcagcattgaaattaaacaatgagtactcccttttttttaataaaaatattgctaaaaaatttagagaagaatggcaactattttcatatttcataaggaaaataccattccacataagctgtccaaaatcgtcatggaatagtatcgcagctttagctcaacatttatgttttcccgagtcttgggcttcaccgaatcaccgattatgtatgccaatcggcttgatggctttttaaggtcagaacgagccataaatgtgcaagcctgcacacatataggatgattagtaacattttttttcatttgggggggacattctaaaataagttacggaatttaccttaccactaaaataaatattct

SEQ ID NO: 216230 - DNA, 464 bp, Glycine max
  unsure (1)..(464): unsure at all n locations
agcttctcaaggaagctacctagtctatatatagaagcatgtgtaacacttgttgtaactttgatgaatgagaatcttgtgtgacacaactcaaagttcaacttctctccctttttcttccttcaatttcgtgatcccccctctctctttctctccctctttcttttcctccattgaagcatcctctccaagcttcttatccaaggctcatcttggtggtgaagctccttcttccatggcttcttccctagtgaatggcgcctcctctcacctcttctcctttgtcttccgctgcatctccatggtggaaaatcaccattaaaggacctcattgaagctcaaagatccagcctccatagaagccctacaagcaagcttccatcatgaggggtatcggnggctttgtgaagctacatcctctggtgaaatatatcaccaattggttaggccttccaaaacttctc

SEQ ID NO: 216231 - DNA, 439 bp, Glycine max
  unsure (1)..(439): unsure at all n locations
tggtgcatatgatgtatatgctctcacttaaggggtctgtgtttaaagttgaattgtcatgaaccaactctgtcataagattaagctgctagcctgttatgtgaaaacacacatggctttatgttatatatctaacaatagtaatctattaatatagcttacaggttcattatgcatacaattttatgtccaagtcatcgcatatattttcatgaaggaaatcaggacctgcatattcattattagattcatatataaatttttgtccgtacttccatagtgtccattaacacattctcagcatatgattatcttttctatctctttctccacaacaatgagcccaatgagcaatattttcttatgagcatcaatcaagaacgtacaattatttatattacatgatagaaaaactaaatntagtttattaatattgaac

SEQ ID NO: 216232 - DNA, 268 bp, Glycine max
cttcctaagactctaggaattatcttgatcatatttcttgaatttcttggatatcttggattcttgtcttgaataaaacttgaaaagcgtgttccttttgcatcatcaaaacattaggatagctttgcctcttcattttcatgtgaataatagtcgggccaaagaaagactattatttgacagaatttattgtctatatttgatcattgggttgagagtatcaattacaaattaatttatttattccaagactatgaactaatgttat

SEQ ID NO: 216233 - DNA, 374 bp, Glycine max
tcaattatacaatttgttttcaacacataattgctatgtttaatttctatgacatgcacgtgtggaagtaatgtctttcatgattattttgatgatgccagagaatcaagagtcgaacaagtttcacgaatcaagatccatattcaagattcaagaataatctagatcgagattcatgaatcgagattcaaggtaagaatcaaggctcaagattcaagaatcatgagaagactcagtcaagataagtattgaaagagtttttcaaaaactattgaatagcacaattttgttcaagagaattcttcagagagaaaaatcttgtatcaaagagttttactctctcgtaattgattaccagaagacagtgttcgatt

SEQ ID NO: 216234 - DNA, 463 bp, Glycine max
  unsure (1)..(463): unsure at all n locations
agcttgaagaagttntgtctttttacatgcccaactctntgagtggcatttgtattgatttttgcatcttagtctgtatcttttcatgtgtacatcatgcaccatcatgtagaggtaaaaagattctttctaaagttagaaacttctttagtgcataaaagtcaatgttttaatcgattacaaggttgattgtaatcgattacataagtgtttgtagcttataaggagattcttgtttcggtttaatcgattagcagttaaccgtaattgattacacatttcagttgagaccatgtctggtttttcatgagtctctgctttaattgattacatgtgatcataatcgattacttcattcttaanagtgttcccagaaatgatcaataacactttaatcaattacatcaagaatctaatcaattacattgttcttgaaagttaccagatgtaggaatacacttaa

SEQ ID NO: 216235 - DNA, 444 bp, Glycine max
  unsure (1)..(444): unsure at all n locations
nttccgagaagaatccatggtattgttgtcttccctctatccagtttcgttcttgaatttccttttaaatgaaatcatctttaattggtacttttcttatttaagaaaagcttgaaagaactttccacagagcttatttaaacttataataacaacttattgaataagtatttgaacttatgacaacttattgaaacatctgtgataatgcttatttcagtaaatttcatgatcaaatatgaaacagaaactatcttgtgacaacttattgaataaatatttaattaaacagttcacacaaatgctacattaatagaaaaatagtgtataaattaatttatcataaattaaagactccttgttgtgtactttctaataatttgttgaattaaatctacttttaattatttaagattaaaatatactgttagtctcttcatcttt

SEQ ID NO: 216236 - DNA, 438 bp, Glycine max
ctacatgaagctacattatgtggtatcagagcatctctttcttgtgatgttctttcgcttcctctatcttttgttccgccaattcactttaattccttgctcttcatcatcttgaccatgtatcttctccattgtcttgaggtttggtgctgtttagagtacatccacaaaaaattaaactgattaaatcttagatctacacttgttcttgcatttctatgcgccacattttttagatctactcttgaatcatgattttgtgttgattctaggctccatctttttttagtcataatattcttgtgctgaacctttagatctaaactttcttggcaaatattgattagaaaagaaaatacaaaaatcctagtgtacatcacttcattcatgttgtcttagaggcatgtctagtcctaataattgccacattcatgtcta

SEQ ID NO: 216237 - DNA, 398 bp, Glycine max
taatggattttctctatttatgtttattccaattttcacttgtatctactcatatactctaaccatgatccctcaagtgaaagagcctaatttatctattttatctcccaaatctctttaagtgataaaatagttaaattccattaagaatagagatgtataacaggctaaataaaaccaacctatccctagctatgaattatttagatatcctttcctagttctattagaaagtaatgtttcccaacgctacccctaaaacttatcatgcaaatgggtgatcaagccacaagcaataaaattaaagcacagaaaaggataatgaaaaagaaatattcataaataaataggaagagaaattatatcaagagcaattagcagctaagctcccaacaaaa

SEQ ID NO: 216238 - DNA, 403 bp, Glycine max
gacctataaatactcagcttctcatgaagctacctaagaagcaagcttcattggagctttgttgcctatgatcttcttcatcgatggaatcctttgcttcttggaagatgaatggcagtggaatggagaaagaagaaggagaggagacgccactttcaggagaagatgagtctagaaaaagctcaccaccctacgaggccattgataagagcttgtgggaagaatgagattaatgaagggagacgaagaaaagagcaccaaattttgtgctctaaatgagccttgaaatctgaatcttaatattcacatgatccaagttgaaaaaaatgctcgcacacgacctctatttataaccttaagtgtacaccaaattggagggaaatacaacattcactttgaattg

SEQ ID NO: 216239 - DNA, 307 bp, Glycine max
  unsure (1)..(307): unsure at all n locations
tataagaacaaaattgcgctcaataattgcttatatgcattttaattangacccctccacaagaatcaagccaatgctattgtgcatgcaatcaatggggcaaaacacaccaaatgattatgatgatggatggctcaaatattcacaaaagtaaactcatcactttctaattgagctttctaaactatcatgtcatgtttagaagaatcaacgatttcaagttacaaaatggcaaaaacttttttttcaaaacaattacccctttcttgaacatatcctataattcaaaaaaaacatgcaaagtctt

SEQ ID NO: 216240 - DNA, 384 bp, Glycine max
aactccagcttggtcgcacatcgttcgcgcgtatgatattctctctaccacttttgaagtagaggagaccttctattctatcaccacaacgtgggagacaaaagtgggccagaaacttgaatgggcattattgtcaatgcggaaaggaatttgggcttcactatccatgctcacacactaattgcacttgtgggtacgtgagcctgagctactaccaatatatatatggtggttacacaaatgagcatatcttacaagcttactccgcacaatggtggccccttgggaaagaagcgcaatttctccttcaatgacgcatggacactttcaccggcaaaaatatagtagatgtggaggtggtcatttaattgatttatgtaatgt

SEQ ID NO: 216241 - DNA, 350 bp, Glycine max
  unsure (1)..(350): unsure at all n locations
tcacttctgtttctagcctctagctatgatggccatctatttcgcatcttataatcncattgcttcttaatcagaggtcttctaagatgggctgattgaaacatttgggttttttagtaacgaagcactttaactatgagtgctgctaggtgcacccagcatttttgctgtgcacccagcaaaatttcaaaatggcaaaaaagcccccgagtctttctttccttataaaagctttttatttcctgcgctatcccgctgccatttttgttagaagtctcttctatttttgtgggtttcatgcggcattatctcttggttgatggatccctgtgaacggctaagtgcgatga

SEQ ID NO: 216242 - DNA, 221 bp, Glycine max
gaaggagcgaagggaagagaaaaagaaccccgccccgagaacaagagccagaagaagcacaccaccaaaggacgccacggacaacagccgcgggaagaacgagacgaacgacgcgagagggagagaagaccacgaaagcctgtgccccaaaggaaccccggaaccagaaacgtcagaactcgaatgagcaaagaggaaaaaaacgcacacacccgacccgc

SEQ ID NO: 216243 - DNA, 338 bp, Glycine max
tggttctaaccaatgaaaaagtttagtgaaggaccatcatgtgcagcgttgtagactatgattcgcccagaagttaacagttagaggcattacaaggttgacttgttcattattgtgcaacgaatcatttgacaagtgtgtcaaaataatcaattaatcttggggaaagttgagtccaccaattcaacacaagtcccttcagtgaagttgaaaagaccccataaaggatagcattgtcattattgtacaaatttatgtaagtgagataccccttaaagtgttagttgggattagttcctccaccgtaattatcaagatattacggtttccatcttatg

SEQ ID NO: 216244 - DNA, 427 bp, Glycine max
ctggaagagcttcctggggaaagaagagggagatataagattttgagcaccaaacggaccgaagaaaaagggagagaagccgacttcgagttgcgcctcacaagactctcactcatcaaagttaccacacatggtacccaagcctctatttatagactagggagcctccttgagaagcatttcttgagaaaacctccttgagaaacctctttgagagaacttccttgggaagctagagcctagctatacacaccccttctcataactaagcctacctccctgagaagcatccttaagaagaatccctaagaaaccagagcttacctccacaaacctccctaatagccaagctcacctcctcagaagagaagccggagctaactacacccccctatataacaagctcacccccgaccaaaaaacagaa

SEQ ID NO: 216245 - DNA, 335 bp, Glycine max
tacgctcattccttgaggataggaccacattgtctctgttatttgaagtcaagtgcatgcatcatactgagcatgattgggtggcaccatggactgatgatgattgttgttgggtatgtgttggactacaaaatgtttgtgtgcaccttatgacacttcgctaatgctttctatttataatgaactcacccttgcattttgtaccgtgtgcgtgatacttgtgatgaacatgaatccttattcctgggagcagaatgacagcggttgaggacgaagagtgagattcttttgtggagccacccgaccgatgtgatgacaatgggattaatttggga

SEQ ID NO: 216246 - DNA, 276 bp, Glycine max
tccatcaaatgtttgctttacccatctttacaatctatttttcttcatttttctccatgtatcttctcacatgtcttgtgctaaatgttggtaacatgactttttagaagttcccaccgatcaacctgccttaaaagctaaatttgattttctatgctacatatctcttgatgctgttctttgaaccatgaattgcgttgagtttacggtcctttgagttttgtcatgttattttttgtggcctaaatcaaaaccctaaaatctcttaccaaatat

SEQ ID NO: 216247 - DNA, 388 bp, Glycine max
  unsure (1)..(388): unsure at all n locations
taganacacaagcttcttatcttgtgcaccacgtgtatcaacgatcatgatgttgattctaccatttctccctagcactttaatttatgttgggctacctagatctatagcaaaaagatcaggaatttttgaagttgtccctcgtgattttactccaattcccattaatagggaaaatgcaccattactgtgcccttcgttctttggaaaaagcattctcacgacaacaagcttacgattaggtgacatggtaatattttggtggtactttattgcaaaccaatgatgaacgtaagtttcataccaacgtatagagtttccttcttggtcgactagttccccataaaaacatctcaattccaacctgaccctttgggaacttatattc

SEQ ID NO: 216248 - DNA, 435 bp, Glycine max
  unsure (1)..(435): unsure at all n locations
taggagaacgatcttcggagaaggccatacaagcaatatgtgtatccatcttggaacgactaagatgtaccaggaccttaggcatatattttggcggccgggcatgaagatagaacgtaatgagtttgcccttgcatgcctagtgtgtcaaacagctaatatagaacaccaatatccttcacggaaattgcaacctttatagatacctgaggggaagtgggatagcatctccatggatttcatggtggggttacctaggaccaccaaaggtttagattccatttgggttattgtagacaggtcgaccaaatctgctcacttcatccaataaacatnagatattctttagagaggttgactagctcgtacttcaatgagaatagtagactacaccatggtccctctagcctagtctctgatagagatccctattta

SEQ ID NO: 216249 - DNA, 363 bp, Glycine max
tattattgttaggagttcttctgtaatggctgtgtgaacacttctaattgggatttcaaatgagcagctgatgtaaatacctaatatctaattgattgtgtattttgcgttcaaagcttccttcaatgcttgatgcttgtatgcttttggtctgatcatccatttgtgttcacagttaggtgactttaccatcgtgaaaagtactattgccttataactcgattgaagcaggatcaaaacttaatcttacatgacggatctgcgggttaaaatttgcgtttaattatgttgtcaccataatgcttgttactttatgcctaattttacatgaaggaatctgcagacgaagcttatgcttaaatt

SEQ ID NO: 216250 - DNA, 397 bp, Glycine max
ttatgtctttatgagcaacacacgcacacactattcttgtatctataagtctagcaataggagcaaaaaatctatctttttccaaagatgttcttattttcaagcttgtgaacaagtgtttagacatcatttctggcgtacaaatggagttcttcttccattgcaatgatcctatcatcatcagttaaggtgtcatctatcatcttaagttctattttagacacgaggacataagacacaagatctttaaacgatgatctggttctgactcatttagcttgatctctaaagatttgatcttaaggtagtagttaacaaactttcagtcattccgttgagggtctaatcaaatgattctctattatgaggaaggatttcactaaactatttgacttca

SEQ ID NO: 216251 - DNA, 360 bp, Glycine max
cttagacgaagatgaaaagcccagctctaagattgatctatgtatgcgagactcgccacagcgaagttcaaatcagttgttacacacattccgaaggagcgccccgatttataagaagaaaacgcgtacccttccaaagcccttgaacaagagaccaaaatggcctcgcaggaggaatatggcccagagaaatttcgaggaacattgtggggtagtaacaatgagctcaatctcccaagagaggagagagatcggtcacacgtgcctggcttgaattaaaagaagagttattgcttgcgtgaagtccacaggagtttgctttacacttggaacccacgaagaaaacatgctactattata

SEQ ID NO: 216252 - DNA, 199 bp, Glycine max
ttccaccacatacacccgccaccacaaccagatctattcaccatgggacaaacatcccgtcctggacccgccctcaaccgtggcgagcaacataactcccacacatgcctgcccatgcacggcggtcaaactcaacccttgacactctgccaaacaataaagcgtcaaaaaaccccccaactacaccgacctgcccccc

SEQ ID NO: 216253 - DNA, 410 bp, Glycine max
taagatgtattcaaagagagctctaaaacacattagagagctctctatgatgatacacttgcccgcggtagtccctactgccacaatgtttgatataaaaaaggatgatatctctacaaacctctgaaagttatgtgcgaccaccttcgggagttgttactcaatatcaaacctttagctccttccattaggttcctattttagggacatacaccaaacgcactatgttttgttcccttgatatggccttgcataacattatgacgccatgattgcgcgcgtcattcccctgttagccatggtgctatgtcaaattggccttaactcaatcgggctgtcatgtatctctttgtgctattaaccacgagcttgtcctacatgcatactcttgtcgtgccaccgcctatgca

SEQ ID NO: 216254 - DNA, 451 bp, Glycine max
  unsure (1)..(451): unsure at all n locations
tgggatagcatttgngcgtctatatcgagttacctatgctgtctctacatacataaaacagccccaccattccaattttgcaaaatcatatatcattgtggcatttcaccgagcacttgatgggcgcatgtttggacataaattgcaagagaatgggggcaatgtggcatgccccattgcttcaaaatacaacataagcctaagagccttctcattcaaatcctcaacttcacaaaacaagcatggattcagatgcaaattgcttcacgaattttacaaaaaatgagcaactatagcaccaaaacacatcaatggagagccaaataaccaagggaaattgcacttacttgtggggagtgatttaaagcgtgaaaaggaagcaaaaactaacaatggaagcttgggggctgctgttctcgtagttaccgtgagccttggggtatttgaagtg

SEQ ID NO: 216255 - DNA, 438 bp, Glycine max
  unsure (1)..(438): unsure at all n locations
ctgaatgtgtgtagcccaccatctcttcatagtagaatattggtaatgtgtctactatcattgtcatcattttttttttcattgagctgccacttcaactgccaggtctcttcacctttgggcgtattctttgaaagatccgtgcccctatttttgcacatattttgtagttgcatcctatccgaagccattatactgacactgtctaacaaaggcaatcattaagtccttccaagaatggactcgggaaggttccaagttagtgtaccaggtaataactaccccagtaagactttcttggaaggaatgtatcaacaatatctcatcttttgcgtatgcccccatcttccgacaatacatctttagatggttnttggggcaaggagtccccttggacttgtaaagttcagcaccttatacttgggaggggtgatgata

SEQ ID NO: 216256 - DNA, 427 bp, Glycine max
  unsure (1)..(427): unsure at all n locations
agtgcctcttcacgtctggaatatgaatgatgcatatatatctcaatacccttangtgctgtgctgatgactccttcccgatccaagcgttaataggagtcttgtctattacagacttatatggacatctgttgagtatgtaaatagcaggtagactgcttcagcccagaatgtgttaagtagtcccttttccttgagcatcgatctaaccatctccataactgcgcgattctttctctccgacactccattttgttgatgagaatatgcgactgtaagttgtctctcaatgccttcatccttacaaaatctttcaaactcgccagaggtgtactctttgccgctaacacttcttagtacctttatccattttccactttgatttacagcaaggccttgaactatttgaacactccanagacttctg

SEQ ID NO: 216257 - DNA, 352 bp, Glycine max
  unsure (1)..(352): unsure at all n locations
ctcaagcttgttaggctngattgacccgaagtattggttgttataatcatacttagctttgaacctcnnnnnctgtttagtgtagaccatctttatttccttactgagtaaatgatggtacaaatttgataatgaccaaaaaaaataatttataaggatgtcttaataactgcgctttttcttttcatatttgctagggttaaaagtacgtccttttaaacgtcttttcttatccatgatccgactcaaaaatttgaagcttttttaactgcatttttttttctaactgggattctgcggaagagtcgcctggtataaaaagctgggccacaaaatacttcactctattctt

SEQ ID NO: 216258 - DNA, 427 bp, Glycine max
  unsure (1)..(427): unsure at all n locations
tcaacacgacgcttggaggagggcacttgaatatccacacttacccacnttggacttgatgaagcacgagttaatgggagcagcttaagttgagttatctcatattgcatcacatcaatcagtcctcattgagccccctgaagtacaacttttaggtgcgcgtgtgtcaacctatggtagttgcattgcaccacagccaaaagaagtacctcaagagtcgtccgatgttggtgacaattcgatggggttgtatgtggttgatgaagatcaaaatactcttctagtggccttaggaaaggggtacccctcaacatgtaccatacacactggtccttatgcagatgaggtcactatagtgagtattatctctgcgtacctggctgatgctaacgtcctgcttcctacctcagaggaattgtttgtaacc

SEQ ID NO: 216259 - DNA, 419 bp, Glycine max
  unsure (1)..(419): unsure at all n locations
ntaataagtaaacccacaacagaatcaaccaagtcctcatttcttccgnangtttaaaccaagaactcatttattcaacttcattctcttcttcttcctcttctttttttattcgaacgtgaacaatagcaattggaagcatttgaaatataaagcaacaattaggcaatatatgtatatacatcaagcatgggcaacaacaacatatcatccaatgaaacataccccccttcacacttattcccaaaacaattccaaagctccaaaattccttaaaggtagggtgaaatcatggttttctacctaaggcttgtaatgagcttcaaaacaaacaaaggggaacatatgctcaaaggggctatcaaagaattatttaaggtaggctatttttgcttaaggttataagaacaaaatgccta

SEQ ID NO: 216260 - DNA, 424 bp, Glycine max
gaacacacaaactcaacttactcgggccattcctgcgaaagcaaacatacggaaagtatgtttacttgtgggactggcgtcacttcttaagcataaatggcctattaccttctcccattaatacaaacatcaatgttaatttatagcatgcttatgcgcatatttccttacaaacgttcttttgcacaagacatgttattaaccgataaaaatgcacccatatacaatcaaggcagcttcggtacctagattatttacacgtactttcaaggagtaattgttacttacatcacacacattttcttggctaaattcacatacatgcatactcaaagcattttggggtaccaaaaatagcacatgtgcacaatcttggatttctaatacctatacatacactaactttctgatgaatactgactat

SEQ ID NO: 216261 - DNA, 447 bp, Glycine max
agccttgcacttctatatgagattaatgacctacccagtcacggttatggccatatataatccttaccttaaatgtctaccctgttaggacctatggggaacatacctcttctcttccttttctcaattttcatgctaatcacttagtctagaaacctagtcatactgttatgcatcacatgcattttctctattctgcacaaatatcatccatcatagaacaaaatgtcacgaattcatacacaaacgaatacaaaaaaggaatcatgtctacatgcttcactcccaaaataaaagatacaagtatacatgcatacctctataatcttaccttaaactatgctggtatgacaacaaaatttgagcaatgttcaatatggaagagaatcatactaggagcgcgccatggtcaccataaacatcacgatcacaactgtgcttataatc

SEQ ID NO: 216262 - DNA, 422 bp, Glycine max
ttctttctcgattgctttcttagatacatgatgatacttttaatgcacactagatgaagaagaaagaaagacgcgttacttgatgagaagagggtttttaagttaaggctcttcgcctatcttattaatggtattatagcaccacatccataaaattgcttcttattgttatataagcaccacatcaataactgcaattccatttaacttgatggcgaacatttagaagtttccttcctgattctccctagggttaactaagttctaacattgattctgacataaaaataacaagtcgtgcttttttctcaaatagaaaaccaactcaactcaattggatttaacaggcacaccatgaatcttcactattaatttcaatttcgcgtttactgaatcaaattgtcaattccgttccttttccc

SEQ ID NO: 216263 - DNA, 352 bp, Glycine max
tatcctttttccaaccgcacacggtataattttcatattgtgcggttcccctaccaaacgcattcttctttatgcatgtcaaacacttaacctagatacacgactactcatgaattatccaaaagaaatataccaacgtggctacatgattccctttgacaccactaaatataatgaaataagacaggaatcacacatcattgcaaatgcttagcgttacacctacaaatcacaatttggctctcgtgaacgcggaaataagaactgaaggtggaaaatagaagcttgaaatctgggtcggttcaaatgatgctgagctcacacaacaatgggcttccggatcgttcaaatt

SEQ ID NO: 216264 - DNA, 282 bp, Glycine max
aacgccttgactatgatgaaacctatgctccctattgcagattggaagctattacggtggtgcatgattttgcatgtattatcgatttcaagctatatcaaatggatgtgaaaagcactttcctcattgatacattgaagaagagatatatgttgaccaacctctagggtttgtagacatcaaacatctaatcatgtttaccaactgaaaatggctcggtattgtttaaaacaagaacctacattctggtttgaaaagattgagcaaatatctccattcgaa

SEQ ID NO: 216265 - DNA, 401 bp, Glycine max
gggatttccttatagtagggaatctatcctttctaagatggagccaaacccagtcaccctcattaagaactagctcttttcttcctctattgcctttagttgaatacacctttgtttgggtctctatttggatcttaaccctctcatgcatcttctttacaaattctgacctagattccccttctttatgtataaaagaagtgtccagtgggaggggaataaggtctaaccgtgttaggggattgaacccatagacaacctcaaaaggggactgcttggtggctctatgaacccccctgttgtaggcaaattctacatgaggaaaatactcatcccaagacttatggttgcctttcagaagagcccttataagggtggataaagacctattcactacctct

SEQ ID NO: 216266 - DNA, 400 bp, Glycine max
aaaactcagcttgacattcctttccagctccgctatggattgaaggttctttatccctgaacagcgagcaaattgcctgcattacaagtgtgtcagaaattattttcctttccatatatgaaatgattgggttcaaaaaaactttctggaattctattgaacaccaaaagagaaaaaacacactaccttcctcatataatgagaagcatgggttaactgctttttctacatgagagctagtataccagctatagtaacacagacatcactttgtgccacaaataaatggtatataacctggatctttttctcttctatgtatattattaagagtaagatgccatatggcacgcccgcaggatataatcagatagtctagatttgatattataataaaatc

SEQ ID NO: 216267 - DNA, 199 bp, Glycine max
atatactaatggatcacatccacacagcttatcaaaaggtagttaaattgtgttggaaattgtcgacacgacaacaaaaaactgtctattaatatgtctgacgaccatttatcttacggatttgtgttcgtcgggaacttatctgacatcatccattatcgacagagttttattgttaccaacagattattgccgttac

SEQ ID NO: 216268 - DNA, 369 bp, Glycine max
  unsure (1)..(369): unsure at all n locations
aggaaactcttatatgcccttcacacggtcttctgaaaggacaagtgagtgctatgttctggattaaacactttatgttgatatcactgctgaggtaatgtatttatattaattatctttttaacatgcacgcgctgaataatctatggagtgtctacgtagactgtgataaactggaccttgctgctgactgctacatgaatgcactcaacatcaagcatacttcgagcacatcaggggttggcacgtgtatatcatcttataaatcaccgcanagctcatatgtgagatgacaatctatacaaaacgacggtgtatgcatctctttgacaacgtcaaatatgtaccggacaggcaaaggatttgtat

SEQ ID NO: 216269 - DNA, 448 bp, Glycine max
  unsure (1)..(448): unsure at all n locations
gcttttactgacattgagaattctgcattggttgtatatttggntnangaaggaaagtgaaagaaaaaaaaagaagacaataagatgattatgtagctttcttggtaagaaagaaactgaaaagagaaaaaagaatatgtatctaaaatgatataatggcttaaataaaaaagagataaatattggtgtttttgtcttcatacataaaaaaaatgtcatttgctgtttgactatatatgggtcgtgtattcttatcataatgtgtctccaccttctcctcctcctcccaagtgaatgacttttcaaataaaataaaagggatattgtcgtcctaaccttcatgtggtagttttattcatatttgctactatgtgggaattgctgcgattattggttaattagattgattgctagtttcttccgattctttttcttaattcattctatc

SEQ ID NO: 216270 - DNA, 414 bp, Glycine max
gcttttcgatacattctatggacccgtagttgtgtcatatcgtgcttagcgcatttttcctcagttctgtttacttattataccccctgttgacgtgcttaagccattgtacttaagtcgcttctcgcttaacttataaataaaataaatttccaccgaacgtttgaattgcattatccattaactttggttaaaatcaattccgactgttcggtcgtgcctgaaccacgttggaaattaaaaagaggtataaaatatcataataatctaaaaaatatctttttagtgaaataaagcggataatcaatcggacgtcttctctttgggatttctcattctctatcgaatagattaataactacagtgaaactaaaggctaaaatcaattcgcctagtcaagctcgtccacaaaaa

SEQ ID NO: 216271 - DNA, 416 bp, Glycine max
  unsure (1)..(416): unsure at all n locations
agcttggaggggggataagagaagttgctataatatatcagtacatcgggggtagttattttaacttttatatatatttccaacttatttcactttgagcactcaacactgttatgtttgccaatctccatacattcgaagaactcatgagagagcacaagtggggaatgaaactaataaaaaaataaggggggaagtgggtcaaaatttaaattatgtaacttctaattttgcagttttttttcttttgtccaagaaaaaattattcaaaagttaaggatttgtaatcgaaagagaaggagagagaaaatacaaggtacctactttttgtttgttgcactattgatttttcttatgcaantctattcattcattattggaattagaccacactacacatgcaactcatgttgctt

SEQ ID NO: 216272 - DNA, 453 bp, Glycine max
catgcaagcttccgcttattagtgcgcagctccttcaagaatttagcatatcttggaatatgctttattgcatctaggagaggtatgtctacctctactttcctaaatgtttccaagatctccttctctgcctcttccatttttttgttggaaattgctcttggagggaatggaagagggatatgtcgcttctcttatgttcacctgcatagaaattgttaggtaacttactctttaaatttttgtcatcatctttttcaagagtagagtgaggttgggcatcttcattggcggatgaggaagatgctactggttgagatccttgacactgctttcctgacctcaatgtaatggcactcacatttttgggattctggacagactgagaaggtaatctatcataattctgcgactattgttgatttaactgtgtagccaactgtcccatctgat

SEQ ID NO: 216273 - DNA, 160 bp, Glycine max
ctgcagctaaattaatatgagggtgttattttggccacacaacaccgggaaaattttgtgttggatggctccaattaacatcatttgagcgtctaattatacgggctattcagacatcgagaaaagaattgtcgttgattatttgagctcacatcaattt

SEQ ID NO: 216274 - DNA, 444 bp, Glycine max
actgcagcatgcaagcttaaattgaattataacgtttgatattgctggtaatcgattaccatatatgtgtaatcgattacacagtgcaaattctgaattcaaattttaatagctattggaaatcagttttggccactggtaatcgattacatcctctggtaatcgattaccaaagagtaaatttgttgaaaaagactttttaacttaaaattcttggccaaaccttttgctacttcaattggaattcccttcctatttaatataccctttctaagattctagagactgtcttgactatgcatcttgaatatctttgatttctttgtcttgaaaaaagctttgtgaaacatgtaatcctttggcatcatcaaaacatcagctagatcctttgtctacaatcctcccctttacgatgatgacaatccatccctgaatcaagacaac

SEQ ID NO: 216275 - DNA, 395 bp, Glycine max
agcttgtctcaaagaggtccaggaaggataatgcggccgaaggaactaattccgctcccgagtatgacagtcaccgctttaggagcgctgtacatcaccagcgctttgaagccatcaagggatggtcatttctccaggagcgacgcatccagctcagggacgacgagtatactgatttccaagaggagataggtcgccgacggtgggcatcactagttacccccatggccaaatttgattcagacatagtcctcgaattttatgccaatgctcggccaacagaggagggcgtgcgtgacatgaggtcctgggtgaggggtcactggatcccgtttgatgcagatgctatcggccacctcctgcgatatccgttagtgctggaagagggcaggagt

SEQ ID NO: 216276 - DNA, 355 bp, Glycine max
  unsure (1)..(355): unsure at all n locations
agctntntgctgcaaaattactttttgttggtgtgtgttctttttcggcatgtgctaaaggtggtcttcgtcattggaagtgcggtagacaggctttgtggttgatttaaggatggcctttgtggataactgggtggtgggtaaggaggaggtttgttattggctgagtaatgacattgttgggttggtgggaaacttggccgtatatgaatggcagccacagcatgggtttcttcctctttctcaccctcttcatttgccccacgattctcagacgccctattgggatgatcaaaattgcccttatttcagactaacatttatctttcactggcgaaaccaaatctgcaaagtt

SEQ ID NO: 216277 - DNA, 459 bp, Glycine max
agcttcttagaaagatacattgtattcattttaaattttttaaaatatcttcttctatactttcaagtaaccatcacattcaaaattattttgtgtctatatataactcgcattagtagctaatcaaaataacaacttttgtttttttacattttctgctttgtttaatccctttatcatcaatcatgtgcctaacaatcaagggggatctagaaacctattaaagggggttaatttttttcctccatttgtaatatgttaaatgtttaacttttaataactaataactaacaatgtttatttatttttttactatttttacacataaaattgaaattaattcttaatttaaatgataataacattaacatcctttgatgatagtcttgattaaaatactaatttttacccgtcatatgttatgatttgaatatatcacacacattcattatgtataga

SEQ ID NO: 216278 - DNA, 349 bp, Glycine max
atacttatacgtttgtgaatgttagtggaaatttgttggttgccaagaattagaagtagtctcaattgtagagacgaaccatgtaacaccccaattgtgctatgaaggtttttcactaaattttaatttaaaggaaatttttatttaatttatttatgaaaacacgatttaaattttcacgatataattgtatatcaaagacatacattaatttacaaataattcaacaagtcatacactagatatagataatgactatgatcatagaaatatctcacaagaacacgtatgtaaaatgtgtgcgaccatcaacaatgtacccattgcctatggtttacatctaaaatgg

SEQ ID NO: 216279 - DNA, 379 bp, Glycine max
agcttatccaaagtggcattcgttgtacctccaaattcctaattcagccacctttaaagtcctactgaattagtacaaagtaacttctagcaatttggtgagtaattcaacactgtatataataagtacctttgtctgttaaaattttaaaaacatatacatatctaacatgaacttaatcttaatttcaggatgcactgagttctatgtactcatctatgaaagatgcaaaattcaccaatgttaatttggaagggactacaaaggcaacattgttgacaataattggaggaagtatgccaaatcacaaaatttggaagttggccaggaaattatttttgatgttccagaatcaaaatttaactttgttctattctaa

SEQ ID NO: 216280 - DNA, 344 bp, Glycine max
  unsure (1)..(344): unsure at all n locations
atgaattaatctggtgaataaataattttctgaatattaatataagacctactattttatgcagcggatcactgccgaagctgctctaaatcatgagtggtttcgtgaagttcctctccccaaaagtaaagaattcatgcctacatttcctgctcaacatgctcaggacaggtattttgacctaataggaaatgctggagcaattttattaaagaaaaactttttgtaattctgctgtctgataaaagagggaagtngtgttaatatttgttgaccctctataacatgtcattatggacgaggtggcatatatttcattaatcatcatataaatatgcgtgtgc

SEQ ID NO: 216281 - DNA, 444 bp, Glycine max
  unsure (1)..(444): unsure at all n locations
agctcggaaccaatattgtgcgcatgcctagttctttattaactaanngatgagcaatacaagcactactttntgagcaaaacaacttacagcaaaaacaatacactttatctaaatcctttgaatacactagccatctttgatcatattttctccatttggtattactttttggtagaaaaatgaatatctaatcggaccattgtcaacaattaaatctctgaagttgtcatccatatttttccattgtcccagatcataaatatttttagaaacttcatttgatgtactattgaactccttatttgtttctaaactatcttcttataaatcttcattatcctcttgttcttgactaggattaggactaatcatattgntaaaaatttctacccttgaatgttctcattatcactattctactctaaccgataaatattattt

SEQ ID NO: 216282 - DNA, 468 bp, Glycine max
  unsure (1)..(468): unsure at all n locations
agctntaaaagatgggctaagattttgttaaaacataagcacttagacaatgaaggaaagctggagttgctgcacatgatgtccaacgttatgtcaaggaataagatcgggctgcactatgcacaaggcaagataaaatgtcaaatgaagaattgaagctgcaggatccacgatgtcggatacaatgtccaggacatcctgcccgagaatactggagttgctgtacaatgcaagataaaagtcaagtagtgaagctgcaggatccacgatgtcggatacgatgtcctgacatctggcccgataatactggacatataattctgttatatctctaacagattattgtgcagttagcaagagattagatgatctatctttaggaacgaattaaaagataattaaagtttgaatttcaaagtagaagagttcgttcacggattaaagattaaagataaaaactgaaagatc

SEQ ID NO: 216283 - DNA, 284 bp, Glycine max
aactaatccaatcctagttgtcggactctcagccacttatgatagccgccgaatgatcccattactgcttcccctaagttctatgaccttatcttacgccgcataccatgctttgcgaacttcttggagaaccatcgcgtttgtggtcactcgaaccctatgcgaagacgctttcatctgatggcacttctctcatggtgtagccaagcttgtctatggcgaggacgggattattataatacaatcccttgttcccatcaaaagaacattgacaacctcccatg

SEQ ID NO: 216284 - DNA, 442 bp, Glycine max
  unsure (1)..(442): unsure at all n locations
agctntaattaaatataattggtctaggttattaataattaatttaattatggttactacactactagaaattatacatttaacatcgctagattagcatcggttttggacaaaactgatgttaacacaaatgcggtgacatacttgtaaataagacgagtttattaacatcagttttgtcaaaaccgatgttaacatagcctcgttaacatcatatttttgaaaaaatgatgttaacatatcttgtttgcatcggttttgacaaaatcgattttacctaggtcatgttaacatcggtttttacaaaaaaaccgatgttaactaggataagttaacatcggttcttttagaacatcgacgttgtgtgtntattanaattaaactagaatctcttttcactgcccgcgctcagtctcgctaacctaccttcgtcactaccatt

SEQ ID NO: 216285 - DNA, 210 bp, Glycine max
  unsure (1)..(210): unsure at all n locations
catgcaagcttttggcanaaggaagaagaagaagaagtttctttacactcanaaatcaatgcggagaacatgcttgtgtaaagaatgaactcgcccacatcgacttatagaacgattgatcgattgattgtgaaatgcaaaacaaagctttgcatttatagactcttcatgtctggacaagagaaccattagaagagttgtgactttcaa

SEQ ID NO: 216286 - DNA, 458 bp, Glycine max
  unsure (1)..(458): unsure at all n locations
agctttctcataagtcctaaatggcatttcaagctaagatttactcactctaacctctaaatactaccaattccagatttggccttccagccctcaaaaattcactcttttcccactcataacaccacatcttcactttctaaccctaggttaatactaccattcatctctaacagttttccatcagcaatttcagcatataaacatcacaaacatcatcacaaaaaaaccctaaaacagaatgggtatgtttaactcatccaaacatggcaatttcaacaagctttcaacaaatgtcttcacaaataatcatcacacagcagaaacctagcaagactacccatcatatctncccaaaccccatacccacgaaaatcaaaggagaaagaagtccacccaaacctgaaatttcgaagtcccactcgtagacacgcacttcacgaccccgaaaatgccct

SEQ ID NO: 216287 - DNA, 387 bp, Glycine max
  unsure (1)..(387): unsure at all n locations
ctatatnattncttggacacataccaactaaactgtacctgaataaaatcttctagtttatcccatcttctatatanggatcaaataagccctataatttcattagtcctctctcagaaactattcatggcttcctcacttctggaaataaccactgcatccacccttcccatcaaactcactgcccccagtcaaatcactcattgtagaagcaaagcttcatggtgaatcaaaggtgattgaaatgtgttttgatgataacaatgatgataacaaaagatgatgacaaaggtgatgacaaanagctcaaagatcaatcaaagaacaactcaagtgaatcaagaacaattcaagagttcaagataagaatcaagaagaattcaagac

SEQ ID NO: 216288 - DNA, 438 bp, Glycine max
  unsure (1)..(438): unsure at all n locations
agcttgtnatgatcttagatagaagtgtgttattaagttcttgagtgaaacccctcttatgaggtgaaaatctatattgtgtgcagtccaacacaaatctatttctttataaaattccagcattggctggcaaaggtgaaacccaatggtgtagctagtctagatagggctaaaattaaagtctagtggggaactgacaggttgttcacactcagtggtttgctgtttcaattgtgaatcggttgtgttagtggaatatcatatttagcggtgaggactagacatagcccacggttagggtgaaccactataacaaccttcgtgcatttttctatattcttactcttgactntgttttgcatagatctgaaaaaatacttttgatcaaaacattatatttgttaacctttcatcttancaactaaactgaatatttta

SEQ ID NO: 216289 - DNA, 429 bp, Glycine max
  unsure (1)..(429): unsure at all n locations
gcttaagaaaattaatatttaaaaaataaacaaaagagaaccccaaatgcgaactctgcagaaactgaattgtggtggtgagtaaaatttctgacaatttcaattggtgcgtagtaatagaaattgaaagaagagaaagaagaagggaatgacctgccatggtggccggaacttgttttcttgcgaaaattccgtttgaatggcggaggcacttactggggaatcgagataggtgtccgtccgtttacatatgagcagcgaagctctttacattttacaacaagcagccattctttcttgctttttttgtttttattctgcatatactcaaagctatgcgaggttaattttatttaatctataactaaaagatatacatataatctcatttcgcggtgattgnttatttctacatctttatctctaacc

SEQ ID NO: 216290 - DNA, 376 bp, Glycine max
ggatccctaagtcacctgcggcatgcaagctcctggtgactgtggaacacgttattctgtcgcttccagattggctctttcgccaagtatgagtatatgcgtatatctgtattatatttgatgttctggtttttgtttgcatgttgttttgtgccgacaataaaacgaagaagtatagatgagagtcgtcatcgcaaatagggcaggacggaccaaatcagtgtcctatctttgcttttctcttatctccgacgagaggtaagtaaagaggggcaactgtcataccctaattctctccgggcttattacttgatgacatgccataaatgaagttcctagacgtttcacaaatcataacgaagcatgcttgttcgat

SEQ ID NO: 216291 - DNA, 424 bp, Glycine max
  unsure (1)..(424): unsure at all n locations
agctgtagagaatgtatatgttttatgctaaattanaattttctgggtcaaatcgcttatattctcttgtgtgcaggatcatggcaaatcgtgtttctttaaagagataccgattgaagaagttggaccgcatggaccaattggaaaaacagataaaagttatccgggcacgttgcttttctctctaaataaatgtatccagcaatttctaaatgtacctaacatttttttaccttattcttatatacagcaacatatctccaactttcgtcgtcaaattagagaggctaataaaaacaacaattgttgcggatgagcacttcatttgaaatcagaattgcactttccgatgaaaaaagtagaaaggtaccttcttctcccctgatggttttgagaagatgtgaaaattacggacaaaaataaa

SEQ ID NO: 216292 - DNA, 451 bp, Glycine max
agcttctctatttatttgtaattaacacaataagcctatataaacctatctctgtagtgccttatgactatgcttctaatttctctcattctcttttgctctttacttggtattcagagcctaagagaggtagtcctagaattgtgtctgccctgtggacccactgtccccaggattttcttttttcttatcttttttttttgcgaatcatgttctcgctttggttagcaaaaccgattgcagccactatctttggcgacttttctgacagttgctgccaccacctccagaaggatgacccagccggcagtgaagctgaaatgtgtagagagaaagagaacttgtatattatgaatgagagattacaagaagtcaccgagtctctgcttacagaatgtgtttatactacagagacgcagttggaaggtagtacaactggttaactaggaca

SEQ ID NO: 216293 - DNA, 367 bp, Glycine max
agcttcaacaaccgcaaggaatgatacatttatattggtggggaatgggattccctatgaaagtcgctacgaagatatggagcttgaacatgagaaaacaaaaaggtaataccgcgcaagagaggttgctggactggatttatatgaatacttacattctcttgatcggaaaaacaaaaaagaaaataggatataggttgaaatgtgttattttatttcacccacaacttattctcaaaagttatgcgacattatctttttatataatatcacaccattcttgaaagtaagttttgaatgaaataaataatttgagttgcatttataaggtttggcgcttgtgtaagtaagcttgattctaccctta

SEQ ID NO: 216294 - DNA, 144 bp, Glycine max
caccccacagaaaccaaaaacaaaaacacccaaaaaaacaaacaaaaaaccaaaacaaaaacaccccaccacccaaaactaccaacgaaaaccaccagcccaaacccaaaaaaacatatacacgccaaacaaccacaaaaccaa

SEQ ID NO: 216295 - DNA, 434 bp, Glycine max
  unsure (1)..(434): unsure at all n locations
tgagcatgcaactgcaagaaaatattggatgtatattctggcgtcnatctacacacacaaaccaaggccattattcaaaatatgtaagatagaaatgatgaattttattggcacaaatattgacttctgcaactgctactaatcttgcaatcaaagatattgtatatatagcaatgaactttccattcagtaacacaaattttgtttatttgtacgcttaaatctgctaaattgtctgttcaacttgaaatctcacatctctatcttacatcttttattcggcaatatgtaacaaaagatgcaacaaacaatgttactatatgttacatcatagatgggcatntgttgttatatattgcttgctggcacaccacaaaatatttttgaatctcttgtcctagataaacttgtttattagtctggttgctctaaca

SEQ ID NO: 216296 - DNA, 310 bp, Glycine max
tcaccccacatgttccctttactctacaactcatgttctttaacaataaacaggggctgataagctgtaatcaatcctatctccatcatttaactcaccatcttccttgtttcgactctgatgaatactactttaccgcttttattatgccatttgatataatgccctgcatttccgacaagttatataatttgtatgaattactaaatgttataatgattcatcttcacaagtacataatatcattcacaataattatgaaacgttattataatacctcgtaagtaccttattacatgacccattcttc

SEQ ID NO: 216297 - DNA, 394 bp, Glycine max
  unsure (1)..(394): unsure at all n locations
agcttcctagataggaattatatgtcatcaaccattattttcactataatnacatatacaaatatcattttaggaaattaaaaccccacaaatagccctccaaaaaagtcttgatatctctattcagagggattttttggaatcaacgcatatcatccactacacacactattcaacccgctatttggtccactatggacactacactaaactgctccattacagcagcccccgtagcgggcaagggtcactccgctctactacaccgctatagcatgctattgataaccctgcatggaacaaagctcaaatggattcttctcatactctgtatccagggcactgagcagtgaaggctttacatcagtaagataccctttaatgtctgcaagga

SEQ ID NO: 216298 - DNA, 419 bp, Glycine max
acttgtcgggtcatcacaattaaggcctagacccattctgatctcatacccatcccttaccataactcgggccaccatcaatgaggcaccatatatatgtgtgtgtaccggatgagcctctacattaacatcgttcattattcctagtgcttgaaaagatgattcccatgactttttctcagcttccatatagggtgaatagaatgtacaactcactatgatatttttctttccgtgaaactataatcaggtgtccttccatcacaaacttcaatttctgtggaacatttgacgggaccacccttacatattggatccacggtcgtaccaatatgtaactgtaaatgggaatttattacttcattaggatagttatttgcacatgtctggctattttaatcgggagacaatttctctct

SEQ ID NO: 216299 - DNA, 388 bp, Glycine max
  unsure (1)..(388): unsure at all n locations
agcttgcttgtggagcttatatggaagctggatcttttancttcaatgagggccttcaatggtgatttttcaccatagagatgcaccggaaggcaaaggagataaggagaggggaggcaccatccactatggaataagccaaggaagaaggagcttcaccaccaagaattgccttggataataagcttgaagaggatgctttaatggaggaaaagaaagagagaaggggggagcacgatattgaaggaataaaagagggagagaagtggaactttgaagtatgtctcacaagactctcattcatcaaagttacaacaagtgtttcacatgcttctatttaaagactaagtagctatcttgagaagctttcttgagaaaacttccttga

SEQ ID NO: 216300 - DNA, 321 bp, Glycine max
  unsure (1)..(321): unsure at all n locations
ggacctaagcacctgggctgcagctctactaaggactaccgtgtattattctctngctcgcccttttgagccttgttatcttgctagtgaagagctcactacggctcttggtgaaaactcatgactttaccatatccttaacgaattttggagctttggaatagttttgggacataaagcggggggtttatgttgcattggacacctcgtttcgatggctatgcttcaagatgtatattgggccatacgtgaagtacattgtatattggtgacacgccggacttgctgaatgacatgttgtgacttttaggctaatgagtt

SEQ ID NO: 216301 - DNA, 408 bp, Glycine max
  unsure (1)..(408): unsure at all n locations
caagctngnacgtggaaatggagtggttcttcttaatgcacacacanccattgcatgaagcacagaaactcacattacactcttttctcttttgaacggaggatgatatatttgttgtttcaaactgaactgtgatgtgcacttctaaatctcatctttagaatttattaaactaaaattctaaatatatatttatcatttaataaattaaattaaaggaccaaattgatgtagtgactgaattaggctgttatcgcattccttgacagcattagatttggctgttagcactgcacaaacacaacgttgcatttcaccttatcagatgaggaaaagtgtgctactagccctgcacaaactagatatatatttatgtggatggcctttaatcttaacattcttatccca

SEQ ID NO: 216302 - DNA, 452 bp, Glycine max
  unsure (1)..(452): unsure at all n locations
agcttagacttcttgttttgtggttagtgtctgtatatctacttgntaattgaatgaagaatttcattcctatggttcttgcaagattaaagaagataaacatgacatttgacagattctaaccgaactaaactttttgactggcctaagcgtttgtacattataaatgaagttgctcgtggactacttcatctccatgaagactcaagactaaggatcgtacacaaagatcttaaggcaagtattgttttattagataacgaaatgaatccaaaaatttcacattttgacttagctggaatgttgcaggtcatcaaattgaaggataaacgagaagagaagttggtacataataagtatctttttaatgttaaattctcatctccaactaatcaaatatgaaactaattcttgtgtgatattttagtgggatatggaactgaatactacaa

SEQ ID NO: 216303 - DNA, 464 bp, Glycine max
  unsure (1)..(464): unsure at all n locations
nagcttanaaagagaattcgaantaatattatatagtcatatatcgcnaggggantttacatgggatcatccaattaaaaatgacttataatatgggttttaaagtaatgtttacaaatagaaatactagtaacaccttctaccatacatattttttattacactctatattattggatgaactttattgaaaattataaattctgtgagtattattttatattcattgatagccaagctcatgattttataatttagtataaattttaactaatagtagagagtgtgtcanaagtatgttataaggtatgttacaatcacgtctaactgttatacaaaactcaacaatcttactatttaagataatttataatttaatgatattattttaaatacatcactattgtactctatttaagttcatacaagaatgtaacaaaattatcttatttgaatgatatgta

SEQ ID NO: 216304 - DNA, 306 bp, Glycine max
  unsure (1)..(306): unsure at all n locations
agctntggatgatgtcaaagattatagctattcaagattaatcaaagttaagatcaagaattcaagagaaacgattaacaattagtacattgtatgttaaaagaatcccttataagagactacaaaggtttggccttaggtaaattcttcaaaacatcttacaaaagtttttaagtaaaactgtttttgaaaatatgtttttctctctggtaaggatttctaaacacaagggaagggtatccctgtggggttcaaaatttgtaaaaggaatttacaagttagtggaaatctcaagcgggttgcttg

SEQ ID NO: 216305 - DNA, 449 bp, Glycine max
agcttaagctccttcaactgcacaaggctcttaatatttgaagagtatccttgtggaaccttcacccgacgaagacactgacaaaaacttatcttctcctttttggacaaagtatggtaggctgggggcaagtaaattttcttcccatcaaaccttggatgcaactgtgatcgtatgcccatatcagctagatcttgacgggtattcaagccatccttcgtcttgccttgaatgttaaagagcgtcccaatcacactgtcacaaacatttttctccacatgcataacatcaatacaatgtctaacgtcaagatcagaccagtacggaagatcaaagaaaatggacctcttcttccatatgcaacatctacttttattcttcttttggatctttccaaatacagtattcaatttgtgaacccgctcatatacctgctcaccagtcaacgg

SEQ ID NO: 216306 - DNA, 410 bp, Glycine max
  unsure (1)..(410): unsure at all n locations
agcttccctacaagncctaattgacattctaaacttgtatcaactcacttcaaactcagatttccactaacaccaaatttggccctctaaacctcaaaatctcacacttttccacctacaacactaccttcctcacatttaactctaagctaactctaccaatcttctataccagtttactaactgcattttaagcatacatatacatcaaaacatcattatttaaccatcaatcaacatgggcagctgtgcttaaatcaaacatatcatagtttagcatgatttacaacaatttctttcacaaacaactacctaaatgcgataacctattagaactacccattataactcccaagaacccaacaccctcagattctagtgaggagaagtccacccttacctggaattga

SEQ ID NO: 216307 - DNA, 463 bp, Glycine max
  unsure (1)..(463): unsure at all n locations
agctntcaacaagagtcttacgaataaccatcatgaagcagaaaactaacagaactacccatcatatctcccaaaatcccatacccacgaaatttaagagagaaagaagtccacccaaacctgaaatttcgaagtcccactcgtagacacgcacttcacgactccgaaaatgctctcctttcacgatttggggcagaaatgatggccaaaggttgaagctttgtttggagcttcaatggagaatgaaggagaagagaatggcaacgtgagggagagagagagctgtctgaaaagtgtgggggctgagtgaagagagagaaaagctttttggttttaaataaaaaggggtttctctctttttctattattttatttaatcaatgccacatgtctccattngagtggagcaaanagggcccactttcccttttgactgtgacccatactcagccacaaaagtggg

SEQ ID NO: 216308 - DNA, 305 bp, Glycine max
  unsure (1)..(305): unsure at all n locations
agcncncatacccatagggcgagcacgaactttttatgcaantgnggagnagccaagatccccatatccgtcgcaacagctccaacaattgaagtgacacccttcattatcatgcaactatatgccaatcaaatccactcattaaaaataaagatggtagaaactcccaaccatatatgactcacaaggagctaaaatgaagaacaagtatcatcgagcttattgacattgagggaatagcacacaaatgcagcctatgccaccacaattgcggccgcaaatactccaaataccttgacattgcc

SEQ ID NO: 216309 - DNA, 354 bp, Glycine max
  unsure (1)..(354): unsure at all n locations
agcttccaaaatgtgttccaatgtcgtgacttatngagaggaagatatcatgaggattttccaagagtgatgatgattatcaacatagaaaagatcttgcaatctgcatcatggtttgataattgataaagcttgaagaagttgtaatctgcatactaaaggtgtattctatccaattctgatttctttgtaggttttaatcttggttagggttaccaaagggctttgagttgatagggtttcaactcttggaatttcttgttatagggttcaacaaagcttttgaaatttctcttgtagggttcaagggaaaaatagattgttagagaactgcttgtgtatagtgtttgtcct

SEQ ID NO: 216310 - DNA, 451 bp, Glycine max
agctacactaggaagatcgctgtagttctctcttcctagggtaaggatgaaaatttccatcctaggtcaaagttatggccaaaaagttgacttttggctcaaaaggcctgcacatggcatgacatgatgtatgttgggatatctatttaccaaatggctcagaaataagggaatgcccaaatcactttcatgaaacacatattatgataattagaaattcacgcaaaattaatcatagcacacatccatgtggacacttcaaatataaggatttgtggccatgctaacactaaggcttagggttcatttcctcattcaaaccaaaccagtgtgtcaacgattactccttttatctagtaatataaacatctgaacccattttgacatttgtgaaaatcattcattgcgttcgccctctatgtgcacatatctatcttcttttcttaaaaaa

SEQ ID NO: 216311 - DNA, 433 bp, Glycine max
agcttaataagtgattcattggtaggagagtccaaacgcaacaatccatattatcaagtatgttgtatttaaattaccttgattcaactcacataaagttcaaaatgtgaatcatgggtaggagggataaaaaacaacaatccgatttcacatttttaatggctagaaaaacaccttgtaatgtttgtcactcattaatagtatacaacaaaaatcataatgtaagttgtaacaacaagttaattcatgggtaggaggaccgaaaacaacatttcattttaccaatagcaacaattcattttatcaagcaagttgattcatgggtaggaggggccaaatgtaggattgaaagtgtagggaagtgcttcccaaattcaatttaaggaaggaatgtaaacaattatcctatacaacaacaagtcttaattgatga

SEQ ID NO: 216312 - DNA, 276 bp, Glycine max
  unsure (1)..(276): unsure at all n locations
agcttggattgcctngtaggatgtaatctttcccccccaagatggagccaaacccagtctccctcattaagaactcgctctttacttccattattgcctgtaggagaatacacctttgtttggcactctatatggttcctaagcctcttatgcaacgttttaagcaactctgacctagatttctctcccttatgtttaaaagtaacgttcagcggtaggggaatgaagtctattggtgttaggggattgaatctctcgacatcctctaaaggggac

SEQ ID NO: 216313 - DNA, 362 bp, Glycine max
agcttcggaagagagtgatgaggtacaagctctataggcagagcttgaaagagcctgtgtagtcgaagagaagttcaagtccatagccatcaaagtctgaaaagagtatgatgaactaagggatgtcaatatggccaccgatgaagccttggaatgagaaaccaagaaggcccgaaaggaagaacacgaccaaagcaaagttttgaggggctttatagggcagcaatagtgagctcaagttccgaagaggtgaaaggaatcatcacgggtcaaaggcatgatcttgaaggacgagctaaaggcttgccttatgtcgaaaagaaaattgtcccaacagctaagcgagactgaagggaatatgt

SEQ ID NO: 216314 - DNA, 427 bp, Glycine max
agcttgtaatcgattacacatatactgtaatcgattaccagaggagtttttcaaaaatcattctcaacagtcacatctttttatctgtttcttaaatggccatcaagggcttatatatatgtgacttgagacacgaatttaacaagagtttttcagaacaaaaaggtcttatcctcttataaagcaaaatcgttttatcctcttacaaattccttggccaaaacatttgtgattcaataaggaattatttgagcgctcaaattggtcaatctatctcttttaagagagagttcttcttctcttcttctttattctgaaaagggattaagagaccgagggtctcttgttgtgaaagaattctatacacaaaggaaggattgtccttgggtgttaaaacttgtaaaggaattacagatagtgaactctc

SEQ ID NO: 216315 - DNA, 369 bp, Glycine max
actgagcatgcaagctggggccatctactaacgacagagagatgttgttactctatattcggattccacaggataccaataccaaggcatcctgtagaattgatagaagccgccactcacttcaatgggtatcaattcacccgcgaagcaccaaaaacgcataccatatgttctaccattacacacccaaagtgtagaatccttactgcaaacctatggcatcttcgtatgggccacccttcccccgaaagattacaagccatgccagcatactatccttacttgaataagaacaaaagttcaacttgaatactagtcattatgcccaacataagagattaccttatcttctagcacatctacgcacaa

SEQ ID NO: 216316 - DNA, 442 bp, Glycine max
  unsure (1)..(442): unsure at all n locations
agcttgtttgaaacattatttgaagtagtgttntttataacattaacttctaaatttttatatttatttactttttgtccttagatatctattagattttctttataatcttttctatttaagataatattttattatttttatctttttatgtaattttactttttttttagttacttcaatttataattttatcacacacttattatttaataagataactttctagttttcagttatcaactatcttttcaacttccagctagttttttatcttctagttagctttttaactacttttgtcaaacataatcataataaattaagagtatgtttgacaaggcatttcaactagcttgtaatgtttttttactagttgaaaagcttatttgagtgtgcttgacaaaatatttcaattagcttctatctttctttactagtt

SEQ ID NO: 216317 - DNA, 455 bp, Glycine max
agcttcaatgtggcaccaactagttggcagtttatagttagggcacttgtcagtcatgtgagggcgaccacgatcaacacaaccgtagaaattactacctaatactataatttaaagtgctttcttgtaggcatcaacatatttatattggtgcttcctattatacagaagcaaacttgcataacttcgatgctagattccaatatacataccccagaaaccctaaataaatcaatccccagaaagcaagctataaacatcattgaggcattgtttgcgacattcataatcagaaggttgccaaagtcacaaaaagtacctgagacaaagtctccaaaggttacaaaaatatacagatacagtcgggaaaggttgcagagatacaaacgaaaaagaagagagtgcgagcaaaatagggctcgcgttctaatgttttaaatatgtaagccacaaca

SEQ ID NO: 216318 - DNA, 470 bp, Glycine max
  unsure (1)..(470): unsure at all n locations
tgcaagcttgtgcatgtttagagatatatagagagagattggtccaagttccagagagttttgagagcttttgctgtgcaaagactggcagagaacggagcttgaagaggaagccatcctgagagcatgagatgagtctgtgagtgattgtgaggttctagaggtggaggagacatccccactacatgtatttcttcaatccttcatttttctcttctctttgttcgaaaggaagcttcccagatatggagagctaaatcctctgttggttcttccttgtaggtacttgatgtaaatacctatatatctatttaatgatgttctatgtgttctctgtgttatcaatacgtcatttcagtgtgctcttgccttgatcacgtagatgcatgccttgttaggatcattaacaataggaatnggtctaattcttagaacttgataggacagggctagtttatcgtattatcacg

SEQ ID NO: 216319 - DNA, 399 bp, Glycine max
agcttgccatcaaggggtcaaattggtggtgcaggttctgatgattctgtccatgagttactacctgggactaaacatcatagccaggttcagaaaattatgcctgattctgctggcattgcttctgatgaaaagaaagaaagaagttttcttagaccgaaaggtgatacaaataatgttgtgataaaacaagtagagaggaaacgtagagctgtttgcctctttgatgatgacgacgacgacaaacctaaaactcctgttcatggaggagctgcaaaaaatatgaaatcgtcttctggttcagaggtcaagaagagaaacattgtacactcagagaagtctgatgttggtcagctggctcaaagaaattccagtgaacttgaggacacccatttgaaa

SEQ ID NO: 216320 - DNA, 422 bp, Glycine max
  unsure (1)..(422): unsure at all n locations
agcttaacacatgaatctaccataaatatattattctccccaaactgtccaaacagacaattcaagattcaatacaatgattaatgcaattgtccgcaagaatcattatattcaattttaaacgagaatctaaggttcactcatgatgaacataatttgtatagcatatatcatttctcattaatggcagcgaacatgtaataaaaacattggtaacaaacataaaaagtgttcaaaaaaacatntgtacctgtgatgatgagcagcatgtccaaataacatagcaacaatccaataaacaactgaaggaccacctacatcaatcatcattcccaaaaacattagatatatatttttgccaccaacatcaatcaccaaccagagtgcttaaacaagtgacatacaaaagttgattaacaaac

SEQ ID NO: 216321 - DNA, 373 bp, Glycine max
agcttattctttgactggccaacaacactatttctaatcagaattgtgaaaactttaaacaataatctcttactgtgtctaagcttaaatcagaaacatcacctgcacaatacagattatttcttgtaatcccagtatgatctagctgtctaccatctgtttcaagatgctccgaaggaatgtctactgcagaagatgtagtcataaatctttgctcattaatgttgtcagcactcaactttatttcctcagcggcagctccactttgtgaggtaacttgatcaattgaaagttttgtttctccatccatcaagcaaactctcaatggtccatcagaagattcgtgtgaatcatccttttgatgatcctgaat

SEQ ID NO: 216322 - DNA, 448 bp, Glycine max
  unsure (1)..(448): unsure at all n locations
agcttaatatatcacttcatcatatactagtagagaaaaattattataaagtttcaagataaaaagttttataatgttgcttaatcacaattcatcaactgatttgtttttatgataattattttaaaaatgatattaataataatttatgattaaatattaatataaaaatgttttatattattaatgtatgattattaaactcaaactataatttttatagtaattatttttaaaattatattcataacaatttataataattaattaacgatatcaattttttttcaatacatccatattaaactcattntaaataataattctaattctatgcattaaataggaaaagaaacaaaaataaattaagatgatanttgggcctaataggctgaatcattcatactgaaagataagaaagcacaaaacacacgcatttgaattcact

SEQ ID NO: 216323 - DNA, 384 bp, Glycine max
  unsure (1)..(384): unsure at all n locations
ttaagcacctgcagctgcaagcttattaaaactgaaaccttgcatttcctctcattntaatatcagcttctaggggagtttagagcagcaaaacttcttcttctttctcttgagggctggtctagaaactttgaagcctagaagtgttggtaagcaagttcacccttcactctagccttgttcattcttcttcatcacttgaatcttctctcatgttcttaaattttgttgaagcttgtttttgactcaagataacttcattcttggtgtacccttctctttcacgtggagactacaataggtaaaggggtggtaggggggtccacttcttgaaccctaaccttgttgtcnttggaagggaggctcattgcatattggtttggt

SEQ ID NO: 216324 - DNA, 424 bp, Glycine max
  unsure (1)..(424): unsure at all n locations
agcttcatgtattgtatcatcatttntattacgaaccaactatctttttctgatatttttttataacatttaaaattaatcttcatttaattatgttttgtttattataaactgagtattgtcatacttcaaaaaggttgattttaagtgggatggcttatatgatttgatatgtttattgtgcattcatattaactgtaattgtagctggggtttcagtttgtccgaatggccgtctccgcattgtgatacgtggctttgatttgcacctgagattgctgtgttactgaattttcaactcgtatttctatgcattggtttttctgtttcttttgtcatcatttatcgtcaggttcttcagagatgataaattattgaatatgcaacatctcaaagcatgaattngtatatttatcatcaaaat

SEQ ID NO: 216325 - DNA, 415 bp, Glycine max
  unsure (1)..(415): unsure at all n locations
ctggctgacatgttctcaatagctcagttgcgttcttctggagtcttcagttctatctttctcactgtagaagcatctaacagttgcttgggttgtggtcccagcccatctataaacatattcaattggattggctcagacaacccatgagtgagagttcttctcaacaagccttagaacctctccaatgcttcactcagagattcatcatgaaactgatgaaatacagagattgcagctttcccttccgcagtcttggactctangaagtatttctttaggaacttttcaacaacttcttcccacgtattcagactgttaccctcgaatgagtggagccacctcttggcttctctgtcaatgagaatgagacaaggctgagcctaatagcttcgtttggacaccgacaatctta

SEQ ID NO: 216326 - DNA, 469 bp, Glycine max
  unsure (1)..(469): unsure at all n locations
ttgtgctgatcccatatgatggagcattctcgcaatacattagttttcctaactgatcaccttatgattgtacctagtaagagtgacctgacttactanggtatnggttgtcttgtcatgtactcctaggcgctcgatgaggttntcactgacatggtaccacattgcatataggattgagtcttaagtgtatttgtgcataacgcttgtgtattgatcgatatagattaatttagtaatattatgttttgatccttgagtacgtgaatgttgcgaaaatgaatgagacatgttgttttgtgatgtgatgttacgcgacaaagtggtggaatgacataagttatgtttaagtaagttttatctcatttatatgatatgtatatctatgctgtcccgtttctctctattagctaggaatgtgatagctcactccacgtgtgctatatngtgttggatcctgtgataatct

SEQ ID NO: 216327 - DNA, 488 bp, Glycine max
  unsure (1)..(488): unsure at all n locations
tactcagcttctaaggaggtgagcttagttatgagaggagtgtgtgtatctaatctctatcttcccaaggaagttntctcacagaagcttctcaaggaagttttctcaagaaagcttctcaaggaagctacctagtctataaatagaagcatgtgtaacacttgttgtaactttgatgaattaaagtcttatgagatacacttcanagttccacttctctccctcttttattcctttaattntgtgctccccccttctctctttcttttcctccattaaagcatcctcttcaagcttcttatccaaggcaattcttggtggtgaagctccttcttccttggcttattccctagtggatggtgcctcccctctcctcttctcctttgccttcctttgcatctccatcggtgtaaatcaccattgaaggacctcattgaagctcanagatccagcctccatagaagctccacaagcaagcttccatcatg

SEQ ID NO: 216328 - DNA, 463 bp, Glycine max
  unsure (1)..(463): unsure at all n locations
cgtgacctatgatactcagctttaaggcaaggacctaatatctaagttgggatatttgcccnctgagagcgaggatgcgtagtcctctaaaggcgagggcgtgtagccctatgaagttcaggacgtgtcgccttttgaaggcgagggagtgtagtcctatgatggcaaggacgtgcaatcctctaaaggtgagggcatgtccccctttgaaaatggggaacatgtagtcctctgatggcgaggacgtgtagtcctctaaaggtgaggacgtgtagtcctctgaaggtgagggcgtgtagccccacaaaggtgaaggcacatgaccctttgacggcaaggacgtgtagtcctctgaagttgaaggtacatgaccctttgaaggcgatgacgtgtagtcctctgaaggtgaaggtaactagtacccaaggtgagggcgtgtagccctcttaacgcgaggacgtat

SEQ ID NO: 216329 - DNA, 324 bp, Glycine max
aaggcccagcatccggacgcagccccgcgggcgaaaatataaaaacgctgccggggcgggccacaacaagcaggggacgacaccgacatgacaacaaacacatgagattaaaacacaccagaaaatgggcgctatccacggggaagctcactagacgggcagcggaggtcggcggagaatcacaaccaacgaatggacagaaagcaaagcacgacggtaaaaagaaaaagaaatgaagactccaagccacacacaagctacctaactaacgaggcggatgaagcagagaccgaccagctcgggcctgcgggcgacatccaaaac

SEQ ID NO: 216330 - DNA, 324 bp, Glycine max
  unsure (1)..(324): unsure at all n locations
cccattttcttccacatgcacctgtatacactcacataagagaaaaaaatacatacttctgttaagcatacttgtatcaatgtagttctcaagatgttctagctgtaaccaatgccttgttaagtaattntagcctgngctgctaagctgcttataatttgaggattattaattgataaagaattaattttggttgtgttataaaactatccctggctttaagttaacttcatgtttgtaaactgaaaataatttttcagttcaaattataatgtaattttcatttttgcatgtcttttaattatcaaactatccgtacttttg

SEQ ID NO: 216331 - DNA, 389 bp, Glycine max
ttgcagaccaaatttcgagaagatccaacagttaacaaaggctgggcagcgtttttaccgagacagcttcatgtagatctctctagaagcttcattaagaggcttcctccagaagcttcattaagaggcttctagaacactccagacatcttctcaaagatcccaacggtcagatcatggaaaaatatcttgtgaagttgcagaccaaatttggaaaagatccaacggttaacgaacactgggcatctgttttaccgaggcagctacatgtagctttctctagaagcttcattaagaggcttcctccagaagcttcctcgtggcttctttgagaagctttctcgagaagcttctttgagaagctagattcttatctatccacacccctc

SEQ ID NO: 216332 - DNA, 459 bp, Glycine max
  unsure (1)..(459): unsure at all n locations
ntgctgtctcaatcaacctgtatatagacgaacaattcttattgtagctcacattcttggtgtttctttgtctaacatacatacttgctcaaacttatgagaagaaacacaaactccatcacaatcatgcattcaatccaaaatcaattcataacaccaantttcacacaaagataaaaatgattcactgcataatcatccaagtcaagttaaactgttctgtatgcttcaaaacaagcatactaactattcgaaaaaacacaagtatataatcataattataaaccaaaatcaccaaaaaagaacaatgtactaaaacataatagttataataattcccaaaagaggagaaatcacgaatctagaattcctgtgaactggcctatgtatcctcctcatctgtcacatggacaacagggggtagcaaaaggagtagcagctcatccagatgctgactct

SEQ ID NO: 216333 - DNA, 408 bp, Glycine max
  unsure (1)..(408): unsure at all n locations
taaatctcagcttgcttcttataagtttaatgattgtctatctcttatttgtggtgtatgattagcagcatgcacttgatgaaatcacctatatgagtgtccagtggggccactatttatttatcttggtgagagcgcnagagcacccacgaatatcgggcacgcgcatgacttattagcacaacacagtgataacaacaaagactgtgggggtgtcttgtgattagtagaccactatcacccgccaagtgtctttggttcatatagcttgctacaccaactacgtcgtatgttaagtcttatcagtctaagtctggttcatatagcttgctacaccaactgcgttgtatgttaagtcttatcaatctatgtctagtcttctggaatatgtggggaattgttgtcatt

SEQ ID NO: 216334 - DNA, 449 bp, Glycine max
tctgaaagttaaactcacatctgaactggtcctatccatttccttgacatcacttgcatgaccataaaattcatgcaacggtgattcctcgattgtgaaaatcttatttggaagaacgatgaaggatgattggcttgagtgtttcttctgagaactagagaagtcatgtttcactttgctagctgcactgtcttctgcattcaagcaaatactagatgtattcagtgtttgtacacgccatatgcgtatgacaccatcttctcctccactagctagatattggccattgggactaaatttcatagtccaaattaggccttcgtgagctctaatctgttgtccaatatacagtgcactgaactccatccacctcttcttattctgccctacatttattcttcgagtttatttgccgtgaaatcattttgatctgatttacctcaccttct

SEQ ID NO: 216335 - DNA, 440 bp, Glycine max
  unsure (1)..(440): unsure at all n locations
tagtaaacctcatgcaagtgttattatcattactctntccgccagtttagcagtggttcccactcaaggttttttttagaaaacaattatactttggctcggaggaggtaacaagggataaattactgtttgggatgaagaaacacggccatgtgtcatttcaaatcttgactagaaactcttacaatttggattttgggacaaaacctatgataacacgcttctgattgttttttgtcttttttggctaggccacactaacttttggctaggccacactttcgggttttcaacctatagagtgagaaccttatatctgtcccctacgttcgcttaaagctcatgcatggtgcctgctattgtcccaatgtggggttaggaggtatctgctgttgtcatttctcacgtactggtagtaagaagaaatgaaagaaattgtg

SEQ ID NO: 216336 - DNA, 449 bp, Glycine max
tcttgccaatggcagaatctacgtgggtttgactagatgcagcctagaccatcttgcatcgacggatgaaaaacgtatggctaatatagaggatgagaatgatgcaggaacacatgctgtgactgtatctcctacatggccaaatctctccaccagcataacggtgtctgtacctcagacttatcagaccttcttattgcccaccacccagtctaccgcatgggcctccctaagtgattcacaacagccggctgactgacatccacataccatgtgccactctctacatgaacctctgcacccaccacggcacgactttttcgcataataggcctgcagaattcgaccctgttccaatgccatatggtgactcgctacgctatctgactgatcatgcaatggcaggcataagccatcacagactcctctacctctgttcctagacaata

SEQ ID NO: 216337 - DNA, 477 bp, Glycine max
  unsure (1)..(477): unsure at all n locations
actaagcttctagccaatggacttaccttgaattaattgctttgatatcctctttgagccttgnttccctttccttggtttgaagctcactacaagccttaagtgaaaaaccatgatatcaccatatccttaaggaattttggagctttggaattgttttgggaataagtgtggggggtttttgtttcattggataatatgttttgttggatatgcttcatgatgtattctgggtcatacttgatgtacattgtatattggttaaatgttggacatgctgaatgagatgctatttctcaaatgctacagagtaaataataataataataataataataataataaataatcaaaaaagaaaaagaacagcaataaagttgagtgaataagatcttaaatagaaaaataatgatgagactcttggttctactctttatgtttaaatttatctttanggcctcttattttttctaatat

SEQ ID NO: 216338 - DNA, 482 bp, Glycine max
  unsure (1)..(482): unsure at all n locations
ntgcttggagcttcaatggagaatggaggagaagggaaatgcatcttgttgaagagggagggagagagctgttctgaaattgggctgagtgaagagagagagagggttgcttttttgggttttaataaaagggttttctctttttctattattttattcaagctctgccacatgtccctatttgattggagcaaaagggcccactttctcttcttgactgtgacccatactcagtcacaaaagtgagaaaaatctgacctttgaaacgctaaaatcctgcctcggtttgcgtgtcgtttctctgattccagtttctcgcgtttctctgcgtccgccggggccagttttcgaaagcaagcaatatatatatncataacgctcaaatgaaaccncgagcgtggtttagaggggtggtttcgtaaattataagtcgcaagcaaaacgatgatttttaactaattaattaggaattaacccataac

SEQ ID NO: 216339 - DNA, 463 bp, Glycine max
  unsure (1)..(463): unsure at all n locations
actaagcttccacgtaagaaaaataccggctggaagagatgcatttattcntattatggaaacttcacttcacatggactaaatactttcgaatcttgaacactatcagatccaggagatgcccctaatattattccatattctttggttaaaaaagctgcatggcttttcttttctttcgagaacgttttctagtacagacttagttcgttcaatcaaaggaaaatggaatttgcatgggacttgactctgttaaacaataattgtatttcaaaagataaagagcggaatcgcaatcattaattacaaaatatacatatatatactatttctaaagtaatctttaattaatacttaatatttgacaaaaatatgtattcatataataaattaaaaaatattaagtattaggcgtcaattttaattaataattataatttcactttatcatgccagcctcact

SEQ ID NO: 216340 - DNA, 458 bp, Glycine max
  unsure (1)..(458): unsure at all n locations
ctaagcttcatacattgngttggcaacttcgctataacattctctttgtattgcaataggcgcgccgattgacttacaaagaaagaagcccaggatgatcaactattagttttaaatgttgttccttatgaacttgagtctaagttgatcgcaaatgccctaggtgttgttttcttctctaggcacaactaatataacctntgttgaatttattttctactgcataaaaaaaaaaaaaacacgacatggtagtcccaattaattcaacacaatattgtttctagaataactaggttaaggaacaaaaaaaaatcgccattctatatattcgtattaaactaaaatctcagttaaaaaaaacaattntgagtcattnntacattttctctttctctcttttctgcattgcttgtaagtaacagaaataaaagatgtgaaataatctttattctgatttc

SEQ ID NO: 216341 - DNA, 164 bp, Glycine max
cattatgatccaccgagtagcttcgtatcttcttttactgcagattgtgtaaataacatcagtaatctaaaatgacacatttacaattaccgagatgaaagagttatatctataatatatatacctatatatgtcgcactccatatatactaatgtatatataa

SEQ ID NO: 216342 - DNA, 446 bp, Glycine max
  unsure (1)..(446): unsure at all n locations
tattcgtcaagctagtgacattaaagaagtgcttactgggtgttagttgtcatttagactaacttttgcattaaatagttatatgaaaattagcatcattccctcaatntatggttcttnttgtaggatttgtaaatattttcatgtttagtttgattttgcttagtagataccctaattttgtgaattaatgttgaatcaacttcagtttcaggccaaatgaaaaagaaggtgaagcaactggtgtcttgctaagtgaggcatatgcgcttagtgagtgacatccgctaagctaggcactcagcttgcccaacgagtcgtttgtcccttctcacgcttagcgcgcccagcttgctaagcgaanattcactaacttgcgcttagcgagaaaatggcgctaagtgagccttcagaatttgaaacgtcaaggagcctttnaaacactg

SEQ ID NO: 216343 - DNA, 416 bp, Glycine max
  unsure (1)..(416): unsure at all n locations
ttttcaaataaaattattaataataaaaaataaagatctatggtcaaacaaacaccaaatatatacgcactgtaaacggccaagactttagctaatagaattctcatcttcttttctctccctctcttattttatatatatgctgtcagatttctcacttcacaaacaaagaacattagtgtctgcttcatataaccaaactcttcactctgcttctgcttctttggtcagttcccaattctctactttttctcgtttctcttcttaccctctaatcattcttcacgtgattttgatcccggacacttttcctcaactgggttccgaanaaagttctgtctttttcacgcaatattctattatcaaactcttttagcggcagcattcccctgtntctaactctgacttctctgcac

SEQ ID NO: 216344 - DNA, 430 bp, Glycine max
ataaataaggcacccacaagtatgaataccaactctaatttcattacaccctctaagacttaattaactgtcagagtatttttaagtataacacctaatgtcgtgctctcccatctgaaaccaagatttgtgttgaatcttcatcgtgataatgatttgtgattcttctatacaacatttggatcgactaattacttcaacgtatattccaaaagaatgtcaagtgattgatactaggaagggaaatctgcttctcaataatgggtttcattccaagctacttcatgagtaagcccttggtgtaggtgaaaagaaataaatgaaaaagataggatctgctacaatgtaaagggtgctgtatagaaaaacgataaagaaagtggtaaaagaaagattgtaaggacatctttatatgaaagtgataaaagat

SEQ ID NO: 216345 - DNA, 444 bp, Glycine max
  unsure (1)..(444): unsure at all n locations
tcanaggatataaaaccaattggttgtaaatgggtttactatataaggattggagtagattggaaggttgaaacctacaaagcttgtcttgttgcaaagggatattgtcaaaaggaaggtatagattatgatgaaacttttctcccatggcaatgctcaaatcaatccggatttttcttgctatagtagatactatgatcatgaaatatgaaatggatatggaaaatgactttccttaacggtgagctaaaagaagatgtgtatatgacacaacttgagggattcacatccttgtctgatcgtaataaagtgtacaagttntaactaaagttttaactattcatttatgaattgaaacacgtgtgtagaagttgaagcattcattttaacaaaaataattgaatggttcaatcttcttagctatgaagaagaactctgtgagta

SEQ ID NO: 216346 - DNA, 407 bp, Glycine max
tgcatcatttacattcgtcccctttctcaagcaaatacttaattcttcttgacatcatcaaaatcttcatgatttacacaacacacaccccattgactcatccaacatagtcatatataggataaggtgtcttccgagcaccggttgcacaagcacaagatgattcatgaggcaccgcttaatcctctcgaatgccactcgacattcatcgtcccattggacagacaggttcttactcaataactttaagagaggctcacaagaggtagttagttgtgatatgaacctcgatatgttgattaatcgtcctacgaaacctcagacttgcttctcggagcgtggctcgcgcattctgacgatgaccttcactctgtctgagtctacctatatacctctttggctcacga

SEQ ID NO: 216347 - DNA, 416 bp, Glycine max
  unsure (1)..(416): unsure at all n locations
ngcatnnattacattctccccctatctcaagcaaagtatttattcttcttgacatcatcaaaatcttcatgatntacacaacacacaccccattgactcatccaacatagtcatatataggataaggggtcttccgagcaccggtggcacaagcacaagaggattcatgaggcaccgcttaatcctttcgaatgccactcgacattcatcgtcccattggacatacatgttcttacgcaataacttgaagagaggctcacaagatgtagtaagctgtgatatgaacctcgctatgtatattaatcctcctaagaaacctcagacttgcttctcggtgcgtggctccggcattatgacgatgaccttcaatttgtctgagtctacctctatcccttatggctcacgagtaaaccaat

SEQ ID NO: 216348 - DNA, 403 bp, Glycine max
  unsure (1)..(403): unsure at all n locations
ctcagctgtctcaaagctatatcataaagactagagagattttttggaaaagtgcttaacatcaccttttccaattcagaaaagagacaaatctagtctcacacaatgtcctagaaatgatctggaacaaaaacaaatggaagtaatttcgtatgcatcggttgttgggagtattatgcatgctcaaatctgtactcgaccaaacataagctttgcaactagaatgttaggaagatatcaaagtaatatgggaatggaacattggaaagttgcaaagaaagttttaagatacttacagggaacgaaagatcacatgcttacatataggaggtctgatcaccttaaggtgatttggtacttagactcagactttgntggatgtgtggatactagaaaatccact

SEQ ID NO: 216349 - DNA, 480 bp, Glycine max
  unsure (1)..(480): unsure at all n locations
taaaagaacactcaaaccgggtgtatgtacccccaaggcctagtctctgaagagtccgttaaggcctctccctcctgattcaggtccaactaagaaaacattttagcacattttagtacaacctgcccaattccttctatttgcgtagcatatctaagaaaaacaaaccagacaaaaataaatgtaattaagaaaattatgtcttcaaactcagtaacttcttctccgtgctttgaaaataacacttagaatgagataataatctcggtgaataaaacaactaanagaaatntattgtaaatgtaagtatccatactctcttccccatccagatgacttatatataaataaacatcattatcatttcagatggacgtataatctcataataagatgtacatcatcaaaaaaattataaaaatatcattttgaaaaaataccaactaattccctaatatcgtgcatctgataacaattctc

SEQ ID NO: 216350 - DNA, 250 bp, Glycine max
cttaaaatgatcaccttttcaagtaaaaaagaattacttgatcataaacaactacgtacgtctgcattcctcatcgcaaaagatgaataaataggagctaagggaaacaccctcgtctatcacaaacagagaacacttttatacgggtaaccgaaataacgacatacatcggtacatactaaactgagcgcatcatatgccgtatggttaaggctgtctccctttggacggacgtgcggggagcaatacc

SEQ ID NO: 216351 - DNA, 302 bp, Glycine max
gaaactaagaacgcttacctacgaccaatgattatctcatctctctcttgaaatgctactcttgagaccatagcaaccaagtagaacatcccaaacttctcctcttaccgatggacggattccctgatttgaaaaatctaataaagtgagacaaaatattctctagattccctattgcatatactaagatgcctatagcaagctactttttaaacattcgacttaatccgctgtttgaagagtctcctatagggatctatatgccttgatatgtatggtgagatactggtaataaaatgtca

SEQ ID NO: 216352 - DNA, 484 bp, Glycine max
acacataaaactcagctatgtggcaaccatggtagacttggacactctttgatgttgcaggctcctcttatcaaattgagcaaacagttctctcatcttcatatgtccattgttcaagctaggactgagttactaaaagcacaggatgagctaactgtggacaaaatgaatagagggaatattgagaaggtgaagaagtatactgatgaagtgatctacctgcaggaacttaatgataatatgctgagacagaggacgaaactggattggcttatagaaggtgatacaaatacagctattttctatgcctacctcaattctagaaatgtagctacccatattagtcaacttctaaaggaggatgggacttatattcagaatcctgctgatatagaaaaggaggtttatgaattttatggtaatttgtatggaactcgagaacacagtgtgagcatgattgatattaatgctatgagggagggac

SEQ ID NO: 216353 - DNA, 469 bp, Glycine max
  unsure (1)..(469): unsure at all n locations
tgtccattggggttctnggaatntcctaattctcctttaaggcaccctacctncacacaaactcattcttttaactaagctatgaacaatatgattgataaccctataaaccaacttccatgtgcttgtgtcaaaggtgactccttttccatcgagatattggtggagcaatataggctaaggtaggagggttgaaaaaataacctacatgaatgccttattataggcaaggatgatcgaccaatcaaggtgcatgatttgcgtgcacaattgactatactttgaaaaccccttatgcaatgacagatgatttcattgngaaggggtttctatgggtttagttctgcagtgtctaggtagtgggtgcatctaggtcttctttgtctactaccatggacacctaacttcaaccctaataagcaaaaacaaacacatgcctagtgcattgagtaaatttcatgatctccat

SEQ ID NO: 216354 - DNA, 395 bp, Glycine max
atttgggtgtcctagcctaaggtgccttgttacacagaattgggcactttattattacaatcagaagtggaaacagtgtttatacaaggagaaacaacaacagctgaagaagagacagctgagcagaatttccggctaggaaactgatacagccatcaggtccaatgtcaccttgaagaaggatttcattggaatcctgagatttggaaaagcaacgattagcatgaaactcaaagaaaacatgattgtcatgaacaaatttgctgacacttatgagattcttagttatttgaggaacatgaatcatatttataagagcaagattaatattaggattattatgagaaaggaaattagagtgtccaggagctgaaattttcagaccttgtctttta

SEQ ID NO: 216355 - DNA, 334 bp, Glycine max
tgtgatcacagctacatctatggagaagaagggaaagtcattccctccttatggacatgaaagagatgtagttcttccgataagtcaggaaaagctcatatctcttgctactgaagcaaagggtaaaaataatgcacatcagtcatggagtgaacccactgtcagaagaatgccaatgccccatgacggtccagctaaatggaattcatcttgcctatcatcaaggaccctagaggatgatgcatcttcttttgccttaaaacacaaaactcaaacacaagaacagatgttaagcaatgaaagatattcatctggatctacaacaagtgatatg

SEQ ID NO: 216356 - DNA, 404 bp, Glycine max
  unsure (1)..(404): unsure at all n locations
ctcagctttgacctgtgcttgaggctaacactactcgatatattgcctttgttctacaccatganaggcgcaggatgcgttatgattgtaccattgagaaaatggaggttggtagacctttcccgggctcaccatagccatttgtgtgctgagcaaagatggtagcaggtctgcataatgtaacggtatcggggtgaactccaagggttctctttctgggaagttcctgctcaagtttgtgtttgtgttgtggttaggatttccagttggtcaaggctatgcaggaaatggattttatgggggaggcacttgcagttgagtgggcattctctattggatgggtgctggactggaaggagatccaacattggctgagtagttgtactggggtgaggagtattggt

SEQ ID NO: 216357 - DNA, 363 bp, Glycine max
  unsure (1)..(363): unsure at all n locations
ttacctacacgcngacgatgatacggtcatattaaagactcttacctacagttaggagatgtaagcagaagctaatgacatttacctacacactatacatagtacgtcaaacctatagtgacagacaattagccgtcattataagccccctcaaagatgacggaaaaaatgtccgtaggacaaagtctatcatacatttacctacgaaatttttatttatagtgacagctattgtctgcaagtataggttattcttcttgtagtatgctaggttatctntgtatatcattataagtctcatttatctatatatatatctaatcatcaacattattctatagacatatttatttatatcatata

SEQ ID NO: 216358 - DNA, 434 bp, Glycine max
  unsure (1)..(434): unsure at all n locations
actaagctttagccaatggacttaccttgaataatgccttttatttgagctttgttnccctttccttggttcgaagctcactacaagccttaagtgaaaaaccatgatattaccatatccttaaggaatattggagctttggaattgctttgggaataagtgtggggggtttttgtttcattggacaatgtggcgtccccaaaataatgactggtttaatagtaatgatttaattaacagaaaccatgcgaaatttttttttctttctctttttcattactttctcttttcaccaaaacaaggtttcgaaggaaaatcctcactatatagtcctgaatggccagatcacaactctattctgagtcatttctttcttaccgctcataatctctaaactattatgctctctcaaaaagaagaatgtaccaaccatt

SEQ ID NO: 216359 - DNA, 468 bp, Glycine max
  unsure (1)..(468): unsure at all n locations
tagtagcagttgcagaagtcaatgttagtgccaatgactattatcatttctatcttacctattttgaattatggccttggtttgtgtgtctagattgacaccagacttatatatacacaatatctttcattgcaagcttagcagcagtcccaaaacccaatgtttatgcgcaaccaagtgtcatgatttctatattaccaattttgctagttgttaatgttgaatcatagttttgctctctcatctggcattcatctcatattgtaaacttattccgcgtcgtccagatttaaaacaaacttctcttactttatttcaaaatcattcttttgtttaccttacaactcactcaactctatcattaccctgtttcaatatgcagaattaccaacatgcaaacatatctaatccagcanatggcagcatcaataggcaagcaatgatccagaagcagcgagatgtctcatc

SEQ ID NO: 216360 - DNA, 371 bp, Glycine max
  unsure (1)..(371): unsure at all n locations
ttcagcaacttcaaacgacgataactttgtactcggatgtttgtttgagncccgcaacacatcgagacgctcgaaattgaatgctgaagctctcagcaaattcaaacgacaataacgtgttactcagatgtctgattgagtcccgtaatacatcgagacgctcganattgaatgttgaagctctcagcaaattcaaacgacaataactttgtactcagatgtctgattgagtcccgtaatacatcgagacgctcgaaattgaatgttgaagctgccagcaaattcaaacaacaataacgtttttactcagatgtctgattgagtcccgtgatatatagagacgcttcgaattgaataccgacgctctgatg

SEQ ID NO: 216361 - DNA, 385 bp, Glycine max
  unsure (1)..(385): unsure at all n locations
ttctgtggaaagnggcaagacctacctattgagaatcatttatgctgcactcaatgaggagctcttcttcaaaattgctggccatccattcactgtggttgaagttgatgcctcatatgtaaagcccttcaagacagacactctttcgatagcccctggtcaaaccaccaatgcccttttaactgctgaccaaaactctggcaaatacacaattgtagcctctactttcatggattctccagntgtagctgtggataacttgactgcaacagccacattgcactacactggcactcttgccaccactcctacacttctcaccacccctcctccaagaaatgccacccaagttgctaacaacattaccaattctcttaaaagcctt

SEQ ID NO: 216362 - DNA, 293 bp, Glycine max
  unsure (1)..(293): unsure at all n locations
acttctaacaactgtacaggttactcagcggcaaagatcaagttgaactatcttcgacaatgtgaaggcttaaaaatcagacatgaatattattaattcttcaggcacacatagactcttgcgttgtgtgtaaatctcaaattagtggccgccaaacacaaatatcaaatatggcgcaaatctatgagaagacacagaagtgttgggacgcacgcgccctgagcgggagtgagaaatgtgaaaccagcgaactggccaactgtacgcgcatcgctactctnttcttcccgctc

SEQ ID NO: 216363 - DNA, 409 bp, Glycine max
tcggagaggttacctctgaacaaaagcaagagagatgagatttttgtgttgtctacatacacacgggatgaattcttacaagtggtgggtgatacatttcaagtgctattatgctttatccagaagttgtatatacttggcattatctgcaatttctagacagaatagatgtatcacaagcttgatccaactacagttggcataatagtggcatatgtggaatttattcttctgaggttaatttcactcatgacctctaggaaataattatgtcttttgcttcttttgatatattgcgcgtcccattcctaattcaatctttaatatctgccacaggatcaaaaatagatacttgatcttcctattaagaaaatgaatgacatctgtacgatggtgctcatatattgat

SEQ ID NO: 216364 - DNA, 433 bp, Glycine max
  unsure (1)..(433): unsure at all n locations
cgctttgacaacaggttatcactggcatagtaagttctgtattatcttacaaactttaatctggcagcactgatgggacagttatgatatgggactgccatactggtcaacgtgctaaagtcatcaatcttggtgctgaggttacctctttgatcaccgaggggttatggatctttgntggtctgctaaatgctgtcaaagtaagctcttatctgtcattgttttgatttgacgtatgataatgtctaatcataggagtagtacatgcaaactgattatgtggctgtggctgttgtgaaggcttggaatatccacaccatgtcatagttactcttgatggaccacaaggccgaatccgtgccatgactgttggaacaatacactttttgtgggcaaggtaactaacctgtattaaattgtcaatgatattcct

SEQ ID NO: 216365 - DNA, 322 bp, Glycine max
tcaatacaactctgatatggctcccgaacggactcatctgcagaacatggttaaaagggaaaacaagtcctttaaagagtacgctcacgcgtggaggacccggaagcgcatgtagcccctcccatggtcgaaagggaaatgcttaccatgatggcagataccttgcatgtgttttactatgagaaattagtgggctacatgccctacagcttcgcagacttggtattcgccggggaaaggatcgacgcgggcttgaagagagggaagatcgactacggctcctacacacgaactaacgctaggaggatcggagcaactgggg

SEQ ID NO: 216366 - DNA, 350 bp, Glycine max
attgcatgagagatctaactcaccaaattcttgtaagcttcccaaccaatcaggtatttttccactcaacccgttgttattcatcaacatgtgttccattttcttggagtttgagagctgaagaggcacttctcctgttaaattgttgaatgataaatcaagaaagttgagaacagtaacgtggccaaattcagaaagaatgcttcctgtgagataattttctccaagtctgagacggctgaggtctctagaattggttagagaggaagggatgggacctgagaagctgtctgtagtcaggcccacaagggtcatggaatttgaaccagtgagaggaaagaaacttccac

SEQ ID NO: 216367 - DNA, 349 bp, Glycine max
  unsure (1)..(349): unsure at all n locations
actnncaaggntgcatgccaccacgaggcatcttttatctctccgcgcggccctacgcagagcaacgacccaatgaacatctatggcctctgaagcgaagactttgaacctgggcgcatacaccatatattactaacacacaccattaaatttggagagccactatcgctggctctgaagctccagaaccagcctctgaatcacatatgagaacgacacgaagtataactcccctgagcctctcacgataccttctatccttccgctcacgacaaggaccaaatacgtcgagaccactatactacaccagccatagcgcnacacatagatatacatatacaccaatcca

SEQ ID NO: 216368 - DNA, 472 bp, Glycine max
cttttgactcctgattctttggaactttcttaactcttgattctttggcatcatcaaaataatcttggaagtcattgcttccccacaatctagctgacagcagcatcgacctagccttggtgaaggagttctatgccaacctctacagtcccgaggggccttccctaaaacaagtcagaatccgaggccacttgataaaaattgatgcagacagcctcaacaccttcctggagaaacctgtggtacttgctgagggagaatccttacccgtttactccagatactacaggaagcccactgatatcagagagattgaggcagctttgtgtatacccggccgagggtttggtttacatgatgaacgccatcatgggaagatcctcaagaaagatctgacaactcttgctcaggtttggagtgttctcctattgctcaacctggcttcgacttcccacacctcggatttgacttt

SEQ ID NO: 216369 - DNA, 466 bp, Glycine max
  unsure (1)..(466): unsure at all n locations
tgccattgcagcagttaagtgaatgaatgaagtgtccacagtctttgatggtttgctggtagagggacatgctaataactaataagatttcctgtgcagggtatcattgtctttgcatgagtgatggctaccttggggctggagattctggttgaatctgcctcacaagttatttcgaaggtaattgagataatcttttgttcttgtttgtttattatatacctaaatttgggttcaatactagttattcaacatgtggattatctaccacaagattgttctaataagtgattgtatcatttgagcagatgatattatcatttgaccttgcttttgctntgattccgctcctaaagatcagtagcagcaaaatgactagcagcacaagcattgaagaggtgtgtttcctccttggttgtggattgatgaactatatcgtaatacattatactcanatgttctactt

SEQ ID NO: 216370 - DNA, 469 bp, Glycine max
  unsure (1)..(469): unsure at all n locations
actaagctatgttgcaacatctacacagacctgctcatacctagctttttattagccacaacagaataactatgacctctccagcaacaggtacaatcccggatggaggaatcatcccaaccttagatggtcgaatcattcacaacagcagcaacaacaacagctttattttcaaaatggtgctggcccaagcagaccatacgttcctccaccaatccagcaacaacagcaacagccccagaaatagcaaatagttgaggcccctccgcaaccttcccttgaagaacttgtgaggcaaatgactatgcaaaacatgcagtttcagcaagagaccagagcctctattcagagcttaactaattagatgggataggtggctacacagttaaatcaacaacagtcccaaaattctgatagattaccttctcaatctgtccagaatcccananatgtgagtgccattacattg

SEQ ID NO: 216371 - DNA, 450 bp, Glycine max
  unsure (1)..(450): unsure at all n locations
ntctggagaaaactnncttgagaagcgtgtgtgagaaactcttttttgatgctagagctnanctgcacacacccctctaataactaagctcacctccttgagaagcttccttgagaagatccctaaacaagctagagcttagatacacacaccccctataatagttaagctcacccccatgccaaaatacatgacaatataaaaaaaagtccttattacaaagactactcaaaataccctaaaagacaaagctaaaaccctatactactagaatggccaaaatacacggcctaaaagaaggagaaaccaattctaacatttacaaagaagagggaatccaaccctgacccatgggctaaaaaatctaccctaaggttcatgagaaccctagggccctctttcgagctgctacacaatcctctcgagtgatcatccaaacccttgggggga

SEQ ID NO: 216372 - DNA, 385 bp, Glycine max
acatttttaagagtaaagtaattgattatgatcacctgataattgattaaagcagagactcatgaagaaccatacatggtgtcaactgaactatgttatcgattacggttgactggtaattggttaaatcacaacatgaattgctctacaagctacaaacacttgtgtaatcgattacgatcagcattataatcaattaaatcaaagattcttatgcactgaagaagtttctaactttagaaacaatcttattacctctacatgatgatgcatgatgtacacatgacaagacgaagactaagatgcaacaatcaatacaaatgccactttaagagttgggcatggaaaatgataaaacttcttcaagctccatagctttttcatg

SEQ ID NO: 216373 - DNA, 466 bp, Glycine max
  unsure (1)..(466): unsure at all n locations
tgcttctacanagagaaattgtgttaagcacgaagtgtctgtcttattgcacactgnaacaccctgatatatatatctatatattattagcaattatgtttgatgttcgattctttgtttggttatttttatcccgaattatttttaacgagtttaatttagttaaaagaggggtgtggatagataaggatctagcttttcaaaatagcctcttgagaaagcttatcatagaagccacatggaagcttctggaggaagcctcttaatgaagcttctagagaaagctacatgaagctgcctcggtaaaaatgctgtccaactttcgttaactgttggatcttctcgaaatatggtctacaacttcacaagacactnttccattatctgaccgctgggaatcttgagaagatttctggagtgtgctaaaagcttccgttcccaagagcatctcttatttaagcacttc

SEQ ID NO: 216374 - DNA, 461 bp, Glycine max
  unsure (1)..(461): unsure at all n locations
gcacccttgcactattaaacgcattgataccactatctttatctccaattgacatctaaggatgcatgtgatctgactcaaatggtaatgatgaagaactaaatactcgacatcaacatatagctcaagcgcaccaataattgctcgccgaaagcattgatcatacacctaacaattgattagttgaaacttcaatttagcatgaattttaaatatcattactaatacctcggttaatttggatgaaccttatctcactctcaaattaagaattttttttttcagattaaaatatggcgttaattgtattttaattctctacattagtgacaaatactactatcagtgtgtaaacatatctatatatatgtttgtgagacctataaagtcttctttggtaattgttatcaatcatgttaccaaataatagcactaatngatgacgaggatagcatattaat

SEQ ID NO: 216375 - DNA, 446 bp, Glycine max
  unsure (1)..(446): unsure at all n locations
gctntcaccgttcttcgacgntcttcattcgatcttcatcgttcttcgatcttcaacgggtaagtatctcgaaccaagctnttcgattcattctatgcacccatggtggtccacattgtgtttcgtgcatttttactctcgttntgtttactttttataccccctcttgacgtgcttaagccgttttacttaagtcatttctcgcttaacttaaaaataaaataaatttccaccgaacgtttgaattatattatccgttaacttcggttaaaatcaattccgaccgttcggtcgtgccgtaaccacgttggaaatcaaaaagaggtaaaaaacaatataataatcaaaaaacgtcttttagtaaaataaagcggaaaatcaatcggacgttttctctttgggatttctcattcttaaccgacttgattaataactaaagtgaaact

SEQ ID NO: 216376 - DNA, 467 bp, Glycine max
  unsure (1)..(467): unsure at all n locations
ttcttgctctctnntgtgtccatataccttgaatctgtctattctccatctgagaatcgttttgtctaagctcgagcatcgtgttcgtcgcactcaagcatcgagacaactctgtgcttcttctccttcaccaccttacctaggtatgtttcgtctaatcctgtataaatatttgattgcattcatgtatcgcacacttagtgaagtaaacatggctagggtatctcatatttaactcgagcatcataattgctttgtattcattacaaggataacaactttaaggaataactggctctttaggtctgttactttaatacatcattcattagttctcttgaggcaggtgatcctgaatcccaagctagacaagaagggcaagaggactgatctngtttttgaagggtgcttgaagtgtccttctttgttaccactctttgcttcgcagactttcaattcatcttttc

SEQ ID NO: 216377 - DNA, 350 bp, Glycine max
ggcacatgcatgaatagtatataagcaaagatttgttgtttattgatgcacaaatgctattcacacttcatatctcgtgaagcatgcttatacggcctcgtacatgaaatgatgtatcatacccatgaaatgttgccagaaataaagctagtcaataataacttatcttgccagacatagagctagtcaataataacttgtatcacggaccactaaaacaattataaggtgtgtatattggactccacgcggggtgcatgaatattatacaagttaagatatcagaacgtgatactatggccaaagaccaatacttgtgtaaccattaccttacaccacccaactttcat

SEQ ID NO: 216378 - DNA, 411 bp, Glycine max
  unsure (1)..(411): unsure at all n locations
tatanatactcaagctgttagaaactgcattggtgcaataacaataccttttcttcactttaaacggagnagtaagaaccctaatggatatggttaagaatatgcccatcaattacactttacccgtatctttggggatgtatggcctgaaaactgccacgtatttgttgaatagggttcctattaacgcagatccaagacatcttttgtattgtggactaatatgacacctaatataacgcacctgcatgttctgggatgccaggtagaaataagaaattacaattcgccataaagaacattgcatgcaataacaatcagtggatatatcattggatatccacaacagtcaaatgggtatatgatatattggcctaatcatagactgagaatcgtcgaaactggaaatgc

SEQ ID NO: 216379 - DNA, 392 bp, Glycine max
atctaaacccattagactacaattataactgtctcaacaatgtatgagtggaattgaattcacgttcttttctacaaattcaggcttgtcaatggatataccttgtctctctcatttgttacacactaccaagggtttaaaatatggtatgcaaactcgtgactttaactccatcaagataatttgaatggcggccatagccctgagaagaattatgataaatcaagtatatttggctataatttctcaccatcaatatacaaaatacaagaaattgcggatatcatttatcacaatttaaaagtcttggagctactcatcgagttagcatgctgatcttcagacaagtgtgccacccttagcaattcttattatatatggttgtacccaca

SEQ ID NO: 216380 - DNA, 476 bp, Glycine max
  unsure (1)..(476): unsure at all n locations
tgtagaatggttggacaagatacatgtcgagggtttggtcattggttcggggataaagggatgtcccacattatttccatgaaacanatgcaacaatgatgatttggaaattttatgcaaaactagtcatgcatgcatctatctggacactcatgtgtcgaaattttttttggtcatgtgatgctagggctcacgattcatttttctctattttagtcaacccaatgctttcaaaacatgttcttttatcaattcatgcattcatccgagtccattttgggtgttcgagaaaacttttcatggcattcatccttcaaatgtgtacacacatttctttcaaaaactagttatgatcagtgaatcttttccaaagaagagatggaaattatcttttttcacaagcatgttgttttttagctagacaactttttattcttattcattatattgttatcttccttctgtctcttttctta

SEQ ID NO: 216381 - DNA, 447 bp, Glycine max
  unsure (1)..(447): unsure at all n locations
tagcagaccagatcagcctaagatgtaagggctgcgtgatatgctcttgagactcgnggcttagcacatgaacaaatatgcgcttagcgcgaggcttgcacttagcgaaaggactgtttttcagaaaacgttttctaagttgtttttcagtccttgttccaagaaattgaaacccttatgtctaacattcaaggctaagctgatatactccattgcacaaattataaagcaagttcccaatgatctaatgcatgaaaacaaaaattgctgaaattaaaaactgggttgcctcccaggaagcgcttctttaacgtcattagcttcatgcttttacctcattgcgtgatcttatgttatggttcttactttcagaacctcttgacctgcgttcattacctgtnaacagacattgtgttctggagcacgcttgtcttcaacanacaaatc

SEQ ID NO: 216382 - DNA, 473 bp, Glycine max
  unsure (1)..(473): unsure at all n locations
ctataaaactcagcttctaaggaagctacctagtctataaagagaagcatgtgtttcacttgttgtaactctgatgaatgagagtcttgtgagacacaactcanagttcaacttcactccctttttcttccttcaatttcgtgctcccccctctctctttctctccctctttcttttcctccattgaaacatcctctccaagcttcttatccaaggctcatcttggtggcgaagctccttcttccatggcttattccctagtggatggcgccgcctcttaccttttctcctttgtcttccgctgcatctccatggtggaaaatcaccattaaaggacctcattgaagctcanagatccagtctccatagaagctccacaagcaagcttccatcaagtggtatcagagcacaagagctntaagtaggtgctccttaaacctccattaattattttgtctttaccttctcttcca

SEQ ID NO: 216383 - DNA, 457 bp, Glycine max
  unsure (1)..(457): unsure at all n locations
tgcanatgttgggttngaattgattagataaccggccttgttttaagcttggncttggttgcttagttaaacatacacgatcgattgagcatgagcttgaatagttcacaaatagcttagattatttacactcctgctcctactaatcatcatatgcccctctttgtcttaaacatgttgagctattaacaaagagtgctaaaagggttatctttagtgcatctcttattgtactgagccaagcataaataacctgcttgggtgaatacctttttatgttgatgtagcatcacaagtattgccatatattaattgtaggcaaacttagttatttctatcaatcccagatagcagacgtgtagcagctgacaccaaaattgctatagtagtcaatagtgcatattaagatgactgctatttcaaacaattatgcagttatataattctactaaaacat

SEQ ID NO: 216384 - DNA, 449 bp, Glycine max
  unsure (1)..(449): unsure at all n locations
tgtcttcaacanacaagtcagaatcaagtctctggttcttatattctaactccaacttcctcttccccatgtcaactatgcagcttgcagtcaacatgaacggcctctccatgattacagggatgtcagtatctttagagatatccatgaccacacagtatgttgggaagataaaatgcttgacccagaccaatacatcttctattactccgtagcgcctggtaatggagcggccagctaattgtagagtcattcgagtgggcataatctcccactctcccaatcttttgcacatggagagnggcatcaaattaatgctggctcccagatcaatcagagcctttcccacattgacttctcctattgaacaaggaatagttacactcccaggatctttatgcttatgtggaagaatctgttggatcacagcactacaatttcctttcact

SEQ ID NO: 216385 - DNA, 467 bp, Glycine max
ttggaaggatcatatcccaagatagatcccttcaattattctctatgagtaacgcatccagaagaagagggagatgctcttggagtatatatggaaagggaaccagtgatcaaggatttccccatcaaacacactgttgctcccaaccccaatggtttgatttttaggcatgtgaaagctaataaatatttagctaaattatagcccaatccatgaattatcttatatctacaatatcgagattattttaacagacttgaagacaataatttggagagcaaaattagcccaacactgaatactcaagatgcatatgtgggctaaagcttatttgggtgtattacttagctctttgaattaatacttaattaagcccatttacttattttcatggtattctacgtcttaatgttgggggcataagatcatgtctgctttcttagaggtggatggtccaatatgatata

SEQ ID NO: 216386 - DNA, 305 bp, Glycine max
  unsure (1)..(305): unsure at all n locations
tatacggataaccactcgggtatgtccggccgtcttcgttattcaattgngagtatgacagatcatgggaccgcggaagatgatgtaaatctctgcgtgtgaacgggcttggcggccacgcgtgacgactggcgcacaagacgaccgtagtctctgcgcgctgtccagctttccgctctacagacacgagaaaagaatggttatacggataaccaccttgggtatttcctccccgcatcgcgactcaaaagcagtatgacagatcctgcgatcgctggagatgacgtatatctccgcgtgtcaac

SEQ ID NO: 216387 - DNA, 448 bp, Glycine max
ggattcagagttcaacatgataatgtcttatgccctatgaaaggagggatcaccatccatcctgaggctatctatattctgacttacaaaaaactcagcgatttatctgtttatacgttttaagtactatcactcaatcatatgtctttggcttgagtaagttgaaccaaatgaagtgaatgctttggcacaactaatgacatggaagacagcagtagcgaatataccatatggtggagccaaaggagggatacggtgtgatcctgcaaaattaagtgtgtctgagctagaaagactcactagagcttttacccacaaaactcatgatctgattggagttcatactgatgtacccgctcctgatatgggaatcggaccacaggtcagtacaacaactatgacttgtgaagttgctgatgattgatatgcttgaccaaagtatgctctc

SEQ ID NO: 216388 - DNA, 452 bp, Glycine max
  unsure (1)..(452): unsure at all n locations
tntcatgatacgatgagactgttcacaattgaatttgacattcttcgttcagatgaactggtaatccattaccaatatcttgtaatcgattacaccattttgaaatcaattggaacattgtaaattaagttaaaagcttttgaaatccaactctgccactagtaatcgattacatgaaactggtaatcgattaccagagagtaaaaactctggtaacttacaaaagtttgtgaaaactctctcgaaaaacaaaactgtgctatggttgttctttgaaaaatcttttcaatacatcccttgtgaaggctttgtgatttcttcactctaaacttgaattcatctcttcttgaatcttgagataaactactcttgattctcgaatgtgttcttgattcaagctcgaaatcatactctgggctgtttgtcagcatctgtgtcattatcaccacttc

SEQ ID NO: 216389 - DNA, 474 bp, Glycine max
  unsure (1)..(474): unsure at all n locations
tctccacttccgactttaccctcgccgccgcaacaccggctttcttcagcaactctccganttgggagtcctcgaggattccgaggatcaattgatcaacggccaaatgcgtgtcgccgcgtgatttctgcgcagcctgtgctcttcttatggccttcacgagattcgtgctcgcaggaacctcgtccggnggaggggactggcagggtagcttcttcaatgcctggttcaacactcgctccacggcgcgtgcagattcatcaccgccgcccgcactgtttattgcttgcacgaaaatgccgttgggatcggaaatcagcgcgtgggctaagtggatgggagtgaattgcgcgtggcctgaactcattgcgagatcgtgcgccgacgcaagagcctcattggtcttgtgagtaaagntctcaagattcatttcaaacctgcacgcgacaatacgagatataatgctggcttatt

SEQ ID NO: 216390 - DNA, 468 bp, Glycine max
gacacaatacacaagcttgctatacagctgattcaggcaggaagtgtagagacagaaattattgatacttcctccgccatattagaagctgcgacgtcgtcatccattaatactacagattcttcagaacgggcagatgatgattctatgcacttcgcagctcacaacaccagagaggtcttattaagactctgttcaagatatccataagttcatctttttggatagggtatgcgaaataatttatgacccacgacctatcctttatttgtctgaactcaataagaaccagaagatatagctggaaacttggacaattaatgctgcggtggcgaatgaaaatataccgatgacagctttgtgagatgattgtaaccaaatctttactgacaaacttgctgaacactactgctatgataccctatatcgtacaacaaaataaattgaatgaatgcaacttgtttacat

SEQ ID NO: 216391 - DNA, 437 bp, Glycine max
  unsure (1)..(437): unsure at all n locations
aagcgggaaagtagtctcctactcttgtttgtgaccacagagtggtacctggagatatgtcgcggaggtcaagagaccttgtggacgtcatgtggggtgctattgcccaaaaccaagctttgaccaatcccgacccaacctgggcatagtcagtcagtgagaacctgtgacgtacctaaacaggcgagctcctggcagtcaaccaataaatgaacaaagaccacaaagcaaggaggcttgtgtggtggctggccagctatggatcttgagtgatatctggagattggcctctggtaattgattaccaagagcgtgtaatcgattacaaggcttaaaaatggagacaagaagttaagatgacctctggtaatcgactacaaggcttagaaatagagacaggaagtngaggtggcctctggtaatcgattaccaatgct

SEQ ID NO: 216392 - DNA, 450 bp, Glycine max
  unsure (1)..(450): unsure at all n locations
acggaccataaaactcagctgtcttgattttctaagttttacatctttaacttatacttgcccttcatttaactgtctgtgggcttggcggtcacgatcaacaaagtgaatttgacacctactatatgttgatttgaccaatgttgttatcgatatgttgcgacaatccttcataaccttatttatacattctgagaggatggttgtcatgtggcaatatcgacgtctttctctatcataagccatcgtccattnttcctttgaaatgcgatcaatccatgttgctatggttggactcaaatgacggaatttttctaaattttgataaaaaaaatgtgcttgcaaggagtgtaatctgcatgaaattagttatcaacaacacatttaagtatatatgaaacttaaattaacgtgaccatcatacatgaaatcttaccccatatcttcaac

SEQ ID NO: 216393 - DNA, 461 bp, Glycine max
  unsure (1)..(461): unsure at all n locations
tgacatgctaaatntctgtgtggccaaagaactatagatatacttcaaaagtcagaaattgatccagaaataaaatgtgtcactattgaaatatgaatatgaaaaaagttgagataaaagtttaaaagcagccaaatgggaatctataatagttcctacttgtgacttggttgaaaatgaaaacagaatgaacatagcatgtaaaagaaatttcaaaattgagaaatcaagaaaatttatttattgttttggaaggaagaaagtttgggaagagggtatcaagttgtcctattccttaatcagagtaccggtgaaggccaaccagccccaagaccttntttgacaagggcaaggcaattcaatcttacctaccaaccttcacatggccatgtctagaaattcttgagcctatacgcaaaattttggttgaggcataatctaatntaactcttcaatcctta

SEQ ID NO: 216394 - DNA, 226 bp, Glycine max
cacacctctataatagctaagcccacctccttgagatgagaagctagagcgtagctacacaccccctcatatagccaagctcacccgcatgacaaaaaacatgaaaacaaccaagtacaggccttattacaaagacaactcacaatgccccgaaatacaaggctcaaaccctatactaccagaatggccaaaatacaaggcccagacgaaggaataacctattcta

SEQ ID NO: 216395 - DNA, 459 bp, Glycine max
  unsure (1)..(459): unsure at all n locations
tgtaggattatggggtacccatcacatgtggtactatgttgttgtccggcganggngcacaacaagttgtccacatccacaatgcgcgaataaacccaccatcccctgttgtccacctccatccgagctcacgtactcccacgtagcccatatgctcggttctctcaacaccgggtgcccatcaatcctcccaagctttcacaacatccaagcaaaacaatattcaaacagcacaaactatcacagccaagcaaaacagagcaaaggcagaaaactctgcccaaaacaccaaccaaaatcacagcttttctcacccaaagaccccaataacaattcattcgttccaattcgttaaccgttggatcgactcgaaaattgtactggaagtctctagtacttaagcctacattgtgaccgttgggatctactagcaaacatccagaactcgttctgcactac
